United States Patent Application Publication US 2023/0026259 A1 - sequence listing, part 24

SEQ ID NO: 105562 - DNA, 5293 bp, Homo sapiens
  Payload ID: 696
  Gene Symbol: ADGRL2
  Gene Name: adhesion G protein-coupled receptor L2
  Uniprot ID: O95490
  ENST ID: ENST00000370725
  CDS Start-End: 646-5070
ctctttctctctccctctcttgcgctgtccctcattcatgcactcttccatctttttgccattgtgccagctcaatttaaatgtatctgctctgtatctgttcaagtggagataatccatgcaaatcaggagccgtggctctcaatgcctggttcacagagaggactcagcttgaggaggtcactcgttcacagccgctcctcccattatatttttccccttattgcagaactgctgtatgtatacagtgactgaaaggactcaatttactgcaactgctgcctggctttacttacaacttttttttttttataaaggaacttacctccatctgtcttttcaagctctaaacttcacaaatggttctgaagagtatggagcctacgtagattcataagagcccaatgtttccaaaggacattaattttgatttctccaatgaaggcttgtggctgtccttatgctttacaaaacattaccaaatcagagccgaaaagaaaactggtatttatggcacaatgaaaaatttcatctttcccagaatgatatgaagatcaatgatgcagactgatggttttgatgaagctgggcatttataactagattcattaaggaatacaaagaaaatacttaaagggatcaataatggtgtcttctggttgcagaatgcgaagtctgtggtttatcattgtaatcagcttcttaccaaatacagaaggtttcagcagagcagctttaccatttgggctggtgaggcgagaattatcctgtgaaggttattctatagatctgcgatgcccgggcagtgatgtcatcatgattgagagcgctaactatggtcggacggatgacaagatttgtgatgctgacccatttcagatggagaatacagactgctacctccccgatgccttcaaaattatgactcaaaggtgcaacaatcgaacacagtgtatagtagttactgggtcagatgtgtttcctgatccatgtcctggaacatacaaataccttgaagtccaatatgaatgtgtcccttacatttttgtgtgtcctgggaccttgaaagcaattgtggactcaccatgtatatatgaagctgaacaaaaggcgggtgcttggtgcaaggaccctcttcaggctgcagataaaatttatttcatgccctggactccctatcgtaccgatactttaatagaatatgcttctttagaagatttccaaaatagtcgccaaacaacaacatataaacttccaaatcgagtagatggtactggatttgtggtgtatgatggtgctgtcttctttaacaaagaaagaacgaggaatattgtgaaatttgacttgaggactagaattaagagtggcgaggccataattaactatgccaactaccatgatacctcaccatacagatggggaggaaagactgatatcgacctagcagttgatgaaaatggtttatgggtcatttacgccactgaacagaacaatggaatgatagttattagccagctgaatccatacactcttcgatttgaagcaacgtgggagactgtatacgacaaacgtgccgcatcaaatgcttttatgatatgcggagtcctctatgtggttaggtcagtttatcaagacaatgaaagtgaaacaggcaagaactcaattgattacatttataatacccgattaaaccgaggagaatatgtagatgttcccttccccaaccagtatcagtatattgctgcagtggattacaatccaagagataaccaactttacgtgtggaacaataacttcattttacgatattctctggagtttggtccacctgatcctgcccaagtgcctaccacagctgtgacaataacttcttcagctgagctgttcaaaaccataatatcaaccacaagcactacttcacagaaaggccccatgagcacaactgtagctggatcacaggaaggaagcaaagggacaaaaccacctccagcagtttctacaaccaaaattccacctataacaaatatttttcccctgccagagagattctgtgaagcattagactccaaggggataaagtggcctcagacacaaaggggaatgatggttgaacgaccatgccctaagggaacaagaggaactgcctcatatctctgcatgatttccactggaacatggaaccctaagggccccgatcttagcaactgtacctcacactgggtgaatcagctggctcagaagatcagaagcggagaaaatgctgctagtcttgccaatgaactggctaaacataccaaagggccagtgtttgctggggatgtaagttcttcagtgagattgatggagcagttggtggacatccttgatgcacagctgcaggaactgaaacctagtgaaaaagattcagctggacggagttataacaagctccaaaaacgagagaagacatgcagggcttaccttaaggcaattgttgacacagtggacaaccttctgagacccgaagctttggaatcatggaaacatatgaattcttctgaacaagcacatactgcaacaatgttactcgatacattggaagaaggagcttttgtcctagctgacaatcttttagaaccaacaagggtctcaatgcccacagaaaatattgtcctggaagttgccgtactcagtacagaaggacagatccaagactttaaatttcctctgggcatcaaaggagcaggcagctcaatccaactgtccgcaaataccgtcaaacagaacagcaggaatgggcttgcaaagttggtgttcatcatttaccggagcctgggacagttccttagtacagaaaatgcaaccattaaactgggtgctgattttattggtcgtaatagcaccattgcagtgaactctcacgtcatttcagtttcaatcaataaagagtccagccgagtatacctgactgatcctgtgctttttaccctgccacacattgatcctgacaattatttcaatgcaaactgctccttctggaactactcagagagaactatgatgggatattggtctacccagggctgcaagctggttgacactaataaaactcgaacaacgtgtgcatgcagccacctaaccaattttgcaattctcatggcccacagggaaattgcatataaagatggcgttcatgaattacttcttacagtcatcacctgggtgggaattgtcatttcccttgtttgcctggctatctgcatcttcaccttctgctttttccgtggcctacagagtgaccgaaatactattcacaagaacctttgtatcaaccttttcattgctgaatttattttcctaataggcattgataagacaaaatatgcgattgcatgcccaatatttgcaggacttctacactttttctttttggcagcttttgcttggatgtgcctagaaggtgtgcagctctacctaatgttagttgaagtttttgaaagtgaatattcaaggaaaaaatattactatgttgctggttacttgtttcctgccacagtggttggagtttcagctgctattgactataagagctatggaacagaaaaagcttgctggcttcatgttgataactactttatatggagcttcattggacctgttaccttcattattctgctaaatattatcttcttggtgatcacattgtgcaaaatggtgaagcattcaaacactttgaaaccagattctagcaggttggaaaacattaataattaccgtgtttgtgatggctactataatacggacttacctgggtcttgggtgcttggcgctttcgctcttctgtgtcttcttggcctcacctggtcctttgggttgctttttattaatgaggagactattgtgatggcatatctcttcactatatttaatgctttccagggagtgttcattttcatctttcactgtgctctccaaaagaaagtacgaaaagaatatggcaagtgcttcagacactcatactgctgtggaggcctcccaactgagagtccccacagttcagtgaaggcatcaaccaccagaaccagtgctcgctattcctctggcacacagagtcgtataagaagaatgtggaatgatactgtgagaaaacaatcagaatcttcttttatctcaggtgacatcaatagcacttcaacacttaatcaaggaatgactggcaattacctactaacaaaccctcttcttcgaccccacggcactaacaacccctataacacattgctcgctgaaacagttgtatgtaatgccccttcagctcctgtatttaactcaccaggacattcactgaacaatgccagggatacaagtgccatggatactctaccgctaaatggtaattttaacaacagctactcgctgcacaagggtgactataatgacagcgtgcaagttgtggactgtggactaagtctgaatgatactgcttttgagaaaatgatcatttcagaattagtgcacaacaacttacggggcagcagcaagactcacaacctcgagctcacgctaccagtcaaacctgtgattggaggtagcagcagtgaagatgatgctattgtggcagatgcttcatctttaatgcacagcgacaacccagggctggagctccatcacaaagaactcgaggcaccacttattcctcagcggactcactcccttctgtaccaaccccagaagaaagtgaagtccgagggaactgacagctatgtctcccaactgacagcagaggctgaagatcacctacagtcccccaacagagactctctttatacaagcatgcccaatcttagagactctccctatccggagagcagccctgacatggaagaagacctctctccctccaggaggagtgagaatgaggacatttactataaaagcatgccaaatcttggagctggccatcagcttcagatgtgctaccagatcagcaggggcaatagtgatggttatataatccccattaacaaagaagggtgtattccagaaggagatgttagagaaggacaaatgcagctggttacaagtctttaatcatacagctaaggaattccaagggccacatgcgagtattaataaataaagacaccattggcctgacgcagctccctcaaactctgcttgaagagatgactcttgacctgtggttctctggtgtaaaaaagatgactgaaccttgcagttctgtgaatttttataaaacatacaaaaactttgtatatacacagagtatactaaagtgaattatttgttacaa

SEQ ID NO: 105563 - DNA, 5164 bp, Homo sapiens
  Payload ID: 696
  Gene Symbol: ADGRL2
  Gene Name: adhesion G protein-coupled receptor L2
  ENST ID: ENST00000370727
  CDS Start-End: 646-4941
ctctttctctctccctctcttgcgctgtccctcattcatgcactcttccatctttttgccattgtgccagctcaatttaaatgtatctgctctgtatctgttcaagtggagataatccatgcaaatcaggagccgtggctctcaatgcctggttcacagagaggactcagcttgaggaggtcactcgttcacagccgctcctcccattatatttttccccttattgcagaactgctgtatgtatacagtgactgaaaggactcaatttactgcaactgctgcctggctttacttacaacttttttttttttataaaggaacttacctccatctgtcttttcaagctctaaacttcacaaatggttctgaagagtatggagcctacgtagattcataagagcccaatgtttccaaaggacattaattttgatttctccaatgaaggcttgtggctgtccttatgctttacaaaacattaccaaatcagagccgaaaagaaaactggtatttatggcacaatgaaaaatttcatctttcccagaatgatatgaagatcaatgatgcagactgatggttttgatgaagctgggcatttataactagattcattaaggaatacaaagaaaatacttaaagggatcaataatggtgtcttctggttgcagaatgcgaagtctgtggtttatcattgtaatcagcttcttaccaaatacagaaggtttcagcagagcagctttaccatttgggctggtgaggcgagaattatcctgtgaaggttattctatagatctgcgatgcccgggcagtgatgtcatcatgattgagagcgctaactatggtcggacggatgacaagatttgtgatgctgacccatttcagatggagaatacagactgctacctccccgatgccttcaaaattatgactcaaaggtgcaacaatcgaacacagtgtatagtagttactgggtcagatgtgtttcctgatccatgtcctggaacatacaaataccttgaagtccaatatgaatgtgtcccttacatttttgtgtgtcctgggaccttgaaagcaattgtggactcaccatgtatatatgaagctgaacaaaaggcgggtgcttggtgcaaggaccctcttcaggctgcagataaaatttatttcatgccctggactccctatcgtaccgatactttaatagaatatgcttctttagaagatttccaaaatagtcgccaaacaacaacatataaacttccaaatcgagtagatggtactggatttgtggtgtatgatggtgctgtcttctttaacaaagaaagaacgaggaatattgtgaaatttgacttgaggactagaattaagagtggcgaggccataattaactatgccaactaccatgatacctcaccatacagatggggaggaaagactgatatcgacctagcagttgatgaaaatggtttatgggtcatttacgccactgaacagaacaatggaatgatagttattagccagctgaatccatacactcttcgatttgaagcaacgtgggagactgtatacgacaaacgtgccgcatcaaatgcttttatgatatgcggagtcctctatgtggttaggtcagtttatcaagacaatgaaagtgaaacaggcaagaactcaattgattacatttataatacccgattaaaccgaggagaatatgtagatgttcccttccccaaccagtatcagtatattgctgcagtggattacaatccaagagataaccaactttacgtgtggaacaataacttcattttacgatattctctggagtttggtccacctgatcctgcccaagtgcctaccacagctgtgacaataacttcttcagctgagctgttcaaaaccataatatcaaccacaagcactacttcacagaaaggccccatgagcacaactgtagctggatcacaggaaggaagcaaagggacaaaaccacctccagcagtttctacaaccaaaattccacctataacaaatatttttcccctgccagagagattctgtgaagcattagactccaaggggataaagtggcctcagacacaaaggggaatgatggttgaacgaccatgccctaagggaacaagaggaactgcctcatatctctgcatgatttccactggaacatggaaccctaagggccccgatcttagcaactgtacctcacactgggtgaatcagctggctcagaagatcagaagcggagaaaatgctgctagtcttgccaatgaactggctaaacataccaaagggccagtgtttgctggggatgtaagttcttcagtgagattgatggagcagttggtggacatccttgatgcacagctgcaggaactgaaacctagtgaaaaagattcagctggacggagttataacaagctccaaaaacgagagaagacatgcagggcttaccttaaggcaattgttgacacagtggacaaccttctgagacccgaagctttggaatcatggaaacatatgaattcttctgaacaagcacatactgcaacaatgttactcgatacattggaagaaggagcttttgtcctagctgacaatcttttagaaccaacaagggtctcaatgcccacagaaaatattgtcctggaagttgccgtactcagtacagaaggacagatccaagactttaaatttcctctgggcatcaaaggagcaggcagctcaatccaactgtccgcaaataccgtcaaacagaacagcaggaatgggcttgcaaagttggtgttcatcatttaccggagcctgggacagttccttagtacagaaaatgcaaccattaaactgggtgctgattttattggtcgtaatagcaccattgcagtgaactctcacgtcatttcagtttcaatcaataaagagtccagccgagtatacctgactgatcctgtgctttttaccctgccacacattgatcctgacaattatttcaatgcaaactgctccttctggaactactcagagagaactatgatgggatattggtctacccagggctgcaagctggttgacactaataaaactcgaacaacgtgtgcatgcagccacctaaccaattttgcaattctcatggcccacagggaaattgcatataaagatggcgttcatgaattacttcttacagtcatcacctgggtgggaattgtcatttcccttgtttgcctggctatctgcatcttcaccttctgctttttccgtggcctacagagtgaccgaaatactattcacaagaacctttgtatcaaccttttcattgctgaatttattttcctaataggcattgataagacaaaatatgcgattgcatgcccaatatttgcaggacttctacactttttctttttggcagcttttgcttggatgtgcctagaaggtgtgcagctctacctaatgttagttgaagtttttgaaagtgaatattcaaggaaaaaatattactatgttgctggttacttgtttcctgccacagtggttggagtttcagctgctattgactataagagctatggaacagaaaaagcttgctggcttcatgttgataactactttatatggagcttcattggacctgttaccttcattattctgctaaatattatcttcttggtgatcacattgtgcaaaatggtgaagcattcaaacactttgaaaccagattctagcaggttggaaaacattaataattaccgtgtttgtgatggctactataatacggacttacctgggtcttgggtgcttggcgctttcgctcttctgtgtcttcttggcctcacctggtcctttgggttgctttttattaatgaggagactattgtgatggcatatctcttcactatatttaatgctttccagggagtgttcattttcatctttcactgtgctctccaaaagaaagtacgaaaagaatatggcaagtgcttcagacactcatactgctgtggaggcctcccaactgagagtccccacagttcagtgaaggcatcaaccaccagaaccagtgctcgctattcctctggcacacagagtcgtataagaagaatgtggaatgatactgtgagaaaacaatcagaatcttcttttatctcaggtgacatcaatagcacttcaacacttaatcaaggacattcactgaacaatgccagggatacaagtgccatggatactctaccgctaaatggtaattttaacaacagctactcgctgcacaagggtgactataatgacagcgtgcaagttgtggactgtggactaagtctgaatgatactgcttttgagaaaatgatcatttcagaattagtgcacaacaacttacggggcagcagcaagactcacaacctcgagctcacgctaccagtcaaacctgtgattggaggtagcagcagtgaagatgatgctattgtggcagatgcttcatctttaatgcacagcgacaacccagggctggagctccatcacaaagaactcgaggcaccacttattcctcagcggactcactcccttctgtaccaaccccagaagaaagtgaagtccgagggaactgacagctatgtctcccaactgacagcagaggctgaagatcacctacagtcccccaacagagactctctttatacaagcatgcccaatcttagagactctccctatccggagagcagccctgacatggaagaagacctctctccctccaggaggagtgagaatgaggacatttactataaaagcatgccaaatcttggagctggccatcagcttcagatgtgctaccagatcagcaggggcaatagtgatggttatataatccccattaacaaagaagggtgtattccagaaggagatgttagagaaggacaaatgcagctggttacaagtctttaatcatacagctaaggaattccaagggccacatgcgagtattaataaataaagacaccattggcctgacgcagctccctcaaactctgcttgaagagatgactcttgacctgtggttctctggtgtaaaaaagatgactgaaccttgcagttctgtgaatttttataaaacatacaaaaactttgtatatacacagagtatactaaagtgaattatttgttacaa

SEQ ID NO: 105564 - DNA, 6302 bp, Homo sapiens
  Payload ID: 696
  Gene Symbol: ADGRL2
  Gene Name: adhesion G protein-coupled receptor L2
  Uniprot ID: O95490
  ENST ID: ENST00000370728
  CDS Start-End: 646-5025
ctctttctctctccctctcttgcgctgtccctcattcatgcactcttccatctttttgccattgtgccagctcaatttaaatgtatctgctctgtatctgttcaagtggagataatccatgcaaatcaggagccgtggctctcaatgcctggttcacagagaggactcagcttgaggaggtcactcgttcacagccgctcctcccattatatttttccccttattgcagaactgctgtatgtatacagtgactgaaaggactcaatttactgcaactgctgcctggctttacttacaacttttttttttttataaaggaacttacctccatctgtcttttcaagctctaaacttcacaaatggttctgaagagtatggagcctacgtagattcataagagcccaatgtttccaaaggacattaattttgatttctccaatgaaggcttgtggctgtccttatgctttacaaaacattaccaaatcagagccgaaaagaaaactggtatttatggcacaatgaaaaatttcatctttcccagaatgatatgaagatcaatgatgcagactgatggttttgatgaagctgggcatttataactagattcattaaggaatacaaagaaaatacttaaagggatcaataatggtgtcttctggttgcagaatgcgaagtctgtggtttatcattgtaatcagcttcttaccaaatacagaaggtttcagcagagcagctttaccatttgggctggtgaggcgagaattatcctgtgaaggttattctatagatctgcgatgcccgggcagtgatgtcatcatgattgagagcgctaactatggtcggacggatgacaagatttgtgatgctgacccatttcagatggagaatacagactgctacctccccgatgccttcaaaattatgactcaaaggtgcaacaatcgaacacagtgtatagtagttactgggtcagatgtgtttcctgatccatgtcctggaacatacaaataccttgaagtccaatatgaatgtgtcccttacatttttgtgtgtcctgggaccttgaaagcaattgtggactcaccatgtatatatgaagctgaacaaaaggcgggtgcttggtgcaaggaccctcttcaggctgcagataaaatttatttcatgccctggactccctatcgtaccgatactttaatagaatatgcttctttagaagatttccaaaatagtcgccaaacaacaacatataaacttccaaatcgagtagatggtactggatttgtggtgtatgatggtgctgtcttctttaacaaagaaagaacgaggaatattgtgaaatttgacttgaggactagaattaagagtggcgaggccataattaactatgccaactaccatgatacctcaccatacagatggggaggaaagactgatatcgacctagcagttgatgaaaatggtttatgggtcatttacgccactgaacagaacaatggaatgatagttattagccagctgaatccatacactcttcgatttgaagcaacgtgggagactgtatacgacaaacgtgccgcatcaaatgcttttatgatatgcggagtcctctatgtggttaggtcagtttatcaagacaatgaaagtgaaacaggcaagaactcaattgattacatttataatacccgattaaaccgaggagaatatgtagatgttcccttccccaaccagtatcagtatattgctgcagtggattacaatccaagagataaccaactttacgtgtggaacaataacttcattttacgatattctctggagtttggtccacctgatcctgcccaagtgcctaccacagctgtgacaataacttcttcagctgagctgttcaaaaccataatatcaaccacaagcactacttcacagaaaggccccatgagcacaactgtagctggatcacaggaaggaagcaaagggacaaaaccacctccagcagtttctacaaccaaaattccacctataacaaatatttttcccctgccagagagattctgtgaagcattagactccaaggggataaagtggcctcagacacaaaggggaatgatggttgaacgaccatgccctaagggaacaagaggaactgcctcatatctctgcatgatttccactggaacatggaaccctaagggccccgatcttagcaactgtacctcacactgggtgaatcagctggctcagaagatcagaagcggagaaaatgctgctagtcttgccaatgaactggctaaacataccaaagggccagtgtttgctggggatgtaagttcttcagtgagattgatggagcagttggtggacatccttgatgcacagctgcaggaactgaaacctagtgaaaaagattcagctggacggagttataacaagctccaaaaacgagagaagacatgcagggcttaccttaaggcaattgttgacacagtggacaaccttctgagacccgaagctttggaatcatggaaacatatgaattcttctgaacaagcacatactgcaacaatgttactcgatacattggaagaaggagcttttgtcctagctgacaatcttttagaaccaacaagggtctcaatgcccacagaaaatattgtcctggaagttgccgtactcagtacagaaggacagatccaagactttaaatttcctctgggcatcaaaggagcaggcagctcaatccaactgtccgcaaataccgtcaaacagaacagcaggaatgggcttgcaaagttggtgttcatcatttaccggagcctgggacagttccttagtacagaaaatgcaaccattaaactgggtgctgattttattggtcgtaatagcaccattgcagtgaactctcacgtcatttcagtttcaatcaataaagagtccagccgagtatacctgactgatcctgtgctttttaccctgccacacattgatcctgacaattatttcaatgcaaactgctccttctggaactactcagagagaactatgatgggatattggtctacccagggctgcaagctggttgacactaataaaactcgaacaacgtgtgcatgcagccacctaaccaattttgcaattctcatggcccacagggaaattgcatataaagatggcgttcatgaattacttcttacagtcatcacctgggtgggaattgtcatttcccttgtttgcctggctatctgcatcttcaccttctgctttttccgtggcctacagagtgaccgaaatactattcacaagaacctttgtatcaaccttttcattgctgaatttattttcctaataggcattgataagacaaaatatgcgattgcatgcccaatatttgcaggacttctacactttttctttttggcagcttttgcttggatgtgcctagaaggtgtgcagctctacctaatgttagttgaagtttttgaaagtgaatattcaaggaaaaaatattactatgttgctggttacttgtttcctgccacagtggttggagtttcagctgctattgactataagagctatggaacagaaaaagcttgctggcttcatgttgataactactttatatggagcttcattggacctgttaccttcattattctgctaaatattatcttcttggtgatcacattgtgcaaaatggtgaagcattcaaacactttgaaaccagattctagcaggttggaaaacattaagtcttgggtgcttggcgctttcgctcttctgtgtcttcttggcctcacctggtcctttgggttgctttttattaatgaggagactattgtgatggcatatctcttcactatatttaatgctttccagggagtgttcattttcatctttcactgtgctctccaaaagaaagtacgaaaagaatatggcaagtgcttcagacactcatactgctgtggaggcctcccaactgagagtccccacagttcagtgaaggcatcaaccaccagaaccagtgctcgctattcctctggcacacagagtcgtataagaagaatgtggaatgatactgtgagaaaacaatcagaatcttcttttatctcaggtgacatcaatagcacttcaacacttaatcaaggaatgactggcaattacctactaacaaaccctcttcttcgaccccacggcactaacaacccctataacacattgctcgctgaaacagttgtatgtaatgccccttcagctcctgtatttaactcaccaggacattcactgaacaatgccagggatacaagtgccatggatactctaccgctaaatggtaattttaacaacagctactcgctgcacaagggtgactataatgacagcgtgcaagttgtggactgtggactaagtctgaatgatactgcttttgagaaaatgatcatttcagaattagtgcacaacaacttacggggcagcagcaagactcacaacctcgagctcacgctaccagtcaaacctgtgattggaggtagcagcagtgaagatgatgctattgtggcagatgcttcatctttaatgcacagcgacaacccagggctggagctccatcacaaagaactcgaggcaccacttattcctcagcggactcactcccttctgtaccaaccccagaagaaagtgaagtccgagggaactgacagctatgtctcccaactgacagcagaggctgaagatcacctacagtcccccaacagagactctctttatacaagcatgcccaatcttagagactctccctatccggagagcagccctgacatggaagaagacctctctccctccaggaggagtgagaatgaggacatttactataaaagcatgccaaatcttggagctggccatcagcttcagatgtgctaccagatcagcaggggcaatagtgatggttatataatccccattaacaaagaagggtgtattccagaaggagatgttagagaaggacaaatgcagctggttacaagtctttaatcatacagctaaggaattccaagggccacatgcgagtattaataaataaagacaccattggcctgacgcagctccctcaaactctgcttgaagagatgactcttgacctgtggttctctggtgtaaaaaagatgactgaaccttgcagttctgtgaatttttataaaacatacaaaaactttgtatatacacagagtatactaaagtgaattatttgttacaaagaaaagagatgccagccaggtattttaagattctgctgctgtttagagaaattgtgaaacaagcaaaacaaaactttccagccattttactgcagcagtctgtgaactaaatttgtaaatatggctgcaccatttttgtaggcctgcattgtattatatacaagacgtaggctttaaaatcctgtgggacaaatttactgtaccttactattcctgacaagacttggaaaagcaggagagatattctgcatcagtttgcagttcactgcaaatcttttacattaaggcaaagattgaaaacatgcttaaccactagcaatcaagccacaggccttatttcatatgtttcctcaactgtacaatgaactattctcatgaaaaatggctaaagaaattatattttgttctattgctagggtaaaataaatacatttgtgtccaactgaaatataattgtcattaaaataattttaaagagtgaagaaaatattgtgaaaagctcttggttgcacatgttatgaaatgttttttcttacactttgtcatggtaagttctactcattttcacttcttttccactgtatacagtgttctgctttgacaaagttggtctttattacttacatttaaatttcttattgccaaaagaacgtgttttatggggagaaacaaactctttgaagccagttatgtcatgccttgcacaaaagtgatgaaatctagaaaagattgtgtgtcacccctgtttattcttgaacagagggcaaagagggcactgggcacttctcacaaactttctagtgaacaaaaggtgcctattcttttttaaaaaaataaaataaaacataaatattactcttccatattccttctgcctatatttagtaattaatttattttatgataaagttctaatgaaatgtaaattgtttcagcaaaattctgcttttttttcatccctttgtgtaaacctgttaataatgagcccatcactaatatccagtgtaaagtttaacacggtttgacagtaaataaatgtgaattttttcaagt

SEQ ID NO: 105565 - DNA, 6173 bp, Homo sapiens
  Payload ID: 696
  Gene Symbol: ADGRL2
  Gene Name: adhesion G protein-coupled receptor L2
  Uniprot ID: O95490
  ENST ID: ENST00000370730
  CDS Start-End: 646-4896
ctctttctctctccctctcttgcgctgtccctcattcatgcactcttccatctttttgccattgtgccagctcaatttaaatgtatctgctctgtatctgttcaagtggagataatccatgcaaatcaggagccgtggctctcaatgcctggttcacagagaggactcagcttgaggaggtcactcgttcacagccgctcctcccattatatttttccccttattgcagaactgctgtatgtatacagtgactgaaaggactcaatttactgcaactgctgcctggctttacttacaacttttttttttttataaaggaacttacctccatctgtcttttcaagctctaaacttcacaaatggttctgaagagtatggagcctacgtagattcataagagcccaatgtttccaaaggacattaattttgatttctccaatgaaggcttgtggctgtccttatgctttacaaaacattaccaaatcagagccgaaaagaaaactggtatttatggcacaatgaaaaatttcatctttcccagaatgatatgaagatcaatgatgcagactgatggttttgatgaagctgggcatttataactagattcattaaggaatacaaagaaaatacttaaagggatcaataatggtgtcttctggttgcagaatgcgaagtctgtggtttatcattgtaatcagcttcttaccaaatacagaaggtttcagcagagcagctttaccatttgggctggtgaggcgagaattatcctgtgaaggttattctatagatctgcgatgcccgggcagtgatgtcatcatgattgagagcgctaactatggtcggacggatgacaagatttgtgatgctgacccatttcagatggagaatacagactgctacctccccgatgccttcaaaattatgactcaaaggtgcaacaatcgaacacagtgtatagtagttactgggtcagatgtgtttcctgatccatgtcctggaacatacaaataccttgaagtccaatatgaatgtgtcccttacatttttgtgtgtcctgggaccttgaaagcaattgtggactcaccatgtatatatgaagctgaacaaaaggcgggtgcttggtgcaaggaccctcttcaggctgcagataaaatttatttcatgccctggactccctatcgtaccgatactttaatagaatatgcttctttagaagatttccaaaatagtcgccaaacaacaacatataaacttccaaatcgagtagatggtactggatttgtggtgtatgatggtgctgtcttctttaacaaagaaagaacgaggaatattgtgaaatttgacttgaggactagaattaagagtggcgaggccataattaactatgccaactaccatgatacctcaccatacagatggggaggaaagactgatatcgacctagcagttgatgaaaatggtttatgggtcatttacgccactgaacagaacaatggaatgatagttattagccagctgaatccatacactcttcgatttgaagcaacgtgggagactgtatacgacaaacgtgccgcatcaaatgcttttatgatatgcggagtcctctatgtggttaggtcagtttatcaagacaatgaaagtgaaacaggcaagaactcaattgattacatttataatacccgattaaaccgaggagaatatgtagatgttcccttccccaaccagtatcagtatattgctgcagtggattacaatccaagagataaccaactttacgtgtggaacaataacttcattttacgatattctctggagtttggtccacctgatcctgcccaagtgcctaccacagctgtgacaataacttcttcagctgagctgttcaaaaccataatatcaaccacaagcactacttcacagaaaggccccatgagcacaactgtagctggatcacaggaaggaagcaaagggacaaaaccacctccagcagtttctacaaccaaaattccacctataacaaatatttttcccctgccagagagattctgtgaagcattagactccaaggggataaagtggcctcagacacaaaggggaatgatggttgaacgaccatgccctaagggaacaagaggaactgcctcatatctctgcatgatttccactggaacatggaaccctaagggccccgatcttagcaactgtacctcacactgggtgaatcagctggctcagaagatcagaagcggagaaaatgctgctagtcttgccaatgaactggctaaacataccaaagggccagtgtttgctggggatgtaagttcttcagtgagattgatggagcagttggtggacatccttgatgcacagctgcaggaactgaaacctagtgaaaaagattcagctggacggagttataacaagctccaaaaacgagagaagacatgcagggcttaccttaaggcaattgttgacacagtggacaaccttctgagacccgaagctttggaatcatggaaacatatgaattcttctgaacaagcacatactgcaacaatgttactcgatacattggaagaaggagcttttgtcctagctgacaatcttttagaaccaacaagggtctcaatgcccacagaaaatattgtcctggaagttgccgtactcagtacagaaggacagatccaagactttaaatttcctctgggcatcaaaggagcaggcagctcaatccaactgtccgcaaataccgtcaaacagaacagcaggaatgggcttgcaaagttggtgttcatcatttaccggagcctgggacagttccttagtacagaaaatgcaaccattaaactgggtgctgattttattggtcgtaatagcaccattgcagtgaactctcacgtcatttcagtttcaatcaataaagagtccagccgagtatacctgactgatcctgtgctttttaccctgccacacattgatcctgacaattatttcaatgcaaactgctccttctggaactactcagagagaactatgatgggatattggtctacccagggctgcaagctggttgacactaataaaactcgaacaacgtgtgcatgcagccacctaaccaattttgcaattctcatggcccacagggaaattgcatataaagatggcgttcatgaattacttcttacagtcatcacctgggtgggaattgtcatttcccttgtttgcctggctatctgcatcttcaccttctgctttttccgtggcctacagagtgaccgaaatactattcacaagaacctttgtatcaaccttttcattgctgaatttattttcctaataggcattgataagacaaaatatgcgattgcatgcccaatatttgcaggacttctacactttttctttttggcagcttttgcttggatgtgcctagaaggtgtgcagctctacctaatgttagttgaagtttttgaaagtgaatattcaaggaaaaaatattactatgttgctggttacttgtttcctgccacagtggttggagtttcagctgctattgactataagagctatggaacagaaaaagcttgctggcttcatgttgataactactttatatggagcttcattggacctgttaccttcattattctgctaaatattatcttcttggtgatcacattgtgcaaaatggtgaagcattcaaacactttgaaaccagattctagcaggttggaaaacattaagtcttgggtgcttggcgctttcgctcttctgtgtcttcttggcctcacctggtcctttgggttgctttttattaatgaggagactattgtgatggcatatctcttcactatatttaatgctttccagggagtgttcattttcatctttcactgtgctctccaaaagaaagtacgaaaagaatatggcaagtgcttcagacactcatactgctgtggaggcctcccaactgagagtccccacagttcagtgaaggcatcaaccaccagaaccagtgctcgctattcctctggcacacagagtcgtataagaagaatgtggaatgatactgtgagaaaacaatcagaatcttcttttatctcaggtgacatcaatagcacttcaacacttaatcaaggacattcactgaacaatgccagggatacaagtgccatggatactctaccgctaaatggtaattttaacaacagctactcgctgcacaagggtgactataatgacagcgtgcaagttgtggactgtggactaagtctgaatgatactgcttttgagaaaatgatcatttcagaattagtgcacaacaacttacggggcagcagcaagactcacaacctcgagctcacgctaccagtcaaacctgtgattggaggtagcagcagtgaagatgatgctattgtggcagatgcttcatctttaatgcacagcgacaacccagggctggagctccatcacaaagaactcgaggcaccacttattcctcagcggactcactcccttctgtaccaaccccagaagaaagtgaagtccgagggaactgacagctatgtctcccaactgacagcagaggctgaagatcacctacagtcccccaacagagactctctttatacaagcatgcccaatcttagagactctccctatccggagagcagccctgacatggaagaagacctctctccctccaggaggagtgagaatgaggacatttactataaaagcatgccaaatcttggagctggccatcagcttcagatgtgctaccagatcagcaggggcaatagtgatggttatataatccccattaacaaagaagggtgtattccagaaggagatgttagagaaggacaaatgcagctggttacaagtctttaatcatacagctaaggaattccaagggccacatgcgagtattaataaataaagacaccattggcctgacgcagctccctcaaactctgcttgaagagatgactcttgacctgtggttctctggtgtaaaaaagatgactgaaccttgcagttctgtgaatttttataaaacatacaaaaactttgtatatacacagagtatactaaagtgaattatttgttacaaagaaaagagatgccagccaggtattttaagattctgctgctgtttagagaaattgtgaaacaagcaaaacaaaactttccagccattttactgcagcagtctgtgaactaaatttgtaaatatggctgcaccatttttgtaggcctgcattgtattatatacaagacgtaggctttaaaatcctgtgggacaaatttactgtaccttactattcctgacaagacttggaaaagcaggagagatattctgcatcagtttgcagttcactgcaaatcttttacattaaggcaaagattgaaaacatgcttaaccactagcaatcaagccacaggccttatttcatatgtttcctcaactgtacaatgaactattctcatgaaaaatggctaaagaaattatattttgttctattgctagggtaaaataaatacatttgtgtccaactgaaatataattgtcattaaaataattttaaagagtgaagaaaatattgtgaaaagctcttggttgcacatgttatgaaatgttttttcttacactttgtcatggtaagttctactcattttcacttcttttccactgtatacagtgttctgctttgacaaagttggtctttattacttacatttaaatttcttattgccaaaagaacgtgttttatggggagaaacaaactctttgaagccagttatgtcatgccttgcacaaaagtgatgaaatctagaaaagattgtgtgtcacccctgtttattcttgaacagagggcaaagagggcactgggcacttctcacaaactttctagtgaacaaaaggtgcctattcttttttaaaaaaataaaataaaacataaatattactcttccatattccttctgcctatatttagtaattaatttattttatgataaagttctaatgaaatgtaaattgtttcagcaaaattctgcttttttttcatccctttgtgtaaacctgttaataatgagcccatcactaatatccagtgtaaagtttaacacggtttgacagtaaataaatgtgaattttttcaagt

SEQ ID NO: 105566 - DNA, 2692 bp, Homo sapiens
  Payload ID: 696
  Gene Symbol: ADGRL2
  Gene Name: adhesion G protein-coupled receptor L2
  ENST ID: ENST00000402328
  CDS Start-End: 1-1414
gatcacattgtgcaaaatggtgaagcattcaaacactttgaaaccagattctagcaggttggaaaacattaataattaccgtgtttgtgatggctactataatacggacttacctgggtcttgggtgcttggcgctttcgctcttctgtgtcttcttggcctcacctggtcctttgggttgctttttattaatgaggagactattgtgatggcatatctcttcactatatttaatgctttccagggagtgttcattttcatctttcactgtgctctccaaaagaaagtacgaaaagaatatggcaagtgcttcagacactcatactgctgtggaggcctcccaactgagagtccccacagttcagtgaaggcatcaaccaccagaaccagtgctcgctattcctctggcacacagagtcgtataagaagaatgtggaatgatactgtgagaaaacaatcagaatcttcttttatctcaggtgacatcaatagcacttcaacacttaatcaaggaatgactggcaattacctactaacaaaccctcttcttcgaccccacggcactaacaacccctataacacattgctcgctgaaacagttgtatgtaatgccccttcagctcctgtatttaactcaccagcaacctacagagagacaagacattcactgaacaatgccagggatacaagtgccatggatactctaccgctaaatggtaattttaacaacagctactcgctgcacaagggtgactataatgacagcgtgcaagttgtggactgtggactaagtctgaatgatactgcttttgagaaaatgatcatttcagaattagtgcacaacaacttacggggcagcagcaagactcacaacctcgagctcacgctaccagtcaaacctgtgattggaggtagcagcagtgaagatgatgctattgtggcagatgcttcatctttaatgcacagcgacaacccagggctggagctccatcacaaagaactcgaggcaccacttattcctcagcggactcactcccttctgtaccaaccccagaagaaagtgaagtccgagggaactgacagctatgtctcccaactgacagcagaggctgaagatcacctacagtcccccaacagagactctctttatacaagcatgcccaatcttagagactctccctatccggagagcagccctgacatggaagaagacctctctccctccaggaggagtgagaatgaggacatttactataaaagcatgccaaatcttggagctggccatcagcttcagatgtgctaccagatcagcaggggcaatagtgatggttatataatccccattaacaaagaagggtgtattccagaaggagatgttagagaaggacaaatgcagctggttacaagtctttaatcatacagctaaggaattccaagggccacatgcgagtattaataaataaagacaccattggcctgacgcagctccctcaaactctgcttgaagagatgactcttgacctgtggttctctggtgtaaaaaagatgactgaaccttgcagttctgtgaatttttataaaacatacaaaaactttgtatatacacagagtatactaaagtgaattatttgttacaaagaaaagagatgccagccaggtattttaagattctgctgctgtttagagaaattgtgaaacaagcaaaacaaaactttccagccattttactgcagcagtctgtgaactaaatttgtaaatatggctgcaccatttttgtaggcctgcattgtattatatacaagacgtaggctttaaaatcctgtgggacaaatttactgtaccttactattcctgacaagacttggaaaagcaggagagatattctgcatcagtttgcagttcactgcaaatcttttacattaaggcaaagattgaaaacatgcttaaccactagcaatcaagccacaggccttatttcatatgtttcctcaactgtacaatgaactattctcatgaaaaatggctaaagaaattatattttgttctattgctagggtaaaataaatacatttgtgtccaactgaaatataattgtcattaaaataattttaaagagtgaagaaaatattgtgaaaagctcttggttgcacatgttatgaaatgttttttcttacactttgtcatggtaagttctactcattttcacttcttttccactgtatacagtgttctgctttgacaaagttggtctttattacttacatttaaatttcttattgccaaaagaacgtgttttatggggagaaacaaactctttgaagccagttatgtcatgccttgcacaaaagtgatgaaatctagaaaagattgtgtgtcacccctgtttattcttgaacagagggcaaagagggcactgggcacttctcacaaactttctagtgaacaaaaggtgcctattcttttttaaaaaaataaaataaaacataaatattactcttccatattccttctgcctatatttagtaattaatttattttatgataaagttctaatgaaatgtaaattgtttcagcaaaattctgcttttttttcatccctttgtgtaaacctgttaataatgagcccatcactaatatccagtgtaaagtttaacacggtttgacagtaaataaatgtgaattttttcaagta

SEQ ID NO: 105567 - DNA, 4278 bp, Homo sapiens
  Payload ID: 696
  Gene Symbol: ADGRL2
  Gene Name: adhesion G protein-coupled receptor L2
  ENST ID: ENST00000449420
  CDS Start-End: 1-4055
tttttgtgtgtcctgggaccttgaaagcaattgtggactcaccatgtatatatgaagctgaacaaaaggcgggtgcttggtgcaaggaccctcttcaggctgcagataaaatttatttcatgccctggactccctatcgtaccgatactttaatagaatatgcttctttagaagatttccaaaatagtcgccaaacaacaacatataaacttccaaatcgagtagatggtactggatttgtggtgtatgatggtgctgtcttctttaacaaagaaagaacgaggaatattgtgaaatttgacttgaggactagaattaagagtggcgaggccataattaactatgccaactaccatgatacctcaccatacagatggggaggaaagactgatatcgacctagcagttgatgaaaatggtttatgggtcatttacgccactgaacagaacaatggaatgatagttattagccagctgaatccatacactcttcgatttgaagcaacgtgggagactgtatacgacaaacgtgccgcatcaaatgcttttatgatatgcggagtcctctatgtggttaggtcagtttatcaagacaatgaaagtgaaacaggcaagaactcaattgattacatttataatacccgattaaaccgaggagaatatgtagatgttcccttccccaaccagtatcagtatattgctgcagtggattacaatccaagagataaccaactttacgtgtggaacaataacttcattttacgatattctctggagtttggtccacctgatcctgcccaagtgcctaccacagctgtgacaataacttcttcagctgagctgttcaaaaccataatatcaaccacaagcactacttcacagaaaggccccatgagcacaactgtagctggatcacaggaaggaagcaaagggacaaaaccacctccagcagtttctacaaccaaaattccacctataacaaatatttttcccctgccagagagattctgtgaagcattagactccaaggggataaagtggcctcagacacaaaggggaatgatggttgaacgaccatgccctaagggaacaagaggaactgcctcatatctctgcatgatttccactggaacatggaaccctaagggccccgatcttagcaactgtacctcacactgggtgaatcagctggctcagaagatcagaagcggagaaaatgctgctagtcttgccaatgaactggctaaacataccaaagggccagtgtttgctggggatgtaagttcttcagtgagattgatggagcagttggtggacatccttgatgcacagctgcaggaactgaaacctagtgaaaaagattcagctggacggagttataacaagctccaaaaacgagagaagacatgcagggcttaccttaaggcaattgttgacacagtggacaaccttctgagacccgaagctttggaatcatggaaacatatgaattcttctgaacaagcacatactgcaacaatgttactcgatacattggaagaaggagcttttgtcctagctgacaatcttttagaaccaacaagggtctcaatgcccacagaaaatattgtcctggaagttgccgtactcagtacagaaggacagatccaagactttaaatttcctctgggcatcaaaggagcaggcagctcaatccaactgtccgcaaataccgtcaaacagaacagcaggaatgggcttgcaaagttggtgttcatcatttaccggagcctgggacagttccttagtacagaaaatgcaaccattaaactgggtgctgattttattggtcgtaatagcaccattgcagtgaactctcacgtcatttcagtttcaatcaataaagagtccagccgagtatacctgactgatcctgtgctttttaccctgccacacattgatcctgacaattatttcaatgcaaactgctccttctggaactactcagagagaactatgatgggatattggtctacccagggctgcaagctggttgacactaataaaactcgaacaacgtgtgcatgcagccacctaaccaattttgcaattctcatggcccacagggaaattgcatataaagatggcgttcatgaattacttcttacagtcatcacctgggtgggaattgtcatttcccttgtttgcctggctatctgcatcttcaccttctgctttttccgtggcctacagagtgaccgaaatactattcacaagaacctttgtatcaaccttttcattgctgaatttattttcctaataggcattgataagacaaaatatgcgattgcatgcccaatatttgcaggacttctacactttttctttttggcagcttttgcttggatgtgcctagaaggtgtgcagctctacctaatgttagttgaagtttttgaaagtgaatattcaaggaaaaaatattactatgttgctggttacttgtttcctgccacagtggttggagtttcagctgctattgactataagagctatggaacagaaaaagcttgctggcttcatgttgataactactttatatggagcttcattggacctgttaccttcattattctgctaaatattatcttcttggtgatcacattgtgcaaaatggtgaagcattcaaacactttgaaaccagattctagcaggttggaaaacattaataattaccgtgtttgtgatggctactataatacggacttacctggctatgaagataataagccatttatcaagtcttgggtgcttggcgctttcgctcttctgtgtcttcttggcctcacctggtcctttgggttgctttttattaatgaggagactattgtgatggcatatctcttcactatatttaatgctttccagggagtgttcattttcatctttcactgtgctctccaaaagaaagtacgaaaagaatatggcaagtgcttcagacactcatactgctgtggaggcctcccaactgagagtccccacagttcagtgaaggcatcaaccaccagaaccagtgctcgctattcctctggcacacagagtcgtataagaagaatgtggaatgatactgtgagaaaacaatcagaatcttcttttatctcaggtgacatcaatagcacttcaacacttaatcaaggaatgactggcaattacctactaacaaaccctcttcttcgaccccacggcactaacaacccctataacacattgctcgctgaaacagttgtatgtaatgccccttcagctcctgtatttaactcaccaggacattcactgaacaatgccagggatacaagtgccatggatactctaccgctaaatggtaattttaacaacagctactcgctgcacaagggtgactataatgacagcgtgcaagttgtggactgtggactaagtctgaatgatactgcttttgagaaaatgatcatttcagaattagtgcacaacaacttacggggcagcagcaagactcacaacctcgagctcacgctaccagtcaaacctgtgattggaggtagcagcagtgaagatgatgctattgtggcagatgcttcatctttaatgcacagcgacaacccagggctggagctccatcacaaagaactcgaggcaccacttattcctcagcggactcactcccttctgtaccaaccccagaagaaagtgaagtccgagggaactgacagctatgtctcccaactgacagcagaggctgaagatcacctacagtcccccaacagagactctctttatacaagcatgcccaatcttagagactctccctatccggagagcagccctgacatggaagaagacctctctccctccaggaggagtgagaatgaggacatttactataaaagcatgccaaatcttggagctggccatcagcttcagatgtgctaccagatcagcaggggcaatagtgatggttatataatccccattaacaaagaagggtgtattccagaaggagatgttagagaaggacaaatgcagctggttacaagtctttaatcatacagctaaggaattccaagggccacatgcgagtattaataaataaagacaccattggcctgacgcagctccctcaaactctgcttgaagagatgactcttgacctgtggttctctggtgtaaaaaagatgactgaaccttgcagttctgtgaatttttataaaacatacaaaaactttgtatatacacagagtatactaaagtgaattatttgttacaa

SEQ ID NO: 105568 - DNA, 5789 bp, Homo sapiens
  Payload ID: 696
  Gene Symbol: ADGRL2
  Gene Name: adhesion G protein-coupled receptor L2
  ENST ID: ENST00000627151
  CDS Start-End: 217-4512
cggcgaacagacgttctttctcctccatgcagttacacaaaaggagggctacggaaactaaaagtttcggggcctctggctcggtgcgtggagaaaagagaaaacctggagacgggatatgaagatcaatgatgcagactgatggttttgatgaagctgggcatttataactagattcattaaggaatacaaagaaaatacttaaagggatcaataatggtgtcttctggttgcagaatgcgaagtctgtggtttatcattgtaatcagcttcttaccaaatacagaaggtttcagcagagcagctttaccatttgggctggtgaggcgagaattatcctgtgaaggttattctatagatctgcgatgcccgggcagtgatgtcatcatgattgagagcgctaactatggtcggacggatgacaagatttgtgatgctgacccatttcagatggagaatacagactgctacctccccgatgccttcaaaattatgactcaaaggtgcaacaatcgaacacagtgtatagtagttactgggtcagatgtgtttcctgatccatgtcctggaacatacaaataccttgaagtccaatatgaatgtgtcccttacatttttgtgtgtcctgggaccttgaaagcaattgtggactcaccatgtatatatgaagctgaacaaaaggcgggtgcttggtgcaaggaccctcttcaggctgcagataaaatttatttcatgccctggactccctatcgtaccgatactttaatagaatatgcttctttagaagatttccaaaatagtcgccaaacaacaacatataaacttccaaatcgagtagatggtactggatttgtggtgtatgatggtgctgtcttctttaacaaagaaagaacgaggaatattgtgaaatttgacttgaggactagaattaagagtggcgaggccataattaactatgccaactaccatgatacctcaccatacagatggggaggaaagactgatatcgacctagcagttgatgaaaatggtttatgggtcatttacgccactgaacagaacaatggaatgatagttattagccagctgaatccatacactcttcgatttgaagcaacgtgggagactgtatacgacaaacgtgccgcatcaaatgcttttatgatatgcggagtcctctatgtggttaggtcagtttatcaagacaatgaaagtgaaacaggcaagaactcaattgattacatttataatacccgattaaaccgaggagaatatgtagatgttcccttccccaaccagtatcagtatattgctgcagtggattacaatccaagagataaccaactttacgtgtggaacaataacttcattttacgatattctctggagtttggtccacctgatcctgcccaagtgcctaccacagctgtgacaataacttcttcagctgagctgttcaaaaccataatatcaaccacaagcactacttcacagaaaggccccatgagcacaactgtagctggatcacaggaaggaagcaaagggacaaaaccacctccagcagtttctacaaccaaaattccacctataacaaatatttttcccctgccagagagattctgtgaagcattagactccaaggggataaagtggcctcagacacaaaggggaatgatggttgaacgaccatgccctaagggaacaagaggaactgcctcatatctctgcatgatttccactggaacatggaaccctaagggccccgatcttagcaactgtacctcacactgggtgaatcagctggctcagaagatcagaagcggagaaaatgctgctagtcttgccaatgaactggctaaacataccaaagggccagtgtttgctggggatgtaagttcttcagtgagattgatggagcagttggtggacatccttgatgcacagctgcaggaactgaaacctagtgaaaaagattcagctggacggagttataacaagctccaaaaacgagagaagacatgcagggcttaccttaaggcaattgttgacacagtggacaaccttctgagacccgaagctttggaatcatggaaacatatgaattcttctgaacaagcacatactgcaacaatgttactcgatacattggaagaaggagcttttgtcctagctgacaatcttttagaaccaacaagggtctcaatgcccacagaaaatattgtcctggaagttgccgtactcagtacagaaggacagatccaagactttaaatttcctctgggcatcaaaggagcaggcagctcaatccaactgtccgcaaataccgtcaaacagaacagcaggaatgggcttgcaaagttggtgttcatcatttaccggagcctgggacagttccttagtacagaaaatgcaaccattaaactgggtgctgattttattggtcgtaatagcaccattgcagtgaactctcacgtcatttcagtttcaatcaataaagagtccagccgagtatacctgactgatcctgtgctttttaccctgccacacattgatcctgacaattatttcaatgcaaactgctccttctggaactactcagagagaactatgatgggatattggtctacccagggctgcaagctggttgacactaataaaactcgaacaacgtgtgcatgcagccacctaaccaattttgcaattctcatggcccacagggaaattgcatataaagatggcgttcatgaattacttcttacagtcatcacctgggtgggaattgtcatttcccttgtttgcctggctatctgcatcttcaccttctgctttttccgtggcctacagagtgaccgaaatactattcacaagaacctttgtatcaaccttttcattgctgaatttattttcctaataggcattgataagacaaaatatgcgattgcatgcccaatatttgcaggacttctacactttttctttttggcagcttttgcttggatgtgcctagaaggtgtgcagctctacctaatgttagttgaagtttttgaaagtgaatattcaaggaaaaaatattactatgttgctggttacttgtttcctgccacagtggttggagtttcagctgctattgactataagagctatggaacagaaaaagcttgctggcttcatgttgataactactttatatggagcttcattggacctgttaccttcattattctgctaaatattatcttcttggtgatcacattgtgcaaaatggtgaagcattcaaacactttgaaaccagattctagcaggttggaaaacattaataattaccgtgtttgtgatggctactataatacggacttacctgggtcttgggtgcttggcgctttcgctcttctgtgtcttcttggcctcacctggtcctttgggttgctttttattaatgaggagactattgtgatggcatatctcttcactatatttaatgctttccagggagtgttcattttcatctttcactgtgctctccaaaagaaagtacgaaaagaatatggcaagtgcttcagacactcatactgctgtggaggcctcccaactgagagtccccacagttcagtgaaggcatcaaccaccagaaccagtgctcgctattcctctggcacacagagtcgtataagaagaatgtggaatgatactgtgagaaaacaatcagaatcttcttttatctcaggtgacatcaatagcacttcaacacttaatcaaggacattcactgaacaatgccagggatacaagtgccatggatactctaccgctaaatggtaattttaacaacagctactcgctgcacaagggtgactataatgacagcgtgcaagttgtggactgtggactaagtctgaatgatactgcttttgagaaaatgatcatttcagaattagtgcacaacaacttacggggcagcagcaagactcacaacctcgagctcacgctaccagtcaaacctgtgattggaggtagcagcagtgaagatgatgctattgtggcagatgcttcatctttaatgcacagcgacaacccagggctggagctccatcacaaagaactcgaggcaccacttattcctcagcggactcactcccttctgtaccaaccccagaagaaagtgaagtccgagggaactgacagctatgtctcccaactgacagcagaggctgaagatcacctacagtcccccaacagagactctctttatacaagcatgcccaatcttagagactctccctatccggagagcagccctgacatggaagaagacctctctccctccaggaggagtgagaatgaggacatttactataaaagcatgccaaatcttggagctggccatcagcttcagatgtgctaccagatcagcaggggcaatagtgatggttatataatccccattaacaaagaagggtgtattccagaaggagatgttagagaaggacaaatgcagctggttacaagtctttaatcatacagctaaggaattccaagggccacatgcgagtattaataaataaagacaccattggcctgacgcagctccctcaaactctgcttgaagagatgactcttgacctgtggttctctggtgtaaaaaagatgactgaaccttgcagttctgtgaatttttataaaacatacaaaaactttgtatatacacagagtatactaaagtgaattatttgttacaaagaaaagagatgccagccaggtattttaagattctgctgctgtttagagaaattgtgaaacaagcaaaacaaaactttccagccattttactgcagcagtctgtgaactaaatttgtaaatatggctgcaccatttttgtaggcctgcattgtattatatacaagacgtaggctttaaaatcctgtgggacaaatttactgtaccttactattcctgacaagacttggaaaagcaggagagatattctgcatcagtttgcagttcactgcaaatcttttacattaaggcaaagattgaaaacatgcttaaccactagcaatcaagccacaggccttatttcatatgtttcctcaactgtacaatgaactattctcatgaaaaatggctaaagaaattatattttgttctattgctagggtaaaataaatacatttgtgtccaactgaaatataattgtcattaaaataattttaaagagtgaagaaaatattgtgaaaagctcttggttgcacatgttatgaaatgttttttcttacactttgtcatggtaagttctactcattttcacttcttttccactgtatacagtgttctgctttgacaaagttggtctttattacttacatttaaatttcttattgccaaaagaacgtgttttatggggagaaacaaactctttgaagccagttatgtcatgccttgcacaaaagtgatgaaatctagaaaagattgtgtgtcacccctgtttattcttgaacagagggcaaagagggcactgggcacttctcacaaactttctagtgaacaaaaggtgcctattcttttttaaaaaaataaaataaaacataaatattactcttccatattccttctgcctatatttagtaattaatttattttatgataaagttctaatgaaatgtaaattgtttcagcaaaattctgcttttttttcatccctttgtgtaaacctgttaataatgagcccatcactaatatccagtgtaaagtttaacacggtttgacagtaaataaatgtgaattttttcaagt

SEQ ID NO: 105569 - DNA, 4962 bp, Homo sapiens
  Payload ID: 697
  Gene Symbol: ADGRL3
  Gene Name: adhesion G protein-coupled receptor L3
  ENST ID: ENST00000506720
  CDS Start-End: 1-4743
atgtggccatcgcagctactaattttcatgatgctcttagctccaataattcatggtggcaagcacagtgaacgacatcctgcccttgctgctccattgcgacacgctgagcgcagcccaggaggcgctcttccacccagacatctgcttcagcagccagctgcagagcgcaccgctgctcatcgtggacaagggccccgtggagctaccagaggagttcgcggtccaggtgcccaaggagcacagattgcagcgcaagctttcagccgtgccccaattccaatggctgtggtccgcagagagctatcctgtgagagctatcctatagagcttcgctgtccaggaacagacgtcatcatgatagaaagtgccaactatggcaggactgatgacaaaatttgtgactctgaccctgctcagatggagaatatccgatgttatctgccagatgcctataagattatgtctcaaagatgcaataacagaacccagtgtgcagtggtggcaggtcctgatgtttttccagacccgtgtccaggaacctataaataccttgaagtgcagtatgaatgtgtcccttacaaagtggaacaaaaagtttttctttgtcctggactactaaaaggagtataccagagtgaacatttgtttgagtccgaccaccaatctggggcgtggtgcaaagaccctctgcaggcatctgacaagatttattatatgccctggactccctacagaactgataccctgactgagtattcatccaaggatgacttcattgctggaagaccaactacaacctacaagctccctcacagggtggatggcacaggatttgtagtgtatgatggagctttgttcttcaacaaagagcgcaccaggaacatagtaaagtttgatttgcggactaggataaagagtggagaggctatcatagcaaatgccaattaccatgatacctccccttaccgatggggaggcaaatctgacatagacctggcagtagatgagaatgggctatgggtaatctatgcaacagaacaaaacaatggtaaaattgtcattagtcaattgaacccttacaccctacggatcgaaggaacatgggatactgcatatgataaaaggtcagcttccaatgcctttatgatttgtggaattctgtatgtggtcaaatctgtatatgaggatgatgacaatgaggctactggaaataagattgactacatttacaacactgaccaaagcaaggatagtttggtggatgtaccctttcctaattcataccagtacattgcagctgtggattacaaccccagggacaacctactttatgtatggaataactatcacgtcgtgaaatattctttggattttggacctctggatagtagatcagggcaggcacatcatggacaagtttcatacatttctccgccaattcaccttgactctgagctagaaagaccctctgttaaagatatctctaccacaggacctcttggcatgggaagcactaccaccagtaccacccttcggaccacaactttgagcccaggaaggagtaccaccccgtcagtgtcaggaagaagaaaccggagtactagtaccccatctccagctgtcgaggtacttgatgacatgaccacacaccttccatcagcatcgtcccaaatcccagctctcgaagagagctgtgaggctgtggaagcccgagaaatcatgtggtttaagactcgtcaaggacagatagcaaagcagccatgccctgcaggaactataggtgtatcaacttatctatgccttgctcctgatggaatttgggatccccaaggtccagatctcagcaactgttcttctccttgggtcaatcatataacacagaagttgaaatctggtgaaacagctgccaacattgctagagagctggctgaacagacaagaaatcacttgaatgctggggacatcacctactctgtccgggccatggaccagctggtaggcctcctagatgtacagcttcggaacttgaccccaggtggaaaagatagtgctgcccggagtttgaacaagcttcagaaaagagagcgctcttgcagagcctatgtccaggcaatggtcgagacagttaacaacctccttcagccacaagctttgaatgcatggagagacctgactacgagtgatcagctgcgtgcggccaccatgttgcttcatactgtggaggaaagtgcttttgtgctggctgataaccttttgaagactgacattgtcagggagaatacagacaatattaaattggaagttgcaagactgagcacagaaggaaacttagaagacctaaaatttccagaaaacatgggccatggaagcactatccagctgtctgcaaataccttaaagcaaaatggccgaaatggagagatcagagtggcctttgtcctgtataacaacttgggtccttatttatccacggagaatgccagtatgaagttgggaacggaagctttgtccacaaatcattctgttattgtcaattcccctgttattacggcagcaataaacaaagagttcagtaacaaggtttatttggctgatcctgtggtatttactgttaaacatatcaagcagtcagaggaaaatttcaaccctaactgttcattttggagctactccaagcgtacaatgacaggttattggtcaacacaaggctgtcggctcctgacaacaaataagacacatactacatgctcttgtaaccacctaacaaattttgcagtactgatggcacatgtggaagttaagcacagtgatgcggtccatgacctccttctggatgtgatcacgtgggttggaattttgctgtcccttgtttgtctcctgatttgcatcttcacattttgctttttccgggggctccagagtgaccgtaacaccatccacaagaacctctgcatcagtctctttgtagcagagctgctcttcctgattgggatcaaccgaactgaccaaccaattgcctgtgctgttttcgctgccctgttacatttcttcttcttggctgccttcacctggatgttcctggagggggtgcagctttatatcatgctggtggaggtttttgagagtgaacattcacgtaggaaatacttttatctggtcggctatgggatgcctgcactcattgtggctgtgtcagctgcagtagactacaggagttatggaacagataaagtatgttggctccgacttgacacctacttcatttggagttttataggaccagcaactttgataattatgcttaatgtaatcttccttgggattgctttatataaaatgtttcatcatactgctatactgaaacctgaatcaggctgtcttgataacatcaactatgaggataacagacccttcatcaagtcatgggttataggtgcaatagctcttctctgcctattaggattgacctgggcctttggactcatgtatattaatgaaagcacagtcatcatggcctatctcttcaccattttcaattctctacagggaatgtttatatttattttccattgtgtcctacagaagaaggtacgaaaagagtatgggaaatgcctgcgaacacattgctgtagtggcaaaagtacagagagttccattggttcagggaaaacatctggttctcgaactcctggacgctactccacaggctcacagagccgaatccgtagaatgtggaatgacacggttcgaaagcagtcagagtcttcctttattactggagacataaacagttcagcgtcactcaacagaggagccatggctaatcatcttataagcaatgctctgcttcgtccgcatggtactaacaatccctataatacattgcttggggaaccggcggtctgtaacaacccttctgtcagcatgtacaacgcacaagaggggcttctgaacaatgccagggatacaagtgtcatggatactctaccactgaatggtaaccatggcaatagttacagcattgccagcggcgaatacctgagcaactgtgtgcaaatcatagaccgtggctataaccataacgagaccgccctagagaaaaagattctgaaggaactcacttccaactatatcccttcttacctgaacaaccatgagcgctccagtgaacagaacaggaatctgatgaacaagctggtgaataaccttggcagtggaagggaagatgatgccattgtcctggatgatgccacctcgtttaaccacgaggagagtttgggcctggaactcattcatgaggaatctgatgctcctttgctgcccccaagagtatactccaccgagaaccaccagccacaccattataccagaaggcggatcccccaagaccacagtgagagctttttccctttgctaaccaacgagcacacagaagatctccagtcaccccatagagactctctctataccagcatgccgacactggctggtgtggccgccacagagagtgttaccaccagcacccagaccgaacccccaccggccaaatgtggtgatgccgaagatgtttactacaaaagcatgccaaacctaggctccagaaaccacgtccatcagctgcatacttactaccagctaggtcgcggcagcagtgatggatttatagttcctccaaacaaagatgggacccctcccgagggaagttcaaaaggaccggctcatttggtcactagtctatagaagatgacacagaaattggaaccaacaaaactgctaacaccttgttgactgttctgagttgatataagcagtggtaataatgtgtgtactcctaaatctttatgctgtcctctaaagacaaacacaaactctcagacttttttttttttaatgggatttttaggtcagcccaggggagaaagataactgctaaaattcccctgtaccccatcctttctt

SEQ ID NO: 105570 - DNA, 4843 bp, Homo sapiens
  Payload ID: 697
  Gene Symbol: ADGRL3
  Gene Name: adhesion G protein-coupled receptor L3
  ENST ID: ENST00000507625
  CDS Start-End: 107-4693
aaaatcatcagtcttggaatacagaagagaaactagaaatatacgtattttgtttcacatttgaacagtcattcttgaggaatactccatacctgagtagacagccatgtggccatcgcagctactaattttcatgatgctcttagctccaataattcatggtggcaagcacagtgaacgacatcctgcccttgctgctccattgcgacacgctgagcgcagcccaggaggcgctcttccacccagacatctgcttcagcagccagctgcagagcgcaccgctgctcatcgtggacaagggccccgtggagctaccagaggagttcgcggtccaggtgcccaaggagcacagattgcagcgcaagctttcagccgtgccccaattccaatggctgtggtccgcagagagctatcctgtgagagctatcctatagagcttcgctgtccaggaacagacgtcatcatgatagaaagtgccaactatggcaggactgatgacaaaatttgtgactctgaccctgctcagatggagaatatccgatgttatctgccagatgcctataagattatgtctcaaagatgcaataacagaacccagtgtgcagtggtggcaggtcctgatgtttttccagacccgtgtccaggaacctataaataccttgaagtgcagtatgaatgtgtcccttacaaagtggaacaaaaagtttttctttgtcctggactactaaaaggagtataccagagtgaacatttgtttgagtccgaccaccaatctggggcgtggtgcaaagaccctctgcaggcatctgacaagatttattatatgccctggactccctacagaactgataccctgactgagtattcatccaaggatgacttcattgctggaagaccaactacaacctacaagctccctcacagggtggatggcacaggatttgtagtgtatgatggagctttgttcttcaacaaagagcgcaccaggaacatagtaaagtttgatttgcggactaggataaagagtggagaggctatcatagcaaatgccaattaccatgatacctccccttaccgatggggaggcaaatctgacatagacctggcagtagatgagaatgggctatgggtaatctatgcaacagaacaaaacaatggtaaaattgtcattagtcaattgaacccttacaccctacggatcgaaggaacatgggatactgcatatgataaaaggtcagcttccaatgcctttatgatttgtggaattctgtatgtggtcaaatctgtatatgaggatgatgacaatgaggctactggaaataagattgactacatttacaacactgaccaaagcaaggatagtttggtggatgtaccctttcctaattcataccagtacattgcagctgtggattacaaccccagggacaacctactttatgtatggaataactatcacgtcgtgaaatattctttggattttggacctctggatagtagatcagggcaggcacatcatggacaagtttcatacatttctccgccaattcaccttgactctgagctagaaagaccctctgttaaagatatctctaccacaggacctcttggcatgggaagcactaccaccagtaccacccttcggaccacaactttgagcccaggaaggagtaccaccccgtcagtgtcaggaagaagaaaccggagtactagtaccccatctccagctgtcgaggtacttgatgacatgaccacacaccttccatcagcatcgtcccaaatcccagctctcgaagagagctgtgaggctgtggaagcccgagaaatcatgtggtttaagactcgtcaaggacagatagcaaagcagccatgccctgcaggaactataggtgtatcaacttatctatgccttgctcctgatggaatttgggatccccaaggtccagatctcagcaactgttcttctccttgggtcaatcatataacacagaagttgaaatctggtgaaacagctgccaacattgctagagagctggctgaacagacaagaaatcacttgaatgctggggacatcacctactctgtccgggccatggaccagctggtaggcctcctagatgtacagcttcggaacttgaccccaggtggaaaagatagtgctgcccggagtttgaacaagcttcagaaaagagagcgctcttgcagagcctatgtccaggcaatggtcgagacagttaacaacctccttcagccacaagctttgaatgcatggagagacctgactacgagtgatcagctgcgtgcggccaccatgttgcttcatactgtggaggaaagtgcttttgtgctggctgataaccttttgaagactgacattgtcagggagaatacagacaatattaaattggaagttgcaagactgagcacagaaggaaacttagaagacctaaaatttccagaaaacatgggccatggaagcactatccagctgtctgcaaataccttaaagcaaaatggccgaaatggagagatcagagtggcctttgtcctgtataacaacttgggtccttatttatccacggagaatgccagtatgaagttgggaacggaagctttgtccacaaatcattctgttattgtcaattcccctgttattacggcagcaataaacaaagagttcagtaacaaggtttatttggctgatcctgtggtatttactgttaaacatatcaagcagtcagaggaaaatttcaaccctaactgttcattttggagctactccaagcgtacaatgacaggttattggtcaacacaaggctgtcggctcctgacaacaaataagacacatactacatgctcttgtaaccacctaacaaattttgcagtactgatggcacatgtggaagttaagcacagtgatgcggtccatgacctccttctggatgtgatcacgtgggttggaattttgctgtcccttgtttgtctcctgatttgcatcttcacattttgctttttccgggggctccagagtgaccgtaacaccatccacaagaacctctgcatcagtctctttgtagcagagctgctcttcctgattgggatcaaccgaactgaccaaccaattgcctgtgctgttttcgctgccctgttacatttcttcttcttggctgccttcacctggatgttcctggagggggtgcagctttatatcatgctggtggaggtttttgagagtgaacattcacgtaggaaatacttttatctggtcggctatgggatgcctgcactcattgtggctgtgtcagctgcagtagactacaggagttatggaacagataaagtatgttggctccgacttgacacctacttcatttggagttttataggaccagcaactttgataattatgcttaatgtaatcttccttgggattgctttatataaaatgtttcatcatactgctatactgaaacctgaatcaggctgtcttgataacatcaagtcatgggttataggtgcaatagctcttctctgcctattaggattgacctgggcctttggactcatgtatattaatgaaagcacagtcatcatggcctatctcttcaccattttcaattctctacagggaatgtttatatttattttccattgtgtcctacagaagaaggtacgaaaagagtatgggaaatgcctgcgaacacattgctgtagtggcaaaagtacagagagttccattggttcagggaaaacatctggttctcgaactcctggacgctactccacaggctcacagagccgaatccgtagaatgtggaatgacacggttcgaaagcagtcagagtcttcctttattactggagacataaacagttcagcgtcactcaacagagaggggcttctgaacaatgccagggatacaagtgtcatggatactctaccactgaatggtaaccatggcaatagttacagcattgccagcggcgaatacctgagcaactgtgtgcaaatcatagaccgtggctataaccataacgagaccgccctagagaaaaagattctgaaggaactcacttccaactatatcccttcttacctgaacaaccatgagcgctccagtgaacagaacaggaatctgatgaacaagctggtgaataaccttggcagtggaagggaagatgatgccattgtcctggatgatgccacctcgtttaaccacgaggagagtttgggcctggaactcattcatgaggaatctgatgctcctttgctgcccccaagagtatactccaccgagaaccaccagccacaccattataccagaaggcggatcccccaagaccacagtgagagctttttccctttgctaaccaacgagcacacagaagatctccagtcaccccatagagactctctctataccagcatgccgacactggctggtgtggccgccacagagagtgttaccaccagcacccagaccgaacccccaccggccaaatgtggtgatgccgaagatgtttactacaaaagcatgccaaacctaggctccagaaaccacgtccatcagctgcatacttactaccagctaggtcgcggcagcagtgatggatttatagttcctccaaacaaagatgggacccctcccgagggaagttcaaaaggaccggctcatttggtcactagtctatagaagatgacacagaaattggaaccaacaaaactgctaacaccttgttgactgttctgagttgatataagcagtggtaataatgtgtgtactcctaaatctttatgctgtcctctaaagacaaacacaaactctcagactttttttttttta

SEQ ID NO: 105571 - DNA, 4982 bp, Homo sapiens
  Payload ID: 697
  Gene Symbol: ADGRL3
  Gene Name: adhesion G protein-coupled receptor L3
  ENST ID: ENST00000507164
  CDS Start-End: 130-4158
tctttttctttttaatttgaagaaaaatcatcagtcttggaatacagaagagaaactagaaatatacgtattttgtttcacatttgaacagtcattcttgaggaatactccatacctgagtagacagccatgtggccatcgcagctactaattttcatgatgctcttagctccaataattcatggtggcaagcacagtgaacgacatcctgcccttgctgctccattgcgacacgctgagcgcagcccaggaggcgctcttccacccagacatctgcttcagcagccagctgcagagcgcaccgctgctcatcgtggacaagggccccgtggagctaccagaggagttcgcggtccaggtgcccaaggagcacagattgcagcgcaagctttcagccgtgccccaattccaatggctgtggtccgcagagagctatcctgtgagagctatcctatagagcttcgctgtccaggaacagacgtcatcatgatagaaagtgccaactatggcaggactgatgacaaaatttgtgactctgaccctgctcagatggagaatatccgatgttatctgccagatgcctataagattatgtctcaaagatgcaataacagaacccagtgtgcagtggtggcaggtcctgatgtttttccagacccgtgtccaggaacctataaataccttgaagtgcagtatgaatgtgtcccttacaaagtggaacaaaaagtttttctttgtcctggactactaaaaggagtataccagagtgaacatttgtttgagtccgaccaccaatctggggcgtggtgcaaagaccctctgcaggcatctgacaagatttattatatgccctggactccctacagaactgataccctgactgagtattcatccaaggatgacttcattgctggaagaccaactacaacctacaagctccctcacagggtggatggcacaggatttgtagtgtatgatggagctttgttcttcaacaaagagcgcaccaggaacatagtaaagtttgatttgcggactaggataaagagtggagaggctatcatagcaaatgccaattaccatgatacctccccttaccgatggggaggcaaatctgacatagacctggcagtagatgagaatgggctatgggtaatctatgcaacagaacaaaacaatggtaaaattgtcattagtcaattgaacccttacaccctacggatcgaaggaacatgggatactgcatatgataaaaggtcagcttccaatgcctttatgatttgtggaattctgtatgtggtcaaatctgtatatgaggatgatgacaatgaggctactggaaataagattgactacatttacaacactgaccaaagcaaggatagtttggtggatgtaccctttcctaattcataccagtacattgcagctgtggattacaaccccagggacaacctactttatgtatggaataactatcacgtcgtgaaatattctttggattttggacctctggatagtagatcagggcaggcacatcatggacaagtttcatacatttctccgccaattcaccttgactctgagctagaaagaccctctgttaaagatatctctaccacaggacctcttggcatgggaagcactaccaccagtaccacccttcggaccacaactttgagcccaggaaggagtaccaccccgtcagtgtcaggaagaagaaaccggagtactagtaccccatctccagctgtcgaggtacttgatgacatgaccacacaccttccatcagcatcgtcccaaatcccagctctcgaagagagctgtgaggctgtggaagcccgagaaatcatgtggtttaagactcgtcaaggacagatagcaaagcagccatgccctgcaggaactataggtgtatcaacttatctatgccttgctcctgatggaatttgggatccccaaggtccagatctcagcaactgttcttctccttgggtcaatcatataacacagaagttgaaatctggtgaaacagctgccaacattgctagagagctggctgaacagacaagaaatcacttgaatgctggggacatcacctactctgtccgggccatggaccagctggtaggcctcctagatgtacagcttcggaacttgaccccaggtggaaaagatagtgctgcccggagtttgaacaagcttcagaaaagagagcgctcttgcagagcctatgtccaggcaatggtcgagacagttaacaacctccttcagccacaagctttgaatgcatggagagacctgactacgagtgatcagctgcgtgcggccaccatgttgcttcatactgtggaggaaagtgcttttgtgctggctgataaccttttgaagactgacattgtcagggagaatacagacaatattaaattggaagttgcaagactgagcacagaaggaaacttagaagacctaaaatttccagaaaacatgggccatggaagcactatccagctgtctgcaaataccttaaagcaaaatggccgaaatggagagatcagagtggcctttgtcctgtataacaacttgggtccttatttatccacggagaatgccagtatgaagttgggaacggaagctttgtccacaaatcattctgttattgtcaattcccctgttattacggcagcaataaacaaagagttcagtaacaaggtttatttggctgatcctgtggtatttactgttaaacatatcaagcagtcagaggaaaatttcaaccctaactgttcattttggagctactccaagcgtacaatgacaggttattggtcaacacaaggctgtcggctcctgacaacaaataagacacatactacatgctcttgtaaccacctaacaaattttgcagtactgatggcacatgtggaagttaagcacagtgatgcggtccatgacctccttctggatgtgatcacgtgggttggaattttgctgtcccttgtttgtctcctgatttgcatcttcacattttgctttttccgggggctccagagtgaccgtaacaccatccacaagaacctctgcatcagtctctttgtagcagagctgctcttcctgattgggatcaaccgaactgaccaaccaattgcctgtgctgttttcgctgccctgttacatttcttcttcttggctgccttcacctggatgttcctggagggggtgcagctttatatcatgctggtggaggtttttgagagtgaacattcacgtaggaaatacttttatctggtcggctatgggatgcctgcactcattgtggctgtgtcagctgcagtagactacaggagttatggaacagataaagtatgttggctccgacttgacacctacttcatttggagttttataggaccagcaactttgataattatgcttaatgtaatcttccttgggattgctttatataaaatgtttcatcatactgctatactgaaacctgaatcaggctgtcttgataacatcaagtcatgggttataggtgcaatagctcttctctgcctattaggattgacctgggcctttggactcatgtatattaatgaaagcacagtcatcatggcctatctcttcaccattttcaattctctacagggaatgtttatatttattttccattgtgtcctacagaagaaggtacgaaaagagtatgggaaatgcctgcgaacacattgctgtagtggcaaaagtacagagagttccattggttcagggaaaacatctggttctcgaactcctggacgctactccacaggctcacagagccgaatccgtagaatgtggaatgacacggttcgaaagcagtcagagtcttcctttattactggagacataaacagttcagcgtcactcaacagaggagccatggctaatcatcttataagcaatgctctgcttcgtccgcatggtactaacaatccctataatacattgcttggggaaccggcggtctgtaacaacccttctgtcagcatgtacaacgcacaagagccctacagagagacaagtatgggagtaaagctaaacattgcatatcaaataggggcttctgaacaatgccagggatacaagtgtcatggatactctaccactgaatggtaaccatggcaatagttacagcattgccagcggcgaatacctgagcaactgtgtgcaaatcatagaccgtggctataaccataacgagaccgccctagagaaaaagattctgaaggaactcacttccaactatatcccttcttacctgaacaaccatgagcgctccagtgaacagaacaggaatctgatgaacaagctggtgaataaccttggcagtggaagggaagatgatgccattgtcctggatgatgccacctcgtttaaccacgaggagagtttgggcctggaactcattcatgaggaatctgatgctcctttgctgcccccaagagtatactccaccgagaaccaccagccacaccattataccagaaggcggatcccccaagaccacagtgagagctttttccctttgctaaccaacgagcacacagaagatctccagtcaccccatagagactctctctataccagcatgccgacactggctggtgtggccgccacagagagtgttaccaccagcacccagaccgaacccccaccggccaaatgtggtgatgccgaagatgtttactacaaaagcatgccaaacctaggctccagaaaccacgtccatcagctgcatacttactaccagctaggtcgcggcagcagtgatggatttatagttcctccaaacaaagatgggacccctcccgagggaagttcaaaaggaccggctcatttggtcactagtctatagaagatgacacagaaattggaaccaacaaaactgctaacaccttgttgactgttctgagttgatataagcagtggtaataatgtgt

SEQ ID NO: 105572 - DNA, 4758 bp, Homo sapiens
  Payload ID: 697
  Gene Symbol: ADGRL3
  Gene Name: adhesion G protein-coupled receptor L3
  ENST ID: ENST00000508946
  CDS Start-End: 1-4539
atgtggccatcgcagctactaattttcatgatgctcttagctccaataattcatgctttcagccgtgccccaattccaatggctgtggtccgcagagagctatcctgtgagagctatcctatagagcttcgctgtccaggaacagacgtcatcatgatagaaagtgccaactatggcaggactgatgacaaaatttgtgactctgaccctgctcagatggagaatatccgatgttatctgccagatgcctataagattatgtctcaaagatgcaataacagaacccagtgtgcagtggtggcaggtcctgatgtttttccagacccgtgtccaggaacctataaataccttgaagtgcagtatgaatgtgtcccttacaaagtggaacaaaaagtttttctttgtcctggactactaaaaggagtataccagagtgaacatttgtttgagtccgaccaccaatctggggcgtggtgcaaagaccctctgcaggcatctgacaagatttattatatgccctggactccctacagaactgataccctgactgagtattcatccaaggatgacttcattgctggaagaccaactacaacctacaagctccctcacagggtggatggcacaggatttgtagtgtatgatggagctttgttcttcaacaaagagcgcaccaggaacatagtaaagtttgatttgcggactaggataaagagtggagaggctatcatagcaaatgccaattaccatgatacctccccttaccgatggggaggcaaatctgacatagacctggcagtagatgagaatgggctatgggtaatctatgcaacagaacaaaacaatggtaaaattgtcattagtcaattgaacccttacaccctacggatcgaaggaacatgggatactgcatatgataaaaggtcagcttccaatgcctttatgatttgtggaattctgtatgtggtcaaatctgtatatgaggatgatgacaatgaggctactggaaataagattgactacatttacaacactgaccaaagcaaggatagtttggtggatgtaccctttcctaattcataccagtacattgcagctgtggattacaaccccagggacaacctactttatgtatggaataactatcacgtcgtgaaatattctttggattttggacctctggatagtagatcagggcaggcacatcatggacaagtttcatacatttctccgccaattcaccttgactctgagctagaaagaccctctgttaaagatatctctaccacaggacctcttggcatgggaagcactaccaccagtaccacccttcggaccacaactttgagcccaggaaggagtaccaccccgtcagtgtcaggaagaagaaaccggagtactagtaccccatctccagctgtcgaggtacttgatgacatgaccacacaccttccatcagcatcgtcccaaatcccagctctcgaagagagctgtgaggctgtggaagcccgagaaatcatgtggtttaagactcgtcaaggacagatagcaaagcagccatgccctgcaggaactataggtgtatcaacttatctatgccttgctcctgatggaatttgggatccccaaggtccagatctcagcaactgttcttctccttgggtcaatcatataacacagaagttgaaatctggtgaaacagctgccaacattgctagagagctggctgaacagacaagaaatcacttgaatgctggggacatcacctactctgtccgggccatggaccagctggtaggcctcctagatgtacagcttcggaacttgaccccaggtggaaaagatagtgctgcccggagtttgaacaagcttcagaaaagagagcgctcttgcagagcctatgtccaggcaatggtcgagacagttaacaacctccttcagccacaagctttgaatgcatggagagacctgactacgagtgatcagctgcgtgcggccaccatgttgcttcatactgtggaggaaagtgcttttgtgctggctgataaccttttgaagactgacattgtcagggagaatacagacaatattaaattggaagttgcaagactgagcacagaaggaaacttagaagacctaaaatttccagaaaacatgggccatggaagcactatccagctgtctgcaaataccttaaagcaaaatggccgaaatggagagatcagagtggcctttgtcctgtataacaacttgggtccttatttatccacggagaatgccagtatgaagttgggaacggaagctttgtccacaaatcattctgttattgtcaattcccctgttattacggcagcaataaacaaagagttcagtaacaaggtttatttggctgatcctgtggtatttactgttaaacatatcaagcagtcagaggaaaatttcaaccctaactgttcattttggagctactccaagcgtacaatgacaggttattggtcaacacaaggctgtcggctcctgacaacaaataagacacatactacatgctcttgtaaccacctaacaaattttgcagtactgatggcacatgtggaagttaagcacagtgatgcggtccatgacctccttctggatgtgatcacgtgggttggaattttgctgtcccttgtttgtctcctgatttgcatcttcacattttgctttttccgggggctccagagtgaccgtaacaccatccacaagaacctctgcatcagtctctttgtagcagagctgctcttcctgattgggatcaaccgaactgaccaaccaattgcctgtgctgttttcgctgccctgttacatttcttcttcttggctgccttcacctggatgttcctggagggggtgcagctttatatcatgctggtggaggtttttgagagtgaacattcacgtaggaaatacttttatctggtcggctatgggatgcctgcactcattgtggctgtgtcagctgcagtagactacaggagttatggaacagataaagtatgttggctccgacttgacacctacttcatttggagttttataggaccagcaactttgataattatgcttaatgtaatcttccttgggattgctttatataaaatgtttcatcatactgctatactgaaacctgaatcaggctgtcttgataacatcaactatgaggataacagacccttcatcaagtcatgggttataggtgcaatagctcttctctgcctattaggattgacctgggcctttggactcatgtatattaatgaaagcacagtcatcatggcctatctcttcaccattttcaattctctacagggaatgtttatatttattttccattgtgtcctacagaagaaggtacgaaaagagtatgggaaatgcctgcgaacacattgctgtagtggcaaaagtacagagagttccattggttcagggaaaacatctggttctcgaactcctggacgctactccacaggctcacagagccgaatccgtagaatgtggaatgacacggttcgaaagcagtcagagtcttcctttattactggagacataaacagttcagcgtcactcaacagaggagccatggctaatcatcttataagcaatgctctgcttcgtccgcatggtactaacaatccctataatacattgcttggggaaccggcggtctgtaacaacccttctgtcagcatgtacaacgcacaagaggggcttctgaacaatgccagggatacaagtgtcatggatactctaccactgaatggtaaccatggcaatagttacagcattgccagcggcgaatacctgagcaactgtgtgcaaatcatagaccgtggctataaccataacgagaccgccctagagaaaaagattctgaaggaactcacttccaactatatcccttcttacctgaacaaccatgagcgctccagtgaacagaacaggaatctgatgaacaagctggtgaataaccttggcagtggaagggaagatgatgccattgtcctggatgatgccacctcgtttaaccacgaggagagtttgggcctggaactcattcatgaggaatctgatgctcctttgctgcccccaagagtatactccaccgagaaccaccagccacaccattataccagaaggcggatcccccaagaccacagtgagagctttttccctttgctaaccaacgagcacacagaagatctccagtcaccccatagagactctctctataccagcatgccgacactggctggtgtggccgccacagagagtgttaccaccagcacccagaccgaacccccaccggccaaatgtggtgatgccgaagatgtttactacaaaagcatgccaaacctaggctccagaaaccacgtccatcagctgcatacttactaccagctaggtcgcggcagcagtgatggatttatagttcctccaaacaaagatgggacccctcccgagggaagttcaaaaggaccggctcatttggtcactagtctatagaagatgacacagaaattggaaccaacaaaactgctaacaccttgttgactgttctgagttgatataagcagtggtaataatgtgtgtactcctaaatctttatgctgtcctctaaagacaaacacaaactctcagacttttttttttttaatgggatttttaggtcagcccaggggagaaagataactgctaaaattcccctgtaccccatcctttctt

SEQ ID NO: 105573 - DNA, 6297 bp, Homo sapiens
  Payload ID: 697
  Gene Symbol: ADGRL3
  Gene Name: adhesion G protein-coupled receptor L3
  Uniprot ID: Q9HAR2
  ENST ID: ENST00000514591
  CDS Start-End: 330-4739
agaaagcggacaggagggcgacttttctccgtcaggctggaactggtgccgctggaggcgggagcgggctggaggacggacagggtctggaaatgtttaatttggtaaattggaggaaaaaaacatggatttttagcaattgaagagcaaattaaggtttcagatttgggatattggtgtttctgttttggagaaattattctttttctttttaatttgaagaaaaatcatcagtcttggaatacagaagagaaactagaaatatacgtattttgtttcacatttgaacagtcattcttgaggaatactccatacctgagtagacagccatgtggccatcgcagctactaattttcatgatgctcttagctccaataattcatgctttcagccgtgccccaattccaatggctgtggtccgcagagagctatcctgtgagagctatcctatagagcttcgctgtccaggaacagacgtcatcatgatagaaagtgccaactatggcaggactgatgacaaaatttgtgactctgaccctgctcagatggagaatatccgatgttatctgccagatgcctataagattatgtctcaaagatgcaataacagaacccagtgtgcagtggtggcaggtcctgatgtttttccagacccgtgtccaggaacctataaataccttgaagtgcagtatgaatgtgtcccttacaaagtggaacaaaaagtttttctttgtcctggactactaaaaggagtataccagagtgaacatttgtttgagtccgaccaccaatctggggcgtggtgcaaagaccctctgcaggcatctgacaagatttattatatgccctggactccctacagaactgataccctgactgagtattcatccaaggatgacttcattgctggaagaccaactacaacctacaagctccctcacagggtggatggcacaggatttgtagtgtatgatggagctttgttcttcaacaaagagcgcaccaggaacatagtaaagtttgatttgcggactaggataaagagtggagaggctatcatagcaaatgccaattaccatgatacctccccttaccgatggggaggcaaatctgacatagacctggcagtagatgagaatgggctatgggtaatctatgcaacagaacaaaacaatggtaaaattgtcattagtcaattgaacccttacaccctacggatcgaaggaacatgggatactgcatatgataaaaggtcagcttccaatgcctttatgatttgtggaattctgtatgtggtcaaatctgtatatgaggatgatgacaatgaggctactggaaataagattgactacatttacaacactgaccaaagcaaggatagtttggtggatgtaccctttcctaattcataccagtacattgcagctgtggattacaaccccagggacaacctactttatgtatggaataactatcacgtcgtgaaatattctttggattttggacctctggatagtagatcagggcaggcacatcatggacaagtttcatacatttctccgccaattcaccttgactctgagctagaaagaccctctgttaaagatatctctaccacaggacctcttggcatgggaagcactaccaccagtaccacccttcggaccacaactttgagcccaggaaggagtaccaccccgtcagtgtcaggaagaagaaaccggagtactagtaccccatctccagctgtcgaggtacttgatgacatgaccacacaccttccatcagcatcgtcccaaatcccagctctcgaagagagctgtgaggctgtggaagcccgagaaatcatgtggtttaagactcgtcaaggacagatagcaaagcagccatgccctgcaggaactataggtgtatcaacttatctatgccttgctcctgatggaatttgggatccccaaggtccagatctcagcaactgttcttctccttgggtcaatcatataacacagaagttgaaatctggtgaaacagctgccaacattgctagagagctggctgaacagacaagaaatcacttgaatgctggggacatcacctactctgtccgggccatggaccagctggtaggcctcctagatgtacagcttcggaacttgaccccaggtggaaaagatagtgctgcccggagtttgaacaagcttcagaaaagagagcgctcttgcagagcctatgtccaggcaatggtcgagacagttaacaacctccttcagccacaagctttgaatgcatggagagacctgactacgagtgatcagctgcgtgcggccaccatgttgcttcatactgtggaggaaagtgcttttgtgctggctgataaccttttgaagactgacattgtcagggagaatacagacaatattaaattggaagttgcaagactgagcacagaaggaaacttagaagacctaaaatttccagaaaacatgggccatggaagcactatccagctgtctgcaaataccttaaagcaaaatggccgaaatggagagatcagagtggcctttgtcctgtataacaacttgggtccttatttatccacggagaatgccagtatgaagttgggaacggaagctttgtccacaaatcattctgttattgtcaattcccctgttattacggcagcaataaacaaagagttcagtaacaaggtttatttggctgatcctgtggtatttactgttaaacatatcaagcagtcagaggaaaatttcaaccctaactgttcattttggagctactccaagcgtacaatgacaggttattggtcaacacaaggctgtcggctcctgacaacaaataagacacatactacatgctcttgtaaccacctaacaaattttgcagtactgatggcacatgtggaagttaagcacagtgatgcggtccatgacctccttctggatgtgatcacgtgggttggaattttgctgtcccttgtttgtctcctgatttgcatcttcacattttgctttttccgggggctccagagtgaccgtaacaccatccacaagaacctctgcatcagtctctttgtagcagagctgctcttcctgattgggatcaaccgaactgaccaaccaattgcctgtgctgttttcgctgccctgttacatttcttcttcttggctgccttcacctggatgttcctggagggggtgcagctttatatcatgctggtggaggtttttgagagtgaacattcacgtaggaaatacttttatctggtcggctatgggatgcctgcactcattgtggctgtgtcagctgcagtagactacaggagttatggaacagataaagtatgttggctccgacttgacacctacttcatttggagttttataggaccagcaactttgataattatgcttaatgtaatcttccttgggattgctttatataaaatgtttcatcatactgctatactgaaacctgaatcaggctgtcttgataacatcaactatgaggataacagacccttcatcaagtcatgggttataggtgcaatagctcttctctgcctattaggattgacctgggcctttggactcatgtatattaatgaaagcacagtcatcatggcctatctcttcaccattttcaattctctacagggaatgtttatatttattttccattgtgtcctacagaagaaggtacgaaaagagtatgggaaatgcctgcgaacacattgctgtagtggcaaaagtacagagagttccattggttcagggaaaacatctggttctcgaactcctggacgctactccacaggctcacagagccgaatccgtagaatgtggaatgacacggttcgaaagcagtcagagtcttcctttattactggagacataaacagttcagcgtcactcaacagagaggggcttctgaacaatgccagggatacaagtgtcatggatactctaccactgaatggtaaccatggcaatagttacagcattgccagcggcgaatacctgagcaactgtgtgcaaatcatagaccgtggctataaccataacgagaccgccctagagaaaaagattctgaaggaactcacttccaactatatcccttcttacctgaacaaccatgagcgctccagtgaacagaacaggaatctgatgaacaagctggtgaataaccttggcagtggaagggaagatgatgccattgtcctggatgatgccacctcgtttaaccacgaggagagtttgggcctggaactcattcatgaggaatctgatgctcctttgctgcccccaagagtatactccaccgagaaccaccagccacaccattataccagaaggcggatcccccaagaccacagtgagagctttttccctttgctaaccaacgagcacacagaagatctccagtcaccccatagagactctctctataccagcatgccgacactggctggtgtggccgccacagagagtgttaccaccagcacccagaccgaacccccaccggccaaatgtggtgatgccgaagatgtttactacaaaagcatgccaaacctaggctccagaaaccacgtccatcagctgcatacttactaccagctaggtcgcggcagcagtgatggatttatagttcctccaaacaaagatgggacccctcccgagggaagttcaaaaggaccggctcatttggtcactagtctatagaagatgacacagaaattggaaccaacaaaactgctaacaccttgttgactgttctgagttgatataagcagtggtaataatgtgtgtactcctaaatctttatgctgtcctctaaagacaaacacaaactctcagacttttttttttttaatgggatttttaggtcagcccaggggagaaagataactgctaaaattcccctgtaccccatcctttcttgtcctttccccttcagatggagacttcattatgttaatgaacaagatatgaagaaaatggcactcattgtggccttgttgaattatgttgtgtatgttttaacatctctgatgctgtgttactaaaattacaaggacctgctttttaaaaggccagaacaattgtctgaaattagtaacaatgctgcatctagattggagtgctgcacaaacaaacataagagcaaagcaaaactgtatcacatagggtttttggtcactcacaacctgaattcaccacagctggaatagctgtggaaaacaaaataaaacaacaaaattaataatgaaatggaggggaattctagaattatatgctaaatgcatattttatgatttgctgtattaactgatgataaaactaatggcagaaaaagaagttgagcaatttctatgtaatgtacagatactagcattgcacatatagtctgctttctgttcctccagaatttgagtcctgttaatgtagtagaaaaaaaaaaaagaaattttctttttcttttgtgctggtcttgcaagtttgtctaccagtaagagagcaaagtttccttcctttcttctctttcttcattttctttttttcttttttgccttttattcctttaaaatttcgcctggcaaaaaataaataaatggaactatcactttataagaatcattttctagtaatgcaaacaaattattttttacaaaaaaacaaaataaataaaattagacttccttccctcactatatatctttatgcagtcagaatatttccaacagtgttttttgcaaattagagcaggacaaacttttatgtttacagggcacgtctgttgtaatgcaaagcatatttggcaagcagttcatcaccaggacactagctatgattctagaagtcaaaaggtgtctatagaactagtggggcttctgcatgtgaaaaacggttttccataggcattaaagtgctgaatgctcagtctgatcaacaagtgggcacctgcactaccactttttagaggaaattcactccctcgtaagcattggaaggtcaaattattttgaagtgatttttttaaaaaaaagtcttctgtttattaacaggaaaatttatttatttgacaggattttgagtaatgtaggaatacaaaaggtaaattagcagcacatataatttttttttaatttatgatccattttgtatggtctcaaagttggatgacctcattactaatatttgttgtaaaagtgaaacttgtttgccaaccaataaacaactgattgagatttagaagatattgtattgatgtatgtactat

SEQ ID NO: 105574 - DNA, 12636 bp, Homo sapiens
  Payload ID: 697
  Gene Symbol: ADGRL3
  Gene Name: adhesion G protein-coupled receptor L3
  Uniprot ID: Q9HAR2
  ENST ID: ENST00000512091
  CDS Start-End: 748-4470
ttcttaagcggcggcggcagcagcagcagcaagagaaggagaagcagccccagctatgactgccgcatgttaatagctgccgctgggtccctcggctgctgctggagacagagcctgactccgaagttgtgcaactgtggactgggagagacatttgaaccctcttttcttttcgctccccttttgcccccttggggtgtgtgaagcgaggaacgtaaaggaaggcgaacatttggctctctttttccttcccctttctccgtggctgtgtagcggaagaaagggaagagagactttttgttgttgtttccttgactggggtctccaccctcctgctgctttctctgcgcttcgattctcgttatttgccgcgtgtggttgggggtgtctgcacaggggccggccggtcttttgccccgggctcaatggctggattgtggaaactgcacccgccttcaggttgttgagcaactgatgggacgatctcagggaccggcgtttacgaaagaaatgtttaatttggtaaattggaggaaaaaaacatggatttttagcaattgaagagcaaattaaggtttcagatttgggatattggtgtttctgttttggagaaattattctttttctttttaatttgaagaaaaatcatcagtcttggaatacagaagagaaactagaaatatacgtattttgtttcacatttgaacagtcattcttgaggaatactccatacctgagtagacagccatgtggccatcgcagctactaattttcatgatgctcttagctccaataattcatgctttcagccgtgccccaattccaatggctgtggtccgcagagagctatcctgtgagagctatcctatagagcttcgctgtccaggaacagacgtcatcatgatagaaagtgccaactatggcaggactgatgacaaaatttgtgactctgaccctgctcagatggagaatatccgatgttatctgccagatgcctataagattatgtctcaaagatgcaataacagaacccagtgtgcagtggtggcaggtcctgatgtttttccagacccgtgtccaggaacctataaataccttgaagtgcagtatgaatgtgtcccttacaaagtggaacaaaaagtttttctttgtcctggactactaaaaggagtataccagagtgaacatttgtttgagtccgaccaccaatctggggcgtggtgcaaagaccctctgcaggcatctgacaagatttattatatgccctggactccctacagaactgataccctgactgagtattcatccaaggatgacttcattgctggaagaccaactacaacctacaagctccctcacagggtggatggcacaggatttgtagtgtatgatggagctttgttcttcaacaaagagcgcaccaggaacatagtaaagtttgatttgcggactaggataaagagtggagaggctatcatagcaaatgccaattaccatgatacctccccttaccgatggggaggcaaatctgacatagacctggcagtagatgagaatgggctatgggtaatctatgcaacagaacaaaacaatggtaaaattgtcattagtcaattgaacccttacaccctacggatcgaaggaacatgggatactgcatatgataaaaggtcagcttccaatgcctttatgatttgtggaattctgtatgtggtcaaatctgtatatgaggatgatgacaatgaggctactggaaataagattgactacatttacaacactgaccaaagcaaggatagtttggtggatgtaccctttcctaattcataccagtacattgcagctgtggattacaaccccagggacaacctactttatgtatggaataactatcacgtcgtgaaatattctttggattttggacctctggatagtagatcagggcaggcacatcatggacaagtttcatacatttctccgccaattcaccttgactctgagctagaaagaccctctgttaaagatatctctaccacaggacctcttggcatgggaagcactaccaccagtaccacccttcggaccacaactttgagcccaggaaggagtaccaccccgtcagtgtcaggaagaagaaaccggagtactagtaccccatctccagctgtcgaggtacttgatgacatgaccacacaccttccatcagcatcgtcccaaatcccagctctcgaagagagctgtgaggctgtggaagcccgagaaatcatgtggtttaagactcgtcaaggacagatagcaaagcagccatgccctgcaggaactataggtgtatcaacttatctatgccttgctcctgatggaatttgggatccccaaggtccagatctcagcaactgttcttctccttgggtcaatcatataacacagaagttgaaatctggtgaaacagctgccaacattgctagagagctggctgaacagacaagaaatcacttgaatgctggggacatcacctactctgtccgggccatggaccagctggtaggcctcctagatgtacagcttcggaacttgaccccaggtggaaaagatagtgctgcccggagtttgaacaagcttcagaaaagagagcgctcttgcagagcctatgtccaggcaatggtcgagacagttaacaacctccttcagccacaagctttgaatgcatggagagacctgactacgagtgatcagctgcgtgcggccaccatgttgcttcatactgtggaggaaagtgcttttgtgctggctgataaccttttgaagactgacattgtcagggagaatacagacaatattaaattggaagttgcaagactgagcacagaaggaaacttagaagacctaaaatttccagaaaacatgggccatggaagcactatccagctgtctgcaaataccttaaagcaaaatggccgaaatggagagatcagagtggcctttgtcctgtataacaacttgggtccttatttatccacggagaatgccagtatgaagttgggaacggaagctttgtccacaaatcattctgttattgtcaattcccctgttattacggcagcaataaacaaagagttcagtaacaaggtttatttggctgatcctgtggtatttactgttaaacatatcaagcagtcagaggaaaatttcaaccctaactgttcattttggagctactccaagcgtacaatgacaggttattggtcaacacaaggctgtcggctcctgacaacaaataagacacatactacatgctcttgtaaccacctaacaaattttgcagtactgatggcacatgtggaagttaagcacagtgatgcggtccatgacctccttctggatgtgatcacgtgggttggaattttgctgtcccttgtttgtctcctgatttgcatcttcacattttgctttttccgggggctccagagtgaccgtaacaccatccacaagaacctctgcatcagtctctttgtagcagagctgctcttcctgattgggatcaaccgaactgaccaaccaattgcctgtgctgttttcgctgccctgttacatttcttcttcttggctgccttcacctggatgttcctggagggggtgcagctttatatcatgctggtggaggtttttgagagtgaacattcacgtaggaaatacttttatctggtcggctatgggatgcctgcactcattgtggctgtgtcagctgcagtagactacaggagttatggaacagataaagtatgttggctccgacttgacacctacttcatttggagttttataggaccagcaactttgataattatgcttaatgtaatcttccttgggattgctttatataaaatgtttcatcatactgctatactgaaacctgaatcaggctgtcttgataacatcaactatgaggataacagacccttcatcaagtcatgggttataggtgcaatagctcttctctgcctattaggattgacctgggcctttggactcatgtatattaatgaaagcacagtcatcatggcctatctcttcaccattttcaattctctacagggaatgtttatatttattttccattgtgtcctacagaagaaggtacgaaaagagtatgggaaatgcctgcgaacacattgctgtagtggcaaaagtacagagagttccattggttcagggaaaacatctggttctcgaactcctggacgctactccacaggctcacagagccgaatccgtagaatgtggaatgacacggttcgaaagcagtcagagtcttcctttattactggagacataaacagttcagcgtcactcaacagagagccctacagagagacaagtatgggagtaaagctaaacattgcatatcaaataggggcttctgaacaatgccagggatacaagtgtcatggatactctaccactgaatggtaaccatggcaatagttacagcattgccagcggcgaatacctgagcaactgtgtgcaaatcatagaccgtggctataaccataacgagaccgccctagagaaaaagattctgaaggaactcacttccaactatatcccttcttacctgaacaaccatgagcgctccagtgaacagaacaggaatctgatgaacaagctggtgaataaccttggcagtggaagggaagatgatgccattgtcctggatgatgccacctcgtttaaccacgaggagagtttgggcctggaactcattcatgaggaatctgatgctcctttgctgcccccaagagtatactccaccgagaaccaccagccacaccattataccagaaggcggatcccccaagaccacagtgagagctttttccctttgctaaccaacgagcacacagaagatctccagtcaccccatagagactctctctataccagcatgccgacactggctggtgtggccgccacagagagtgttaccaccagcacccagaccgaacccccaccggccaaatgtggtgatgccgaagatgtttactacaaaagcatgccaaacctaggctccagaaaccacgtccatcagctgcatacttactaccagctaggtcgcggcagcagtgatggatttatagttcctccaaacaaagatgggacccctcccgagggaagttcaaaaggaccggctcatttggtcactagtctatagaagatgacacagaaattggaaccaacaaaactgctaacaccttgttgactgttctgagttgatataagcagtggtaataatgtgtgtactcctaaatctttatgctgtcctctaaagacaaacacaaactctcagacttttttttttttaatgggatttttaggtcagcccaggggagaaagataactgctaaaattcccctgtaccccatcctttcttgtcctttccccttcagatggagacttcattatgttaatgaacaagatatgaagaaaatggcactcattgtggccttgttgaattatgttgtgtatgttttaacatctctgatgctgtgttactaaaattacaaggacctgctttttaaaaggccagaacaattgtctgaaattagtaacaatgctgcatctagattggagtgctgcacaaacaaacataagagcaaagcaaaactgtatcacatagggtttttggtcactcacaacctgaattcaccacagctggaatagctgtggaaaacaaaataaaacaacaaaattaataatgaaatggaggggaattctagaattatatgctaaatgcatattttatgatttgctgtattaactgatgataaaactaatggcagaaaaagaagttgagcaatttctatgtaatgtacagatactagcattgcacatatagtctgctttctgttcctccagaatttgagtcctgttaatgtagtagaaaaaaaaaaaagaaattttctttttcttttgtgctggtcttgcaagtttgtctaccagtaagagagcaaagtttccttcctttcttctctttcttcattttctttttttcttttttgccttttattcctttaaaatttcgcctggcaaaaaataaataaatggaactatcactttataagaatcattttctagtaatgcaaacaaattattttttacaaaaaaacaaaataaataaaattagacttccttccctcactatatatctttatgcagtcagaatatttccaacagtgttttttgcaaattagagcaggacaaacttttatgtttacagggcacgtctgttgtaatgcaaagcatatttggcaagcagttcatcaccaggacactagctatgattctagaagtcaaaaggtgtctatagaactagtggggcttctgcatgtgaaaaacggttttccataggcattaaagtgctgaatgctcagtctgatcaacaagtgggcacctgcactaccactttttagaggaaattcactccctcgtaagcattggaaggtcaaattattttgaagtgatttttttaaaaaaaagtcttctgtttattaacaggaaaatttatttatttgacaggattttgagtaatgtaggaatacaaaaggtaaattagcagcacatataatttttttttaatttatgatccattttgtatggtctcaaagttggatgacctcattactaatatttgttgtaaaagtgaaacttgtttgccaaccaataaacaactgattgagatttagaagatattgtattgatgtatgtactatatgattaatcagtctttttatttttctcgcctttctttctttctgttttcaatacataaactttgctaatcctctgtggcccaaatgagccatgcaaaagaaatcaatctgcctagatgaataagctaagcacaaaatcatacaggtttgcagacaaagtaaaccagaaaaatggaatgggcatgtttattttggatgaaatcagatgcataacttaatgttgagcaggttaacatatatgttactatttgcttatctataaaccagctgcagtcactatgcttacctttaaaaccagattcaatcagagatataaatatgaaatttgggggctgggtgagtcatattttttcctcctttgtacattgcattttgatgttagaaattcaaattccctcaatttgctaaaagctgcaaagagaatattcattttataaagatataataagacttttattgtgtttttttcttattctatatatgagggaaatcggaaaagataaagaagttctttcaaagaaactttctagatctctcattactgcagatcctttatagcagtgtccaagtacagatcccctgttagggcaaagctaaaaggaacctgccaaattataatttctcctgtagtgtgttttatctcggggtttcctttttcaaaaatctaaacactatccatctataaatgactatcttaaatcaagtttagagaatggccaataatctgtatatagtttataaatacatgacaaaaaaatttctgctgagccagagtgcatcataaccttcacatcacctcaaaatattttatgtctcattcttttttagtgaattggcatgaatattttttaagtctacagattttatgttagaggagaatcacaagcgttaatgataattaggttttctcacaccacactatggcaatattagcacgtccaaggcttttaacccacccgatacatagaatacatttggcaataaaagaatcctttttagatgtgtttatggtaacttcagaaacacaaatgtggtctgtggattatgagcacttatgcttgttttgtcaaacagtaacctacatgaaagcaactctatcagtaagaagctggtttcacagaaaaatggggaaactacctcaattcagcttgctgattttctgacattgctacctccctgcccattatttttgtgtttctatatggaaatttgaagcaggtagcttctcaagctctacatagaccaaactgaagaaagatcacttgaatacacaaactggtgcagaagaacattcagcatataaagttactaccaagctcttgcatcaagaaaaaagagtgagatttttgaactctatacatcataaatggcatgctttcagagagacttaagatcccaaagattataacagagagaaatttcccctgcaagtattatgtaaccgtaattaaaaaaaatggataaaggagctaattttacatacatttcaatagaaatttgcatatatctaacatattcattttgtcctgtttacactagcaagggttgaattcctgaacttgaatctttttcttcatatacattttcttatagagctattgatgaattaattaatgattttttaattgttcttttttctaccaccttttgtgactcaattttttaagatcctgagacatttatgacctgcttatctgtatatttttatgtgttcatctgaatttccagtaagaagtaaatttccgtcaaacagatgtagtataccgctataatacagcttatttagccagctagaagtaaaacttatgccaccgaaacaaacaaatgattactttcttgtcaaataatatttttgtcacatttttagacttggttgtttttcctctttgaaatctagttcacatgacactttatcagggacactagctaatggacctcatgtttagttaattctgaaactgatggattgttgcacagcctctgctcctaactgataaatatttgcggcaaagtccaaattttgtgaaggagaaattggttggaattaaattttatgggcgtcccttcttgtttccactatattataattaaacacactgaagttgaataataaattactgtgctaaaataattgtaataacaaaaatgaactgacagaacaattatcttgaagtaacaataatcaggaaaatatctaacaaaaagcacgtaagggaaatatccttaacttcctgtaaaaaaaattcacattgactctaaattaagatgtagtttatcatctgtattttaaaatatccatcataactaaaaatgttgacatattaaggaaaggatctttaagatctaggtttaagattcttattagtattaacttaattggtatgacaaaacttttcataatagatataagcatataagggaattagtaacatttataaaggacccacatatttaattttaggcattgtcttcagcttccctggacccccaacacatgttgaaatgttattgactagcttgctttttttaaggaatgacattaaaaatttcgactgactttctacattactgtaaagatcaaaagggagaggaaaaatagtttacaagttttctaaagatcaactccagactaatctatatcatcccctaataatgaaaaaacaattagtttttagaagttgtctatcagtactgtaccgaagtgctactgcttggatttttttgttgtggttttaaagagatggggtcttgctctgtcacaaagactgaagggcagtggcacaatcccagctcactgcagcctcagactcttgggctcaagtgatcctgctgtctcagccttctgcgtagccatgatcacaggtttgagccacagcacttggcctgtgatgtattgcagagggaaaaaaaccaacactacagaagtataatgcatgtcaattcagatttagagagtgtaaaaaacaaaaacccaaagtccaactatttagttttgagcaaatctgaagatattggcatgaatatcctttcttctctaagaaaatttttgagataacaatatatatgaagttcccagtacattgtagaccaaggtgttaaaatttaattagttcatttttagtaattcataattttaacttaccacataaacaattactatgcatttctaagtaacgttttcaatatagcttatattagatttctgcacatcattaaattacgaagatggcacaaaagcaaagcagcaacattgcacaatagcttatggaagcatttttgtgcgaatggattttacataagaagcttttctgagctcataaaatatattcaatggatcccaacattaaatttaactttgcaatcagcaaatatgttctttataacatcttaaaaatattaaacaattaaattttcatttgtaggctagcagaacttaaatgtgttggtagttgcttctttcctgattaggccataagaagaaactttcctatttactaattaacactgattacactctctttggtttaaaagggaaactttcacctgtacacatacacactctgattccatttatttacagcctgcagaagaagtagcttgtttacgatatttaaaactttgtgatttctgcaataaaacaggtagttaatatagtttcgcataatctcattgaaagatattgctattccttctttatttaaaaaaaaatttaaaagtcagcacttctttcacatctagcacctataagttactattcaaatgtcttgatttcagctaagttttgatgtttctttttctcttaatagtatgtcaaaagcattgttctcatttgataatttgtgtcccgttacagtatttcaaaggtaaatgcaaactaatttttaggaaggcttgtgaaagaactttgatttatgtgaagaaatcaagaaagactatacatgaacaaatctctattgggataaacaagtctcttcaaccacaatatgaacaacggaagagcagaaaccaaacaagttagcaaacttatggtaaggtgacaggacctaaactagagttacagagaaaagttttccaggaaagaataatgaagtcatttgtagtgataaaaatcttatacactacaccaaatgttacagatgtattccgaaaagtaaaatgggagtttcctatattctgatttcattctgctaattccacgggaaacattaaatactttaaacactcttgagatatttcgtatctagctataccttgtctcaaggaaacatcaatattttataaatgtttcttaaatataagtattttgtctgaattcatcttcactctctaatctgctggctctattgaacaccaacagagttaatgcttttagtagctttgtaccttttaaagctctattatgaatctttctaatacatatgaaattaatattatattagaattatgtacattatacaaaataattcataaccaagaaatattcatactatagaataatttattattatatatatgaatattacattgagactgaacaaataaccactctgctccaaatattactctcaagttctctgcctttaattattatagtcaattcataaaattctacatacagttgtacatggtgggttatcaaagtactccataatccaaatgcatctaaaagtattccaaatgcgcctttcattctagaatactaaaggaaagcgtttgaaagaagaggaaagtaaagcagacttctaactatttaatttaaacattgccattcagattgaataatttttaaatgatgatgctccactctttgatctacagacaaggttacaaaagatttacaattagtccaaaatcagaggattttaaatcttaaaggagttaagtttgtctcaatgatccaagactacaaaatttcttgctacattggcaaggaaatatgtttaaagccgagaactaaaatagctttttaaaatttaaaaattcctctgtttcttctgaatgtaaaacaggcaaaatgatcctgacttcaaaatgaaatatattgattgctctcaaaagatgtttgacaaagttaagtcagtatcttcaatgctttaacagtaggtagaggtctttggggttggaactcaggatacagtgactaggacagagtgcattcttaggctaattagtgcctagtcctctggagtattttttaatgccctgaatttcaagttgtcaaactggtttacatattgaatgacattttgaatcaataaaaatgagaaaaaaacatttaaatttggttttcatgactcatttgagaataaagatttccttcatcaccctaagtaataaaagctgatatgtcttgaaacaactatagacaatcagaatgtgttcatttataaagtatcactggtttgtatattttaatgctgacctttgcctgtgaactagaaaatcaagatttgtagagtcaggttgatttgccttcatttaattcctgcaaatgcattggaagtggatggataacttggaactttttccatactgttttccccctcaccaagcattaaatctaattcaaaatatgtctttctaaaaaacaatagtttatttttaaaactaacaactaattgtgttattccttgttgataagaaagtcactttttagaaacaagaatatagctattgtggctttggtcgcttaggattctcatatatttacacatggcattattcttttcatatacacctaccagatttcaagctattggatatttcccttgtacaacctttacatcctttttttttccttaaatgctctgtacaatcacatgtaaagtcatgagctacaaacctcaataaaaatatcagtaaacaagaa

SEQ ID NO: 105575 - DNA, 4816 bp, Homo sapiens
  Payload ID: 697
  Gene Symbol: ADGRL3
  Gene Name: adhesion G protein-coupled receptor L3
  ENST ID: ENST00000504896
  CDS Start-End: 96-3947
tcttggaatacagaagagaaactagaaatatacgtattttgtttcacatttgaacagtcattcttgaggaatactccatacctgagtagacagccatgtggccatcgcagctactaattttcatgatgctcttagctccaataattcatgctttcagccgtgccccaattccaatggctgtggtccgcagagagctatcctgtgagagctatcctatagagcttcgctgtccaggaacagacgtcatcatgatagaaagtgccaactatggcaggactgatgacaaaatttgtgactctgaccctgctcagatggagaatatccgatgttatctgccagatgcctataagattatgtctcaaagatgcaataacagaacccagtgtgcagtggtggcaggtcctgatgtttttccagacccgtgtccaggaacctataaataccttgaagtgcagtatgaatgtgtcccttacaaagtggaacaaaaagtttttctttgtcctggactactaaaaggagtataccagagtgaacatttgtttgagtccgaccaccaatctggggcgtggtgcaaagaccctctgcaggcatctgacaagatttattatatgccctggactccctacagaactgataccctgactgagtattcatccaaggatgacttcattgctggaagaccaactacaacctacaagctccctcacagggtggatggcacaggatttgtagtgtatgatggagctttgttcttcaacaaagagcgcaccaggaacatagtaaagtttgatttgcggactaggataaagagtggagaggctatcatagcaaatgccaattaccatgatacctccccttaccgatggggaggcaaatctgacatagacctggcagtagatgagaatgggctatgggtaatctatgcaacagaacaaaacaatggtaaaattgtcattagtcaattgaacccttacaccctacggatcgaaggaacatgggatactgcatatgataaaaggtcagcttccaatgcctttatgatttgtggaattctgtatgtggtcaaatctgtatatgaggatgatgacaatgaggctactggaaataagattgactacatttacaacactgaccaaagcaaggatagtttggtggatgtaccctttcctaattcataccagtacattgcagctgtggattacaaccccagggacaacctactttatgtatggaataactatcacgtcgtgaaatattctttggattttggacctctggatagtagatcagggcaggcacatcatggacaagtttcatacatttctccgccaattcaccttgactctgagctagaaagaccctctgttaaagatatctctaccacaggacctcttggcatgggaagcactaccaccagtaccacccttcggaccacaactttgagcccaggaaggagtaccaccccgtcagtgtcaggaagaagaaaccggagtactagtaccccatctccagctgtcgaggtacttgatgacatgaccacacaccttccatcagcatcgtcccaaatcccagctctcgaagagagctgtgaggctgtggaagcccgagaaatcatgtggtttaagactcgtcaaggacagatagcaaagcagccatgccctgcaggaactataggtgtatcaacttatctatgccttgctcctgatggaatttgggatccccaaggtccagatctcagcaactgttcttctccttgggtcaatcatataacacagaagttgaaatctggtgaaacagctgccaacattgctagagagctggctgaacagacaagaaatcacttgaatgctggggacatcacctactctgtccgggccatggaccagctggtaggcctcctagatgtacagcttcggaacttgaccccaggtggaaaagatagtgctgcccggagtttgaacaagcttcagaaaagagagcgctcttgcagagcctatgtccaggcaatggtcgagacagttaacaacctccttcagccacaagctttgaatgcatggagagacctgactacgagtgatcagctgcgtgcggccaccatgttgcttcatactgtggaggaaagtgcttttgtgctggctgataaccttttgaagactgacattgtcagggagaatacagacaatattaaattggaagttgcaagactgagcacagaaggaaacttagaagacctaaaatttccagaaaacatgggccatggaagcactatccagctgtctgcaaataccttaaagcaaaatggccgaaatggagagatcagagtggcctttgtcctgtataacaacttgggtccttatttatccacggagaatgccagtatgaagttgggaacggaagctttgtccacaaatcattctgttattgtcaattcccctgttattacggcagcaataaacaaagagttcagtaacaaggtttatttggctgatcctgtggtatttactgttaaacatatcaagcagtcagaggaaaatttcaaccctaactgttcattttggagctactccaagcgtacaatgacaggttattggtcaacacaaggctgtcggctcctgacaacaaataagacacatactacatgctcttgtaaccacctaacaaattttgcagtactgatggcacatgtggaagttaagcacagtgatgcggtccatgacctccttctggatgtgatcacgtgggttggaattttgctgtcccttgtttgtctcctgatttgcatcttcacattttgctttttccgggggctccagagtgaccgtaacaccatccacaagaacctctgcatcagtctctttgtagcagagctgctcttcctgattgggatcaaccgaactgaccaaccaattgcctgtgctgttttcgctgccctgttacatttcttcttcttggctgccttcacctggatgttcctggagggggtgcagctttatatcatgctggtggaggtttttgagagtgaacattcacgtaggaaatacttttatctggtcggctatgggatgcctgcactcattgtggctgtgtcagctgcagtagactacaggagttatggaacagataaagtatgttggctccgacttgacacctacttcatttggagttttataggaccagcaactttgataattatgcttaatgtaatcttccttgggattgctttatataaaatgtttcatcatactgctatactgaaacctgaatcaggctgtcttgataacatcaactatgaggataacagacccttcatcaagtcatgggttataggtgcaatagctcttctctgcctattaggattgacctgggcctttggactcatgtatattaatgaaagcacagtcatcatggcctatctcttcaccattttcaattctctacagggaatgtttatatttattttccattgtgtcctacagaagaaggtacgaaaagagtatgggaaatgcctgcgaacacattgctgtagtggcaaaagtacagagagttccattggttcagggaaaacatctggttctcgaactcctggacgctactccacaggctcacagagccgaatccgtagaatgtggaatgacacggttcgaaagcagtcagagtcttcctttattactggagacataaacagttcagcgtcactcaacagaggagccatggctaatcatcttataagcaatgctctgcttcgtccgcatggtactaacaatccctataatacattgcttggggaaccggcggtctgtaacaacccttctgtcagcatgtacaacgcacaagagccctacagagagacaagtatgggagtaaagctaaacattgcatatcaaataggggcttctgaacaatgccagggatacaagtgtcatggatactctaccactgaatggtaaccatggcaatagttacagcattgccagcggcgaatacctgagcaactgtgtgcaaatcatagaccgtggctataaccataacgagaccgccctagagaaaaagattctgaaggaactcacttccaactatatcccttcttacctgaacaaccatgagcgctccagtgaacagaacaggaatctgatgaacaagctggtgaataaccttggcagtggaagggaagatgatgccattgtcctggatgatgccacctcgtttaaccacgaggagagtttgggcctggaactcattcatgaggaatctgatgctcctttgctgcccccaagagtatactccaccgagaaccaccagccacaccattataccagaaggcggatcccccaagaccacagtgagagctttttccctttgctaaccaacgagcacacagaagatctccagtcaccccatagagactctctctataccagcatgccgacactggctggtgtggccgccacagagagtgttaccaccagcacccagaccgaacccccaccggccaaatgtggtgatgccgaagatgtttactacaaaagcatgccaaacctaggctccagaaaccacgtccatcagctgcatacttactaccagctaggtcgcggcagcagtgatggatttatagttcctccaaacaaagatgggacccctcccgagggaagttcaaaaggaccggctcatttggtcactagtctatagaagatgacacagaaattggaaccaacaaaactgctaacaccttgttgactgttctgagttgatataagcagtggtaataatgtgtgtactcctaaatctttatgctgtcctctaaagacaaacacaaact

SEQ ID NO: 105576 - DNA, 5069 bp, Homo sapiens
  Payload ID: 697
  Gene Symbol: ADGRL3
  Gene Name: adhesion G protein-coupled receptor L3
  ENST ID: ENST00000509896
  CDS Start-End: 174-4100
gtttcagatttgggatattggtgtttctgttttggagaaattattctttttctttttaatttgaagaaaaatcatcagtcttggaatacagaagagaaactagaaatatacgtattttgtttcacatttgaacagtcattcttgaggaatactccatacctgagtagacagccatgtggccatcgcagctactaattttcatgatgctcttagctccaataattcatggtggcaagcacagtgaacgacatcctgcccttgctgctccattgcgacacgctgagcgcagcccaggaggcgctcttccacccagacatctgcttcagcagccagctgcagagcgcaccgctgctcatcgtggacaagggccccgtggagctaccagaggagttcgcggtccaggtgcccaaggagcacagattgcagcgcaagctttcagccgtgccccaattccaatggctgtggtccgcagagagctatcctgtgagagctatcctatagagcttcgctgtccaggaacagacgtcatcatgatagaaagtgccaactatggcaggactgatgacaaaatttgtgactctgaccctgctcagatggagaatatccgatgttatctgccagatgcctataagattatgtctcaaagatgcaataacagaacccagtgtgcagtggtggcaggtcctgatgtttttccagacccgtgtccaggaacctataaataccttgaagtgcagtatgaatgtgtcccttacaaagtggaacaaaaagtttttctttgtcctggactactaaaaggagtataccagagtgaacatttgtttgagtccgaccaccaatctggggcgtggtgcaaagaccctctgcaggcatctgacaagatttattatatgccctggactccctacagaactgataccctgactgagtattcatccaaggatgacttcattgctggaagaccaactacaacctacaagctccctcacagggtggatggcacaggatttgtagtgtatgatggagctttgttcttcaacaaagagcgcaccaggaacatagtaaagtttgatttgcggactaggataaagagtggagaggctatcatagcaaatgccaattaccatgatacctccccttaccgatggggaggcaaatctgacatagacctggcagtagatgagaatgggctatgggtaatctatgcaacagaacaaaacaatggtaaaattgtcattagtcaattgaacccttacaccctacggatcgaaggaacatgggatactgcatatgataaaaggtcagcttccaatgcctttatgatttgtggaattctgtatgtggtcaaatctgtatatgaggatgatgacaatgaggctactggaaataagattgactacatttacaacactgaccaaagcaaggatagtttggtggatgtaccctttcctaattcataccagtacattgcagctgtggattacaaccccagggacaacctactttatgtatggaataactatcacgtcgtgaaatattctttggattttggacctctggatagtagatcagggcaggcacatcatggacaagtttcatacatttctccgccaattcaccttgactctgagctagaaagaccctctgttaaagatatctctaccacaggacctcttggcatgggaagcactaccaccagtaccacccttcggaccacaactttgagcccaggaaggagtaccaccccgtcagtgtcaggaagaagaaaccggagtactagtaccccatctccagctgtcgaggtacttgatgacatgaccacacaccttccatcagcatcgtcccaaatcccagctctcgaagagagctgtgaggctgtggaagcccgagaaatcatgtggtttaagactcgtcaaggacagatagcaaagcagccatgccctgcaggaactataggtgtatcaacttatctatgccttgctcctgatggaatttgggatccccaaggtccagatctcagcaactgttcttctccttgggtcaatcatataacacagaagttgaaatctggtgaaacagctgccaacattgctagagagctggctgaacagacaagaaatcacttgaatgctggggacatcacctactctgtccgggccatggaccagctggtaggcctcctagatgtacagcttcggaacttgaccccaggtggaaaagatagtgctgcccggagtttgaacaagcttcagaaaagagagcgctcttgcagagcctatgtccaggcaatggtcgagacagttaacaacctccttcagccacaagctttgaatgcatggagagacctgactacgagtgatcagctgcgtgcggccaccatgttgcttcatactgtggaggaaagtgcttttgtgctggctgataaccttttgaagactgacattgtcagggagaatacagacaatattaaattggaagttgcaagactgagcacagaaggaaacttagaagacctaaaatttccagaaaacatgggccatggaagcactatccagctgtctgcaaataccttaaagcaaaatggccgaaatggagagatcagagtggcctttgtcctgtataacaacttgggtccttatttatccacggagaatgccagtatgaagttgggaacggaagctttgtccacaaatcattctgttattgtcaattcccctgttattacggcagcaataaacaaagagttcagtaacaaggtttatttggctgatcctgtggtatttactgttaaacatatcaagcagtcagaggaaaatttcaaccctaactgttcattttggagctactccaagcgtacaatgacaggttattggtcaacacaaggctgtcggctcctgacaacaaataagacacatactacatgctcttgtaaccacctaacaaattttgcagtactgatggcacatgtggaagttaagcacagtgatgcggtccatgacctccttctggatgtgatcacgtgggttggaattttgctgtcccttgtttgtctcctgatttgcatcttcacattttgctttttccgggggctccagagtgaccgtaacaccatccacaagaacctctgcatcagtctctttgtagcagagctgctcttcctgattgggatcaaccgaactgaccaaccaattgcctgtgctgttttcgctgccctgttacatttcttcttcttggctgccttcacctggatgttcctggagggggtgcagctttatatcatgctggtggaggtttttgagagtgaacattcacgtaggaaatacttttatctggtcggctatgggatgcctgcactcattgtggctgtgtcagctgcagtagactacaggagttatggaacagataaagtatgttggctccgacttgacacctacttcatttggagttttataggaccagcaactttgataattatgcttaatgtaatcttccttgggattgctttatataaaatgtttcatcatactgctatactgaaacctgaatcaggctgtcttgataacatcaactatgaggataacagacccttcatcaagtcatgggttataggtgcaatagctcttctctgcctattaggattgacctgggcctttggactcatgtatattaatgaaagcacagtcatcatggcctatctcttcaccattttcaattctctacagggaatgtttatatttattttccattgtgtcctacagaagaaggtacgaaaagagtatgggaaatgcctgcgaacacattgctgtagtggcaaaagtacagagagttccattggttcagggaaaacatctggttctcgaactcctggacgctactccacaggctcacagagccgaatccgtagaatgtggaatgacacggttcgaaagcagtcagagtcttcctttattactggagacataaacagttcagcgtcactcaacagagagccctacagagagacaagtatgggagtaaagctaaacattgcatatcaaataggggcttctgaacaatgccagggatacaagtgtcatggatactctaccactgaatggtaaccatggcaatagttacagcattgccagcggcgaatacctgagcaactgtgtgcaaatcatagaccgtggctataaccataacgagaccgccctagagaaaaagattctgaaggaactcacttccaactatatcccttcttacctgaacaaccatgagcgctccagtgaacagaacaggaatctgatgaacaagctggtgaataaccttggcagtggaagggaagatgatgccattgtcctggatgatgccacctcgtttaaccacgaggagagtttgggcctggaactcattcatgaggaatctgatgctcctttgctgcccccaagagtatactccaccgagaaccaccagccacaccattataccagaaggcggatcccccaagaccacagtgagagctttttccctttgctaaccaacgagcacacagaagatctccagtcaccccatagagactctctctataccagcatgccgacactggctggtgtggccgccacagagagtgttaccaccagcacccagaccgaacccccaccggccaaatgtggtgatgccgaagatgtttactacaaaagcatgccaaacctaggctccagaaaccacgtccatcagctgcatacttactaccagctaggtcgcggcagcagtgatggatttatagttcctccaaacaaagatgggacccctcccgagggaagttcaaaaggaccggctcatttggtcactagtctatagaagatgacacagaaattggaaccaacaaaactgctaacaccttgttgactgttctgagttgatataagcagtggtaataatgtgtgtactcctaaatctttatgctgtcctctaaagacaaacacaaactctcagacttttttttttttaatgggatttttaggtcagcccaggggagaaagataactgctaaaattcccctgtaccccatcctttcttgtcctttcccc

SEQ ID NO: 105577 - DNA, 5009 bp, Homo sapiens
  Payload ID: 697
  Gene Symbol: ADGRL3
  Gene Name: adhesion G protein-coupled receptor L3
  ENST ID: ENST00000508693
  CDS Start-End: 130-4185
tctttttctttttaatttgaagaaaaatcatcagtcttggaatacagaagagaaactagaaatatacgtattttgtttcacatttgaacagtcattcttgaggaatactccatacctgagtagacagccatgtggccatcgcagctactaattttcatgatgctcttagctccaataattcatggtggcaagcacagtgaacgacatcctgcccttgctgctccattgcgacacgctgagcgcagcccaggaggcgctcttccacccagacatctgcttcagcagccagctgcagagcgcaccgctgctcatcgtggacaagggccccgtggagctaccagaggagttcgcggtccaggtgcccaaggagcacagattgcagcgcaagctttcagccgtgccccaattccaatggctgtggtccgcagagagctatcctgtgagagctatcctatagagcttcgctgtccaggaacagacgtcatcatgatagaaagtgccaactatggcaggactgatgacaaaatttgtgactctgaccctgctcagatggagaatatccgatgttatctgccagatgcctataagattatgtctcaaagatgcaataacagaacccagtgtgcagtggtggcaggtcctgatgtttttccagacccgtgtccaggaacctataaataccttgaagtgcagtatgaatgtgtcccttacaaagtggaacaaaaagtttttctttgtcctggactactaaaaggagtataccagagtgaacatttgtttgagtccgaccaccaatctggggcgtggtgcaaagaccctctgcaggcatctgacaagatttattatatgccctggactccctacagaactgataccctgactgagtattcatccaaggatgacttcattgctggaagaccaactacaacctacaagctccctcacagggtggatggcacaggatttgtagtgtatgatggagctttgttcttcaacaaagagcgcaccaggaacatagtaaagtttgatttgcggactaggataaagagtggagaggctatcatagcaaatgccaattaccatgatacctccccttaccgatggggaggcaaatctgacatagacctggcagtagatgagaatgggctatgggtaatctatgcaacagaacaaaacaatggtaaaattgtcattagtcaattgaacccttacaccctacggatcgaaggaacatgggatactgcatatgataaaaggtcagcttccaatgcctttatgatttgtggaattctgtatgtggtcaaatctgtatatgaggatgatgacaatgaggctactggaaataagattgactacatttacaacactgaccaaagcaaggatagtttggtggatgtaccctttcctaattcataccagtacattgcagctgtggattacaaccccagggacaacctactttatgtatggaataactatcacgtcgtgaaatattctttggattttggacctctggatagtagatcagggcaggcacatcatggacaagtttcatacatttctccgccaattcaccttgactctgagctagaaagaccctctgttaaagatatctctaccacaggacctcttggcatgggaagcactaccaccagtaccacccttcggaccacaactttgagcccaggaaggagtaccaccccgtcagtgtcaggaagaagaaaccggagtactagtaccccatctccagctgtcgaggtacttgatgacatgaccacacaccttccatcagcatcgtcccaaatcccagctctcgaagagagctgtgaggctgtggaagcccgagaaatcatgtggtttaagactcgtcaaggacagatagcaaagcagccatgccctgcaggaactataggtgtatcaacttatctatgccttgctcctgatggaatttgggatccccaaggtccagatctcagcaactgttcttctccttgggtcaatcatataacacagaagttgaaatctggtgaaacagctgccaacattgctagagagctggctgaacagacaagaaatcacttgaatgctggggacatcacctactctgtccgggccatggaccagctggtaggcctcctagatgtacagcttcggaacttgaccccaggtggaaaagatagtgctgcccggagtttgaacaagcttcagaaaagagagcgctcttgcagagcctatgtccaggcaatggtcgagacagttaacaacctccttcagccacaagctttgaatgcatggagagacctgactacgagtgatcagctgcgtgcggccaccatgttgcttcatactgtggaggaaagtgcttttgtgctggctgataaccttttgaagactgacattgtcagggagaatacagacaatattaaattggaagttgcaagactgagcacagaaggaaacttagaagacctaaaatttccagaaaacatgggccatggaagcactatccagctgtctgcaaataccttaaagcaaaatggccgaaatggagagatcagagtggcctttgtcctgtataacaacttgggtccttatttatccacggagaatgccagtatgaagttgggaacggaagctttgtccacaaatcattctgttattgtcaattcccctgttattacggcagcaataaacaaagagttcagtaacaaggtttatttggctgatcctgtggtatttactgttaaacatatcaagcagtcagaggaaaatttcaaccctaactgttcattttggagctactccaagcgtacaatgacaggttattggtcaacacaaggctgtcggctcctgacaacaaataagacacatactacatgctcttgtaaccacctaacaaattttgcagtactgatggcacatgtggaagttaagcacagtgatgcggtccatgacctccttctggatgtgatcacgtgggttggaattttgctgtcccttgtttgtctcctgatttgcatcttcacattttgctttttccgggggctccagagtgaccgtaacaccatccacaagaacctctgcatcagtctctttgtagcagagctgctcttcctgattgggatcaaccgaactgaccaaccaattgcctgtgctgttttcgctgccctgttacatttcttcttcttggctgccttcacctggatgttcctggagggggtgcagctttatatcatgctggtggaggtttttgagagtgaacattcacgtaggaaatacttttatctggtcggctatgggatgcctgcactcattgtggctgtgtcagctgcagtagactacaggagttatggaacagataaagtatgttggctccgacttgacacctacttcatttggagttttataggaccagcaactttgataattatgcttaatgtaatcttccttgggattgctttatataaaatgtttcatcatactgctatactgaaacctgaatcaggctgtcttgataacatcaactatgaggataacagacccttcatcaagtcatgggttataggtgcaatagctcttctctgcctattaggattgacctgggcctttggactcatgtatattaatgaaagcacagtcatcatggcctatctcttcaccattttcaattctctacagggaatgtttatatttattttccattgtgtcctacagaagaaggtacgaaaagagtatgggaaatgcctgcgaacacattgctgtagtggcaaaagtacagagagttccattggttcagggaaaacatctggttctcgaactcctggacgctactccacaggctcacagagccgaatccgtagaatgtggaatgacacggttcgaaagcagtcagagtcttcctttattactggagacataaacagttcagcgtcactcaacagaggagccatggctaatcatcttataagcaatgctctgcttcgtccgcatggtactaacaatccctataatacattgcttggggaaccggcggtctgtaacaacccttctgtcagcatgtacaacgcacaagagccctacagagagacaagtatgggagtaaagctaaacattgcatatcaaataggggcttctgaacaatgccagggatacaagtgtcatggatactctaccactgaatggtaaccatggcaatagttacagcattgccagcggcgaatacctgagcaactgtgtgcaaatcatagaccgtggctataaccataacgagaccgccctagagaaaaagattctgaaggaactcacttccaactatatcccttcttacctgaacaaccatgagcgctccagtgaacagaacaggaatctgatgaacaagctggtgaataaccttggcagtggaagggaagatgatgccattgtcctggatgatgccacctcgtttaaccacgaggagagtttgggcctggaactcattcatgaggaatctgatgctcctttgctgcccccaagagtatactccaccgagaaccaccagccacaccattataccagaaggcggatcccccaagaccacagtgagagctttttccctttgctaaccaacgagcacacagaagatctccagtcaccccatagagactctctctataccagcatgccgacactggctggtgtggccgccacagagagtgttaccaccagcacccagaccgaacccccaccggccaaatgtggtgatgccgaagatgtttactacaaaagcatgccaaacctaggctccagaaaccacgtccatcagctgcatacttactaccagctaggtcgcggcagcagtgatggatttatagttcctccaaacaaagatgggacccctcccgagggaagttcaaaaggaccggctcatttggtcactagtctatagaagatgacacagaaattggaaccaacaaaactgctaacaccttgttgactgttctgagttgatataagcagtggtaataatgtgt

SEQ ID NO: 105578 - DNA, 4838 bp, Homo sapiens
  Payload ID: 697
  Gene Symbol: ADGRL3
  Gene Name: adhesion G protein-coupled receptor L3
  ENST ID: ENST00000506700
  CDS Start-End: 174-3869
gtttcagatttgggatattggtgtttctgttttggagaaattattctttttctttttaatttgaagaaaaatcatcagtcttggaatacagaagagaaactagaaatatacgtattttgtttcacatttgaacagtcattcttgaggaatactccatacctgagtagacagccatgtggccatcgcagctactaattttcatgatgctcttagctccaataattcatgctttcagccgtgccccaattccaatggctgtggtccgcagagagctatcctgtgagagctatcctatagagcttcgctgtccaggaacagacgtcatcatgatagaaagtgccaactatggcaggactgatgacaaaatttgtgactctgaccctgctcagatggagaatatccgatgttatctgccagatgcctataagattatgtctcaaagatgcaataacagaacccagtgtgcagtggtggcaggtcctgatgtttttccagacccgtgtccaggaacctataaataccttgaagtgcagtatgaatgtgtcccttacaaagtggaacaaaaagtttttctttgtcctggactactaaaaggagtataccagagtgaacatttgtttgagtccgaccaccaatctggggcgtggtgcaaagaccctctgcaggcatctgacaagatttattatatgccctggactccctacagaactgataccctgactgagtattcatccaaggatgacttcattgctggaagaccaactacaacctacaagctccctcacagggtggatggcacaggatttgtagtgtatgatggagctttgttcttcaacaaagagcgcaccaggaacatagtaaagtttgatttgcggactaggataaagagtggagaggctatcatagcaaatgccaattaccatgatacctccccttaccgatggggaggcaaatctgacatagacctggcagtagatgagaatgggctatgggtaatctatgcaacagaacaaaacaatggtaaaattgtcattagtcaattgaacccttacaccctacggatcgaaggaacatgggatactgcatatgataaaaggtcagcttccaatgcctttatgatttgtggaattctgtatgtggtcaaatctgtatatgaggatgatgacaatgaggctactggaaataagattgactacatttacaacactgaccaaagcaaggatagtttggtggatgtaccctttcctaattcataccagtacattgcagctgtggattacaaccccagggacaacctactttatgtatggaataactatcacgtcgtgaaatattctttggattttggacctctggatagtagatcagggcaggcacatcatggacaagtttcatacatttctccgccaattcaccttgactctgagctagaaagaccctctgttaaagatatctctaccacaggacctcttggcatgggaagcactaccaccagtaccacccttcggaccacaactttgagcccaggaaggagtaccaccccgtcagtgtcaggaagaagaaaccggagtactagtaccccatctccagctgtcgaggtacttgatgacatgaccacacaccttccatcagcatcgtcccaaatcccagctctcgaagagagctgtgaggctgtggaagcccgagaaatcatgtggtttaagactcgtcaaggacagatagcaaagcagccatgccctgcaggaactataggtgtatcaacttatctatgccttgctcctgatggaatttgggatccccaaggtccagatctcagcaactgttcttctccttgggtcaatcatataacacagaagttgaaatctggtgaaacagctgccaacattgctagagagctggctgaacagacaagaaatcacttgaatgctggggacatcacctactctgtccgggccatggaccagctggtaggcctcctagatgtacagcttcggaacttgaccccaggtggaaaagatagtgctgcccggagtttgaacaagcttcagaaaagagagcgctcttgcagagcctatgtccaggcaatggtcgagacagttaacaacctccttcagccacaagctttgaatgcatggagagacctgactacgagtgatcagctgcgtgcggccaccatgttgcttcatactgtggaggaaagtgcttttgtgctggctgataaccttttgaagactgacattgtcagggagaatacagacaatattaaattggaagttgcaagactgagcacagaaggaaacttagaagacctaaaatttccagaaaacatgggccatggaagcactatccagctgtctgcaaataccttaaagcaaaatggccgaaatggagagatcagagtggcctttgtcctgtataacaacttgggtccttatttatccacggagaatgccagtatgaagttgggaacggaagctttgtccacaaatcattctgttattgtcaattcccctgttattacggcagcaataaacaaagagttcagtaacaaggtttatttggctgatcctgtggtatttactgttaaacatatcaagcagtcagaggaaaatttcaaccctaactgttcattttggagctactccaagcgtacaatgacaggttattggtcaacacaaggctgtcggctcctgacaacaaataagacacatactacatgctcttgtaaccacctaacaaattttgcagtactgatggcacatgtggaagttaagcacagtgatgcggtccatgacctccttctggatgtgatcacgtgggttggaattttgctgtcccttgtttgtctcctgatttgcatcttcacattttgctttttccgggggctccagagtgaccgtaacaccatccacaagaacctctgcatcagtctctttgtagcagagctgctcttcctgattgggatcaaccgaactgaccaaccaattgcctgtgctgttttcgctgccctgttacatttcttcttcttggctgccttcacctggatgttcctggagggggtgcagctttatatcatgctggtggaggtttttgagagtgaacattcacgtaggaaatacttttatctggtcggctatgggatgcctgcactcattgtggctgtgtcagctgcagtagactacaggagttatggaacagataaagtatgttggctccgacttgacacctacttcatttggagttttataggaccagcaactttgataattatgcttaatgtaatcttccttgggattgctttatataaaatgtttcatcatactgctatactgaaacctgaatcaggctgtcttgataacatcaagtcatgggttataggtgcaatagctcttctctgcctattaggattgacctgggcctttggactcatgtatattaatgaaagcacagtcatcatggcctatctcttcaccattttcaattctctacagggaatgtttatatttattttccattgtgtcctacagaagaaggtacgaaaagagtatgggaaatgcctgcgaacacattgctgtagtggcaaaagtacagagagttccattggttcagggaaaacatctggttctcgaactcctggacgctactccacaggctcacagagccgaatccgtagaatgtggaatgacacggttcgaaagcagtcagagtcttcctttattactggagacataaacagttcagcgtcactcaacagagagccctacagagagacaagtatgggagtaaagctaaacattgcatatcaaataggggcttctgaacaatgccagggatacaagtgtcatggatactctaccactgaatggtaaccatggcaatagttacagcattgccagcggcgaatacctgagcaactgtgtgcaaatcatagaccgtggctataaccataacgagaccgccctagagaaaaagattctgaaggaactcacttccaactatatcccttcttacctgaacaaccatgagcgctccagtgaacagaacaggaatctgatgaacaagctggtgaataaccttggcagtggaagggaagatgatgccattgtcctggatgatgccacctcgtttaaccacgaggagagtttgggcctggaactcattcatgaggaatctgatgctcctttgctgcccccaagagtatactccaccgagaaccaccagccacaccattataccagaaggcggatcccccaagaccacagtgagagctttttccctttgctaaccaacgagcacacagaagatctccagtcaccccatagagactctctctataccagcatgccgacactggctggtgtggccgccacagagagtgttaccaccagcacccagaccgaacccccaccggccaaatgtggtgatgccgaagatgtttactacaaaagcatgccaaacctaggctccagaaaccacgtccatcagctgcatacttactaccagctaggtcgcggcagcagtgatggatttatagttcctccaaacaaagatgggacccctcccgagggaagttcaaaaggaccggctcatttggtcactagtctatagaagatgacacagaaattggaaccaacaaaactgctaacaccttgttgactgttctgagttgatataagcagtggtaataatgtgtgtactcctaaatctttatgctgtcctctaaagacaaacacaaactctcagacttttttttttttaatgggatttttaggtcagcccaggggagaaagataactgctaaaattcccctgtaccccatcctttcttgtcctttcccc

SEQ ID NO: 105579 - DNA, 4731 bp, Homo sapiens
  Payload ID: 697
  Gene Symbol: ADGRL3
  Gene Name: adhesion G protein-coupled receptor L3
  ENST ID: ENST00000514996
  CDS Start-End: 1-4512
atgtggccatcgcagctactaattttcatgatgctcttagctccaataattcatgctttcagccgtgccccaattccaatggctgtggtccgcagagagctatcctgtgagagctatcctatagagcttcgctgtccaggaacagacgtcatcatgatagaaagtgccaactatggcaggactgatgacaaaatttgtgactctgaccctgctcagatggagaatatccgatgttatctgccagatgcctataagattatgtctcaaagatgcaataacagaacccagtgtgcagtggtggcaggtcctgatgtttttccagacccgtgtccaggaacctataaataccttgaagtgcagtatgaatgtgtcccttacaaagtggaacaaaaagtttttctttgtcctggactactaaaaggagtataccagagtgaacatttgtttgagtccgaccaccaatctggggcgtggtgcaaagaccctctgcaggcatctgacaagatttattatatgccctggactccctacagaactgataccctgactgagtattcatccaaggatgacttcattgctggaagaccaactacaacctacaagctccctcacagggtggatggcacaggatttgtagtgtatgatggagctttgttcttcaacaaagagcgcaccaggaacatagtaaagtttgatttgcggactaggataaagagtggagaggctatcatagcaaatgccaattaccatgatacctccccttaccgatggggaggcaaatctgacatagacctggcagtagatgagaatgggctatgggtaatctatgcaacagaacaaaacaatggtaaaattgtcattagtcaattgaacccttacaccctacggatcgaaggaacatgggatactgcatatgataaaaggtcagcttccaatgcctttatgatttgtggaattctgtatgtggtcaaatctgtatatgaggatgatgacaatgaggctactggaaataagattgactacatttacaacactgaccaaagcaaggatagtttggtggatgtaccctttcctaattcataccagtacattgcagctgtggattacaaccccagggacaacctactttatgtatggaataactatcacgtcgtgaaatattctttggattttggacctctggatagtagatcagggcaggcacatcatggacaagtttcatacatttctccgccaattcaccttgactctgagctagaaagaccctctgttaaagatatctctaccacaggacctcttggcatgggaagcactaccaccagtaccacccttcggaccacaactttgagcccaggaaggagtaccaccccgtcagtgtcaggaagaagaaaccggagtactagtaccccatctccagctgtcgaggtacttgatgacatgaccacacaccttccatcagcatcgtcccaaatcccagctctcgaagagagctgtgaggctgtggaagcccgagaaatcatgtggtttaagactcgtcaaggacagatagcaaagcagccatgccctgcaggaactataggtgtatcaacttatctatgccttgctcctgatggaatttgggatccccaaggtccagatctcagcaactgttcttctccttgggtcaatcatataacacagaagttgaaatctggtgaaacagctgccaacattgctagagagctggctgaacagacaagaaatcacttgaatgctggggacatcacctactctgtccgggccatggaccagctggtaggcctcctagatgtacagcttcggaacttgaccccaggtggaaaagatagtgctgcccggagtttgaacaagcttcagaaaagagagcgctcttgcagagcctatgtccaggcaatggtcgagacagttaacaacctccttcagccacaagctttgaatgcatggagagacctgactacgagtgatcagctgcgtgcggccaccatgttgcttcatactgtggaggaaagtgcttttgtgctggctgataaccttttgaagactgacattgtcagggagaatacagacaatattaaattggaagttgcaagactgagcacagaaggaaacttagaagacctaaaatttccagaaaacatgggccatggaagcactatccagctgtctgcaaataccttaaagcaaaatggccgaaatggagagatcagagtggcctttgtcctgtataacaacttgggtccttatttatccacggagaatgccagtatgaagttgggaacggaagctttgtccacaaatcattctgttattgtcaattcccctgttattacggcagcaataaacaaagagttcagtaacaaggtttatttggctgatcctgtggtatttactgttaaacatatcaagcagtcagaggaaaatttcaaccctaactgttcattttggagctactccaagcgtacaatgacaggttattggtcaacacaaggctgtcggctcctgacaacaaataagacacatactacatgctcttgtaaccacctaacaaattttgcagtactgatggcacatgtggaagttaagcacagtgatgcggtccatgacctccttctggatgtgatcacgtgggttggaattttgctgtcccttgtttgtctcctgatttgcatcttcacattttgctttttccgggggctccagagtgaccgtaacaccatccacaagaacctctgcatcagtctctttgtagcagagctgctcttcctgattgggatcaaccgaactgaccaaccaattgcctgtgctgttttcgctgccctgttacatttcttcttcttggctgccttcacctggatgttcctggagggggtgcagctttatatcatgctggtggaggtttttgagagtgaacattcacgtaggaaatacttttatctggtcggctatgggatgcctgcactcattgtggctgtgtcagctgcagtagactacaggagttatggaacagataaagtatgttggctccgacttgacacctacttcatttggagttttataggaccagcaactttgataattatgcttaatgtaatcttccttgggattgctttatataaaatgtttcatcatactgctatactgaaacctgaatcaggctgtcttgataacatcaagtcatgggttataggtgcaatagctcttctctgcctattaggattgacctgggcctttggactcatgtatattaatgaaagcacagtcatcatggcctatctcttcaccattttcaattctctacagggaatgtttatatttattttccattgtgtcctacagaagaaggtacgaaaagagtatgggaaatgcctgcgaacacattgctgtagtggcaaaagtacagagagttccattggttcagggaaaacatctggttctcgaactcctggacgctactccacaggctcacagagccgaatccgtagaatgtggaatgacacggttcgaaagcagtcagagtcttcctttattactggagacataaacagttcagcgtcactcaacagaggagccatggctaatcatcttataagcaatgctctgcttcgtccgcatggtactaacaatccctataatacattgcttggggaaccggcggtctgtaacaacccttctgtcagcatgtacaacgcacaagaggggcttctgaacaatgccagggatacaagtgtcatggatactctaccactgaatggtaaccatggcaatagttacagcattgccagcggcgaatacctgagcaactgtgtgcaaatcatagaccgtggctataaccataacgagaccgccctagagaaaaagattctgaaggaactcacttccaactatatcccttcttacctgaacaaccatgagcgctccagtgaacagaacaggaatctgatgaacaagctggtgaataaccttggcagtggaagggaagatgatgccattgtcctggatgatgccacctcgtttaaccacgaggagagtttgggcctggaactcattcatgaggaatctgatgctcctttgctgcccccaagagtatactccaccgagaaccaccagccacaccattataccagaaggcggatcccccaagaccacagtgagagctttttccctttgctaaccaacgagcacacagaagatctccagtcaccccatagagactctctctataccagcatgccgacactggctggtgtggccgccacagagagtgttaccaccagcacccagaccgaacccccaccggccaaatgtggtgatgccgaagatgtttactacaaaagcatgccaaacctaggctccagaaaccacgtccatcagctgcatacttactaccagctaggtcgcggcagcagtgatggatttatagttcctccaaacaaagatgggacccctcccgagggaagttcaaaaggaccggctcatttggtcactagtctatagaagatgacacagaaattggaaccaacaaaactgctaacaccttgttgactgttctgagttgatataagcagtggtaataatgtgtgtactcctaaatctttatgctgtcctctaaagacaaacacaaactctcagacttttttttttttaatgggatttttaggtcagcccaggggagaaagataactgctaaaattcccctgtaccccatcctttctt

SEQ ID NO: 105580 - DNA, 4284 bp, Homo sapiens
  Payload ID: 697
  Gene Symbol: ADGRL3
  Gene Name: adhesion G protein-coupled receptor L3
  ENST ID: ENST00000502815
  CDS Start-End: 1-2755
ttatctatgccttgctcctgatggaatttgggatccccaaggtccagatctcagcaactgttcttctccttgggtcaatcatataacacagaagttgaaatctggtgaaacagctgccaacattgctagagagctggctgaacagacaagaaatcacttgaatgctggggacatcacctactctgtccgggccatggaccagctggtaggcctcctagatgtacagcttcggaacttgaccccaggtggaaaagatagtgctgcccggagtttgaacaaggcaatggtcgagacagttaacaacctccttcagccacaagctttgaatgcatggagagacctgactacgagtgatcagctgcgtgcggccaccatgttgcttcatactgtggaggaaagtgcttttgtgctggctgataaccttttgaagactgacattgtcagggagaatacagacaatattaaattggaagttgcaagactgagcacagaaggaaacttagaagacctaaaatttccagaaaacatgggccatggaagcactatccagctgtctgcaaataccttaaagcaaaatggccgaaatggagagatcagagtggcctttgtcctgtataacaacttgggtccttatttatccacggagaatgccagtatgaagttgggaacggaagctttgtccacaaatcattctgttattgtcaattcccctgttattacggcagcaataaacaaagagttcagtaacaaggtttatttggctgatcctgtggtatttactgttaaacatatcaagcagtcagaggaaaatttcaaccctaactgttcattttggagctactccaagcgtacaatgacaggttattggtcaacacaaggctgtcggctcctgacaacaaataagacacatactacatgctcttgtaaccacctaacaaattttgcagtactgatggcacatgtggaagttaagcacagtgatgcggtccatgacctccttctggatgtgatcacgtgggttggaattttgctgtcccttgtttgtctcctgatttgcatcttcacattttgctttttccgggggctccagagtgaccgtaacaccatccacaagaacctctgcatcagtctctttgtagcagagctgctcttcctgattgggatcaaccgaactgaccaaccaattgcctgtgctgttttcgctgccctgttacatttcttcttcttggctgccttcacctggatgttcctggagggggtgcagctttatatcatgctggtggaggtttttgagagtgaacattcacgtaggaaatacttttatctggtcggctatgggatgcctgcactcattgtggctgtgtcagctgcagtagactacaggagttatggaacagataaagtatgttggctccgacttgacacctacttcatttggagttttataggaccagcaactttgataattatgcttaatgtaatcttccttgggattgctttatataaaatgtttcatcatactgctatactgaaacctgaatcaggctgtcttgataacatcaagtcatgggttataggtgcaatagctcttctctgcctattaggattgacctgggcctttggactcatgtatattaatgaaagcacagtcatcatggcctatctcttcaccattttcaattctctacagggaatgtttatatttattttccattgtgtcctacagaagaaggtacgaaaagagtatgggaaatgcctgcgaacacattgctgtagtggcaaaagtacagagagttccattggttcagggaaaacatctggttctcgaactcctggacgctactccacaggctcacagagccgaatccgtagaatgtggaatgacacggttcgaaagcagtcagagtcttcctttattactggagacataaacagttcagcgtcactcaacagagaggggcttctgaacaatgccagggatacaagtgtcatggatactctaccactgaatggtaaccatggcaatagttacagcattgccagcggcgaatacctgagcaactgtgtgcaaatcatagaccgtggctataaccataacgagaccgccctagagaaaaagattctgaaggaactcacttccaactatatcccttcttacctgaacaaccatgagcgctccagtgaacagaacaggaatctgatgaacaagctggtgaataaccttggcagtggaagggaagatgatgccattgtcctggatgatgccacctcgtttaaccacgaggagagtttgggcctggaactcattcatgaggaatctgatgctcctttgctgcccccaagagtatactccaccgagaaccaccagccacaccattataccagaaggcggatcccccaagaccacagtgagagctttttccctttgctaaccaacgagcacacagaagatctccagtcaccccatagagactctctctataccagcatgccgacactggctggtgtggccgccacagagagtgttaccaccagcacccagaccgaacccccaccggccaaatgtggtgatgccgaagatgtttactacaaaagcatgccaaacctaggctccagaaaccacgtccatcagctgcatacttactaccagctaggtcgcggcagcagtgatggatttatagttcctccaaacaaagatgggacccctcccgagggaagttcaaaaggaccggctcatttggtcactagtctatagaagatgacacagaaattggaaccaacaaaactgctaacaccttgttgactgttctgagttgatataagcagtggtaataatgtgtgtactcctaaatctttatgctgtcctctaaagacaaacacaaactctcagacttttttttttttaatgggatttttaggtcagcccaggggagaaagataactgctaaaattcccctgtaccccatcctttcttgtcctttccccttcagatggagacttcattatgttaatgaacaagatatgaagaaaatggcactcattgtggccttgttgaattatgttgtgtatgttttaacatctctgatgctgtgttactaaaattacaaggacctgctttttaaaaggccagaacaattgtctgaaattagtaacaatgctgcatctagattggagtgctgcacaaacaaacataagagcaaagcaaaactgtatcacatagggtttttggtcactcacaacctgaattcaccacagctggaatagctgtggaaaacaaaataaaacaacaaaattaataatgaaatggaggggaattctagaattatatgctaaatgcatattttatgatttgctgtattaactgatgataaaactaatggcagaaaaagaagttgagcaatttctatgtaatgtacagatactagcattgcacatatagtctgctttctgttcctccagaatttgagtcctgttaatgtagtagaaaaaaaaaaaagaaattttctttttcttttgtgctggtcttgcaagtttgtctaccagtaagagagcaaagtttccttcctttcttctctttcttcattttctttttttcttttttgccttttattcctttaaaatttcgcctggcaaaaaataaataaatggaactatcactttataagaatcattttctagtaatgcaaacaaattattttttacaaaaaaacaaaataaataaaattagacttccttccctcactatatatctttatgcagtcagaatatttccaacagtgttttttgcaaattagagcaggacaaacttttatgtttacagggcacgtctgttgtaatgcaaagcatatttggcaagcagttcatcaccaggacactagctatgattctagaagtcaaaaggtgtctatagaactagtggggcttctgcatgtgaaaaacggttttccataggcattaaagtgctgaatgctcagtctgatcaacaagtgggcacctgcactaccactttttagaggaaattcactccctcgtaagcattggaaggtcaaattattttgaagtgatttttttaaaaaaaagtcttctgtttattaacaggaaaatttatttatttgacaggattttgagtaatgtaggaatacaaaaggtaaattagcagcacatataatttttttttaatttatgatccattttgtatggtctcaaagttggatgacctcattactaatatttgttgtaaaagtgaaacttgtttgccaaccaataaacaactgattgagattt

SEQ ID NO: 105581 - DNA, 5042 bp, Homo sapiens
  Payload ID: 697
  Gene Symbol: ADGRL3
  Gene Name: adhesion G protein-coupled receptor L3
  ENST ID: ENST00000511324
  CDS Start-End: 174-4073
gtttcagatttgggatattggtgtttctgttttggagaaattattctttttctttttaatttgaagaaaaatcatcagtcttggaatacagaagagaaactagaaatatacgtattttgtttcacatttgaacagtcattcttgaggaatactccatacctgagtagacagccatgtggccatcgcagctactaattttcatgatgctcttagctccaataattcatggtggcaagcacagtgaacgacatcctgcccttgctgctccattgcgacacgctgagcgcagcccaggaggcgctcttccacccagacatctgcttcagcagccagctgcagagcgcaccgctgctcatcgtggacaagggccccgtggagctaccagaggagttcgcggtccaggtgcccaaggagcacagattgcagcgcaagctttcagccgtgccccaattccaatggctgtggtccgcagagagctatcctgtgagagctatcctatagagcttcgctgtccaggaacagacgtcatcatgatagaaagtgccaactatggcaggactgatgacaaaatttgtgactctgaccctgctcagatggagaatatccgatgttatctgccagatgcctataagattatgtctcaaagatgcaataacagaacccagtgtgcagtggtggcaggtcctgatgtttttccagacccgtgtccaggaacctataaataccttgaagtgcagtatgaatgtgtcccttacaaagtggaacaaaaagtttttctttgtcctggactactaaaaggagtataccagagtgaacatttgtttgagtccgaccaccaatctggggcgtggtgcaaagaccctctgcaggcatctgacaagatttattatatgccctggactccctacagaactgataccctgactgagtattcatccaaggatgacttcattgctggaagaccaactacaacctacaagctccctcacagggtggatggcacaggatttgtagtgtatgatggagctttgttcttcaacaaagagcgcaccaggaacatagtaaagtttgatttgcggactaggataaagagtggagaggctatcatagcaaatgccaattaccatgatacctccccttaccgatggggaggcaaatctgacatagacctggcagtagatgagaatgggctatgggtaatctatgcaacagaacaaaacaatggtaaaattgtcattagtcaattgaacccttacaccctacggatcgaaggaacatgggatactgcatatgataaaaggtcagcttccaatgcctttatgatttgtggaattctgtatgtggtcaaatctgtatatgaggatgatgacaatgaggctactggaaataagattgactacatttacaacactgaccaaagcaaggatagtttggtggatgtaccctttcctaattcataccagtacattgcagctgtggattacaaccccagggacaacctactttatgtatggaataactatcacgtcgtgaaatattctttggattttggacctctggatagtagatcagggcaggcacatcatggacaagtttcatacatttctccgccaattcaccttgactctgagctagaaagaccctctgttaaagatatctctaccacaggacctcttggcatgggaagcactaccaccagtaccacccttcggaccacaactttgagcccaggaaggagtaccaccccgtcagtgtcaggaagaagaaaccggagtactagtaccccatctccagctgtcgaggtacttgatgacatgaccacacaccttccatcagcatcgtcccaaatcccagctctcgaagagagctgtgaggctgtggaagcccgagaaatcatgtggtttaagactcgtcaaggacagatagcaaagcagccatgccctgcaggaactataggtgtatcaacttatctatgccttgctcctgatggaatttgggatccccaaggtccagatctcagcaactgttcttctccttgggtcaatcatataacacagaagttgaaatctggtgaaacagctgccaacattgctagagagctggctgaacagacaagaaatcacttgaatgctggggacatcacctactctgtccgggccatggaccagctggtaggcctcctagatgtacagcttcggaacttgaccccaggtggaaaagatagtgctgcccggagtttgaacaagcttcagaaaagagagcgctcttgcagagcctatgtccaggcaatggtcgagacagttaacaacctccttcagccacaagctttgaatgcatggagagacctgactacgagtgatcagctgcgtgcggccaccatgttgcttcatactgtggaggaaagtgcttttgtgctggctgataaccttttgaagactgacattgtcagggagaatacagacaatattaaattggaagttgcaagactgagcacagaaggaaacttagaagacctaaaatttccagaaaacatgggccatggaagcactatccagctgtctgcaaataccttaaagcaaaatggccgaaatggagagatcagagtggcctttgtcctgtataacaacttgggtccttatttatccacggagaatgccagtatgaagttgggaacggaagctttgtccacaaatcattctgttattgtcaattcccctgttattacggcagcaataaacaaagagttcagtaacaaggtttatttggctgatcctgtggtatttactgttaaacatatcaagcagtcagaggaaaatttcaaccctaactgttcattttggagctactccaagcgtacaatgacaggttattggtcaacacaaggctgtcggctcctgacaacaaataagacacatactacatgctcttgtaaccacctaacaaattttgcagtactgatggcacatgtggaagttaagcacagtgatgcggtccatgacctccttctggatgtgatcacgtgggttggaattttgctgtcccttgtttgtctcctgatttgcatcttcacattttgctttttccgggggctccagagtgaccgtaacaccatccacaagaacctctgcatcagtctctttgtagcagagctgctcttcctgattgggatcaaccgaactgaccaaccaattgcctgtgctgttttcgctgccctgttacatttcttcttcttggctgccttcacctggatgttcctggagggggtgcagctttatatcatgctggtggaggtttttgagagtgaacattcacgtaggaaatacttttatctggtcggctatgggatgcctgcactcattgtggctgtgtcagctgcagtagactacaggagttatggaacagataaagtatgttggctccgacttgacacctacttcatttggagttttataggaccagcaactttgataattatgcttaatgtaatcttccttgggattgctttatataaaatgtttcatcatactgctatactgaaacctgaatcaggctgtcttgataacatcaagtcatgggttataggtgcaatagctcttctctgcctattaggattgacctgggcctttggactcatgtatattaatgaaagcacagtcatcatggcctatctcttcaccattttcaattctctacagggaatgtttatatttattttccattgtgtcctacagaagaaggtacgaaaagagtatgggaaatgcctgcgaacacattgctgtagtggcaaaagtacagagagttccattggttcagggaaaacatctggttctcgaactcctggacgctactccacaggctcacagagccgaatccgtagaatgtggaatgacacggttcgaaagcagtcagagtcttcctttattactggagacataaacagttcagcgtcactcaacagagagccctacagagagacaagtatgggagtaaagctaaacattgcatatcaaataggggcttctgaacaatgccagggatacaagtgtcatggatactctaccactgaatggtaaccatggcaatagttacagcattgccagcggcgaatacctgagcaactgtgtgcaaatcatagaccgtggctataaccataacgagaccgccctagagaaaaagattctgaaggaactcacttccaactatatcccttcttacctgaacaaccatgagcgctccagtgaacagaacaggaatctgatgaacaagctggtgaataaccttggcagtggaagggaagatgatgccattgtcctggatgatgccacctcgtttaaccacgaggagagtttgggcctggaactcattcatgaggaatctgatgctcctttgctgcccccaagagtatactccaccgagaaccaccagccacaccattataccagaaggcggatcccccaagaccacagtgagagctttttccctttgctaaccaacgagcacacagaagatctccagtcaccccatagagactctctctataccagcatgccgacactggctggtgtggccgccacagagagtgttaccaccagcacccagaccgaacccccaccggccaaatgtggtgatgccgaagatgtttactacaaaagcatgccaaacctaggctccagaaaccacgtccatcagctgcatacttactaccagctaggtcgcggcagcagtgatggatttatagttcctccaaacaaagatgggacccctcccgagggaagttcaaaaggaccggctcatttggtcactagtctatagaagatgacacagaaattggaaccaacaaaactgctaacaccttgttgactgttctgagttgatataagcagtggtaataatgtgtgtactcctaaatctttatgctgtcctctaaagacaaacacaaactctcagacttttttttttttaatgggatttttaggtcagcccaggggagaaagataactgctaaaattcccctgtaccccatcctttcttgtcctttcccc

SEQ ID NO: 105582 - DNA, 4789 bp, Homo sapiens
  Payload ID: 697
  Gene Symbol: ADGRL3
  Gene Name: adhesion G protein-coupled receptor L3
  ENST ID: ENST00000514157
  CDS Start-End: 96-3920
tcttggaatacagaagagaaactagaaatatacgtattttgtttcacatttgaacagtcattcttgaggaatactccatacctgagtagacagccatgtggccatcgcagctactaattttcatgatgctcttagctccaataattcatgctttcagccgtgccccaattccaatggctgtggtccgcagagagctatcctgtgagagctatcctatagagcttcgctgtccaggaacagacgtcatcatgatagaaagtgccaactatggcaggactgatgacaaaatttgtgactctgaccctgctcagatggagaatatccgatgttatctgccagatgcctataagattatgtctcaaagatgcaataacagaacccagtgtgcagtggtggcaggtcctgatgtttttccagacccgtgtccaggaacctataaataccttgaagtgcagtatgaatgtgtcccttacaaagtggaacaaaaagtttttctttgtcctggactactaaaaggagtataccagagtgaacatttgtttgagtccgaccaccaatctggggcgtggtgcaaagaccctctgcaggcatctgacaagatttattatatgccctggactccctacagaactgataccctgactgagtattcatccaaggatgacttcattgctggaagaccaactacaacctacaagctccctcacagggtggatggcacaggatttgtagtgtatgatggagctttgttcttcaacaaagagcgcaccaggaacatagtaaagtttgatttgcggactaggataaagagtggagaggctatcatagcaaatgccaattaccatgatacctccccttaccgatggggaggcaaatctgacatagacctggcagtagatgagaatgggctatgggtaatctatgcaacagaacaaaacaatggtaaaattgtcattagtcaattgaacccttacaccctacggatcgaaggaacatgggatactgcatatgataaaaggtcagcttccaatgcctttatgatttgtggaattctgtatgtggtcaaatctgtatatgaggatgatgacaatgaggctactggaaataagattgactacatttacaacactgaccaaagcaaggatagtttggtggatgtaccctttcctaattcataccagtacattgcagctgtggattacaaccccagggacaacctactttatgtatggaataactatcacgtcgtgaaatattctttggattttggacctctggatagtagatcagggcaggcacatcatggacaagtttcatacatttctccgccaattcaccttgactctgagctagaaagaccctctgttaaagatatctctaccacaggacctcttggcatgggaagcactaccaccagtaccacccttcggaccacaactttgagcccaggaaggagtaccaccccgtcagtgtcaggaagaagaaaccggagtactagtaccccatctccagctgtcgaggtacttgatgacatgaccacacaccttccatcagcatcgtcccaaatcccagctctcgaagagagctgtgaggctgtggaagcccgagaaatcatgtggtttaagactcgtcaaggacagatagcaaagcagccatgccctgcaggaactataggtgtatcaacttatctatgccttgctcctgatggaatttgggatccccaaggtccagatctcagcaactgttcttctccttgggtcaatcatataacacagaagttgaaatctggtgaaacagctgccaacattgctagagagctggctgaacagacaagaaatcacttgaatgctggggacatcacctactctgtccgggccatggaccagctggtaggcctcctagatgtacagcttcggaacttgaccccaggtggaaaagatagtgctgcccggagtttgaacaagcttcagaaaagagagcgctcttgcagagcctatgtccaggcaatggtcgagacagttaacaacctccttcagccacaagctttgaatgcatggagagacctgactacgagtgatcagctgcgtgcggccaccatgttgcttcatactgtggaggaaagtgcttttgtgctggctgataaccttttgaagactgacattgtcagggagaatacagacaatattaaattggaagttgcaagactgagcacagaaggaaacttagaagacctaaaatttccagaaaacatgggccatggaagcactatccagctgtctgcaaataccttaaagcaaaatggccgaaatggagagatcagagtggcctttgtcctgtataacaacttgggtccttatttatccacggagaatgccagtatgaagttgggaacggaagctttgtccacaaatcattctgttattgtcaattcccctgttattacggcagcaataaacaaagagttcagtaacaaggtttatttggctgatcctgtggtatttactgttaaacatatcaagcagtcagaggaaaatttcaaccctaactgttcattttggagctactccaagcgtacaatgacaggttattggtcaacacaaggctgtcggctcctgacaacaaataagacacatactacatgctcttgtaaccacctaacaaattttgcagtactgatggcacatgtggaagttaagcacagtgatgcggtccatgacctccttctggatgtgatcacgtgggttggaattttgctgtcccttgtttgtctcctgatttgcatcttcacattttgctttttccgggggctccagagtgaccgtaacaccatccacaagaacctctgcatcagtctctttgtagcagagctgctcttcctgattgggatcaaccgaactgaccaaccaattgcctgtgctgttttcgctgccctgttacatttcttcttcttggctgccttcacctggatgttcctggagggggtgcagctttatatcatgctggtggaggtttttgagagtgaacattcacgtaggaaatacttttatctggtcggctatgggatgcctgcactcattgtggctgtgtcagctgcagtagactacaggagttatggaacagataaagtatgttggctccgacttgacacctacttcatttggagttttataggaccagcaactttgataattatgcttaatgtaatcttccttgggattgctttatataaaatgtttcatcatactgctatactgaaacctgaatcaggctgtcttgataacatcaagtcatgggttataggtgcaatagctcttctctgcctattaggattgacctgggcctttggactcatgtatattaatgaaagcacagtcatcatggcctatctcttcaccattttcaattctctacagggaatgtttatatttattttccattgtgtcctacagaagaaggtacgaaaagagtatgggaaatgcctgcgaacacattgctgtagtggcaaaagtacagagagttccattggttcagggaaaacatctggttctcgaactcctggacgctactccacaggctcacagagccgaatccgtagaatgtggaatgacacggttcgaaagcagtcagagtcttcctttattactggagacataaacagttcagcgtcactcaacagaggagccatggctaatcatcttataagcaatgctctgcttcgtccgcatggtactaacaatccctataatacattgcttggggaaccggcggtctgtaacaacccttctgtcagcatgtacaacgcacaagagccctacagagagacaagtatgggagtaaagctaaacattgcatatcaaataggggcttctgaacaatgccagggatacaagtgtcatggatactctaccactgaatggtaaccatggcaatagttacagcattgccagcggcgaatacctgagcaactgtgtgcaaatcatagaccgtggctataaccataacgagaccgccctagagaaaaagattctgaaggaactcacttccaactatatcccttcttacctgaacaaccatgagcgctccagtgaacagaacaggaatctgatgaacaagctggtgaataaccttggcagtggaagggaagatgatgccattgtcctggatgatgccacctcgtttaaccacgaggagagtttgggcctggaactcattcatgaggaatctgatgctcctttgctgcccccaagagtatactccaccgagaaccaccagccacaccattataccagaaggcggatcccccaagaccacagtgagagctttttccctttgctaaccaacgagcacacagaagatctccagtcaccccatagagactctctctataccagcatgccgacactggctggtgtggccgccacagagagtgttaccaccagcacccagaccgaacccccaccggccaaatgtggtgatgccgaagatgtttactacaaaagcatgccaaacctaggctccagaaaccacgtccatcagctgcatacttactaccagctaggtcgcggcagcagtgatggatttatagttcctccaaacaaagatgggacccctcccgagggaagttcaaaaggaccggctcatttggtcactagtctatagaagatgacacagaaattggaaccaacaaaactgctaacaccttgttgactgttctgagttgatataagcagtggtaataatgtgtgtactcctaaatctttatgctgtcctctaaagacaaacacaaact

SEQ ID NO: 105583 - DNA, 4935 bp, Homo sapiens
  Payload ID: 697
  Gene Symbol: ADGRL3
  Gene Name: adhesion G protein-coupled receptor L3
  ENST ID: ENST00000506746
  CDS Start-End: 1-4716
atgtggccatcgcagctactaattttcatgatgctcttagctccaataattcatggtggcaagcacagtgaacgacatcctgcccttgctgctccattgcgacacgctgagcgcagcccaggaggcgctcttccacccagacatctgcttcagcagccagctgcagagcgcaccgctgctcatcgtggacaagggccccgtggagctaccagaggagttcgcggtccaggtgcccaaggagcacagattgcagcgcaagctttcagccgtgccccaattccaatggctgtggtccgcagagagctatcctgtgagagctatcctatagagcttcgctgtccaggaacagacgtcatcatgatagaaagtgccaactatggcaggactgatgacaaaatttgtgactctgaccctgctcagatggagaatatccgatgttatctgccagatgcctataagattatgtctcaaagatgcaataacagaacccagtgtgcagtggtggcaggtcctgatgtttttccagacccgtgtccaggaacctataaataccttgaagtgcagtatgaatgtgtcccttacaaagtggaacaaaaagtttttctttgtcctggactactaaaaggagtataccagagtgaacatttgtttgagtccgaccaccaatctggggcgtggtgcaaagaccctctgcaggcatctgacaagatttattatatgccctggactccctacagaactgataccctgactgagtattcatccaaggatgacttcattgctggaagaccaactacaacctacaagctccctcacagggtggatggcacaggatttgtagtgtatgatggagctttgttcttcaacaaagagcgcaccaggaacatagtaaagtttgatttgcggactaggataaagagtggagaggctatcatagcaaatgccaattaccatgatacctccccttaccgatggggaggcaaatctgacatagacctggcagtagatgagaatgggctatgggtaatctatgcaacagaacaaaacaatggtaaaattgtcattagtcaattgaacccttacaccctacggatcgaaggaacatgggatactgcatatgataaaaggtcagcttccaatgcctttatgatttgtggaattctgtatgtggtcaaatctgtatatgaggatgatgacaatgaggctactggaaataagattgactacatttacaacactgaccaaagcaaggatagtttggtggatgtaccctttcctaattcataccagtacattgcagctgtggattacaaccccagggacaacctactttatgtatggaataactatcacgtcgtgaaatattctttggattttggacctctggatagtagatcagggcaggcacatcatggacaagtttcatacatttctccgccaattcaccttgactctgagctagaaagaccctctgttaaagatatctctaccacaggacctcttggcatgggaagcactaccaccagtaccacccttcggaccacaactttgagcccaggaaggagtaccaccccgtcagtgtcaggaagaagaaaccggagtactagtaccccatctccagctgtcgaggtacttgatgacatgaccacacaccttccatcagcatcgtcccaaatcccagctctcgaagagagctgtgaggctgtggaagcccgagaaatcatgtggtttaagactcgtcaaggacagatagcaaagcagccatgccctgcaggaactataggtgtatcaacttatctatgccttgctcctgatggaatttgggatccccaaggtccagatctcagcaactgttcttctccttgggtcaatcatataacacagaagttgaaatctggtgaaacagctgccaacattgctagagagctggctgaacagacaagaaatcacttgaatgctggggacatcacctactctgtccgggccatggaccagctggtaggcctcctagatgtacagcttcggaacttgaccccaggtggaaaagatagtgctgcccggagtttgaacaagcttcagaaaagagagcgctcttgcagagcctatgtccaggcaatggtcgagacagttaacaacctccttcagccacaagctttgaatgcatggagagacctgactacgagtgatcagctgcgtgcggccaccatgttgcttcatactgtggaggaaagtgcttttgtgctggctgataaccttttgaagactgacattgtcagggagaatacagacaatattaaattggaagttgcaagactgagcacagaaggaaacttagaagacctaaaatttccagaaaacatgggccatggaagcactatccagctgtctgcaaataccttaaagcaaaatggccgaaatggagagatcagagtggcctttgtcctgtataacaacttgggtccttatttatccacggagaatgccagtatgaagttgggaacggaagctttgtccacaaatcattctgttattgtcaattcccctgttattacggcagcaataaacaaagagttcagtaacaaggtttatttggctgatcctgtggtatttactgttaaacatatcaagcagtcagaggaaaatttcaaccctaactgttcattttggagctactccaagcgtacaatgacaggttattggtcaacacaaggctgtcggctcctgacaacaaataagacacatactacatgctcttgtaaccacctaacaaattttgcagtactgatggcacatgtggaagttaagcacagtgatgcggtccatgacctccttctggatgtgatcacgtgggttggaattttgctgtcccttgtttgtctcctgatttgcatcttcacattttgctttttccgggggctccagagtgaccgtaacaccatccacaagaacctctgcatcagtctctttgtagcagagctgctcttcctgattgggatcaaccgaactgaccaaccaattgcctgtgctgttttcgctgccctgttacatttcttcttcttggctgccttcacctggatgttcctggagggggtgcagctttatatcatgctggtggaggtttttgagagtgaacattcacgtaggaaatacttttatctggtcggctatgggatgcctgcactcattgtggctgtgtcagctgcagtagactacaggagttatggaacagataaagtatgttggctccgacttgacacctacttcatttggagttttataggaccagcaactttgataattatgcttaatgtaatcttccttgggattgctttatataaaatgtttcatcatactgctatactgaaacctgaatcaggctgtcttgataacatcaagtcatgggttataggtgcaatagctcttctctgcctattaggattgacctgggcctttggactcatgtatattaatgaaagcacagtcatcatggcctatctcttcaccattttcaattctctacagggaatgtttatatttattttccattgtgtcctacagaagaaggtacgaaaagagtatgggaaatgcctgcgaacacattgctgtagtggcaaaagtacagagagttccattggttcagggaaaacatctggttctcgaactcctggacgctactccacaggctcacagagccgaatccgtagaatgtggaatgacacggttcgaaagcagtcagagtcttcctttattactggagacataaacagttcagcgtcactcaacagaggagccatggctaatcatcttataagcaatgctctgcttcgtccgcatggtactaacaatccctataatacattgcttggggaaccggcggtctgtaacaacccttctgtcagcatgtacaacgcacaagaggggcttctgaacaatgccagggatacaagtgtcatggatactctaccactgaatggtaaccatggcaatagttacagcattgccagcggcgaatacctgagcaactgtgtgcaaatcatagaccgtggctataaccataacgagaccgccctagagaaaaagattctgaaggaactcacttccaactatatcccttcttacctgaacaaccatgagcgctccagtgaacagaacaggaatctgatgaacaagctggtgaataaccttggcagtggaagggaagatgatgccattgtcctggatgatgccacctcgtttaaccacgaggagagtttgggcctggaactcattcatgaggaatctgatgctcctttgctgcccccaagagtatactccaccgagaaccaccagccacaccattataccagaaggcggatcccccaagaccacagtgagagctttttccctttgctaaccaacgagcacacagaagatctccagtcaccccatagagactctctctataccagcatgccgacactggctggtgtggccgccacagagagtgttaccaccagcacccagaccgaacccccaccggccaaatgtggtgatgccgaagatgtttactacaaaagcatgccaaacctaggctccagaaaccacgtccatcagctgcatacttactaccagctaggtcgcggcagcagtgatggatttatagttcctccaaacaaagatgggacccctcccgagggaagttcaaaaggaccggctcatttggtcactagtctatagaagatgacacagaaattggaaccaacaaaactgctaacaccttgttgactgttctgagttgatataagcagtggtaataatgtgtgtactcctaaatctttatgctgtcctctaaagacaaacacaaactctcagacttttttttttttaatgggatttttaggtcagcccaggggagaaagataactgctaaaattcccctgtaccccatcctttctt

SEQ ID NO: 105584 - DNA, 5567 bp, Homo sapiens
  Payload ID: 697
  Gene Symbol: ADGRL3
  Gene Name: adhesion G protein-coupled receptor L3
  ENST ID: ENST00000545650
  CDS Start-End: 1-4038
ccaatagaagtggaacaaaaagtttttctttgtcctggactactaaaaggagtataccagagtgaacatttgtttgagtccgaccaccaatctggggcgtggtgcaaagaccctctgcaggcatctgacaagatttattatatgccctggactccctacagaactgataccctgactgagtattcatccaaggatgacttcattgctggaagaccaactacaacctacaagctccctcacagggtggatggcacaggatttgtagtgtatgatggagctttgttcttcaacaaagagcgcaccaggaacatagtaaagtttgatttgcggactaggataaagagtggagaggctatcatagcaaatgccaattaccatgatacctccccttaccgatggggaggcaaatctgacatagacctggcagtagatgagaatgggctatgggtaatctatgcaacagaacaaaacaatggtaaaattgtcattagtcaattgaacccttacaccctacggatcgaaggaacatgggatactgcatatgataaaaggtcagcttccaatgcctttatgatttgtggaattctgtatgtggtcaaatctgtatatgaggatgatgacaatgaggctactggaaataagattgactacatttacaacactgaccaaagcaaggatagtttggtggatgtaccctttcctaattcataccagtacattgcagctgtggattacaaccccagggacaacctactttatgtatggaataactatcacgtcgtgaaatattctttggattttggacctctggatagtagatcagggcaggcacatcatggacaagtttcatacatttctccgccaattcaccttgactctgagctagaaagaccctctgttaaagatatctctaccacaggacctcttggcatgggaagcactaccaccagtaccacccttcggaccacaactttgagcccaggaaggagtaccaccccgtcagtgtcaggaagaagaaaccggagtactagtaccccatctccagctgtcgaggtacttgatgacatgaccacacaccttccatcagcatcgtcccaaatcccagctctcgaagagagctgtgaggctgtggaagcccgagaaatcatgtggtttaagactcgtcaaggacagatagcaaagcagccatgccctgcaggaactataggtgtatcaacttatctatgccttgctcctgatggaatttgggatccccaaggtccagatctcagcaactgttcttctccttgggtcaatcatataacacagaagttgaaatctggtgaaacagctgccaacattgctagagagctggctgaacagacaagaaatcacttgaatgctggggacatcacctactctgtccgggccatggaccagctggtaggcctcctagatgtacagcttcggaacttgaccccaggtggaaaagatagtgctgcccggagtttgaacaagcttcagaaaagagagcgctcttgcagagcctatgtccaggcaatggtcgagacagttaacaacctccttcagccacaagctttgaatgcatggagagacctgactacgagtgatcagctgcgtgcggccaccatgttgcttcatactgtggaggaaagtgcttttgtgctggctgataaccttttgaagactgacattgtcagggagaatacagacaatattaaattggaagttgcaagactgagcacagaaggaaacttagaagacctaaaatttccagaaaacatgggccatggaagcactatccagctgtctgcaaataccttaaagcaaaatggccgaaatggagagatcagagtggcctttgtcctgtataacaacttgggtccttatttatccacggagaatgccagtatgaagttgggaacggaagctttgtccacaaatcattctgttattgtcaattcccctgttattacggcagcaataaacaaagagttcagtaacaaggtttatttggctgatcctgtggtatttactgttaaacatatcaagcagtcagaggaaaatttcaaccctaactgttcattttggagctactccaagcgtacaatgacaggttattggtcaacacaaggctgtcggctcctgacaacaaataagacacatactacatgctcttgtaaccacctaacaaattttgcagtactgatggcacatgtggaagttaagcacagtgatgcggtccatgacctccttctggatgtgatcacgtgggttggaattttgctgtcccttgtttgtctcctgatttgcatcttcacattttgctttttccgggggctccagagtgaccgtaacaccatccacaagaacctctgcatcagtctctttgtagcagagctgctcttcctgattgggatcaaccgaactgaccaaccaattgcctgtgctgttttcgctgccctgttacatttcttcttcttggctgccttcacctggatgttcctggagggggtgcagctttatatcatgctggtggaggtttttgagagtgaacattcacgtaggaaatacttttatctggtcggctatgggatgcctgcactcattgtggctgtgtcagctgcagtagactacaggagttatggaacagataaagtatgttggctccgacttgacacctacttcatttggagttttataggaccagcaactttgataattatgcttaatgtaatcttccttgggattgctttatataaaatgtttcatcatactgctatactgaaacctgaatcaggctgtcttgataacatcaactatgaggataacagacccttcatcaagtcatgggttataggtgcaatagctcttctctgcctattaggattgacctgggcctttggactcatgtatattaatgaaagcacagtcatcatggcctatctcttcaccattttcaattctctacagggaatgtttatatttattttccattgtgtcctacagaagaaggtacgaaaagagtatgggaaatgcctgcgaacacattgctgtagtggcaaaagtacagagagttccattggttcagggaaaacatctggttctcgaactcctggacgctactccacaggctcacagagccgaatccgtagaatgtggaatgacacggttcgaaagcagtcagagtcttcctttattactggagacataaacagttcagcgtcactcaacagagaggggcttctgaacaatgccagggatacaagtgtcatggatactctaccactgaatggtaaccatggcaatagttacagcattgccagcggcgaatacctgagcaactgtgtgcaaatcatagaccgtggctataaccataacgagaccgccctagagaaaaagattctgaaggaactcacttccaactatatcccttcttacctgaacaaccatgagcgctccagtgaacagaacaggaatctgatgaacaagctggtgaataaccttggcagtggaagggaagatgatgccattgtcctggatgatgccacctcgtttaaccacgaggagagtttgggcctggaactcattcatgaggaatctgatgctcctttgctgcccccaagagtatactccaccgagaaccaccagccacaccattataccagaaggcggatcccccaagaccacagtgagagctttttccctttgctaaccaacgagcacacagaagatctccagtcaccccatagagactctctctataccagcatgccgacactggctggtgtggccgccacagagagtgttaccaccagcacccagaccgaacccccaccggccaaatgtggtgatgccgaagatgtttactacaaaagcatgccaaacctaggctccagaaaccacgtccatcagctgcatacttactaccagctaggtcgcggcagcagtgatggatttatagttcctccaaacaaagatgggacccctcccgagggaagttcaaaaggaccggctcatttggtcactagtctatagaagatgacacagaaattggaaccaacaaaactgctaacaccttgttgactgttctgagttgatataagcagtggtaataatgtgtgtactcctaaatctttatgctgtcctctaaagacaaacacaaactctcagacttttttttttttaatgggatttttaggtcagcccaggggagaaagataactgctaaaattcccctgtaccccatcctttcttgtcctttccccttcagatggagacttcattatgttaatgaacaagatatgaagaaaatggcactcattgtggccttgttgaattatgttgtgtatgttttaacatctctgatgctgtgttactaaaattacaaggacctgctttttaaaaggccagaacaattgtctgaaattagtaacaatgctgcatctagattggagtgctgcacaaacaaacataagagcaaagcaaaactgtatcacatagggtttttggtcactcacaacctgaattcaccacagctggaatagctgtggaaaacaaaataaaacaacaaaattaataatgaaatggaggggaattctagaattatatgctaaatgcatattttatgatttgctgtattaactgatgataaaactaatggcagaaaaagaagttgagcaatttctatgtaatgtacagatactagcattgcacatatagtctgctttctgttcctccagaatttgagtcctgttaatgtagtagaaaaaaaaaaaagaaattttctttttcttttgtgctggtcttgcaagtttgtctaccagtaagagagcaaagtttccttcctttcttctctttcttcattttctttttttcttttttgccttttattcctttaaaatttcgcctggcaaaaaataaataaatggaactatcactttataagaatcattttctagtaatgcaaacaaattattttttacaaaaaaacaaaataaataaaattagacttccttccctcactatatatctttatgcagtcagaatatttccaacagtgttttttgcaaattagagcaggacaaacttttatgtttacagggcacgtctgttgtaatgcaaagcatatttggcaagcagttcatcaccaggacactagctatgattctagaagtcaaaaggtgtctatagaactagtggggcttctgcatgtgaaaaacggttttccataggcattaaagtgctgaatgctcagtctgatcaacaagtgggcacctgcactaccactttttagaggaaattcactccctcgtaagcattggaaggtcaaattattttgaagtgatttttttaaaaaaaagtcttctgtttattaacaggaaaatttatttatttgacaggattttgagtaatgtaggaatacaaaaggtaaattagcagcacatataatttttttttaatttatgatccattttgtatggtctcaaagttggatgacctcattactaatatttgttgtaaaagtgaaacttgtttgccaaccaataaacaactgattgagattt

SEQ ID NO: 105585 - DNA, 3527 bp, Homo sapiens
  Payload ID: 698
  Gene Symbol: ADGRL4
  Gene Name: adhesion G protein-coupled receptor L4
  Uniprot ID: Q9HBW9
  ENST ID: ENST00000370742
  CDS Start-End: 65-2137
cgggtccacagccgcactcactccgccgcgctctccgccaccgccaccactgcggccaccgccaatgaaacgcctcccgctcctagtggttttttccactttgttgaattgttcctatactcaaaattgcaccaagacaccttgtctcccaaatgcaaaatgtgaaatacgcaatggaattgaagcctgctattgcaacatgggattttcaggaaatggtgtcacaatttgtgaagatgataatgaatgtggaaatttaactcagtcctgtggcgaaaatgctaattgcactaacacagaaggaagttattattgtatgtgtgtacctggcttcagatccagcagtaaccaagacaggtttatcactaatgatggaaccgtctgtatagaaaatgtgaatgcaaactgccatttagataatgtctgtatagctgcaaatattaataaaactttaacaaaaatcagatccataaaagaacctgtggctttgctacaagaagtctatagaaattctgtgacagatctttcaccaacagatataattacatatatagaaatattagctgaatcatcttcattactaggttacaagaacaacactatctcagccaaggacaccctttctaactcaactcttactgaatttgtaaaaaccgtgaataattttgttcaaagggatacatttgtagtttgggacaagttatctgtgaatcataggagaacacatcttacaaaactcatgcacactgttgaacaagctactttaaggatatcccagagcttccaaaagaccacagagtttgatacaaattcaacggatatagctctcaaagttttcttttttgattcatataacatgaaacatattcatcctcatatgaatatggatggagactacataaatatatttccaaagagaaaagctgcatatgattcaaatggcaatgttgcagttgcatttgtatattataagagtattggtcctttgctttcatcatctgacaacttcttattgaaacctcaaaattatgataattctgaagaggaggaaagagtcatatcttcagtaatttcagtctcaatgagctcaaacccacccacattatatgaacttgaaaaaataacatttacattaagtcatcgaaaggtcacagataggtataggagtctatgtgcattttggaattactcacctgataccatgaatggcagctggtcttcagagggctgtgagctgacatactcaaatgagacccacacctcatgccgctgtaatcacctgacacattttgcaattttgatgtcctctggtccttccattggtattaaagattataatattcttacaaggatcactcaactaggaataattatttcactgatttgtcttgccatatgcatttttaccttctggttcttcagtgaaattcaaagcaccaggacaacaattcacaaaaatctttgctgtagcctatttcttgctgaacttgtttttcttgttgggatcaatacaaatactaataagctcttctgttcaatcattgccggactgctacactacttctttttagctgcttttgcatggatgtgcattgaaggcatacatctctatctcattgttgtgggtgtcatctacaacaagggatttttgcacaagaatttttatatctttggctatctaagcccagccgtggtagttggattttcggcagcactaggatacagatattatggcacaaccaaagtatgttggcttagcaccgaaaacaactttatttggagttttataggaccagcatgcctaatcattcttgttaatctcttggcttttggagtcatcatatacaaagtttttcgtcacactgcagggttgaaaccagaagttagttgctttgagaacataaggtcttgtgcaagaggagccctcgctcttctgttccttctcggcaccacctggatctttggggttctccatgttgtgcacgcatcagtggttacagcttacctcttcacagtcagcaatgctttccaggggatgttcatttttttattcctgtgtgttttatctagaaagattcaagaagaatattacagattgttcaaaaatgtcccctgttgttttggatgtttaaggtaaacatagagaatggtggataattacaactgcacaaaaataaaaattccaagctgtggatgaccaatgtataaaaatgactcatcaaattatccaattattaactactagacaaaaagtattttaaatcagtttttctgtttatgctataggaactgtagataataaggtaaaattatgtatcatatagatatactatgtttttctatgtgaaatagttctgtcaaaaatagtattgcagatatttggaaagtaattggtttctcaggagtgatatcactgcacccaaggaaagattttctttctaacacgagaagtatatgaatgtcctgaaggaaaccactggcttgatatttctgtgactcgtgttgcctttgaaactagtcccctaccacctcggtaatgagctccattacagaaagtggaacataagagaatgaaggggcagaatatcaaacagtgaaaagggaatgataagatgtattttgaatgaactgttttttctgtagactagctgagaaattgttgacataaaataaagaattgaagaaacacattttaccattttgtgaattgttctgaacttaaatgtccactaaaacaacttagacttctgtttgctaaatctgtttctttttctaatattctaaaaaaaaaaaaaaggtttacctccacaaattgaaaaaaaaaaagtgaaaaaaatctgtttctaaggttagactgagatatatactatttccttacttatttcacagattgtgactttggatagttaatcagtaaaatataaatgtgtcaagatataatattgtttatacctatcaatgtaaaaacagtgtaataaagctgaagtattctattacctttcagtgaagtgaaagttatactatctcattagtatatttgaatcctttattatttttaattttataaatatcacagttcacattgcaatattccctttaatttactatttttaaaggggtattgtaaatatgaaagtatttataaagtgaattgctattttttctgttcagaaaagtacacacttaaaattgttattgttaacaatgtgtaaacacatttaaaattgttattgttaacaaagaaatcatggagaactgtagaggttttcacagtggatccattttctgacagttttctactatctattaaatcatatctgcttaaatatatagcttctatctgtctttaaatcttctcattaaaatgtataagcagtgattttgatctcaaaaataggtaatttttctttgccgacctgtaaaagtgtgccaatacactaaatttgtgattttaaattaattcctccagctgttgaaatgaagtctgccaaatcttgctctaacaaataaaatgttatctaaatgaa

SEQ ID NO: 105586 - DNA, 501 bp, Homo sapiens
  Payload ID: 698
  Gene Symbol: ADGRL4
  Gene Name: adhesion G protein-coupled receptor L4
  ENST ID: ENST00000401034
  CDS Start-End: 1-450
gtggtagttggattttcggcagcactaggatacagatattatggcacaaccaaagtatgttggcttagcaccgaaaacaactttatttggagttttataggaccagcatgcctaatcattcttgttaatctcttggcttttggagtcatcatatacaaagtttttcgtcacactgcagggttgaaaccagaagttagttgctttgagaacataaggtcttgtgcaagaggagccctcgctcttctgttccttctcggcaccacctggatctttggggttctccatgttgtgcacgcatcagtggttacagcttacctcttcacagtcagcaatgctttccaggggatgttcatttttttattcctgtgtgttttatctagaaagattcaagaagaatattacagattgttcaaaaatgtcccctgttgttttggatgtttaagctgttgaaatgaagtctgccaaatcttgctctaacaaataaaatgttatctaaatgaa

SEQ ID NO: 105587 - DNA, 19338 bp, Homo sapiens
  Payload ID: 699
  Gene Symbol: ADGRV1
  Gene Name: adhesion G protein-coupled receptor V1
  Uniprot ID: Q8WXG9
  ENST ID: ENST00000405460
  CDS Start-End: 97-19017
agtaagaatcagcagcgcgggcaaggagtacggacgggagtcagaggcagagcgagggtgtgtggagggccggcggggaccgccgggagcgcgcggatgtcggtgttcctggggccagggatgccctctgcatctttattagtaaatcttctttcagctttactcatcctatttgtgtttggagaaacagaaataagatttactggacaaactgaatttgttgttaatgaaacaagtacaacagttattcgtcttatcattgaaaggataggagagccagcaaatgttactgcaattgtatcgctgtatggagaggacgctggtgacttttttgacacatatgctgcagcttttatacctgccggagaaacaaacagaacagtgtacatagcagtatgtgatgatgacttaccagagcctgacgaaacttttatttttcacttaacattacagaaaccttcagcaaatgtgaagcttggatggccaaggactgttactgtgacaatattatcaaatgacaatgcatttggaattatttcatttaatatgcttccctcaatcgcagtgagtgagcccaagggcagaaatgagtctatgcctcttactctcatcagggaaaagggaacctatggaatggtcatggtgacttttgaggtagagggtggcccaaatccccctgatgaagatttgagtccagttaaaggaaatatcacctttccccctggcagagcaacagtaatttataacttgacagtactcgatgacgaggtaccagaaaatgatgaaatatttttaattcaactgaaaagtgtagaaggaggagctgagattaacacctctaggaattccattgagatcatcattaagaaaaatgatagtcccgtgagattccttcagagtatttatttggttcctgaggaagaccacatactcataattccagtagttcgtggaaaggacaacaatggaaatctgattggatctgatgaatatgaggtttcaatcagttatgctgtcacaactgggaattccacagcacatgcccagcaaaatctggacttcattgatcttcagccaaacacaactgttgtttttccaccttttattcatgaatctcacttgaaatttcaaatagttgatgacaccataccggagattgctgaatcgtttcacattatgttactaaaagataccttacagggagatgctgtgctaataagcccttctgttgtacaagtcaccattaagccaaatgataaaccttatggagtcctttcattcaacagtgttttgtttgaaaggacagttataattgatgaagatagaatatcaagatatgaagaaatcacagtggttagaaatggaggaacccatgggaatgtctctgcgaattgggtgttgacacggaacagcactgatccctcaccagtaacagcagatatcagaccgagctctggagttctccattttgcacaagggcagatgttggcaacaattcctcttactgtggttgatgatgatcttccagaagaggcagaagcttatctacttcaaattctgcctcatacaatacgaggaggtgcagaagtgagcgagccagcggagcttttgttctacattcaggatagtgatgatgtctatggcctaataacattttttcctatggaaaaccagaagattgaaagcagcccaggtgaacgatacttatccttgagttttacaagactaggagggactaaaggagatgtgaggttgctttattctgtactttacattcctgctggagctgtggaccccttgcaagcaaaagaaggcatcttaaatatatcaaggagaaatgacctcatttttccagagcaaaaaactcaagtcactacaaaattaccaataagaaatgatgcattccttcaaaatggagctcactttctagtacagttggaaactgtggagttgttaaacataattcctctaatcccacccataagccctagatttggggaaatctgcaatatttctttactggttactccagccattgcaaatggagaaattggctttctcagcaatcttccaattattttgcatgaaccagaagattttgctgctgaagtggtatacattcccttacatcgggatggaactgatggccaggctactgtctactggagtttgaagccctctggctttaattcaaaagcagtgaccccggatgatataggcccctttaatggctctgttttgtttttatctgggcaaagtgacacaacaatcaacattactatcaaaggtgatgacataccggaaatgaatgaaactgtaacactttctctagacagggttaacgtggaaaaccaagtgctgaaatctggatatactagccgtgacctaattattttggaaaatgatgaccctgggggagtttttgaattttctcctgcttccagaggaccctatgttataaaagaaggagaatctgtagagctccacatcatccgatcaagggggtcccttgttaagcagtttctacactaccgagtagagccaagagatagcaatgaattctatggaaacacgggagtactagaatttaaacctggagaaagggagatagtgatcaccttgctagcaagattggatgggataccagagttggatgaacactactgggtggtcctcagcagccacggagaacgggaaagcaagttgggaagtgccaccattgtcaatataacgattctgaaaaatgatgatcctcatggcattatagaatttgtttctgatggtctaattgtgatgataaatgaaagcaaaggagatgctatctatagtgctgtttatgatgtagtaagaaatcgaggcaactttggtgatgttagtgtatcatgggtggttagtccagactttacacaagatgtatttcctgtacaagggactgttgtctttggagatcaggaattttcaaaaaatatcaccatttactcccttccagatgagattccagaagaaatggaagaatttaccgttatcctactgaatggcactggaggagctaaagtgggaaatagaacaactgcaactctgaggattagaagaaatgatgaccccatttattttgcagaacctcgtgtagtgagggttcaggaaggtgagactgccaactttacagttctcagaaatggatctgttgatgtgacttgcatggtccagtatgctaccaaggatgggaaggctactgcaagagagagagatttcattcctgttgaaaaaggagaaacgctcatttttgaggttggaagtagacagcagagcatatccatatttgttaatgaagatggtatcccggaaacagatgagcccttttatataatcctcttgaattcaacaggtgatacagtagtatatcaatatggagtagctacagtaataattgaagctaatgatgacccaaatggcattttttctctggagcccatagacaaagcagtggaagaaggaaagactaatgcattttggattttgaggcaccgaggatactttggtagtgtttctgtatcttggcagctctttcagaatgattctgctttgcagcctgggcaggagttctatgaaacttcaggaactgttaacttcatggatggagaagaagcaaaaccaatcattctccatgcttttccagataaaattcctgaattcaatgaattttatttcctaaaacttgtaaacatttcaggtggatccccaggtcctgggggccagctagcagaaaccaacctccaggtgacagtaatggttccattcaatgatgatccctttggagtttttatcttggatccagagtgtttagagagagaagtggcagaagatgtcctgtctgaagatgatatgtcttatattaccaacttcaccattttgaggcagcagggtgtgtttggtgatgtacaactgggctgggaaatactgtccagtgagttccctgctggtttgccaccaatgatagattttttactggttggaattttccccaccaccgtgcatttacaacagcacatgcggcgtcaccacagtggaacggatgctttgtactttaccggactagagggtgcatttgggactgttaatccaaaataccatccctccaggaataatacaattgccaactttacattctcagcttgggtaatgcccaatgccaatacgaatggattcattatagcgaaggatgacggtaatggaagcatctactacggggtaaaaatacaaacaaacgaatcccatgtgacactttcccttcattataaaaccttgggttccaatgctacatacattgccaagacaacagtcatgaaatatttagaagaaagtgtttggcttcatctactaattatcctggaggatggtataatcgaattctacctggatggaaatgcaatgcccaggggaatcaagagtctgaaaggagaagccattactgacggtcctgggatactgagaattggagcagggataaatggcaatgacagatttacaggtctgatgcaggatgtgaggtcctatgagcggaaactgacgcttgaagaaatttatgaacttcatgccatgcccgcaaaaagtgatttacacccaatttctggatatctggagttcagacagggagaaactaacaaatcattcattatttctgcaagagatgacaatgacgaggaaggagaagaattattcattcttaaactagtttctgtatatggaggagctcgtatttcggaagaaaatactactgcaagattaacaatacaaaaaagtgacaatgcaaatggcttgtttggtttcacaggagcttgtataccagagattgcagaggagggatcaaccatttcttgtgtggttgagagaaccagaggagctctggattatgtgcatgttttttacaccatttcacagattgaaactgatggcattaattaccttgttgatgactttgctaatgccagtggaactattacattccttccttggcagagatcagaggttctgaatatatatgttcttgatgatgatattcctgaacttaatgagtatttccgtgtgacattggtttctgcaattcctggagatgggaagctaggctcaactcctaccagtggtgcaagcatagatcctgaaaaggaaacgactgatatcaccatcaaagctagtgatcatccatatggcttgctgcagttctccacagggctgcctcctcagcctaaggacgcaatgaccctgcctgcaagcagcgttccacatatcactgtggaggaggaagatggagaaatcaggttattggtcatccgtgcacagggacttctgggaagggtgactgcggaatttagaacagtgtccttgacagcattcagtcctgaggattaccagaatgttgctggcacattagaatttcaaccaggagaaagatataaatacattttcataaacatcactgataattctattcctgaactggaaaaatcttttaaagttgagttgttaaacttggaaggaggagtagctgaactctttagggttgatggaagtggtagtggtgatggggacatggaattcttccttccaactattcacaaacgtgccagtctaggagtggcttcccaaattctagtgacaattgcagcctctgaccacgctcatggcgtatttgaatttagccctgagtcactctttgtcagtggaactgaaccagaagatgggtatagcactgttacattaaatgttataagacatcatggaactctgtctccagtgactttgcattggaacatagactctgatcctgatggtgatctcgccttcacctctggcaacatcacatttgagattgggcagacgagcgccaatatcactgtggagatattgcctgacgaagacccagaactggataaggcattctctgtgtcagtcctcagtgtttccagtggttctttgggagctcatattaatgccacgttaacagttttggctagtgatgatccatatgggatattcattttttctgagaaaaacagacctgttaaagttgaggaagcaacccagaacatcacactatcaataataaggttgaaaggcctcatgggaaaagtccttgtctcatatgcaacactagatgatatggaaaaaccaccttattttccacctaatttagcgagagcaactcaaggaagagactatataccagcttctggatttgctctttttggagctaatcagagtgaggcaacaatagctatttcaattttggatgatgatgagccagaaaggtccgaatctgtctttatcgaactactcaactctactttagtagcgaaagtacagagtcgttcaattccaaattctccacgtcttgggcctaaggtagaaactattgcgcaactaattatcattgccaatgatgatgcatttggaactcttcagctctcagcaccaattgtccgagtggcagaaaatcatgttggacccattatcaatgtgactagaacaggaggagcatttgcagatgtctctgtgaagtttaaagctgtgccaataactgcaatagctggtgaagattatagtatagcttcatcagatgtggtcttgctagaaggggaaaccagtaaagccgtgccaatatatgtcattaatgatatctatcctgaactggaagaatcttttcttgtgcaactgatgaatgaaacaacaggaggagccagactaggggctttaacagaggcagtcattattattgaggcctctgatgacccctatggattatttggttttcagattactaaacttattgtagaggaacctgagtttaactcagtgaaggtaaacctgccaataattcgaaattctgggacactcggcaatgttactgttcagtgggttgccaccattaatggacagcttgctactggcgacctgcgagttgtctcaggtaatgtgacctttgcccctggggaaaccattcaaaccttgttgttagaggtcctggctgacgacgttccggagattgaagaggttatccaagtgcaactaactgatgcctctggtggaggtactattgggttagatcgaattgcaaatattattattcctgccaatgatgatccttatggtacagtagcctttgctcagatggtttatcgtgttcaagagcctctggaaagaagttcctgtgctaatataactgtcaggcgaagcggagggcactttggtcggctgttgttgttctacagtacttccgacattgatgtagtggctctggcaatggaggaaggtcaagatttactgtcctactatgaatctccaattcaaggggtgcctgacccactttggagaacttggatgaatgtctctgccgtgggggagcccctgtatacctgtgccactttgtgccttaaggaacaagcttgctcagcgttttcatttttcagtgcttctgagggtccccagtgtttctggatgacatcatggatcagcccagctgtcaacaattcagacttctggacctacaggaaaaacatgaccagggtagcatctctttttagtggtcaggctgtggctgggagtgactatgagcctgtgacaaggcaatgggccataatgcaggaaggtgatgaattcgcaaatctcacagtgtctattcttcctgatgatttcccagagatggatgagagttttctaatttctctccttgaagttcacctcatgaacatttcagccagtttgaaaaatcagccaaccataggacagccaaatatttctacagttgtcatagcactaaatggtgatgcctttggagtgtttgtgatctacaatattagtcccaatacttccgaagatggcttatttgttgaagttcaggagcagccccaaaccttggtggagctgatgatacacaggacagggggcagcttaggtcaagtggcagtcgaatggcgtgttgttggtggaacagctactgaaggtttagattttataggtgctggagagattctgacctttgctgaaggtgaaaccaaaaagacagtcattttaaccatcttggatgactctgaaccagaggatgacgaaagtatcatagttagtttggtgtacactgaaggtggaagtagaattttgccaagctccgacactgttagagtgaacattttggccaatgacaatgtggcaggaattgttagctttcagacagcttccagatctgtcataggtcatgaaggagaaattttacaattccatgtgataagaactttccctggtcgaggaaatgttactgttaactggaaaattattgggcaaaatctagaactcaattttgctaactttagcggacaacttttctttcctgaggggtcgttgaatacaacattgtttgtgcatttgttggatgacaacattcctgaggagaaagaagtataccaagtcattctgtatgatgtcaggacacaaggagttccaccagccggaatcgccctgcttgatgctcaaggatatgcagctgtcctcacagtagaagccagtgatgaaccacatggagttttaaattttgctctttcatcaagatttgtgttactacaagaggctaacataacaattcagcttttcatcaacagagaatttggatctctaggagctatcaatgtcacatataccacggttcctggaatgctgagtctgaagaaccaaacagtaggaaacctagcagagccagaagttgattttgtccctatcattggctttctgattttagaagaaggggaaacagcagcagccatcaacattaccattcttgaggatgatgtaccagagctagaagaatatttcctggtgaatttaacttacgttggacttaccatggctgcttcaacttcatttcctcccagactagattcagaaggtttgactgcacaagttattattgatgccaatgatggggcccgaggtgtaattgaatggcaacaaagcaggtttgaagtaaatgaaacccatggaagtttaacattggtagcccagaggagcagagaacctcttggccatgtttccttatttgtgtatgctcagaatttggaagcacaagtggggctggattatatcttcaccccaatgattcttcattttgctgatggagaaaggtataaaaatgtcaatatcatgattcttgatgatgacattccagaaggagatgaaaaatttcagctgattttaacaaatccttctcctggactagagctagggaaaaatacaatagccttaattattgtccttgctaatgatgacggccctggagttctatcatttaacaacagtgagcactttttcctaagagagccaacagctctctacgtccaggagagtgttgcagtattgtacattgttcgggaacctgcacaaggattgtttggaacagtgacagttcagttcattgtgacagaagtgaattcctcaaatgaatctaaagatctgactccttccaaaggctatattgttttagaagaaggtgttcgattcaaggccctacaaatatctgccatattagacacggaaccagaaatggatgagtattttgtttgcaccttgtttaatccaactggaggtgctagactaggggtgcatgttcaaaccctgataacagttttgcaaaaccaggcccctttggggctattcagtatctctgcagttgaaaatagagccacctccatagacatcgaagaagccaataggaccgtgtatttaaatgtatctcgaactaatggcattgatttggctgtgagtgtgcagtgggagacagtatctgaaacagcctttggcatgaggggaatggatgttgtgttttccgtatttcaaagttttttggatgaatcagcttctggctggtgtttctttactttggaaaatttaatatatggtataatgttaagaaaatcatctgttactgtttaccgatggcaggggatttttattccagttgaggatttaaatatagaaaatcctaaaacttgtgaggcctttaatattggtttttctccctactttgtgattactcatgaagaaagaaatgaagaaaagccttctcttaacagtgtgtttacattcacatctggatttaaattattcctggtacaaacaatcattattctggaaagttctcaagtaagatattttacttcagacagccaagattatttaatcattgcaagtcaaagagatgattccgaattaactcaggtcttcaggtggaatggaggaagcttcgtgttgcatcaaaaactccctgtccgaggtgtgctgaccgtggccttgttcaacaagggaggctctgtgttcttagccatttcccaggctaatgccaggctaaactcccttttattcagatggtctggcagtgggtttattaactttcaagaggtgcctgtcagtgggacaacagaagttgaggctttgtcttcagccaatgatatttacctaatatttgccgaaaatgtctttctaggagatcagaattcaattgatattttcatctgggagatgggacagtcttccttcaggtattttcagtctgtagattttgctgctgttaacagaatccactccttcacaccagcctcaggaatagcccacatacttcttattggccaagatatgtctgctctttactgctggaattcggagcgtaatcaattctcttttgttctggaagtaccttctgcttatgatgtggcttctgttacagtaaagtcccttaattcaagcaagaatttaatagctctagtgggagctcattcacatatatatgagctagcctacatttccagccattctgactttattcctagttcaggtgaactgatatttgaacctggtgagagagaagctacaatagcagtaaatatccttgatgatacagttccagaaaaagaagaatccttcaaagttcaacttaaaaatcccaaaggaggagcagagattggcattaatgattctgtaacaataaccattctgtctaatgatgatgcctatggaattgttgcatttgctcagaattcattatataagcaagtggaagaaatggagcaagatagcctagtaaccttgaacgttgaacgcttaaaaggaacatatggccgtataaccatagcatgggaagctgatggaagtattagtgatatatttcctacctcaggagtgattttatttactgaaggccaggtactgtcaacaatcactctaactattcttgctgataatataccagagttatcagaggttgtgattgtaaccctcacccgtatcaccacagaaggggttgaggactcatacaaaggtgctactattgatcaggacagaagcaagtctgttataacaactttgcccaatgactcaccttttggcttggtgggctggcgtgctgcgtctgtcttcattagagtagcagagcctaaagaaaacaccaccactcttcagttacaaatagctcgagataaaggactacttggggatattgccattcacttgagagctcaacccaatttcttactgcatgtcgataatcaagctactgagaatgaagattatgtattgcaagaaacaataataataatgaaagaaaacataaaagaagctcatgccgaagtttccattttgccggatgaccttcctgaattggaggaaggatttattgtcactatcactgaggtgaacctggtgaactctgacttctctacaggacagccaagtgtgcggaggcccggaatggaaatagctgagataatgatagaagaaaatgacgatcccagaggaatttttatgtttcatgttactagaggcgctggggaagttattactgcctatgaggtgcctccacccttgaacgttcttcaagttcctgtagtccggctggctggaagctttggggcagtaaatgtttattggaaagcatcaccagacagtgctggcctggaagactttaaaccatctcatgggattcttgaatttgcagataaacaggttactgcaatgatagaaatcaccataattgatgatgctgaatttgaattgacagagacgttcaatatttccttgatcagtgttgctggaggtggcagacttggtgatgatgttgtggtaactgttgttattccacaaaatgattctccatttggagtatttggatttgaagaaaagactgtaatgattgatgaatccctttcatccgatgaccctgattcatatgtgacattgacggttgtccggtccccaggaggaaaaggaaccgtccgacttgagtggaccatagatgagaaggctaaacataaccttagtcctttgaatgggacccttcattttgatgagactgagtcccagaagaccattgtgttgcacacacttcaagacacagtgttggaggaggacaggcgtttcaccattcagctgatatcaattgatgaggtagaaatatctccagtaaaaggtagtgcatcaataattattcggggtgataagcgagcatcaggagaagttgggatagctccgtcatctaggcacatcctcattggggaaccctcagcaaaatataatggtaccgctattatcagccttgttcgaggcccagggattttgggggaggtcacagtgttctggaggatattccctccttccgtgggggaatttgctgaaacatcaggaaaactgacaatgcgagacgaacagtctgcagtcattgtagtaatacaggctttgaacgatgacattcccgaggaaaaaagcttctatgagtttcagctcactgcagtcagtgagggaggagttctgagtgaatccagcagcactgccaacatcacggtggtggccagcgactctccctatggccgatttgccttttcacatgagcaacttcgagtgtcagaagcacagagggttaacatcacaatcatccgttccagtggagattttggccatgtgcgactctggtacaagacgatgagcgggacagcggaagcaggcttggattttgttcctgcagcaggggagctcctctttgaagcaggggagatgaggaaaagtctgcatgttgaaatccttgatgatgactatcctgaaggcccagaggaattttctctaacaattacaaaggtggaactccagggaagagggtatgattttaccattcaagaaaatggacttcagatagatcaacctcctgaaataggaaacatctccattgttcgcatcataataatgaaaaatgataacgcagaaggcatcattgaatttgacccaaagtatactgccttcgaagtggaggaagatgttgggctgatcatgatcccagtggtgaggctacatggaacttatggctatgtgacagctgatttcatctctcagagctcctctgccagtcccggaggtgttgattacattttgcatggcagtacagtcacctttcagcatgggcaaaacttaagttttataaatatctccatcattgatgacaatgaaagtgaatttgaggagcccattgaaattctactcactggagctactggaggagcggtccttgggcgccacctagtgagcagaatcataatagctaagagtgactctccctttggagttataaggtttctcaatcaaagcaaaatttctattgctaatcccaattccacaatgattttatcactggtgctggagcggactggaggactcttgggagagattcaggtgaactgggagacagtaggacccaactctcaagaagccttactgccacagaatagagacattgcagacccagtgagcgggttgttctattttggagaaggagaaggaggagtgagaaccataattctgacaatctatcctcatgaagaaattgaagttgaagagacattcattattaaacttcatcttgtgaaaggagaagctaaattagactccagagctaaagatgttacattaaccatacaagagtttggtgacccaaatggagttgttcagtttgctcctgaaactttgtctaagaagacttattcagagcctctggctctggaagggcccctgctcattaccttctttgtcagaagagtcaagggcacctttggagagattatggtttactgggaattaagtagtgagtttgacattactgaagactttctttccaccagtggatttttcaccattgctgatggagagagtgaagctagctttgatgttcatttgctaccagatgaggtacctgagatagaggaagattatgtgatccagcttgtttctgtagagggaggagccgaactggatctggagaagagtatcacatggttctctgtttatgcaaatgatgacccacatggagtatttgccctgtattcggatcgccagtcaatacttattgggcagaaccttattagatccatccaaattaacataacccggcttgctggaacatttggagatgtggctgttgggcttcgaatatcatcggatcataaagaacagccgattgttaccgaaaatgcagagaggcagctggtggtcaaagatggtgccacatataaagtggacgtggtgccaataaagaatcaggtcttcctatcactgggctctaatttcactttgcaactggtgactgtgatgcttgtcggtggacgtttctatggaatgccaacaattcttcaggaagcaaaatctgctgtccttccagtctctgagaaagctgccaattctcaggtcggatttgaatccactgcttttcaactcatgaacatcactgctggcacaagccacgttatgatttctaggagaggcacatatggagctctctcggttgcctggaccactggatatgctcctgggttagaaattcctgaattcattgttgttggcaacatgaccccaacactggggagcctttcattttcccacggtgaacaaaggaaaggagttttcctgtggacgtttcctagccctggttggccagaggcctttgttcttcacctatcaggagtgcagagcagtgctcctggcggagctcaactccgatcaggtttcattgttgctgaaattgaaccaatgggcgtcttccaattttccactagctcaagaaatatcatagtgtcagaagatacacagatgatcagattacatgtacaaagactatttgggttccacagcgatcttattaaagtttcttatcagaccactgcaggaagcgccaagccactggaagattttgagcctgttcagaatggggaactgttttttcaaaaattccaaactgaggttgattttgaaataaccattattaatgatcagctttctgagatagaagaatttttttacattaaccttacttcagtagaaattaggggattacaaaagtttgatgttaattggagcccacgcctgaatctagatttcagtgttgcagtgattacaatattggataatgatgacctggcaggaatggatatttccttccccgagacaactgtggctgtagcagttgacacaactctcattcctgtagaaactgaatccaccacatacctcagcacaagcaagacgactaccattctgcagccaaccaacgtggttgccattgttactgaggcaactggtgtatctgccatccctgagaaacttgtcacccttcatggcacacctgctgtgtctgaaaagcctgatgtggccactgtaactgccaatgtttccattcatggaacattcagccttgggccatccattgtttatattgaagaggagatgaagaatggcacattcaacactgcagaagttcttatccgaagaactggtgggtttactggcaatgtcagcataacagttaaaactttcggtgaaagatgtgctcagatggaaccaaatgcattgccctttcgtggtatctatgggatttccaacctaacatgggcagttgaagaagaagactttgaagaacaaactcttacccttatattcctagatggagaaagagaacgtaaagtatcagttcaaattttggatgatgatgagcctgaggggcaggaattcttctacgtgtttctcacaaaccctcaagggggagcacagattgtggaggagaaggatgatactggatttgcagcttttgccatggttattattacagggagtgaccttcacaatggcatcataggattcagtgaggagtcccagagtggactagaactcagggaaggagctgttatgagaagattgcaccttattgtcacaagacagccaaacagggcctttgaagatgtcaaggtcttttggcgagtcacacttaacaaaacagtcgtcgtgctccagaaggatggggtaaacctggtggaggaacttcagtctgtgtcagggaccacaacctgtacaatgggtcaaacaaaatgctttatcagcattgaactcaaaccagaaaaggtaccacaggttgaagtgtatttttttgtggaactatatgaagctactgctggagcagcaataaacaacagtgccagattcgcacagattaaaatcttagaaagtgatgaatctcaaagccttgtgtatttttctgtgggttctcggctggcagtggctcacaagaaggccactttaatcagtctgcaggtggccagagattctgggacaggactaatgatgtctgttaactttagtacccaggagttgaggagtgctgaaacaattggtcgtaccatcatatctccagctatttctggaaaggattttgtgataactgaaggcacattggtctttgaacctggccagagaagcactgtattggatgtcatcctaacgccagagacaggatctttaaattcatttcctaaacgcttccagattgtcctttttgacccaaaaggtggtgccagaattgataaagtgtatgggactgccaacatcactcttgtctcagatgcagattcgcaggccatttgggggcttgcagatcagctacatcagcctgtgaatgatgatattctcaacagagtgctccataccatcagcatgaaagtggccacagaaaacacagatgaacaactcagtgccatgatgcatttaatagaaaagataactactgaaggaaaaattcaagctttcagtgttgccagccgaactcttttctatgagattctttgttctcttattaacccaaagcgcaaggacactaggggattcagtcactttgctgaagtgactgagaattttgccttttctctgctgactaatgttacttgcggctctcctggtgaaaaaagcaaaaccatccttgatagttgcccatatttgtcaatattggctcttcactggtatcctcagcaaatcaatggacacaagtttgaaggaaaggaaggagattacattcgaattccagagaggctactggatgtccaggatgcagaaataatggctgggaaaagtacatgtaaattagtccagtttacagagtatagcagccaacagtggtttataagtggaaacaatcttcctaccctaaaaaataaggtattatctttgagtgtgaaaggtcagagttcacaactcctgactaatgacaatgaggttctctacaggatttatgctgctgagcctagaattattcctcagacatctctgtgtctcctttggaatcaggctgctgcaagctggttgtctgacagtcagttttgcaaagtggttgaggaaactgcagactatgtggaatgtgcctgttcacacatgtctgtgtatgctgtctatgctcggactgacaacttgtcttcatacaatgaagccttcttcacttctggatttatatgtatctcaggtctttgcttggctgttctttcccatatcttctgtgccaggtactccatgtttgcagctaaacttctgactcacatgatggcagccagcttaggtacacagattctgtttctggcgtctgcatacgcaagtccccaactcgctgaggagagctgttcagctatggctgctgtcacacattacctgtatctttgccagtttagctggatgctcattcagtctgtgaatttctggtacgtgctggtgatgaatgatgagcacacagagaggcgatatctgctgtttttccttctgagttggggactaccagcttttgtggtgattctcctcatagttattttgaaaggaatctatcatcagagcatgtcacagatctatggactcattcatggtgacctgtgttttattccaaacgtctatgctgctttgttcactgcagctcttgttcctttgacgtgcctcgtggtggtgttcgtggtgttcatccatgcctaccaggtgaagccacagtggaaagcatatgatgatgtcttcagaggaaggacaaatgctgcagaaattccactgattttatatctctttgctctgatttccgtgacatggctttggggaggactacacatggcctacagacacttctggatgttggttctctttgtcattttcaacagtctgcagggactttatgttttcatggtttatttcattttacacaaccaaatgtgttgccctatgaaggccagttacactgtggaaatgaatgggcatcctggacccagcacagcctttttcacgcccgggagtggaatgcctcctgctggaggggaaatcagcaagtccacccagaatctcatcggtgctatggaggaggtgccacctgactgggagagagcatccttccaacagggcagtcaggccagccctgatttaaagccaagtccacaaaatggagccacgttcccgtcctctggaggatatggccaggggtcactgatagccgatgaggagtcccaggagtttgatgatttaatatttgcattaaaaactggtgctggtctcagtgtcagtgataatgaatctggtcaaggcagccaggaggggggcaccttgactgactcccagatcgtggagctcaggaggatacccatcgccgacactcacctgtagcacctcactaaccattcgactgagcacactttcatatttgtatcagcttttgtgctaaaactctctaagtacatccacctgtgtaataggaacctgtgaattgtactggatgattaatacaaacgtgattgttgtatttggagtataaattactgattgtatgtgacctgaaaattcactgctataagaaaggtggagtcagtttgtatcagttaataggatgttcatattccaaggatattagttgtttttttaatcatcctatatggctaacattgtttaatgaaagtaataatcaataaagcaatagaatctatttgg

SEQ ID NO: 105588 - DNA, 6503 bp, Homo sapiens
  Payload ID: 699
  Gene Symbol: ADGRV1
  Gene Name: adhesion G protein-coupled receptor V1
  Uniprot ID: Q8WXG9
  ENST ID: ENST00000425867
  CDS Start-End: 285-6188
attactgtatatgtatgtattcagccgtgattcccaaaggttcattttatgacagcatctttctgatttcctcacagtttattatcttcccattgcccaagtttagtaactttatattagttttggcttcgtacaggcaccactcattgggagcaacacagaaatctgtttcaaaacatcatttcaggaaaaagagaatattttagcgttgaggatctttaaaagtattgcagtactttatagaactaagttgtaggagctaagaggatcttttaattcatgctatgcaattatgtattttttgttgttgttgtattttattttattttgatttgtatgactttggaagagggtatgattttaccattcaagaaaatggacttcagatagatcaacctcctgaaataggaaacatctccattgttcgcatcataataatgaaaaatgataacgcagaaggcatcattgaatttgacccaaagtatactgccttcgaagtggaggaagatgttgggctgatcatgatcccagtggtgaggctacatggaacttatggctatgtgacagctgatttcatctctcagagctcctctgccagtcccggaggtgttgattacattttgcatggcagtacagtcacctttcagcatgggcaaaacttaagttttataaatatctccatcattgatgacaatgaaagtgaatttgaggagcccattgaaattctactcactggagctactggaggagcggtccttgggcgccacctagtgagcagaatcataatagctaagagtgactctccctttggagttataaggtttctcaatcaaagcaaaatttctattgctaatcccaattccacaatgattttatcactggtgctggagcggactggaggactcttgggagagattcaggtgaactgggagacagtaggacccaactctcaagaagccttactgccacagaatagagacattgcagacccagtgagcgggttgttctattttggagaaggagaaggaggagtgagaaccataattctgacaatctatcctcatgaagaaattgaagttgaagagacattcattattaaacttcatcttgtgaaaggagaagctaaattagactccagagctaaagatgttacattaaccatacaagagtttggtgacccaaatggagttgttcagtttgctcctgaaactttgtctaagaagacttattcagagcctctggctctggaagggcccctgctcattaccttctttgtcagaagagtcaagggcacctttggagagattatggtttactgggaattaagtagtgagtttgacattactgaagactttctttccaccagtggatttttcaccattgctgatggagagagtgaagctagctttgatgttcatttgctaccagatgaggtacctgagatagaggaagattatgtgatccagcttgtttctgtagagggaggagccgaactggatctggagaagagtatcacatggttctctgtttatgcaaatgatgacccacatggagtatttgccctgtattcggatcgccagtcaatacttattgggcagaaccttattagatccatccaaattaacataacccggcttgctggaacatttggagatgtggctgttgggcttcgaatatcatcggatcataaagaacagccgattgttaccgaaaatgcagagaggcagctggtggtcaaagatggtgccacatataaagtggacgtggtgccaataaagaatcaggtcttcctatcactgggctctaatttcactttgcaactggtgactgtgatgcttgtcggtggacgtttctatggaatgccaacaattcttcaggaagcaaaatctgctgtccttccagtctctgagaaagctgccaattctcaggtcggatttgaatccactgcttttcaactcatgaacatcactgctggcacaagccacgttatgatttctaggagaggcacatatggagctctctcggttgcctggaccactggatatgctcctgggttagaaattcctgaattcattgttgttggcaacatgaccccaacactggggagcctttcattttcccacggtgaacaaaggaaaggagttttcctgtggacgtttcctagccctggttggccagaggcctttgttcttcacctatcaggagtgcagagcagtgctcctggcggagctcaactccgatcaggtttcattgttgctgaaattgaaccaatgggcgtcttccaattttccactagctcaagaaatatcatagtgtcagaagatacacagatgatcagattacatgtacaaagactatttgggttccacagcgatcttattaaagtttcttatcagaccactgcaggaagcgccaagccactggaagattttgagcctgttcagaatggggaactgttttttcaaaaattccaaactgaggttgattttgaaataaccattattaatgatcagctttctgagatagaagaatttttttacattaaccttacttcagtagaaattaggggattacaaaagtttgatgttaattggagcccacgcctgaatctagatttcagtgttgcagtgattacaatattggataatgatgacctggcaggaatggatatttccttccccgagacaactgtggctgtagcagttgacacaactctcattcctgtagaaactgaatccaccacatacctcagcacaagcaagacgactaccattctgcagccaaccaacgtggttgccattgttactgaggcaactggtgtatctgccatccctgagaaacttgtcacccttcatggcacacctgctgtgtctgaaaagcctgatgtggccactgtaactgccaatgtttccattcatggaacattcagccttgggccatccattgtttatattgaagaggagatgaagaatggcacattcaacactgcagaagttcttatccgaagaactggtgggtttactggcaatgtcagcataacagttaaaactttcggtgaaagatgtgctcagatggaaccaaatgcattgccctttcgtggtatctatgggatttccaacctaacatgggcagttgaagaagaagactttgaagaacaaactcttacccttatattcctagatggagaaagagaacgtaaagtatcagttcaaattttggatgatgatgagcctgaggggcaggaattcttctacgtgtttctcacaaaccctcaagggggagcacagattgtggaggagaaggatgatactggatttgcagcttttgccatggttattattacagggagtgaccttcacaatggcatcataggattcagtgaggagtcccagagtggactagaactcagggaaggagctgttatgagaagattgcaccttattgtcacaagacagccaaacagggcctttgaagatgtcaaggtcttttggcgagtcacacttaacaaaacagtcgtcgtgctccagaaggatggggtaaacctggtggaggaacttcagtctgtgtcagggaccacaacctgtacaatgggtcaaacaaaatgctttatcagcattgaactcaaaccagaaaaggtaccacaggttgaagtgtatttttttgtggaactatatgaagctactgctggagcagcaataaacaacagtgccagattcgcacagattaaaatcttagaaagtgatgaatctcaaagccttgtgtatttttctgtgggttctcggctggcagtggctcacaagaaggccactttaatcagtctgcaggtggccagagattctgggacaggactaatgatgtctgttaactttagtacccaggagttgaggagtgctgaaacaattggtcgtaccatcatatctccagctatttctggaaaggattttgtgataactgaaggcacattggtctttgaacctggccagagaagcactgtattggatgtcatcctaacgccagagacaggatctttaaattcatttcctaaacgcttccagattgtcctttttgacccaaaaggtggtgccagaattgataaagtgtatgggactgccaacatcactcttgtctcagatgcagattcgcaggccatttgggggcttgcagatcagctacatcagcctgtgaatgatgatattctcaacagagtgctccataccatcagcatgaaagtggccacagaaaacacagatgaacaactcagtgccatgatgcatttaatagaaaagataactactgaaggaaaaattcaagctttcagtgttgccagccgaactcttttctatgagattctttgttctcttattaacccaaagcgcaaggacactaggggattcagtcactttgctgaagtgactgagaattttgccttttctctgctgactaatgttacttgcggctctcctggtgaaaaaagcaaaaccatccttgatagttgcccatatttgtcaatattggctcttcactggtatcctcagcaaatcaatggacacaagtttgaaggaaaggaaggagattacattcgaattccagagaggctactggatgtccaggatgcagaaataatggctgggaaaagtacatgtaaattagtccagtttacagagtatagcagccaacagtggtttataagtggaaacaatcttcctaccctaaaaaataaggtattatctttgagtgtgaaaggtcagagttcacaactcctgactaatgacaatgaggttctctacaggatttatgctgctgagcctagaattattcctcagacatctctgtgtctcctttggaatcaggctgctgcaagctggttgtctgacagtcagttttgcaaagtggttgaggaaactgcagactatgtggaatgtgcctgttcacacatgtctgtgtatgctgtctatgctcggactgacaacttgtcttcatacaatgaagccttcttcacttctggatttatatgtatctcaggtctttgcttggctgttctttcccatatcttctgtgccaggtactccatgtttgcagctaaacttctgactcacatgatggcagccagcttaggtacacagattctgtttctggcgtctgcatacgcaagtccccaactcgctgaggagagctgttcagctatggctgctgtcacacattacctgtatctttgccagtttagctggatgctcattcagtctgtgaatttctggtacgtgctggtgatgaatgatgagcacacagagaggcgatatctgctgtttttccttctgagttggggactaccagcttttgtggtgattctcctcatagttattttgaaaggaatctatcatcagagcatgtcacagatctatggactcattcatggtgacctgtgttttattccaaacgtctatgctgctttgttcactgcagctcttgttcctttgacgtgcctcgtggtggtgttcgtggtgttcatccatgcctaccaggtgaagccacagtggaaagcatatgatgatgtcttcagaggaaggacaaatgctgcagaaattccactgattttatatctctttgctctgatttccgtgacatggctttggggaggactacacatggcctacagacacttctggatgttggttctctttgtcattttcaacagtctgcagggactttatgttttcatggtttatttcattttacacaaccaaatgtgttgccctatgaaggccagttacactgtggaaatgaatgggcatcctggacccagcacagcctttttcacgcccgggagtggaatgcctcctgctggaggggaaatcagcaagtccacccagaatctcatcggtgctatggaggaggtgccacctgactgggagagagcatccttccaacagggcagtcaggccagccctgatttaaagccaagtccacaaaatggagccacgttcccgtcctctggaggatatggccaggggtcactgatagccgatgaggagtcccaggagtttgatgatttaatatttgcattaaaaactggtgctggtctcagtgtcagtgataatgaatctggtcaaggcagccaggaggggggcaccttgactgactcccagatcgtggagctcaggaggatacccatcgccgacactcacctgtagcacctcactaaccattcgactgagcacactttcatatttgtatcagcttttgtgctaaaactctctaagtacatccacctgtgtaataggaacctgtgaattgtactggatgattaatacaaacgtgattgttgtatttggagtataaattactgattgtatgtgacctgaaaattcactgctataagaaaggtggagtcagtttgtatcagttaataggatgttcatattccaaggatattagttgtttttttaatcatcctatatggctaacattgtttaatgaaagtaataatcaataaagcaatagaatct

SEQ ID NO: 105589 - DNA, 5211 bp, Homo sapiens
  Payload ID: 699
  Gene Symbol: ADGRV1
  Gene Name: adhesion G protein-coupled receptor V1
  ENST ID: ENST00000509621
  CDS Start-End: 1-4826
ccctgtatacctgtgccactttgtgccttaaggaacaagcttgctcagcgttttcatttttcagtgcttctgagggtccccagtgtttctggatgacatcatggatcagcccagctgtcaacaattcagacttctggacctacaggaaaaacatgaccagggtagcatctctttttagtggtcaggctgtggctgggagtgactatgagcctgtgacaaggcaatgggccataatgcaggaaggtgatgaattcgcaaatctcacagtgtctattcttcctgatgatttcccagagatggatgagagttttctaatttctctccttgaagttcacctcatgaacatttcagccagtttgaaaaatcagccaaccataggacagccaaatatttctacagttgtcatagcactaaatggtgatgcctttggagtgtttgtgatctacaatattagtcccaatacttccgaagatggcttatttgttgaagttcaggagcagccccaaaccttggtggagctgatgatacacaggacagggggcagcttaggtcaagtggcagtcgaatggcgtgttgttggtggaacagctactgaaggtttagattttataggtgctggagagattctgacctttgctgaaggtgaaaccaaaaagacagtcattttaaccatcttggatgactctgaaccagaggatgacgaaagtatcatagttagtttggtgtacactgaaggtggaagtagaattttgccaagctccgacactgttagagtgaacattttggccaatgacaatgtggcaggaattgttagctttcagacagcttccagatctgtcataggtcatgaaggagaaattttacaattccatgtgataagaactttccctggtcgaggaaatgttactgttaactggaaaattattgggcaaaatctagaactcaattttgctaactttagcggacaacttttctttcctgaggggtcgttgaatacaacattgtttgtgcatttgttggatgacaacattcctgaggagaaagaagtataccaagtcattctgtatgatgtcaggacacaaggagttccaccagccggaatcgccctgcttgatgctcaaggatatgcagctgtcctcacagtagaagccagtgatgaaccacatggagttttaaattttgctctttcatcaagatttgtgttactacaagaggctaacataacaattcagcttttcatcaacagagaatttggatctctaggagctatcaatgtcacatataccacggttcctggaatgctgagtctgaagaaccaaacagtaggaaacctagcagagccagaagttgattttgtccctatcattggctttctgattttagaagaaggggaaacagcagcagccatcaacattaccattcttgaggatgatgtaccagagctagaagaatatttcctggtgaatttaacttacgttggacttaccatggctgcttcaacttcatttcctcccagactagattcagaaggtttgactgcacaagttattattgatgccaatgatggggcccgaggtgtaattgaatggcaacaaagcaggtttgaagtaaatgaaacccatggaagtttaacattggtagcccagaggagcagagaacctcttggccatgtttccttatttgtgtatgctcagaatttggaagcacaagtggggctggattatatcttcaccccaatgattcttcattttgctgatggagaaaggtataaaaatgtcaatatcatgattcttgatgatgacattccagaaggagatgaaaaatttcagctgattttaacaaatccttctcctggactagagctagggaaaaatacaatagccttaattattgtccttgctaatgatgacggccctggagttctatcatttaacaacagtgagcactttttcctaagagagccaacagctctctacgtccaggagagtgttgcagtattgtacattgttcgggaacctgcacaaggattgtttggaacagtgacagttcagttcattgtgacagaagtgaattcctcaaatgaatctaaagatctgactccttccaaaggctatattgttttagaagaaggtgttcgattcaaggccctacaaatatctgccatattagacacggaaccagaaatggatgagtattttgtttgcaccttgtttaatccaactggaggtgctagactaggggtgcatgttcaaaccctgataacagttttgcaaaaccaggcccctttggggctattcagtatctctgcagttgaaaatagagccacctccatagacatcgaagaagccaataggaccgtgtatttaaatgtatctcgaactaatggcattgatttggctgtgagtgtgcagtgggagacagtatctgaaacagcctttggcatgaggggaatggatgttgtgttttccgtatttcaaagttttttggatgaatcagcttctggctggtgtttctttactttggaaaatttaatatatggtataatgttaagaaaatcatctgttactgtttaccgatggcaggggatttttattccagttgaggatttaaatatagaaaatcctaaaacttgtgaggcctttaatattggtttttctccctactttgtgattactcatgaagaaagaaatgaagaaaagccttctcttaacagtgtgtttacattcacatctggatttaaattattcctggtacaaacaatcattattctggaaagttctcaagtaagatattttacttcagacagccaagattatttaatcattgcaagtcaaagagatgattccgaattaactcaggtcttcaggtggaatggaggaagcttcgtgttgcatcaaaaactccctgtccgaggtgtgctgaccgtggccttgttcaacaagggaggctctgtgttcttagccatttcccaggctaatgccaggctaaactcccttttattcagatggtctggcagtgggtttattaactttcaagaggtgcctgtcagtgggacaacagaagttgaggctttgtcttcagccaatgatatttacctaatatttgccgaaaatgtctttctaggagatcagaattcaattgatattttcatctgggagatgggacagtcttccttcaggtattttcagtctgtagattttgctgctgttaacagaatccactccttcacaccagcctcaggaatagcccacatacttcttattggccaagatatgtctgctctttactgctggaattcggagcgtaatcaattctcttttgttctggaagtaccttctgcttatgatgtggcttctgttacagtaaagtcccttaattcaagcaagaatttaatagctctagtgggagctcattcacatatatatgagctagcctacatttccagccattctgactttattcctagttcaggtgaactgatatttgaacctggtgagagagaagctacaatagcagtaaatatccttgatgatacagttccagaaaaagaagaatccttcaaagttcaacttaaaaatcccaaaggaggagcagagattggcattaatgattctgtaacaataaccattctgtctaatgatgatgcctatggaattgttgcatttgctcagaattcattatataagcaagtggaagaaatggagcaagatagcctagtaaccttgaacgttgaacgcttaaaaggaacatatggccgtataaccatagcatgggaagctgatggaagtattagtgatatatttcctacctcaggagtgattttatttactgaaggccaggtactgtcaacaatcactctaactattcttgctgataatataccagagttatcagaggttgtgattgtaaccctcacccgtatcaccacagaaggggttgaggactcatacaaaggtgctactattgatcaggacagaagcaagtctgttataacaactttgcccaatgactcaccttttggcttggtgggctggcgtgctgcgtctgtcttcattagagtagcagagcctaaagaaaacaccaccactcttcagttacaaatagctcgagataaaggactacttggggatattgccattcacttgagagctcaacccaatttcttactgcatgtcgataatcaagctactgagaatgaagattatgtattgcaagaaacaataataataatgaaagaaaacataaaagaagctcatgccgaagtttccattttgccggatgaccttcctgaattggaggaaggatttattgtcactatcactgaggtgaacctggtgaactctgacttctctacaggacagccaagtgtgcggaggcccggaatggaaatagctgagataatgatagaagaaaatgacgatcccagaggaatttttatgtttcatgttactagaggcgctggggaagttattactgcctatgaggtgcctccacccttgaacgttcttcaagttcctgtagtccggctggctggaagctttggggcagtaaatgtttattggaaagcatcaccagacagtgctggcctggaagactttaaaccatctcatgggattcttgaatttgcagataaacaggttactgcaatgatagaaatcaccataattgatgatgctgaatttgaattgacagagacgttcaatatttccttgatcagtgttgctggaggtggcagacttggtgatgatgttgtggtaactgttgttattccacaaaatgattctccatttggagtatttggatttgaagaaaagactgtaagttaaacatatcaggggaaagccttgtttcaggctagcgtttcatgtaattttgagtagaaagtgtctcacatttttgttttggaagtcttggccaggcatggtggctcatgccagtaatcccagcactttgggaggccgcagcgggcagatcacgaggtcaggagattgacaccatcctggccaatatggttgaattcccgtctctactgaaagtacaaaaattagctgggcgtggtggcacatgcctgtattcccagatacttgggaggctgaggcaggagactcgcttgaacccaggaggcagaggttgcagtgagctgagatcacgccattgcactccagcctggcgacatagagagactccatctcaaaaaaaaaaaaaaaaaaa

SEQ ID NO: 105590 - DNA, 5046 bp, Homo sapiens
  Payload ID: 699
  Gene Symbol: ADGRV1
  Gene Name: adhesion G protein-coupled receptor V1
  ENST ID: ENST00000504142
  CDS Start-End: 1-3166
aagatatgaagaaatcacagtggttagaaatggaggaacccatgggaatgtctctgcgaattgggtgttgacacggaacagcactgatccctcaccagtaacagcagatatcagaccgagctctggagttctccattttgcacaagggcagatgttggcaacaattcctcttactgtggttgatgatgatcttccagaagaggcagaagcttatctacttcaaattctgcctcatacaatacgaggaggtgcagaagtgagcgagccagcggagcttttgttctacattcaggatagtgatgatgtctatggcctaataacattttttcctatggaaaaccagaagattgaaagcagcccaggtgaacgatacttatccttgagttttacaagactaggagggactaaaggagatgtgaggttgctttattctgtactttacattcctgctggagctgtggaccccttgcaagcaaaagaaggcatcttaaatatatcaaggagaaatgacctcatttttccagagcaaaaaactcaagtcactacaaaattaccaataagaaatgatgcattccttcaaaatggagctcactttctagtacagttggaaactgtggagttgttaaacataattcctctaatcccacccataagccctagatttggggaaatctgcaatatttctttactggttactccagccattgcaaatggagaaattggctttctcagcaatcttccaattattttgcatgaaccagaagattttgctgctgaagtggtatacattcccttacatcgggatggaactgatggccaggctactgtctactggagtttgaagccctctggctttaattcaaaagcagtgaccccggatgatataggcccctttaatggctctgttttgtttttatctgggcaaagtgacacaacaatcaacattactatcaaaggtgatgacataccggaaatgaatgaaactgtaacactttctctagacagggttaacgtggaaaaccaagtgctgaaatctggatatactagccgtgacctaattattttggaaaatgatgaccctgggggagtttttgaattttctcctgcttccagaggaccctatgttataaaagaaggagaatctgtagagctccacatcatccgatcaagggggtcccttgttaagcagtttctacactaccgagtagagccaagagatagcaatgaattctatggaaacacgggagtactagaatttaaacctggagaaagggagatagtgatcaccttgctagcaagattggatgggataccagagttggatgaacactactgggtggtcctcagcagccacggagaacgggaaagcaagttgggaagtgccaccattgtcaatataacgattctgaaaaatgatgatcctcatggcattatagaatttgtttctgatggtctaattgtgatgataaatgaaagcaaaggagatgctatctatagtgctgtttatgatgtagtaagaaatcgaggcaactttggtgatgttagtgtatcatgggtggttagtccagactttacacaagatgtatttcctgtacaagggactgttgtctttggagatcaggaattttcaaaaaatatcaccatttactcccttccagatgagattccagaagaaatggaagaatttaccgttatcctactgaatggcactggaggagctaaagtgggaaatagaacaactgcaactctgaggattagaagaaatgatgaccccatttattttgcagaacctcgtgtagtgagggttcaggaaggtgagactgccaactttacagttctcagaaatggatctgttgatgtgacttgcatggtccagtatgctaccaaggatgggaaggctactgcaagagagagagatttcattcctgttgaaaaaggagaaacgctcatttttgaggttggaagtagacagcagagcatatccatatttgttaatgaagatggtatcccggaaacagatgagcccttttatataatcctcttgaattcaacaggtgatacagtagtatatcaatatggagtagctacagtaataattgaagctaatgatgacccaaatggcattttttctctggagcccatagacaaagcagtggaagaaggaaagactaatgcattttggattttgaggcaccgaggatactttggtagtgtttctgtatcttggcagctctttcagaatgattctgctttgcagcctgggcaggagttctatgaaacttcaggaactgttaacttcatggatggagaagaagcaaaaccaatcattctccatgcttttccagataaaattcctgaattcaatgaattttatttcctaaaacttgtaaacatttcaggtggatccccaggtcctgggggccagctagcagaaaccaacctccaggtgacagtaatggttccattcaatgatgatccctttggagtttttatcttggatccagagtgtttagagagagaagtggcagaagatgtcctgtctgaagatgatatgtcttatattaccaacttcaccattttgaggcagcagggtgtgtttggtgatgtacaactgggctgggaaatactgtccagtgagttccctgctggtttgccaccaatgatagattttttactggttggaattttccccaccaccgtgcatttacaacagcacatgcggcgtcaccacagtggaacggatgctttgtactttaccggactagagggtgcatttgggactgttaatccaaaataccatccctccaggaataatacaattgccaactttacattctcagcttgggtaatgcccaatgccaatacgaatggattcattatagcgaaggatgacggtaatggaagcatctactacggggtaaaaatacaaacaaacgaatcccatgtgacactttcccttcattataaaaccttgggttccaatgctacatacattgccaagacaacagtcatgaaatatttagaagaaagtgtttggcttcatctactaattatcctggaggatggtataatcgaattctacctggatggaaatgcaatgcccaggggaatcaagagtctgaaaggagaagccattactgacggtgagggtcatcatcacaactaggacactgaaatttgcagtttctaaaatttttcattaaaatttagatttttaaaaaagtgctaacatgtatttgaaaactctacttatgcattggtttaatttctttaatcaaaactatgtgcctaccaagataatgagaaattctgtcctgagtgttacagaaatgaatcagagaattttgcccttaaagaacctggaataaaccctagcagagagatgtgtgatatatcacaatgacaccctgtaggaagacagaaaaaaatatgaaagaggaatgtttgtccttctgtgggtagtaggagagatggggagtgatattcctgcagaggaatgaacaaaggaatagaaatgtgaaacagcgtgttgcacctggggaactgctgctagttcagtattgctgaaggtagagggtggtgggcgtgaggttgaaaagaaagcaggagagaagaatcacagtgaaaagtgattatagggttcatactatcagcaggtaacttggtgaattctacagagtgctttgaagagatattctttgttgtctttaaactagatcatatgctgattcctcaagaagcacatttgtgtgtgtgtgcacacaaatactggttatatgcattatagtcaccattccctctcagcccctccatcttatgattttattcttttttatatttcgtgaaagatagagtagagcttatatggctatagcttaatagagtattttcctctgaacctcttacattagttatttggttctattttttttcccagagggggaaaaaaagataggcaaaggaaaatgcacgtatctaccaatttcaatcccatggattttggttacaagcactttgtggtattatccactttttggctgtgtgaatacctacaagtatctgttagccttgattcttttggtgatggtagtggtggtggaatgagaatggaaacgattgggggaagtgggagctggtgttttttcctctgacttactgcagaggaacttgttatttttgtactttgtaatttggaaagataatttttaaactatatgtaaagttattgaactgtagtgccctttatattataaaaatataaaagtatgcatattgtaagtgtacagataagtgaaatttttaaaacttaaattcatcagtttcagcactcatgtgatcagcccccagaccaagaaacagcattccagaagccccctttgactcctccagttgctaactcaccaccctgcctactgactattggcatttttaagagcttaagattcacttttcctatttttaaatttatataaatagaactgaacagtatgtacacttgagtgtccagcttcttttgctcagtattgtttgtgaagttcatccatatttttgcctgctgtagatatttcatgctcattaccatatagaattatcttatgtaactgtaacacaatttatttattagtgctactttcaatttctgttttggttgttttctgttctgcctactacatatagtacttctatggatactcttatacatgttttttgatgaacatatgcctgccatatgcatttctgttgagcacattcctggggatggaattgctgaatgacagtgtgtgcaaatattcggttttagtagataatgcctatcctttttccaaaacagttgaacctaattatactctcacctctagtgtatgagagttccacttaattaatgcttagcttcttccatctttacttttggtttgtagtggcatctcacagtatcataaaaggtgtatttaaaaaaaaataatgctgtgttcaatatagaaaaattgtaaagtacacatatacaacaaaaatagaaatcatttacaataaaaatcatttacaatc

SEQ ID NO: 105591 - DNA, 582 bp, Homo sapiens
  Payload ID: 699
  Gene Symbol: ADGRV1
  Gene Name: adhesion G protein-coupled receptor V1
  ENST ID: ENST00000508842
  CDS Start-End: 139-582
accacacctgtggccgaggctcagcgcctcccgtgaggacgcagctggggctcaaccccgccctcctggaccgggctaccctcacctcctgccaccatctttacctgtccccgttagcagggagcactctgcgagaagatggccaaaaggtccgccgccgccgctgtcccggggatgccctctgcatctttattagtaaatcttctttcagctttactcatcctatttgtgtttggagaaacagaaataagatttactggacaaactgaatttgttgttaatgaaacaagtacaacagttattcgtcttatcattgaaaggataggagagccagcaaatgttactgcaattgtatcgctgtatggagaggacgctggtgacttttttgacacatatgctgcagcttttatacctgccggagaaacaaacagaacagtgtacatagcagtatgtgatgatgacttaccagagcctgacgaaacttttatttttcacttaacattacagcttccctcaatcgcagtgagtgagcccaagggcagaaatgagtctatgcctcttactctcatcagggaaaaggga

SEQ ID NO: 105592 - DNA, 2229 bp, Homo sapiens
  Payload ID: 700
  Gene Symbol: AMIGO1
  Gene Name: adhesion molecule with Ig-like domain 1
  Uniprot ID: Q86WK6
  ENST ID: ENST00000369862
  CDS Start-End: 385-1866
gcgcgcgcggtgctcgctgcccccacgccgctccctccgctgggatcgctgcgcctccggctccccgcaccgatccgcgccaggcctgcggacctggaggcagcgaccgcggtcggtgggctccggcgggctcagcggtcgaggcggtggcagggtgagcggagcggggccccgcaagtccccgggaggcgacggtgccgggcgcgggcccctgcgtaaggtgggcgcagtgacaggccggccggtgaggcgccgccgggagaggccgcgacggagctcccagaccggccatgggctgagacacgtcctcgccgagcagaacatgcccgggtgacctcctcccagatcttccttgtggccttcctcgcccactccagtgacactatgcacccccaccgtgacccgagaggcctctggctcctgctgccgtccttgtccctgctgctttttgaggtggccagagctggccgagccgtggttagctgtcctgccgcctgcttgtgcgccagcaacatcctcagctgctccaagcagcagctgcccaatgtgccccattccttgcccagttacacagcactactggacctcagtcacaacaacctgagccgcctgcgggccgagtggacccccacgcgcctgacccaactgcactccctgctgctgagccacaaccacctgaacttcatctcctctgaggccttttccccggtacccaacctgcgctacctggacctctcctccaaccagctgcgtacactggatgagttcctgttcagtgacctgcaagtactggaggtgctgctgctctacaataaccacatcatggcggtggaccggtgcgccttcgatgacatggcccagctgcagaaactctacttgagccagaaccagatctctcgcttccctctggaactggtcaaggaaggagccaagctacccaaactaacgctcctggatctctcttctaacaagctgaagaacttgccattgcctgacctgcagaagctgccggcctggatcaagaatgggctgtacctacataacaaccccctgaactgcgactgtgagctctaccagctgttttcacactggcagtatcggcagctgagctccgtgatggactttcaagaggatctgtactgcatgaactccaagaagctgcacaatgtcttcaacctgagtttcctcaactgtggcgagtacaaggagcgtgcctgggaggcccacctgggtgacaccttgatcatcaagtgtgacaccaagcagcaagggatgaccaaggtgtgggtgacaccaagtaatgaacgggtgctagatgaggtgaccaatggcacagtgagtgtgtctaaggatggcagtcttcttttccagcaggtgcaggtcgaggacggtggtgtgtatacctgctatgccatgggagagactttcaatgagacactgtctgtggaattgaaagtgcacaatttcaccttgcacggacaccatgacaccctcaacacagcctataccaccctagtgggctgtatccttagtgtggtcctggtcctcatatacctatacctcaccccttgccgctgctggtgccggggtgtagagaagccttccagccatcaaggagacagcctcagctcttccatgcttagtaccacacccaaccatgatcctatggctggtggggacaaagatgatggttttgaccggcgggtggctttcctggaacctgctggacctgggcagggtcaaaacggcaagctcaagccaggcaacaccctgccagtgcctgaggccacaggcaagggccaacggaggatgtcggatccagaatcagtcagctcggtcttctctgatacgcccattgtggtgtgagcaggatgggttggtggggagattctgccccaggagaggtaatgcacccctgaaggatatgaggggatggaagagagggctggctgcccaagggaatggattcctcctgacctcaagggaattggtcccaggtacaacagagagcaagaccccaaacagggcgtggctgccacgattttcaaatgggggtatattaatcctcaggcaaatgctacacccgtacccaaagccctgccaattctcagtgtggtagaggaagagaagcatgtctgagttggatgggaatgaggaaggagtgaggggaagaacagattccctaaactttcatgaggtcatccctagctccttaagagaaaaacattt

SEQ ID NO: 105593 - DNA, 5088 bp, Homo sapiens
  Payload ID: 700
  Gene Symbol: AMIGO1
  Gene Name: adhesion molecule with Ig-like domain 1
  Uniprot ID: Q86WK6
  ENST ID: ENST00000369864
  CDS Start-End: 351-1832
ccggctccccgcaccgatccgcgccaggcctgcggacctggaggcagcgaccgcggtcggtgggctccggcgggctcagcggtcgaggcggtggcagggtgagcggagcggggccccgcaagtccccgggaggcgacggtgccgggcgcgggcccctgcgtaaggtgggcgcagtgacaggccggccggtgaggcgccgccgggagaggccgcgacggagctcccagaccggccatgggctgagacacgtcctcgccgagcagtgacccttccgtaccccaccagaacatgcccgggtgacctcctcccagatcttccttgtggccttcctcgcccactccagtgacactatgcacccccaccgtgacccgagaggcctctggctcctgctgccgtccttgtccctgctgctttttgaggtggccagagctggccgagccgtggttagctgtcctgccgcctgcttgtgcgccagcaacatcctcagctgctccaagcagcagctgcccaatgtgccccattccttgcccagttacacagcactactggacctcagtcacaacaacctgagccgcctgcgggccgagtggacccccacgcgcctgacccaactgcactccctgctgctgagccacaaccacctgaacttcatctcctctgaggccttttccccggtacccaacctgcgctacctggacctctcctccaaccagctgcgtacactggatgagttcctgttcagtgacctgcaagtactggaggtgctgctgctctacaataaccacatcatggcggtggaccggtgcgccttcgatgacatggcccagctgcagaaactctacttgagccagaaccagatctctcgcttccctctggaactggtcaaggaaggagccaagctacccaaactaacgctcctggatctctcttctaacaagctgaagaacttgccattgcctgacctgcagaagctgccggcctggatcaagaatgggctgtacctacataacaaccccctgaactgcgactgtgagctctaccagctgttttcacactggcagtatcggcagctgagctccgtgatggactttcaagaggatctgtactgcatgaactccaagaagctgcacaatgtcttcaacctgagtttcctcaactgtggcgagtacaaggagcgtgcctgggaggcccacctgggtgacaccttgatcatcaagtgtgacaccaagcagcaagggatgaccaaggtgtgggtgacaccaagtaatgaacgggtgctagatgaggtgaccaatggcacagtgagtgtgtctaaggatggcagtcttcttttccagcaggtgcaggtcgaggacggtggtgtgtatacctgctatgccatgggagagactttcaatgagacactgtctgtggaattgaaagtgcacaatttcaccttgcacggacaccatgacaccctcaacacagcctataccaccctagtgggctgtatccttagtgtggtcctggtcctcatatacctatacctcaccccttgccgctgctggtgccggggtgtagagaagccttccagccatcaaggagacagcctcagctcttccatgcttagtaccacacccaaccatgatcctatggctggtggggacaaagatgatggttttgaccggcgggtggctttcctggaacctgctggacctgggcagggtcaaaacggcaagctcaagccaggcaacaccctgccagtgcctgaggccacaggcaagggccaacggaggatgtcggatccagaatcagtcagctcggtcttctctgatacgcccattgtggtgtgagcaggatgggttggtggggagattctgccccaggagaggtaatgcacccctgaaggatatgaggggatggaagagagggctggctgcccaagggaatggattcctcctgacctcaagggaattggtcccaggtacaacagagagcaagaccccaaacagggcgtggctgccacgattttcaaatgggggtatattaatcctcaggcaaatgctacacccgtacccaaagccctgccaattctcagtgtggtagaggaagagaagcatgtctgagttggatgggaatgaggaaggagtgaggggaagaacagattccctaaactttcatgaggtcatccctagctccttaagagaaaaacatttagaaaaaaaaattttttctatctctgcccacccacacctgtgatgttgtgtgtgttgggggagcttccacaggagccacactggggaaaagctgtagtatcttctttgtttagcaagtcaaacttcacagctggggaagttgaaaacctttggaaaatgagtcaggaaaaggctgagacctcaatcggtaacaattccccaaagctgttgtaagactttgcattaaagccttcctttttcctgatgtgccctgggtggatggatctttgcaggagcctggcctgctgccttttagttacaacagcaatgtgggatgtggtatctgtgccttgtcctgggaccaatggcacagagggttatagcatgaactgaagggtccatgtcacagcataggtgccagcacgaaacttgtagatggggggtgaattccagataggctaattccctggttggtgaaacccttggttagtatttgattcccagcatctgtgtgtcaggccagagtgggggctgctgaaggcagagcttttatggatgcctgccacagacgtggtacatgggcccacttcacgatagaaggatgaaggtaaatcagcctctattatgtagcatccagctggacctagctgattctcaatgtatgccatctcttcatccagtctccttatcaagctcaggtgggattctgaattttccctaatatgctgctctgtaaagggaggagtccaagaaagcctggccccagctggcttagagtaggcttggcgatagtgaaaatccagtatatatctcctctgtgtggacaaggttgccttgctcctctcagagataccacctctgctgcaaagtcaaagcatggggttttgacatcagaagggttggaattgggtggtctctaccccagaatggcaatttggagtgcagcttcaagttctgccctctccacagattccaggcaatcctgaagcagagataatcagtagtactaaactttcagaaggggagttctgccaccccattcctccatcgagaggtctttgcagttgtggttgtgaggccagaggaacttaagaagaatgagctcaacattccattccatccaaggttgcagaatactttgagtatggagatgaccgatccctttaacctttccctttgactacactgcatgccctgtgagtggctgctctgagctttggcgggggatgagcagggtgaaggtgaaaatgttctctgatgttggtttttcttagggtctcttctctcccacgtttctagtccattggaagttctccagatcctctagatttctgacctctttttacattctaagaggtgtcatttacctgtgggtgaggggcttggagggcctgactattaagcttcctattatgattggggaaggggactcaacatcttccccttgtctggtcctgggaactcaagactgctgtccatcctttattagtaacctagttttgttgagagagaggtgcagcatttccctcaagtacctgcatgctcataggtatgcatgcttataggtatgcatgcacaccagcaccttgacttccaccaggacagtgaatctgtagtccccattaatgatactctcagaatggtctccaccaatgtgcacaacttcatgcacacaattgtattcctctttaggagagacagtgaccatgccaggctcttcaaatacacactcctgtattttcatttctgaactccctgaagcttcacccacatctccatggcactgaatcacttttctgcccaggctggagttagaagaaccatgggttgaaggccttgggagaagaggtggtaaggagctacctggttctttggactcctcagaaacctcccgtgaagactatatatatgagcaatatatgagcaattaagatagaactaggtcattgaaggactcagaaggaaactggcaaggggctaagtagctgtgagctgctcttcctgttaactgtcctcaggagagaaaagttgtcttgatttattccagagactcctgagaattttgttactggagctataggaactaggactccctcctcagactcatcaggaaatctgggaaaatctcatctccatgctgcagtctccccgcttggcaccatctagggctctgaagatctttaaagtgagcgttaaatgaagcaggccttctggggcatcgtgatggagctcctgaggactgggagggccgttttcttcataattcctacccagtttagggaatgagaaaaggccctgtggctcttaagtctcctgactatatccactagtttggccttgagtttgagacacctggtagatgtacctggctgccctaccaagagatttgatttgtttcttcccgtggtttcaggtgatagaacccaaaggtagctttttaattggagaattgaataatcagcatatgtaagcgcactagaaccctgtgttgaaaactgccaggtgtgggtataagaaaaggccgagagatcaccacctcctcttaccctaccccacacccataaaccagacatgtctcccaggaagcaggtgtccctggagacagaggatgacagggctctacaatctgtgtaattattattattattattattttgtatttatggggcccaagaaaggggccaggagagggtacaccccagctggggagagcaaagcagatggatccagttttctgtgtgttcttacctctgtacttcctcgtagctctgctgacaaagcaagcaggcctcccgtgtccaagaccccattcctcccacttgtgtacacctaggctggcaaatcttggagcctctgggctctgaaaactagacaatgatcattaaacctggcttgagtctctgttctggcacaa

SEQ ID NO: 105594 - DNA, 3763 bp, Homo sapiens
  Payload ID: 701
  Gene Symbol: AMIGO2
  Gene Name: adhesion molecule with Ig-like domain 2
  Uniprot ID: Q86SJ2
  ENST ID: ENST00000266581
  CDS Start-End: 468-2036
gggtcctgcagcctcccgagtgcggagaggcggggccgcccgctgccgcccggctgcctgcgccccctcccgcggccccggctctgggagcggggcgccccgcgcgcgggcacacggcggccagagcgccgaggcggtaccttcagcctgcaatgagaggaacccgggagagcccccgggagccagcgaagagcttggctgctgcgtccagggctgctgctgccgccgcggctgcttgaaactcctcaaagttgagagccggctagagggtgccgcccgccgggagccggagggaaaggaagtcggaaggtgcaagagtgacagacacggacagacggacgcgcagaccttcggaaggcactgcgtaggcagcctccccggagcccacgaggctccccagcaccgttcactggtgggaggctgagccggtggaaaagacaccgggaagagactcagaggcgaccataatgtcgttacgtgtacacactctgcccaccctgcttggagccgtcgtcagaccgggctgcagggagctgctgtgtttgctgatgatcacagtgactgtgggccctggtgcctctggggtgtgccccaccgcttgcatctgtgccactgacatcgtcagctgcaccaacaaaaacctgtccaaggtgcctgggaaccttttcagactgattaagagactggacctgagttataacagaattgggcttctggattctgagtggattccagtatcgtttgcaaagctgaacaccctaattcttcgtcataacaacatcaccagcatttccacgggcagtttttccacaactccaaatttgaagtgtcttgacttatcgtccaataagctgaagacggtgaaaaatgctgtattccaagagttgaaggttctggaagtgcttctgctttacaacaatcacatatcctatctcgatccttcagcgtttggagggctctcccagttgcagaaactctacttaagtggaaattttctcacacagtttccgatggatttgtatgttggaaggttcaagctggcagaactgatgtttttagatgtttcttataaccgaattccttccatgccaatgcaccacataaatttagtgccaggaaaacagctgagaggcatctaccttcatggaaacccatttgtctgtgactgttccctgtactccttgctggtcttttggtatcgtaggcactttagctcagtgatggattttaagaacgattacacctgtcgcctgtggtctgactccaggcactcgcgtcaggtacttctgctccaggatagctttatgaattgctctgacagcatcatcaatggttcctttcgtgcgcttggctttattcatgaggctcaggtcggggaaagactgatggtccactgtgacagcaagacaggtaatgcaaatacggatttcatctgggtgggtccagataacagactgctagagccggataaagagatggaaaacttttacgtgtttcacaatggaagtctggttatagaaagccctcgttttgaggatgctggagtgtattcttgtatcgcaatgaataagcaacgcctgttaaatgaaactgtggacgtcacaataaatgtgagcaatttcactgtaagcagatcccatgctcatgaggcatttaacacagcttttaccactcttgctgcttgcgtggccagtatcgttttggtacttttgtacctctatctgactccatgcccctgcaagtgtaaaaccaagagacagaaaaatatgctacaccaaagcaatgcccattcatcgattctcagtcctggccccgctagtgatgcctccgctgatgaacggaaggcaggtgcaggtaaaagagtggtgtttttggaacccctgaaggatactgcagcagggcagaacgggaaagtcaggctctttcccagcgaggcagtgatagctgagggcatcctaaagtccacgagggggaaatctgactcagattcagtcaattcagtgttttctgacacaccttttgtggcgtccacttaatttgtgcctatatttgtatgatgtcataatttaatctgttcatatttaactttgtgtgtggtctgcaaaataaacagcaggacagaaattgtgttgttttgttctttgaaatacaaccaaattctcttaaaatgattggtaggaaatgaggtaaagtacttcagttcctcaatgtgccatagaaagatggggttgttttccaaagtttaagttctagatcacaatatcttagcttttagcactattggtaatttcagagtaggcccaaaggtgatatgactcccattgtccctttatttaggatattgaaagaaaaaataaactttatgtattagtgtcctttaaaaatagactttgctaacttactagtaccagagttattttaaagaaaaacactagtgtccaatttcatttttaaaagatgtagaaagaagaatcaagcatcaattaattataaagcctaaagcaaagttagatttgggggttattcagccaaaattaccgttttagaccagaatgaatagactacactgataaaatgtactggataatgccacatcctatatggtgttatagaaatagtgcaaggaaagtacatttgtttgcctgtcttttcattttgtacattcttcccattctgtattcttgtacaaaagatctcattgaaaatttaaagtcatcataatttgttgccataaatatgtaagtgtcaataccaaaatgtctgagtaacttcttaaatccctgttctagcaaactaatattggttcatgtgcttgtgtatatgtaaatcttaaattatgtgaactattaaatagaccctactgtactgtgctttggacatttgaattaatgtaaatatatgtaatctgtgacttgatattttgttttatttggctatttaaaaacataaatctaaaatgtcttatgttatcagattatgctattttgtataaagcaccactgatagcaaatctctctccaaaattcttaaagttgatttttttaaagggggaggggaaggctttaatgtgttctagatcaatttataccttccgtatgacgttttactctgatatcattgtgcactttagccagatccagaaaacactcaaatttattttgcaacaagtgagagcccaggagacctccttattatcctgtctctgctttgaggcaatcaagtaccctctctgaacctaggttccctcatctgtaaaacaaaggtttcagaccagatggtgtttaaggtttctccccatactggaatgaatgatttcttggtggtattagcatcatcacagacctatacttgctttctgaaactctaccacatactgaaggaatacaggaatgggattaagatgactagcatagcagtgtacagcttgaagagatgttccacatcatcactccagctccttctcttttctcagggacaaatgaggcccagagagaatacgacctgtgtaaggtcaaacagtggcagggaaagaaggagagctggggtttagcattctccctggtgaagattggaggtccaaagaaatgactcctttttaagggatgggcataaaaaagtgatcaaaacattgcaaaggagaatcaaagattgattgtcctggggctaagaaagaagataatttttaaagaatgggagtgggcaacagtgaaaaatattgcagataagtagataaggatagaagatcaaccactgactggtagta

SEQ ID NO: 105595 - DNA, 3058 bp, Homo sapiens
  Payload ID: 701
  Gene Symbol: AMIGO2
  Gene Name: adhesion molecule with Ig-like domain 2
  Uniprot ID: Q86SJ2
  ENST ID: ENST00000429635
  CDS Start-End: 656-2224
cgagctgctgcccgcaggaggcaggacgcgcaggggtgggaccggcgccccagcccgtctcccggccccgggcgcgcgggaaccccgggtcctgcagcctcccgagtgcggagaggcggggccgcccgctgccgcccggctgcctgcgccccctcccgcggccccggctctgggagcggggcgccccgcgcgcgggcacacggcggccagagcgccgaggcggtaccttcagcctgcaatgagaggaacccgggagagcccccgggagccagcgaagagcttggctgctgcgtccagggctgctgctgccgccgcggctgcttgaaactcctcaaagttgagagccggctagagggtgccgcccgccgggagccggagggaaaggaagtcggaaggtgcaagagtgacagacacggacagacggacgcgcagaccttcggaaggcactgcgtaggcagcctccccggagcccacgaggctccccagcaccgactaacccaggaaagaggaaaaaatacatttaacagtgaagaggcaacacagagctccctattgtgaaataaaacccatttcaaaagttattggaaagaaagttcactggtgggaggctgagccggtggaaaagacaccgggaagagactcagaggcgaccataatgtcgttacgtgtacacactctgcccaccctgcttggagccgtcgtcagaccgggctgcagggagctgctgtgtttgctgatgatcacagtgactgtgggccctggtgcctctggggtgtgccccaccgcttgcatctgtgccactgacatcgtcagctgcaccaacaaaaacctgtccaaggtgcctgggaaccttttcagactgattaagagactggacctgagttataacagaattgggcttctggattctgagtggattccagtatcgtttgcaaagctgaacaccctaattcttcgtcataacaacatcaccagcatttccacgggcagtttttccacaactccaaatttgaagtgtcttgacttatcgtccaataagctgaagacggtgaaaaatgctgtattccaagagttgaaggttctggaagtgcttctgctttacaacaatcacatatcctatctcgatccttcagcgtttggagggctctcccagttgcagaaactctacttaagtggaaattttctcacacagtttccgatggatttgtatgttggaaggttcaagctggcagaactgatgtttttagatgtttcttataaccgaattccttccatgccaatgcaccacataaatttagtgccaggaaaacagctgagaggcatctaccttcatggaaacccatttgtctgtgactgttccctgtactccttgctggtcttttggtatcgtaggcactttagctcagtgatggattttaagaacgattacacctgtcgcctgtggtctgactccaggcactcgcgtcaggtacttctgctccaggatagctttatgaattgctctgacagcatcatcaatggttcctttcgtgcgcttggctttattcatgaggctcaggtcggggaaagactgatggtccactgtgacagcaagacaggtaatgcaaatacggatttcatctgggtgggtccagataacagactgctagagccggataaagagatggaaaacttttacgtgtttcacaatggaagtctggttatagaaagccctcgttttgaggatgctggagtgtattcttgtatcgcaatgaataagcaacgcctgttaaatgaaactgtggacgtcacaataaatgtgagcaatttcactgtaagcagatcccatgctcatgaggcatttaacacagcttttaccactcttgctgcttgcgtggccagtatcgttttggtacttttgtacctctatctgactccatgcccctgcaagtgtaaaaccaagagacagaaaaatatgctacaccaaagcaatgcccattcatcgattctcagtcctggccccgctagtgatgcctccgctgatgaacggaaggcaggtgcaggtaaaagagtggtgtttttggaacccctgaaggatactgcagcagggcagaacgggaaagtcaggctctttcccagcgaggcagtgatagctgagggcatcctaaagtccacgagggggaaatctgactcagattcagtcaattcagtgttttctgacacaccttttgtggcgtccacttaatttgtgcctatatttgtatgatgtcataatttaatctgttcatatttaactttgtgtgtggtctgcaaaataaacagcaggacagaaattgtgttgttttgttctttgaaatacaaccaaattctcttaaaatgattggtaggaaatgaggtaaagtacttcagttcctcaatgtgccatagaaagatggggttgttttccaaagtttaagttctagatcacaatatcttagcttttagcactattggtaatttcagagtaggcccaaaggtgatatgactcccattgtccctttatttaggatattgaaagaaaaaataaactttatgtattagtgtcctttaaaaatagactttgctaacttactagtaccagagttattttaaagaaaaacactagtgtccaatttcatttttaaaagatgtagaaagaagaatcaagcatcaattaattataaagcctaaagcaaagttagatttgggggttattcagccaaaattaccgttttagaccagaatgaatagactacactgataaaatgtactggataatgccacatcctatatggtgttatagaaatagtgcaaggaaagtacatttgtttgcctgtcttttcattttgtacattcttcccattctgtattcttgtacaaaagatctcattgaaaatttaaagtcatcataatttgttgccataaatatgtaagtgtcaataccaaaatgtctgagtaacttcttaaatccctgttctagcaaactaatattggttcatgtgcttgtgtatatgtaaatcttaaattatgtgaactattaaatagaccctactgtactgtg

SEQ ID NO: 105596 - DNA, 2856 bp, Homo sapiens
  Payload ID: 701
  Gene Symbol: AMIGO2
  Gene Name: adhesion molecule with Ig-like domain 2
  Uniprot ID: Q86SJ2
  ENST ID: ENST00000550413
  CDS Start-End: 352-1920
cgccgcggctgcttgaaactcctcaaagttgagagccggctagagggtgccgcccgccgggagccggagggaaaggaagtcggaaggtgcaagagtgacagacacggacagacggacgcgcagaccttcggaaggcactgcgtaggcagcctccccggagcccacgaggctccccagcaccgactaacccaggaaagaggaaaaaatacatttaacagtgaagaggcaacacagagctccctattgtgaaataaaacccatttcaaaagttattggaaagaaagtaaggttcactggtgggaggctgagccggtggaaaagacaccgggaagagactcagaggcgaccataatgtcgttacgtgtacacactctgcccaccctgcttggagccgtcgtcagaccgggctgcagggagctgctgtgtttgctgatgatcacagtgactgtgggccctggtgcctctggggtgtgccccaccgcttgcatctgtgccactgacatcgtcagctgcaccaacaaaaacctgtccaaggtgcctgggaaccttttcagactgattaagagactggacctgagttataacagaattgggcttctggattctgagtggattccagtatcgtttgcaaagctgaacaccctaattcttcgtcataacaacatcaccagcatttccacgggcagtttttccacaactccaaatttgaagtgtcttgacttatcgtccaataagctgaagacggtgaaaaatgctgtattccaagagttgaaggttctggaagtgcttctgctttacaacaatcacatatcctatctcgatccttcagcgtttggagggctctcccagttgcagaaactctacttaagtggaaattttctcacacagtttccgatggatttgtatgttggaaggttcaagctggcagaactgatgtttttagatgtttcttataaccgaattccttccatgccaatgcaccacataaatttagtgccaggaaaacagctgagaggcatctaccttcatggaaacccatttgtctgtgactgttccctgtactccttgctggtcttttggtatcgtaggcactttagctcagtgatggattttaagaacgattacacctgtcgcctgtggtctgactccaggcactcgcgtcaggtacttctgctccaggatagctttatgaattgctctgacagcatcatcaatggttcctttcgtgcgcttggctttattcatgaggctcaggtcggggaaagactgatggtccactgtgacagcaagacaggtaatgcaaatacggatttcatctgggtgggtccagataacagactgctagagccggataaagagatggaaaacttttacgtgtttcacaatggaagtctggttatagaaagccctcgttttgaggatgctggagtgtattcttgtatcgcaatgaataagcaacgcctgttaaatgaaactgtggacgtcacaataaatgtgagcaatttcactgtaagcagatcccatgctcatgaggcatttaacacagcttttaccactcttgctgcttgcgtggccagtatcgttttggtacttttgtacctctatctgactccatgcccctgcaagtgtaaaaccaagagacagaaaaatatgctacaccaaagcaatgcccattcatcgattctcagtcctggccccgctagtgatgcctccgctgatgaacggaaggcaggtgcaggtaaaagagtggtgtttttggaacccctgaaggatactgcagcagggcagaacgggaaagtcaggctctttcccagcgaggcagtgatagctgagggcatcctaaagtccacgagggggaaatctgactcagattcagtcaattcagtgttttctgacacaccttttgtggcgtccacttaatttgtgcctatatttgtatgatgtcataatttaatctgttcatatttaactttgtgtgtggtctgcaaaataaacagcaggacagaaattgtgttgttttgttctttgaaatacaaccaaattctcttaaaatgattggtaggaaatgaggtaaagtacttcagttcctcaatgtgccatagaaagatggggttgttttccaaagtttaagttctagatcacaatatcttagcttttagcactattggtaatttcagagtaggcccaaaggtgatatgactcccattgtccctttatttaggatattgaaagaaaaaataaactttatgtattagtgtcctttaaaaatagactttgctaacttactagtaccagagttattttaaagaaaaacactagtgtccaatttcatttttaaaagatgtagaaagaagaatcaagcatcaattaattataaagcctaaagcaaagttagatttgggggttattcagccaaaattaccgttttagaccagaatgaatagactacactgataaaatgtactggataatgccacatcctatatggtgttatagaaatagtgcaaggaaagtacatttgtttgcctgtcttttcattttgtacattcttcccattctgtattcttgtacaaaagatctcattgaaaatttaaagtcatcataatttgttgccataaatatgtaagtgtcaataccaaaatgtctgagtaacttcttaaatccctgttctagcaaactaatattggttcatgtgcttgtgtatatgtaaatcttaaattatgtgaactattaaatagaccctactgtactgtgctttggacatttgaattaatgtaaatatatgtaatctgtgacttgatattttgttttatttggctatttaaaaacataaatctaaaatgtcttatgttatca

SEQ ID NO: 105597 - DNA, 2862 bp, Homo sapiens
  Payload ID: 702
  Gene Symbol: AMIGO3
  Gene Name: adhesion molecule with Ig-like domain 3
  Uniprot ID: Q86WK7
  ENST ID: ENST00000320431
  CDS Start-End: 231-1745
gaactcgcttggagagggctagcgaagccgaagggagcgcggctaagagtgccgcaccgcctcacaacctgggaaccggagagtaggggccgtcggctggcaagaacccgccgtgcctcctcggcaagggccatccggtgccacccatgtcgcactagagcagaagagggtgagtcctggaactgcaacctgcacagagctgctctgtactgtccctggtggtcgccgccatgacctggttggtgctgctggggacactgctctgcatgctgcgcgttgggttaggcaccccggactccgagggtttcccgccccgtgcgctccacaactgcccctacaaatgtatctgcgctgccgacctgctaagctgcactggcctagggctgcaggacgtgccagccgagttacctgccgctactgcggacctcgacctgagccacaacgcgctccagcgcctgcgccccggctggttggcgcccctcttccagctgcgcgccctgcacctagaccacaacgaactagatgcgctgggtcgcggcgtcttcgtcaacgccagcggcctgaggctgctcgatctatcatctaacacgttgcgggcgcttggccgccacgacctcgacgggctgggggcgctggagaagctgcttctgttcaataaccgcttggtgcacttggacgagcatgccttccacggcctgcgcgcgctcagccatctctacctgggctgcaacgaactcgcctcgttctccttcgaccacctgcacggtctgagcgccacccacctgcttactctggacctctcctccaaccggctgggacacatctccgtacctgagctggccgcgctgccggccttcctcaagaacggcctctacttgcacaacaaccctttgccttgcgactgccgcctctaccacctgctacagcgctggcaccagcggggcctgagcgccgtgcgcgactttgcgcgcgagtacgtatgcttggccttcaaggtacccgcgtcccgcgtgcgcttcttccagcacagccgcgtctttgagaactgctcgtcggccccagctcttggcctagagcggccggaagagcacctgtacgcgctggtgggtcggtccctgaggctttactgcaacaccagcgtcccggccatgcgcattgcctgggtttcgccgcagcaggagcttctcagggcgccaggatcccgcgatggcagcatcgcggtgctggccgacggcagcttggccataggcaacgtacaggagcagcatgcgggactcttcgtgtgcctggccactgggccccgcctgcaccacaaccagacgcacgagtacaacgtgagcgtgcactttccgcgcccagagcccgaggctttcaacacaggcttcaccacactgctgggctgtgccgtgggccttgtgctcgtgctgctctacctgttcgccccaccctgccgctgctgccgccgtgcctgccgctgccgccgctggccccaaacacccagcccgctccaagagctgagcgcacagtcctcagtactcagcaccacaccgccagacgcacccagccgcaaggccagcgtccacaagcacgtagtctttctggagccaggccggaggggcctcaatggccgcgtgcagctggcagtagctgaggaattcgatctctacaaccctggaggcctgcagctgaaggctggctctgagtccgccagctccataggctccgagggtcccatgacaacctagactgcccagggctcccccacccaggcccccaccctcttgctgctcgccctgctccctgcttcggtccagagaactggcagatactggtgggaagcactgtgcctggccccccagcttcctgtatgggcctcgaaacacaatgggccttctcgctcactggtagagacaggggttgtggtccccaacctgccttctgctctgcccctgcacaggacccaaaggccccaggccctgcaaggtgtgctagttcctgctttcccgcggacttcctagtgcccaaatgccctgtgaggctgagagacccaggcccctgtggctttcaacacagcacagctgtggaagtggctgtgttcttctacagcctgtggaagaacccctgtagcagagcctcccgtccaccctcaggggctgagacagctctcgaggagtggtgctcaagagctgacgcagggccacctccccttcccaagggggtgggagggagtgggcccacagggaaaagaaggcggctctgaaggaagatctcgcccacaccccaggacagaaagaggaaacaagcccgccctctggtgaaatgggactccctccatccaccaacacccaacctcctgaaagcttcacaacttcacgcagagtccggtgggcaggcaccaggcaggaaaggctcctcaagaggttcctggtggtctggcctaagccccagccagaggccctgctctctctggcctggggcatccacccgttgttctgaaggcagagcccattctgtgggctcacaagacacagtgaaggggatcatggcctgcacccctgcttttcagcagtaaaaagcccgaaaagcctggcgagcatggccgagctgggagggccgagccggaactccacgtccctcgagagcaggagcctcttaagggctggcactggtctcagcctaatggctgaggcggtaccctggcttcatatgcatctcactgctcccactgcaggggggcagggaaggggggtctgggagcccttcatgtgtgggggccgagctgggggcccccatggccatcctggacctcgctgctccagagtttaataaaggtagcacatgcttattgctagagcctttgca

SEQ ID NO: 105598 - DNA, 1959 bp, Homo sapiens
  Payload ID: 703
  Gene Symbol: AMICA1
  Gene Name: adhesion molecule, interacts with CXADR antigen 1
  Uniprot ID: Q86YT9
  ENST ID: ENST00000292067
  CDS Start-End: 443-1597
atcacttggctcttctctgatatgaactgggcagcatctaaatgtatctttcttgattttgttgtctctttgcatagagcatatcttgtgaaaacagaaatatccatgtaatggttttttcttgtagtgaccgctcgaaattgcttgagcaacatagagataatgggcaggggtccctgtgtgaagcacctagaggctggaaagctgatggcaaagctggaggggtgaggcagggagaggataaacacagtggaaatgcaggaggaaagctgtgctctgtggtggcctaattacaaggacctgccctacagccagaatcagccagcaaatgcttttgtaaaggaactaaaagaaagggaaaagaggaagtaaacaaaaggtcccttttcagagagggaaccagtgggagatttaagagcaaggaacaacccatttcgtcgttatggtaagtggagattattccttgggcctgaatgacttgaatgtttccccgcctgagctaacagtccatgtgggtgattcagctctgatgggatgtgttttccagagcacagaagacaaatgtatattcaagatagactggactctgtcaccaggagagcacgccaaggacgaatatgtgctatactattactccaatctcagtgtgcctattgggcgcttccagaaccgcgtacacttgatgggggacatcttatgcaatgatggctctctcctgctccaagatgtgcaagaggctgaccagggaacctatatctgtgaaatccgcctcaaaggggagagccaggtgttcaagaaggcggtggtactgcatgtgcttccagaggagcccaaagagctcatggtccatgtgggtggattgattcagatgggatgtgttttccagagcacagaagtgaaacacgtgaccaaggtagaatggatattttcaggacggcgcgcaaaggaggagattgtatttcgttactaccacaaactcaggatgtctgtggagtactcccagagctggggccacttccagaatcgtgtgaacctggtgggggacattttccgcaatgacggttccatcatgcttcaaggagtgagggagtcagatggaggaaactacacctgcagtatccacctagggaacctggtgttcaagaaaaccattgtgctgcatgtcagcccggaagagcctcgaacactggtgaccccggcagccctgaggcctctggtcttgggtggtaatcagttggtgatcattgtgggaattgtctgtgccacaatcctgctgctccctgttctgatattgatcgtgaagaagacctgtggaaataagagttcagtgaattctacagtcttggtgaagaacacgaagaagactaatccagagataaaagaaaaaccctgccattttgaaagatgtgaaggggagaaacacatttactccccaataattgtacgggaggtgatcgaggaagaagaaccaagtgaaaaatcagaggccacctacatgaccatgcacccagtttggccttctctgaggtcagatcggaacaactcacttgaaaaaaagtcaggtgggggaatgccaaaaacacagcaagccttttgagaagaatggagagtcccttcatctcagcagcggtggagactctctcctgtgtgtgtcctgggccactctaccagtgatttcagactcccgctctcccagctgtcctcctgtctcattgtttggtcaatacactgaagatggagaatttggagcctggcagagagactggacagctctggaggaacaggcctgctgaggggaggggagcatggacttggcctctggagtgggacactggccctgggaaccaggctgagctgagtggcctcaaaccccccgttggatcagaccctcctgtgggcagggttcttagtggatgagttactgggaagaatcagagataaaaaccaacccaaatcatt

SEQ ID NO: 105599 - DNA, 1944 bp, Homo sapiens
  Payload ID: 703
  Gene Symbol: AMICA1
  Gene Name: adhesion molecule, interacts with CXADR antigen 1
  Uniprot ID: Q86YT9
  ENST ID: ENST00000356289
  CDS Start-End: 175-1359
ctgtttgcatctctgcaaccacttcagaaggcacgtgtttggtttgctctgagcctaacctagagtgctcgcagcagtctttcagttgagcttggggactgcagctgtggggagatttcagtgcattgcctcccctgggtgctcttcatcttggatttgaaagttgagagcagcatgttttgcccactgaaactcatcctgctgccagtgttactggattattccttgggcctgaatgacttgaatgtttccccgcctgagctaacagtccatgtgggtgattcagctctgatgggatgtgttttccagagcacagaagacaaatgtatattcaagatagactggactctgtcaccaggagagcacgccaaggacgaatatgtgctatactattactccaatctcagtgtgcctattgggcgcttccagaaccgcgtacacttgatgggggacatcttatgcaatgatggctctctcctgctccaagatgtgcaagaggctgaccagggaacctatatctgtgaaatccgcctcaaaggggagagccaggtgttcaagaaggcggtggtactgcatgtgcttccagaggagcccaaagagctcatggtccatgtgggtggattgattcagatgggatgtgttttccagagcacagaagtgaaacacgtgaccaaggtagaatggatattttcaggacggcgcgcaaaggaggagattgtatttcgttactaccacaaactcaggatgtctgtggagtactcccagagctggggccacttccagaatcgtgtgaacctggtgggggacattttccgcaatgacggttccatcatgcttcaaggagtgagggagtcagatggaggaaactacacctgcagtatccacctagggaacctggtgttcaagaaaaccattgtgctgcatgtcagcccggaagagcctcgaacactggtgaccccggcagccctgaggcctctggtcttgggtggtaatcagttggtgatcattgtgggaattgtctgtgccacaatcctgctgctccctgttctgatattgatcgtgaagaagacctgtggaaataagagttcagtgaattctacagtcttggtgaagaacacgaagaagactaatccagagataaaagaaaaaccctgccattttgaaagatgtgaaggggagaaacacatttactccccaataattgtacgggaggtgatcgaggaagaagaaccaagtgaaaaatcagaggccacctacatgaccatgcacccagtttggccttctctgaggtcagatcggaacaactcacttgaaaaaaagtcaggtgggggaatgccaaaaacacagcaagccttttgagaagaatggagagtcccttcatctcagcagcggtggagactctctcctgtgtgtgtcctgggccactctaccagtgatttcagactcccgctctcccagctgtcctcctgtctcattgtttggtcaatacactgaagatggagaatttggagcctggcagagagactggacagctctggaggaacaggcctgctgaggggaggggagcatggacttggcctctggagtgggacactggccctgggaaccaggctgagctgagtggcctcaaaccccccgttggatcagaccctcctgtgggcagggttcttagtggatgagttactgggaagaatcagagataaaaaccaacccaaatcattcctctggcacattatttctaaataagtgttgtttgtggaaatcgtcctatttttatgcctcggttgagggggcaagtaaagtcctggtgaggaatttacagttagaaacttttggaaaaactgaagttcctggaggaaagccaaaccgtgctaacacactagaggctggttttggtcctgggaaaggtttggggtgaatgggttggaagtagggtatgaatac

SEQ ID NO: 105600 - DNA, 1383 bp, Homo sapiens
  Payload ID: 703
  Gene Symbol: AMICA1
  Gene Name: adhesion molecule, interacts with CXADR antigen 1
  Uniprot ID: Q86YT9
  ENST ID: ENST00000526620
  CDS Start-End: 156-1223
gcagtctttcagttgagcttggggactgcagctgtggggagatttcagtgcattgcctcccctgggtgctcttcatcttggattattccttgggcctgaatgacttgaatgtttccccgcctgagctaacagtccatgtgggtgattcagctctgatgggatgtgttttccagagcacagaagacaaatgtatattcaagatagactggactctgtcaccaggagagcacgccaaggacgaatatgtgctatactattactccaatctcagtgtgcctattgggcgcttccagaaccgcgtacacttgatgggggacatcttatgcaatgatggctctctcctgctccaagatgtgcaagaggctgaccagggaacctatatctgtgaaatccgcctcaaaggggagagccaggtgttcaagaaggcggtggtactgcatgtgcttccagaggagcccaaagagctcatggtccatgtgggtggattgattcagatgggatgtgttttccagagcacagaagtgaaacacgtgaccaaggtagaatggatattttcaggacggcgcgcaaaggaggagattgtatttcgttactaccacaaactcaggatgtctgtggagtactcccagagctggggccacttccagaatcgtgtgaacctggtgggggacattttccgcaatgacggttccatcatgcttcaaggagtgagggagtcagatggaggaaactacacctgcagtatccacctagggaacctggtgttcaagaaaaccattgtgctgcatgtcagcccggaagagcctcgaacactggtgaccccggcagccctgaggcctctggtcttgggtggtaatcagttggtgatcattgtgggaattgtctgtgccacaatcctgctgctccctgttctgatattgatcgtgaagaagacctgtggaaataagagttcagtgaattctacagtcttggtgaagaacacgaagaagactaatccagagataaaagaaaaaccctgccattttgaaagatgtgaaggggagaaacacatttactccccaataattgtacgggaggtgatcgaggaagaagaaccaagtgaaaaatcagaggccacctacatgaccatgcacccagtttggccttctctgaggtcagatcggaacaactcacttgaaaaaaagtcaggtgggggaatgccaaaaacacagcaagccttttgagaagaatggagagtcccttcatctcagcagcggtggagactctctcctgtgtgtgtcctgggccactctaccagtgatttcagactcccgctctcccagctgtcctcctgtctcattgtttggtcaatacactgaagatggagaatttggagcctggcag

SEQ ID NO: 105601 - DNA, 1935 bp, Homo sapiens
  Payload ID: 703
  Gene Symbol: AMICA1
  Gene Name: adhesion molecule, interacts with CXADR antigen 1
  ENST ID: ENST00000526595
  CDS Start-End: 517-1434
acttggctcttctctgatatgaactgggcagcatctaaatgtatctttcttgattttgttgtctctttgcatagagcatatcttgtgaaaacagaaatatccatgtaatggttttttcttgtagtgaccgctcgaaattgcttgagcaacatagagataatgggcaggggtccctgtgtgaagcacctagaggctggaaagctgatggcaaagctggaggggtgaggcagggagaggataaacacagtggaaatgcaggaggaaagctgtgctctgtggtggcctaattacaaggacctgccctacagccagaatcagccagcaaatgcttttgtaaaggaactaaaagaaagggaaaagaggaagtaaacaaaaggtcccttttcagagagggaaccagtgggagatttaagagcaaggaacaacccatttcgtcgttatgattattccttgggcctgaatgacttgaatgtttccccgcctgagctaacagtccatgtgggtgattcagctctgatgggatgtgttttccagagcacagaagacaaatgtatattcaagatagactggactctgtcaccaggagagcacgccaaggacgaatatgtgctatactattactccaatctcagtgtgcctattgggcgcttccagaaccgcgtacacttgatgggggacatcttatgcaatgatggctctctcctgctccaagatgtgcaagaggctgaccagggaacctatatctgtgaaatccgcctcaaaggggagagccaggtgttcaagaaggcggtggtactgcatgtgcttccagaggagcccaaagagctcatggtccatgtgggtggattgattcagatgggatgtgttttccagagcacagaagtgaaacacgtgaccaaggtagaatggatattttcaggacggcgcgcaaaggaggagattgtatttcgttactaccacaaactcaggatgtctgtggagtactcccagagctggggccacttccagaatcgtgtgaacctggtgggggacattttccgcaatgacggttccatcatgcttcaaggagtgagggagtcagatggaggaaactacacctgcagtatccacctagggaacctggtgttcaagaaaaccattgtgctgcatgtcagcccggaagagcctcgaacactggtgaccccggcagccctgaggcctctggtcttgggtggtaatcagttggtgatcattgtgggaattgtctgtgccacaatcctgctgctccctgttctgatattgatcgtgaagaagacctgtggaaataagagttcagtgaattctacagtcttggtgaagaacacgaagaagactaatccagagataaaagaaaaaccctgccattttgaaagatgtgaaggggaggtgaacacacgcttcagcctaaaacactaaaaacacatttactccccaataattgtacgggaggtgatcgaggaagaagaaccaagtgaaaaatcagaggccacctacatgaccatgcacccagtttggccttctctgaggtcagatcggaacaactcacttgaaaaaaagtcaggtgggggaatgccaaaaacacagcaagccttttgagaagaatggagagtcccttcatctcagcagcggtggagactctctcctgtgtgtgtcctgggccactctaccagtgatttcagactcccgctctcccagctgtcctcctgtctcattgtttggtcaatacactgaagatggagaatttggagcctggcagagagactggacagctctggaggaacaggcctgctgaggggaggggagcatggacttggcctctggagtgggacactggccctgggaaccaggctgagctgagtggcctcaaaccccccgttggatcagaccctcctgtgggcagggttcttagtggatgag

SEQ ID NO: 105602 - DNA, 574 bp, Homo sapiens
  Payload ID: 703
  Gene Symbol: AMICA1
  Gene Name: adhesion molecule, interacts with CXADR antigen 1
  ENST ID: ENST00000525565
  CDS Start-End: 110-574
gtagacctaaaaacatctgagagcctagaagtgcacagcagtgtgcagatagattgagaggacttggctctgcaggtggacaacactctatttgaaagttgagagcagcatgttttgcccactgaaactcatcctgctgccagtgttactggattattccttgggcctgaatgacttgaatgtttccccgcctgagctaacagtccatgtgggtgattcagctctgatgggatgtgttttccagagcacagaagacaaatgtatattcaagatagactggactctgtcaccaggagagcacgccaaggacgaatatgtgctatactattactccaatctcagtgtgcctattgggcgcttccagaaccgcgtacacttgatgggggacatcttatgcaatgatggctctctcctgctccaagatgtgcaagaggctgaccagggaacctatatctgtgaaatccgcctcaaaggggagagccaggtgttcaagaaggcggtggtactgcatgtgcttccagaggagcccaaagagctcatggtccatgtgggtggattgattcagatgggatgt

SEQ ID NO: 105603 - DNA, 591 bp, Homo sapiens
  Payload ID: 703
  Gene Symbol: AMICA1
  Gene Name: adhesion molecule, interacts with CXADR antigen 1
  ENST ID: ENST00000524477
  CDS Start-End: 230-591
atcagaaaggagagacttctggggtttcccttatttctttagaaaggttgggaggaagaattccagaaaagtgtaaggggctggataggaggagggagccagatagcatttattgtagtatgaagattgcagaatccttctgatgagccatatagattattccttgggcctgaatgacttgaatgtttccccgcctgagctaacagtccatgtgggtgattcagctctgatgggatgtgttttccagagcacagaagacaaatgtatattcaagatagactggactctgtcaccaggagagcacgccaaggacgaatatgtgctatactattactccaatctcagtgtgcctattgggcgcttccagaaccgcgtacacttgatgggggacatcttatgcaatgatggctctctcctgctccaagatgtgcaagaggctgaccagggaacctatatctgtgaaatccgcctcaaaggggagagccaggtgttcaagaaggcggtggtactgcatgtgcttccagaggagcccaaagagctcatggtccatgtgggtggattgattcagatgggatgtgttttccagagcac

SEQ ID NO: 105604 - DNA, 547 bp, Homo sapiens
  Payload ID: 703
  Gene Symbol: AMICA1
  Gene Name: adhesion molecule, interacts with CXADR antigen 1
  ENST ID: ENST00000527877
  CDS Start-End: 173-373
gtttgcatctctgcaaccacttcagaaggcacgtgtttggtttgctctgagcctaacctagagtgctcgcagcagtctttcagttgagcttggggactgcagctgtggggagatttcagtgcattgcctcccctgggtgctcttcatcttggatttgaaagttgagagcagcatgttttgcccactgaaactcatcctgctgccagtgttactggagcacagaagacaaatgtatattcaagatagactggactctgtcaccaggagagcacgccaaggacgaatatgtgctatactattactccaatctcagtgtgcctattgggcgcttccagaaccgcgtacacttgatgggggacatcttatgcaatgatggctctctcctgctccaagatgtgcaagaggctgaccagggaacctatatctgtgaaatccgcctcaaaggggagagccaggtgttcaagaaggcggtggtactgcatgtgcttccagaggagcccaaagagctcatggtccatgtgggtggattgattcagatgggatgtgt

SEQ ID NO: 105605 - DNA, 1508 bp, Homo sapiens
  Payload ID: 703
  Gene Symbol: AMICA1
  Gene Name: adhesion molecule, interacts with CXADR antigen 1
  ENST ID: ENST00000533261
  CDS Start-End: 26-1177
ttaagatttgaaagttgagagcagcatgttttgcccactgaaactcatcctgctgccagtgttactggattattccttgggcctgaatgacttgaatgtttccccgcctgagctaacagtccatgtgggtgattcagctctgatgggatgtgttttccagagcacagaagacaaatgtatattcaagatagactggactctgtcaccaggagagcacgccaaggacgaatatgtgctatactattactccaatctcagtgtgcctattgggcgcttccagaaccgcgtacacttgatgggggacatcttatgcaatgatggctctctcctgctccaagatgtgcaagaggctgaccagggaacctatatctgtgaaatccgcctcaaaggggagagccaggtgttcaagaaggcggtggtactgcatgtgcttccagaggagcccaaagagctcatggtccatgtgggtggattgattcagatgggatgtgttttccagagcacagaagtgaaacacgtgaccaaggaggagattgtatttcgttactaccacaaactcaggatgtctgtggagtactcccagagctggggccacttccagaatcgtgtgaacctggtgggggacattttccgcaatgacggttccatcatgcttcaaggagtgagggagtcagatggaggaaactacacctgcagtatccacctagggaacctggtgttcaagaaaaccattgtgctgcatgtcagcccggaagagcctcgaacactggtgaccccggcagccctgaggcctctggtcttgggtggtaatcagttggtgatcattgtgggaattgtctgtgccacaatcctgctgctccctgttctgatattgatcgtgaagaagacctgtggaaataagagttcagtgaattctacagtcttggtgaagaacacgaagaagactaatccagagataaaagaaaaaccctgccattttgaaagatgtgaaggggagaaacacatttactccccaataattgtacgggaggtgatcgaggaagaagaaccaagtgaaaaatcagaggccacctacatgaccatgcacccagtttggccttctctgaggtcagatcggaacaactcacttgaaaaaaagtcaggtgggggaatgccaaaaacacagcaagccttttgagaagaatggagagtcccttcatctcagcagcggtggagactctctcctgtgtgtgtcctgggccactctaccagtgatttcagactcccgctctcccagctgtcctcctgtctcattgtttggtcaatacactgaagatggagaatttggagcctggcagagagactggacagctctggaggaacaggcctgctgaggggaggggagcatggacttggcctctggagtgggacactggccctgggaaccaggctgagctgagtggcctcaaaccccccgttggatcagaccctcctgtgggcagggttcttagtggatgagttactgggaa

SEQ ID NO: 105606 - DNA, 1478 bp, Homo sapiens
  Payload ID: 704
  Gene Symbol: ADRM1
  Gene Name: adhesion regulating molecule 1
  Uniprot ID: Q16186
  ENST ID: ENST00000253003
  CDS Start-End: 156-1379
gttagagccggctgcgcggcttacggggctcaatcggcggcgagagcggcaggcggggcgggccgaacgcgggtttccggcggggcccggcaggcgccgaggaggaagagcgagcccggacggcgcctctcgaacgagtgtgggcgcgaggcaggatgacgacctcaggcgcgctctttccaagcctggtgccaggctctcggggcgcctccaacaagtacttggtggagtttcgggcgggaaagatgtccctgaaggggaccaccgtgactccggataagcggaaagggctggtgtacattcagcagacggacgactcgcttattcacttctgctggaaggacaggacgtccgggaacgtggaagacgacttgatcatcttccctgacgactgtgagttcaagcgggtgccgcagtgccccagcgggagggtctacgtgctgaagttcaaggcagggtccaagcggcttttcttctggatgcaggaacccaagacagaccaggatgaggagcattgccggaaagtcaacgagtatctgaacaaccccccgatgcctggggcgctgggggccagcggaagcagcggccacgaactctctgcgctaggcggtgagggtggcctgcagagcctgctgggaaacatgagccacagccagctcatgcagctcatcggaccagccggccttggaggactgggtgggctgggggccctgactggacctggcctggccagcttactggggagcagtgggcctccagggagcagctcctcctccagctcccggagccagtcggcagcggtcaccccgtcatccaccacctcttccacccgtgccaccccagccccttctgctccagcagctgcctcagcaactagcccgagccccgcgcccagttccgggaatggagccagcacagcagccagcccgacccagcccatccagctgagcgacctccagagcatcctggccacgatgaacgtaccagccgggccagcaggcggccagcaagtggacctggccagtgtgctgacgccggagataatggctcccatcctcgccaacgcggatgtccaggagcgcctgcttccctacttgccatctggggagtcgctgccgcagaccgcggatgagatccagaataccctgacctcgccccagttccagcaggccctgggcatgttcagcgcagccttggcctcggggcagctgggccccctcatgtgccagttcggtctgcctgcagaggctgtggaggccgccaacaagggcgatgtggaagcgtttgccaaagccatgcagaacaacgccaagcccgagcagaaagagggcgacacgaaggacaagaaggacgaagaggaggacatgagcctggactgagccacgcgccgtcctccgaggaactgggcgcttgcagtgcgttgcacaccctcacctcccacccactgattattaataaagtcttttcttttacctgcc

SEQ ID NO: 105607 - DNA, 1530 bp, Homo sapiens
  Payload ID: 704
  Gene Symbol: ADRM1
  Gene Name: adhesion regulating molecule 1
  Uniprot ID: Q16186
  ENST ID: ENST00000491935
  CDS Start-End: 206-1429
cgactgccgcctttttaccctgtggcctttcccatccaggcgtccagagggttagagccggctgcgcggcttacggggctcaatcggcggcgagagcggcaggcggggcgggccgaacgcgggtttccggcggggcccggcaggcgccgaggaggaagagcgagcccggacggcgcctctcgaacgagtgtgggcgcgaggcaggatgacgacctcaggcgcgctctttccaagcctggtgccaggctctcggggcgcctccaacaagtacttggtggagtttcgggcgggaaagatgtccctgaaggggaccaccgtgactccggataagcggaaagggctggtgtacattcagcagacggacgactcgcttattcacttctgctggaaggacaggacgtccgggaacgtggaagacgacttgatcatcttccctgacgactgtgagttcaagcgggtgccgcagtgccccagcgggagggtctacgtgctgaagttcaaggcagggtccaagcggcttttcttctggatgcaggaacccaagacagaccaggatgaggagcattgccggaaagtcaacgagtatctgaacaaccccccgatgcctggggcgctgggggccagcggaagcagcggccacgaactctctgcgctaggcggtgagggtggcctgcagagcctgctgggaaacatgagccacagccagctcatgcagctcatcggaccagccggccttggaggactgggtgggctgggggccctgactggacctggcctggccagcttactggggagcagtgggcctccagggagcagctcctcctccagctcccggagccagtcggcagcggtcaccccgtcatccaccacctcttccacccgtgccaccccagccccttctgctccagcagctgcctcagcaactagcccgagccccgcgcccagttccgggaatggagccagcacagcagccagcccgacccagcccatccagctgagcgacctccagagcatcctggccacgatgaacgtaccagccgggccagcaggcggccagcaagtggacctggccagtgtgctgacgccggagataatggctcccatcctcgccaacgcggatgtccaggagcgcctgcttccctacttgccatctggggagtcgctgccgcagaccgcggatgagatccagaataccctgacctcgccccagttccagcaggccctgggcatgttcagcgcagccttggcctcggggcagctgggccccctcatgtgccagttcggtctgcctgcagaggctgtggaggccgccaacaagggcgatgtggaagcgtttgccaaagccatgcagaacaacgccaagcccgagcagaaagagggcgacacgaaggacaagaaggacgaagaggaggacatgagcctggactgagccacgcgccgtcctccgaggaactgggcgcttgcagtgcgttgcacaccctcacctcccacccactgattattaataaagtcttttcttttacctgccaa

SEQ ID NO: 105608 - DNA, 735 bp, Homo sapiens
  Payload ID: 704
  Gene Symbol: ADRM1
  Gene Name: adhesion regulating molecule 1
  ENST ID: ENST00000462554
  CDS Start-End: 312-735
gctcgggcgggtctgccccgcggagcgggtcgccggggtggcgcgtcgaggctggtgccccgcggagacggcgtcaagcctagggccggccccactaggcttggcggggctgccccggcccagcgccgagtgcgggcggtgcgatcgtcgtgagcggggcaaacgcggaaaggcagcccggcgtgtctgagtctgccttaggcagctctgggcgcaggccccctgctcgcaaacaccccagggggcgggagcttgccggaccgcaggcgacagtgaccgccgcgtctcagcgtcctctccgcgctttcaggatgacgacctcaggcgcgctctttccaagcctggtgccaggctctcggggcgcctccaacaagtacttggtggagtttcgggcgggaaagatgtccctgaaggggaccaccgtgactccggataagcggaaagggctggtgtacattcagcagacggacgactcgcttattcacttctgctggaaggacaggacgtccgggaacgtggaagacgaacccaagacagaccaggatgaggagcattgccggaaagtcaacgagtatctgaacaaccccccgatgcctggggcgctgggggccagcggaagcagcggccacgaactctctgcgctaggcggtgagggtggcctgcagagcctgctgggaaacatgagccacagccagctcatgcagctcatcggaccagccggccttggaggactgg

SEQ ID NO: 105609 - DNA, 1361 bp, Homo sapiens
  Payload ID: 704
  Gene Symbol: ADRM1
  Gene Name: adhesion regulating molecule 1
  ENST ID: ENST00000620230
  CDS Start-End: 156-1262
gttagagccggctgcgcggcttacggggctcaatcggcggcgagagcggcaggcggggcgggccgaacgcgggtttccggcggggcccggcaggcgccgaggaggaagagcgagcccggacggcgcctctcgaacgagtgtgggcgcgaggcaggatgacgacctcaggcgcgctctttccaagcctggtgccaggctctcggggcgcctccaacaagtacttggtggagtttcgggcgggaaagatgtccctgaaggggaccaccgtgactccggataagcggaaagggctggtgtacattcagcagacggacgactcgcttattcacttctgctggaaggacaggacgtccgggaacgtggaagacgaacccaagacagaccaggatgaggagcattgccggaaagtcaacgagtatctgaacaaccccccgatgcctggggcgctgggggccagcggaagcagcggccacgaactctctgcgctaggcggtgagggtggcctgcagagcctgctgggaaacatgagccacagccagctcatgcagctcatcggaccagccggccttggaggactgggtgggctgggggccctgactggacctggcctggccagcttactggggagcagtgggcctccagggagcagctcctcctccagctcccggagccagtcggcagcggtcaccccgtcatccaccacctcttccacccgtgccaccccagccccttctgctccagcagctgcctcagcaactagcccgagccccgcgcccagttccgggaatggagccagcacagcagccagcccgacccagcccatccagctgagcgacctccagagcatcctggccacgatgaacgtaccagccgggccagcaggcggccagcaagtggacctggccagtgtgctgacgccggagataatggctcccatcctcgccaacgcggatgtccaggagcgcctgcttccctacttgccatctggggagtcgctgccgcagaccgcggatgagatccagaataccctgacctcgccccagttccagcaggccctgggcatgttcagcgcagccttggcctcggggcagctgggccccctcatgtgccagttcggtctgcctgcagaggctgtggaggccgccaacaagggcgatgtggaagcgtttgccaaagccatgcagaacaacgccaagcccgagcagaaagagggcgacacgaaggacaagaaggacgaagaggaggacatgagcctggactgagccacgcgccgtcctccgaggaactgggcgcttgcagtgcgttgcacaccctcacctcccacccactgattattaataaagtcttttcttttacctgcc

SEQ ID NO: 105610 - DNA, 2430 bp, Homo sapiens
  Payload ID: 705
  Gene Symbol: APMAP
  Gene Name: adipocyte plasma membrane associated protein
  Uniprot ID: Q9HDC9
  ENST ID: ENST00000217456
  CDS Start-End: 292-1542
tcgcgttctgggccccggagtccgagacaggcggggaccccggcagctcccggtgctatctctgagcgggttccgagccccacttccgggcggtcagaattagcctcagagcgccgagcaacgacgcgccggggacctcccgcccatgaggccggaaggggcggggagaacgctgcggaatggtccctgggcgcaacgtcatttccgcgtacgggggagggcgggcctggagtctgagccggcgccgctcagtgtgaggtggtttctgcgggtgaggctggcgcccgtaccatgagcgaggcggacgggctgcgacagcgccggcccctgcggccgcaggtcgtcacagacgatgatggccaggccccggaggctaaggacggcagctcctttagcggcagagttttccgagtgaccttcttgatgctggctgtttctctcaccgttcccctgcttggagccatgatgctgctggaatctcctatagatccacagcctctcagcttcaaagaacccccgctcttgcttggtgttctgcatccaaatacgaagctgcgacaggcagaaaggctgtttgaaaatcaacttgttggaccggagtccatagcacatattggggatgtgatgtttactgggacagcagatggccgggtcgtaaaacttgaaaatggtgaaatagagaccattgcccggtttggttcgggcccttgcaaaacccgagatgatgagcctgtgtgtgggagacccctgggtatccgtgcagggcccaatgggactctctttgtggccgatgcatacaagggactatttgaagtaaatccctggaaacgtgaagtgaaactgctgctgtcctccgagacacccattgaggggaagaacatgtcctttgtgaatgatcttacagtcactcaggatgggaggaagatttatttcaccgattctagcagcaaatggcaaagacgagactacctgcttctggtgatggagggcacagatgacgggcgcctgctggagtatgatactgtgaccagggaagtaaaagttttattggaccagctgcggttcccgaatggagtccagctgtctcctgcagaagactttgtcctggtggcagaaacaaccatggccaggatacgaagagtctacgtttctggcctgatgaagggcggggctgatctgtttgtggagaacatgcctggatttccagacaacatccggcccagcagctctggggggtactgggtgggcatgtcgaccatccgccctaaccctgggttttccatgctggatttcttatctgagagaccctggattaaaaggatgatttttaagctctttagtcaagagacggtgatgaagtttgtgccgcggtacagcctcgtcctagaactcagcgacagcggtgccttccggagaagcctgcatgatcccgatgggctggtggccacctacatcagcgaggtgcacgaacacgatgggcacctgtacctgggctctttcaggtcccccttcctctgcagactcagcctccaggctgtttagccctcccagatagctgcccctgccacgcaggccaggagtcttcacactcaggcaccaggcctggtccaggaggagctgtggacacagtcgtggttcaagtgtccacatgcacctgttagtccctgagaggtggtgggaatggctgcttcattcctcgaggatgcccgggccccacctgggcttgtctttctgtttagagggaagtgtaacatatctgccatgaggaacataaattcatgtaaagccattttctcttaaacaaaacaaaactttctaagtacagtcattctctaggatttgggaagctccttgcacttggaacagggctcaggtgggtggagcagtaaggcactacccagagagcttgctgctgcggccctgtcctgcggcctcaaagttcttctttactatatataacgtgcggtcatacctttcttcgttgtggtggggatggaagagcagagggagcatggcccaggggtgttgaggccagcggtgagagccgtgttagccaagacatggaactgtgttctcaagggttatgtggggcgtgggctctccatagtgtgtatgaaaagcttgttgactctagcggctcagagaggactttgctgggtttctttctgtgaatatctccgtgctgaccatgctggaattggatgattctgcaattcgggacctactgcaggggtccgtttagtaacgtcttgtctgtgatctttgttcttgacctctagaccccaagatgtgaacagtgcacgtgttaatgtcatctttgctcatgtgttataagccccaagttgctgtatattttcacaagtatgtctacacactggtcatgattttgataataaataacgataaatcgacttctgctgattaaccttt

SEQ ID NO: 105611 - DNA, 2117 bp, Homo sapiens
  Payload ID: 705
  Gene Symbol: APMAP
  Gene Name: adipocyte plasma membrane associated protein
  ENST ID: ENST00000451442
  CDS Start-End: 1-1229
aggtcgtcacagacgatgatggccaggccccggaggctaaggacggcagctcctttagcggcagagttttccgagtgaccttcttgatgctggctgtttctctcaccgttcccctgcttggagccatgatgctgctggaatctcctatagatccacagcctctcagcttcaaagaacccccgctcttgcttggtgttctgcatccaaatacgaagctgcgacaggcagaaaggctgtttgaaaatcaacttgttggaccggagtccatagcacatattggggatgtgatgtttactgggacagcagatggccgggtcgtaaaacttgaaaatggtgaaatagagaccattgcccggtttggttcgggcccttgcaaaacccgagatgatgagcctgtgtgtgggagacccctgggtatccgtgcagggcccaatgggactctctttgtggccgatgcatacaagggactatttgaagtaaatccctggaaacgtgaagtgaaactgctgctgtcctccgagacacccattgaggggaagaacatgtcctttgtgaatgatcttacagtcactcaggatgggaggaagatttatttcaccgattctagcagcaaatggcaaagacgagactacctgcttctggtgatggagggcacagatgacgggcgcctgctggagtatgatactgtgaccagggaagtaaaagttttattggaccagctgcggttcccgaatggagtccagctgtctcctgcagaagactttgtcctggtggcagaaacaaccatggccaggatacgaagagtctacgtttctggcctgatgaagggcggggctgatctgtttgtggagaacatgcctggatttccagacaacatccggcccagcagctctggggggtactgggtgggcatgtcgaccatccgccctaaccctgggttttccatgctggatttcttatctgagagaccctggattaaaaggatgatttttaagggaagctgcgctggttgtgatctgctctttagtcaagagacggtgatgaagtttgtgccgcggtacagcctcgtcctagaactcagcgacagcggtgccttccggagaagcctgcatgatcccgatgggctggtggccacctacatcagcgaggtgcacgaacacgatgggcacctgtacctgggctctttcaggtcccccttcctctgcagactcagcctccaggctgtttagccctcccagatagctgcccctgccacgcaggccaggagtcttcacactcaggcaccaggcctggtccaggaggagctgtggacacagtcgtggttcaagtgtccacatgcacctgttagtccctgagaggtggtgggaatggctgcttcattcctcgaggatgcccgggccccacctgggcttgtctttctgtttagagggaagtgtaacatatctgccatgaggaacataaattcatgtaaagccattttctcttaaacaaaacaaaactttctaagtacagtcattctctaggatttgggaagctccttgcacttggaacagggctcaggtgggtggagcagtaaggcactacccagagagcttgctgctgcggccctgtcctgcggcctcaaagttcttctttactatatataacgtgcggtcatacctttcttcgttgtggtggggatggaagagcagagggagcatggcccaggggtgttgaggccagcggtgagagccgtgttagccaagacatggaactgtgttctcaagggttatgtggggcgtgggctctccatagtgtgtatgaaaagcttgttgactctagcggctcagagaggactttgctgggtttctttctgtgaatatctccgtgctgaccatgctggaattggatgattctgcaattcgggacctactgcaggggtccgtttagtaacgtcttgtctgtgatctttgttcttgacctctagaccccaagatgtgaacagtgcacgtgttaatgtcatctttgctcatgtgttataagccccaagttgctgtatattttcacaagtatgtctacacactggtcatgattttgataataaataacgataaatcgacttctgctgattaaccttt

SEQ ID NO: 105612 - DNA, 619 bp, Homo sapiens
  Payload ID: 706
  Gene Symbol: AAMDC
  Gene Name: adipogenesis associated, Mth938 domain containing
  ENST ID: ENST00000304716
  CDS Start-End: 148-591
gcagatcccgaagcagcgctgggagcgtaagtgcgggcagagcactgcgccgtttgggaacgcaactttgaggagacagtgcggtggttctggaggctgggaagtccaagaccagttggctcgcatctgacttcagtgaagttccttatgacttcccctgaaattgcttccttatcatgggggcaaatgaaagtaaaaggctctaatacaacctataaggactgcaaagtatggccagggggtagtcggacttgggattggagagaaacaggaactgagcattctcctggtgtgcagcctgcagatgtgaaggaagttgttgagaagggtgtacagactcttgtgattggccgagggatgagtgaggccttgaaggctccaacccagcagctgccatcaggtgttcatgtcagggctgtggtacaattccacctggctacagcttcatggcacatccttgagagatgcaaaacaggagctggactgagcatcaaacatgtctgtgagctggcaatgagtcacctaagtacttttttgtatcaaatctatgatgccatcattcttaagatgcacctttattttatgaaatagtaagaaacaaaaaacactatgggacacc

SEQ ID NO: 105613 - DNA, 531 bp, Homo sapiens
  Payload ID: 706
  Gene Symbol: AAMDC
  Gene Name: adipogenesis associated, Mth938 domain containing
  Uniprot ID: Q9H7C9
  ENST ID: ENST00000393427
  CDS Start-End: 117-485
agttggggagcgcagatcccgaagcagcgctgggagcgtaagtgcgggcagagcactgcgccgtttgggaacgcaactttgaggagacagtgcggtggacttcagtgaagttccttatgacttcccctgaaattgcttccttatcatgggggcaaatgaaagtaaaaggctctaatacaacctataaggactgcaaagtatggccagggggtagtcggacttgggattggagagaaacaggaactgagcattctcctggtgtgcagcctgcagatgtgaaggaagttgttgagaagggtgtacagactcttgtgattggccgagggatgagtgaggccttgaaggtgccttcatcaactgtggagtacctcaagaaacatggcattgatgtgcgggtcctccagacagagcaggcagtgaaggagtataatgccttggttgcccaaggggtcagggtgggaggtgtcttccattccacctgctgatggagccttaagaggagaataaatcactaagtgcctatgcctgtga

SEQ ID NO: 105614 - DNA, 579 bp, Homo sapiens
  Payload ID: 706
  Gene Symbol: AAMDC
  Gene Name: adipogenesis associated, Mth938 domain containing
  Uniprot ID: Q9H7C9
  ENST ID: ENST00000526415
  CDS Start-End: 174-542
gtattcccggagggcagttggggagcgcagatcccgaagcagcgctgggagcgtaagtgcgggcagagcactgcgccgtttgggaacgcaactttgaggagacagtgcggtggttctggaggctgggaagtccaagaccagttggctcgcatctgacttcagtgaagttccttatgacttcccctgaaattgcttccttatcatgggggcaaatgaaagtaaaaggctctaatacaacctataaggactgcaaagtatggccagggggtagtcggacttgggattggagagaaacaggaactgagcattctcctggtgtgcagcctgcagatgtgaaggaagttgttgagaagggtgtacagactcttgtgattggccgagggatgagtgaggccttgaaggtgccttcatcaactgtggagtacctcaagaaacatggcattgatgtgcgggtcctccagacagagcaggcagtgaaggagtataatgccttggttgcccaaggggtcagggtgggaggtgtcttccattccacctgctgatggagccttaagaggagaataaatcactaagtgccta

SEQ ID NO: 105615 - DNA, 511 bp, Homo sapiens
  Payload ID: 706
  Gene Symbol: AAMDC
  Gene Name: adipogenesis associated, Mth938 domain containing
  ENST ID: ENST00000525034
  CDS Start-End: 49-474
ccttttataatgaacctactactcctgcaataacagcataatctattcatgagggtggaaccctcatggcctaatcagctcttaaagacttcagtgaagttccttatgacttcccctgaaattgcttccttatcatgggggcaaatgaaagtaaaaggctctaatacaacctataaggactgcaaagtatggccagggggtagtcggacttgggattggagagaaacaggaactgagcattctcctggtgtgcagcctgcagatgtgaaggaagttgttgagaagggtgtacagactcttgtgattggccgagggatgagtgaggccttgaaggtgccttcatcaactgtggagtacctcaagaaacatggcattgatgtgcgggtcctccagacagagcaggcagtgaaggagtataatgccttggttgcccaaggggtcagggtgggaggtgtcttccattccacctgctgatggagccttaagaggagaataaatcactaagtgccta

SEQ ID NO: 105616 - DNA, 693 bp, Homo sapiens
  Payload ID: 706
  Gene Symbol: AAMDC
  Gene Name: adipogenesis associated, Mth938 domain containing
  ENST ID: ENST00000527134
  CDS Start-End: 149-562
cgcagatcccgaagcagcgctgggagcgtaagtgcgggcagagcactgcgccgtttgggaacgcaactttgaggagacagtgcggtggttctggaggctgggaagtccaagaccagttggctcgcatctgacttcagtgaagttccttatgacttcccctgaaattgcttccttatcatgggggcaaatgaaagtaaaaggctctaatacaacctataaggactgcaaagtatggccagggggtagtcggacttgggattggagagaaacaggaactgagcattctcctggtgtgcagcctgcagatgtgaaggaagttgttgagaagggtgtacagactcttgtgattggccgagggatgagtgaggccttgaaggctccaacccagcagctgccatcaggtgttcatgtcagggctgtggtacaattccacctggctacagcttcatggcacatccttgagagatgcaaaacagaccaggaactagaacagcttggtgttttctcaactttattgtggacaggagaagggagctggactgagcatcaaacatgtctgtgagctggcaatgagtcacctaagtacttttttgtatcaaatctatgatgccatcattcttaagatgcacctttattttatgaaatagtaagaaacaaaaaacactatgggacaccatcaaaatatctgatttc

SEQ ID NO: 105617 - DNA, 690 bp, Homo sapiens
  Payload ID: 706
  Gene Symbol: AAMDC
  Gene Name: adipogenesis associated, Mth938 domain containing
  Uniprot ID: Q9H7C9
  ENST ID: ENST00000532481
  CDS Start-End: 91-357
gcgctgttcaactgcagggcgtattcccggagggcagttggggagcgcagatcccgaagcagcgctgggagcacttcagtgaagttccttatgacttcccctgaaattgcttccttatcatgggggcaaatgaaagtaaaaggctctaatacaacctataaggactgcaaagtatggccagggggtagtcggacttgggattggagagaaacaggaactgagcattctcctggtgtgcagcctgcagatgtgaaggaagttgttgagaagggtgtacagactcttgtgattggccgagggatgagtgaggccttgaaggatggaatacagggggcacagttagatctgaattgttaagcagaggctgcttgatgcagaagatgaagacagaagaaagaatgagcctaggccgggcacagtggctcacgcctgtaattccagcactttgggaggccgaggcgggaggatcacttgagctcaggagtttgagaccagcctggccaccatggtgaaacctcgactctacaaaaaaaaaaaagccaaaattagccaggtgtggtggcatatgcctgtggtcccagctacttgggaggctgaagtgggagaatcacttgcagtgagctgatattatgccactgcactccagcctgggtgacagggtgagaccctgtctcaaaaaaaaaaaaaaaa

SEQ ID NO: 105618 - DNA, 421 bp, Homo sapiens
  Payload ID: 706
  Gene Symbol: AAMDC
  Gene Name: adipogenesis associated, Mth938 domain containing
  ENST ID: ENST00000525409
  CDS Start-End: 112-384
gcgggcagagcactgcgccgtttgggaacgcaactttgaggagacagtgcgttctggaggctgggaagtccaagaccagttggctcgcatctgacttcagtgaagttccttatgacttcccctgaaattgcttccttatcatgggggcaaatgaaagtaaaaggctctaatacaacctataaggactgcaaagtatggccagggggtagtcggacttgggattggagagaaacaggaactgaggtgccttcatcaactgtggagtacctcaagaaacatggcattgatgtgcgggtcctccagacagagcaggcagtgaaggagtataatgccttggttgcccaaggggtcagggtgggaggtgtcttccattccacctgctgatggagccttaagaggagaataaatcactaagtgccta

SEQ ID NO: 105619 - DNA, 726 bp, Homo sapiens
  Payload ID: 706
  Gene Symbol: AAMDC
  Gene Name: adipogenesis associated, Mth938 domain containing
  ENST ID: ENST00000526164
  CDS Start-End: 147-428
gttcaactgcagggcgtattcccggagggcagttggggagcgcagatcccgaagcagcgctgggagcgtaagtgcgggcagagcactgcgccgtttgggaacgcaactttgaggagacagtgcggtggacttcagtgaagttccttatgacttcccctgaaattgcttccttatcatgggggcaaatgaaagtaaaaggctctaatacaacctataaggactgcaaagtatggccagggggtagtcggacttgggattggagagaaacaggaactgagcattctcctggtgtgcagcctgcagatgtgaaggaagttgttgagaagggtgtacagactcttgtgattggccgagggatgagtgaggccttgaagggtcttactctgccacccaggctggagtgcagtggcacgatcataactcactgaagcctcaaactcctgggcgcaagtgatcttcctgcctcagcctcctgaggagtggggattacaggcacgtgccaccacgccaggagctggactgagcatcaaacatgtctgtgagctggcaatgagtcacctaagtacttttttgtatcaaatctatgatgccatcattcttaagatgcacctttattttatgaaatagtaagaaacaaaaaacactatgggacaccatcaaaatatctgatttcagagaagttacaataataaaaaatgtgtatcttggaatcaatgaaatgtggca

SEQ ID NO: 105620 - DNA, 606 bp, Homo sapiens
  Payload ID: 706
  Gene Symbol: AAMDC
  Gene Name: adipogenesis associated, Mth938 domain containing
  ENST ID: ENST00000533193
  CDS Start-End: 61-567
ttctggaggctgggaagtccaagaccagttggctcgcatctgacttcagtgaagttccttatgacttcccctgaaattgcttccttatcatgggggcaaatgaaagtaaaaggctctaatacaacctataaggactgcaaagtatggccagggggtagtcggacttgggattggagagaaacaggaactgagagtctcactctgttgcccaggctggagtgcagtggcgcgatctcggctcactgcaacctccacctcccaggttcatgccattctcctgcctcagcctcccaagtagctgggactacaggtgcctgccaccacacccagcattctcctggtgtgcagcctgcagatgtgaaggaagttgttgagaagggtgtacagactcttgtgattggccgagggatgagtgaggccttgaaggtgccttcatcaactgtggagtacctcaagaaacatggcattgatgtgcgggtcctccagacagagcaggcagtgaaggagtataatgccttggttgcccaaggggtcagggtgggaggtgtcttccattccacctgctgatggagccttaagaggagaataaatcactaagtgcctatg

SEQ ID NO: 105621 - DNA, 440 bp, Homo sapiens
  Payload ID: 706
  Gene Symbol: AAMDC
  Gene Name: adipogenesis associated, Mth938 domain containing
  ENST ID: ENST00000529666
  CDS Start-End: 1-156
aggctccaacccagcagctgccatcaggtgttcatgtcagggctgtggtacaattccacctggctacagcttcatggcacatccttgagagatgcaaaacagggtcttactctgccacccaggctggagtgcagtggcacgatcataactcactgaagcctcaaactcctgggcgcaagtgatcttcctgcctcagcctcctgaggagtggggattacaggcacgtgccaccacgccaggagctggactgagcatcaaacatgtctgtgagctggcaatgagtcacctaagtacttttttgtatcaaatctatgatgccatcattcttaagatgcacctttattttatgaaatagtaagaaacaaaaaacactatgggacaccatcaaaatatctgatttcagagaagttacaataataaaaaatgtgtatcttggaatc

SEQ ID NO: 105622 - DNA, 542 bp, Homo sapiens
  Payload ID: 706
  Gene Symbol: AAMDC
  Gene Name: adipogenesis associated, Mth938 domain containing
  ENST ID: ENST00000630098
  CDS Start-End: 99-542
ccgaagcagcgctgggagcgtaagtgcgggcagagcactgcgccgtttgggaacgcaactttgaggagacagtgcggtggacttcagtgaagttccttatgacttcccctgaaattgcttccttatcatgggggcaaatgaaagtaaaaggctctaatacaacctataaggactgcaaagtatggccagggggtagtcggacttgggattggagagaaacaggaactgagcattctcctggtgtgcagcctgcagatgtgaaggaagttgttgagaagggtgtacagactcttgtgattggccgagggatgagtgaggccttgaaggctccaacccagcagctgccatcaggtgttcatgtcagggctgtggtacaattccacctggctacagcttcatggcacatccttgagagatgcaaaacaggagctggactgagcatcaaacatgtctgtgagctggcaatgagtcacctaagtacttttttgtatcaaatctatgatgccatcattcttaagatgcacctttattttatgaaatag

SEQ ID NO: 105623 - DNA, 917 bp, Homo sapiens
  Payload ID: 707
  Gene Symbol: ADIRF
  Gene Name: adipogenesis regulatory factor
  Uniprot ID: Q15847
  ENST ID: ENST00000372013
  CDS Start-End: 354-584
aaagggagggctggggctgatgagctgggaggtggtgtgcgcccttctcctgcctccagctcctctctggacccctgtcctggcacctcttcggtccctggttcggtctgcccctttcccaccgcggcccgtcttaggccaggatgtgctccctgccctgcggactctggagcagggcccggccactccccggagcctgtatgacgggaaccgccccgcgccctctcccctacgcggggcaggccagccctggggcgccttaaaaaccggagctggcgcttggcatcgccactctgggcaggatccaacgtcgctccagctgctcttgacgactccacagataccccgaagccatggcaagcaagggcttgcaggacctgaagcaacaggtggaggggaccgcccaggaagccgtgtcagcggccggagcggcagctcagcaagtggtggaccaggccacagaggcggggcagaaagccatggaccagctggccaagaccacccaggaaaccatcgacaagactgctaaccaggcctctgacaccttctctgggattgggaaaaaattcggcctcctgaaatgacagcagggagacttgggtcggcctcctgaaatgacagcagggagacttgggtgaccccccttccaggcgccatctagcacagcctggccctgatctccgggcagccaccacctcctcggtctgccccctcattaaaattcacgttcccaccctgtgtccacttcatgattcctcgcaagctgggcccagtcctctcatcccaagagcagagccaccgtagccggagtcctagcctcccaaattcggaaatccaatccaacggtctcaggaatgttttccatcccgccacgcgcctcccgaagctcccagaccggaggctcagcccccatctcg

SEQ ID NO: 105624 - DNA, 229 bp, Homo sapiens
  Payload ID: 707
  Gene Symbol: ADIRF
  Gene Name: adipogenesis regulatory factor
  ENST ID: ENST00000416348
  CDS Start-End: 114-229
aggccagccctggggcgccttaaaaaccggagctggcgcttggcatcgccactctgggcaggatccaacgtcgctccagctgctcttgacgactccacagataccccgaagccatggcaagcaagggcttgcaggacctgaagcaacaggtggaggggaccgcccaggaagccgccatggaccagctggccaagaccacccaggaaaccatcgacaagactgctaacca

SEQ ID NO: 105625 - DNA, 700 bp, Homo sapiens
  Payload ID: 707
  Gene Symbol: ADIRF
  Gene Name: adipogenesis regulatory factor
  Uniprot ID: Q15847
  ENST ID: ENST00000561504
  CDS Start-End: 56-286
caggatccaacgtcgctccagctgctcttgacgactccacagataccccgaagccatggcaagcaagggcttgcaggacctgaagcaacaggtggaggggaccgcccaggaagccgtgtcagcggccggagcggcagctcagcaagtggtggaccaggccacagaggcggggcagaaagccatggaccagctggccaagaccacccaggaaaccatcgacaagactgctaaccaggcctctgacaccttctctgggattgggaaaaaattcggcctcctgaaatgacagcagggagacttgggtcggcctcctgaaatgacagcagggagacttgggtgaccccccttccaggcgccatctagcacagcctggccctgatctccgggcagccaccacctcctcggtctgccccctcattaaaattcacgttcccaccctgtgtccacttcatgattcctcgcaagctgggcccagtcctctcatcccaagagcagagccaccgtagccggagtcctagcctcccaaattcggaaatccaatccaacggtctcaggaatgttttccatcccgccacgcgcctcccgaagctcccagaccggaggctcagcccccatctcggtaaaatacctgttttctgacaagactaggactcttacatagactgccatgaactacaagaagtatagcattgctcaaata

SEQ ID NO: 105626 - DNA, 430 bp, Homo sapiens
  Payload ID: 708
  Gene Symbol: ADIG
  Gene Name: adipogenin
  ENST ID: ENST00000373348
  CDS Start-End: 46-225
ctgccagcccagcccaggctggcccagcttagccacacatgcgccatgaagtaccctttgatgccgctggtgaacgacctcacattttctttcctggttttctggttctgcctccctgtgggtttgctgttgttattgatcatctggctacgcttcttacttagccaagatattctgcaagtcagaagatacagatatgatgcaaacattttaacagcttcatgacaagccatcagacggagggtccgggtctccatgtggtgtgactctcccacagcttagtcacccagatctctcgtgatctgtggacgtggacacagtttccaggtgttttattgttcgtgtgtgcgtgtttcatcacaaaacagggctacagtggagatcattgtgcctttgtactcagatgtttgttaatgaatgaactagtgga

SEQ ID NO: 105627 - DNA, 547 bp, Homo sapiens
  Payload ID: 708
  Gene Symbol: ADIG
  Gene Name: adipogenin
  ENST ID: ENST00000416116
  CDS Start-End: 1-539
tctggttctgcctccctgtgggtttgctgttgttattgatcatctggctacgcttcttacttagccaagattcagaggaaaatgactccagtgtgtgcttggattgggagccctggagcaaaggcccagctgagttttgctggaaggggacactccacggccaagagaaggagaggccctgctgtttggttttcctggagtcagcagggcagtggcaatggcagaagtggatgggagagacttgccagggaggcaagaggactttggcaactgtggtgcctccctggaacccccaactcatctcctcttcagaccgacatgtgaaagcctccagaggtcccagcccttctccagcatcacagatgacctccagccctgcagggagccgctcaagtctgggagggcatgggagcagtgagcaggcccatggggagaaattggccaatttaattcagaggggtcttaaagcagggctgggccggagggtgtgggtccatattaaagaagcaagggtcttcccatacccgggggacccctgacaaaccta

SEQ ID NO: 105628 - DNA, 772 bp, Homo sapiens
  Payload ID: 708
  Gene Symbol: ADIG
  Gene Name: adipogenin
  Uniprot ID: Q0VDE8
  ENST ID: ENST00000470147
  CDS Start-End: 57-299
atggggcagccctgccagcccagcccaggctggcccagcttagccacacatgcgccatgaagtaccctttgatgccgctggtgaacgacctcacattttctttcctggttttctggttctgcctccctgtgggtttgctgttgttattgatcatctggctacgcttcttacttagccaagattcagaggaaaatgactccagtgtgtgcttggattgggagccctggagcaaaggcccagctgagttttgctggaaggggacactccacggccaagagaaggagaggccctgctggtgagcctgctgtgccaggtgaggcccttccaggggccagggggagcctcaaggcccacccaaagccttgggcagctgctatgtgggcaagaggctgcctccaccatattagagtttggttttcctggagtcagcagggcagtggcaatggcagaagtggatgggagagacttgccagggaggcaagaggactttggcaactgtggtgcctccctggaacccccaactcatctcctcttcagaccgacatgtgaaagcctccagaggtcccagcccttctccagcatcacagatgacctccagccctgcagggagccgctcaagtctgggagggcatgggagcagtgagcaggcccatggggagaaattggccaatttaattcagaggggtcttaaagcagggctgggccggagggtgtgggtccatattaaagaagcaagggtcttcccatacccgggggacccctgacaaaccta

SEQ ID NO: 105629 - DNA, 770 bp, Homo sapiens
  Payload ID: 708
  Gene Symbol: ADIG
  Gene Name: adipogenin
  Uniprot ID: Q0VDE8
  ENST ID: ENST00000537425
  CDS Start-End: 57-299
atggggcagccctgccagcccagcccaggctggcccagcttagccacacatgcgccatgaagtaccctttgatgccgctggtgaacgacctcacattttctttcctggttttctggttctgcctccctgtgggtttgctgttgttattgatcatctggctacgcttcttacttagccaagattcagaggaaaatgactccagtgtgtgcttggattgggagccctggagcaaaggcccagctgagttttgctggaaggggacactccacggccaagagaaggagaggccctgctggtgagcctgctgtgccaggtgaggcccttccaggggccagggggagcctcaaggcccacccaaagccttgggcagctgctatgtgggcaagaggctgcctccaccatattagagtttggttttcctggagtcagcagggcagtggcaatggcagaagtggatgggagagacttgccagggaggcaagaggactttggcaactgtggtgcctccctggaacccccaactcatctcctcttcagaccgacatgtgaaagcctccagaggtcccagcccttctccagcatcacagatgacctccagccctgcagggagccgctcaagtctgggagggcatgggagcagtgagcaggcccatggggagaaattggccaatttaattcagaggggtcttaaagcagggctgggccggagggtgtgggtccatattaaagaagcaagggtcttcccatacccgggggacccctgacaaacc

SEQ ID NO: 105630 - DNA, 2177 bp, Homo sapiens
  Payload ID: 709
  Gene Symbol: ADIPOR1
  Gene Name: adiponectin receptor 1
  Uniprot ID: Q96A54
  ENST ID: ENST00000340990
  CDS Start-End: 300-1427
ctccgcgagagggcctaggattggagggcccaggcagagcccgcgaggaggtgacgcggctgcggaggtgacgcgggaggtcgcgcgccccttccggcgcggggagggcgctgaagatcggggccgctcggccgcaggccgcctccagcgccgcgggatgtagcgcgggggaccgcggcccccagcagagcccgcctgcccggcttgtctaccatcagagggagatctctgccccctggggctgagagaccccaacctttccccaagctgaagctgcagggtattgaggtaccagccagatgtcttcccacaaaggatctgtggtggcacaggggaatggggctcctgccagtaacagggaagctgacacggtggaactggctgaactgggacccctgctagaagagaagggcaaacgggtaatcgccaacccacccaaagctgaagaagagcaaacatgcccagtgccccaggaagaagaggaggaggtgcgggtactgacacttcccctgcaagcccaccacgccatggagaagatggaagagtttgtgtacaaggtctgggagggacgttggagggtcatcccatatgatgtgctccctgactggctaaaggacaacgactatctgctacatggtcatagacctcccatgccctcctttcgggcttgcttcaagagcatcttccgcattcatacagaaactggcaacatctggacccatctgcttggtttcgtgctgtttctctttttgggaatcttgaccatgctcagaccaaatatgtacttcatggcccctctacaggagaaggtggtttttgggatgttctttttgggtgcagtgctctgcctcagcttctcctggctctttcacaccgtctattgtcattcagagaaagtctctcggactttttccaaactggactattcagggattgctcttctaattatggggagctttgtcccctggctctattattccttctactgctccccacagccacggctcatctacctctccatcgtctgtgtcctgggcatttctgccatcattgtggcgcagtgggaccggtttgccactcctaagcaccggcagacaagagcaggcgtgttcctgggacttggcttgagtggcgtcgtgcccaccatgcactttactatcgctgagggctttgtcaaggccaccacagtgggccagatgggctggttcttcctcatggctgtgatgtacatcactggagctggcctttatgctgctcgaattcctgagcgcttctttcctggaaaatttgacatatggttccagtctcatcagattttccatgtcctggtggtggcagcagcctttgtccacttctatggagtctccaaccttcaggaattccgttacggcctagaaggcggctgtactgatgacacccttctctgagccttcccacctgcggggtggaggaggaacttcccaagtgcttttaaaaataacttctttgctgaagtgagaggaagagtctgagttgtctgtttctagaagaaacctcttagagaattcagtaccaaccaagcttcagcccactttcacacccactgggcaataaactttccatttccattctcctagctggggatggggcatggtcaaacttagccatcccctcctcagcaaggcatctaccggcccctcacagagacagtactttgaaactcatgttgagattttaccctctcctccaaccattttgggaaaattatggactgggactcttcagaaattctgtcttttcttctggaagaaaatgtccctcccttacccccatccttaactttgtatcctggcttataacaggccatccatttttgtagcacacttttcaaaaacaattatataccctggtcccatctttctagggcctggatctgcttatagagcaggaagaataaagccaccaacttttacctagcccggctaatcatggaagtgtgtccaggcttcaagtaacttgagttttaattttttttttttcttggcagagtaatgtaaaatttaaatggggaaagatatttaatatttaatactaagctttaaaaagaaacctgctatcattgctatgtatcttgatgcaaagactatgatgttaataaaagaaagtacagaagacacttggcattcaaagatttcaca

SEQ ID NO: 105631 - DNA, 1116 bp, Homo sapiens
  Payload ID: 709
  Gene Symbol: ADIPOR1
  Gene Name: adiponectin receptor 1
  ENST ID: ENST00000367254
  CDS Start-End: 175-690
gctcggccgcaggccgcctccagcgccgcgggatgtagcgcgggggaccgcggcccccagcagagcccgcctgcccggcttgtctaccatcagagggagatctctgccccctggggctgagagaccccaacctttccccaagctgaagctgcagggtattgaggtaccagccagatgtcttcccacaaaggatctgtggtggcacaggggaatggggctcctgccagtaacagggaagctgacacggtggaactggctgaactgggacccctgctagaagagaagggcaaacgggtaatcgccaacccacccaaagctgaagaagagcaaacatgcccagtgccccaggaagaagaggaggaggtgcgggtactgacacttcccctgcaagcccaccacgccatggagaagatggaagagtttgtgtacaaggtctgggagggacgttggagggtcatcccatatgatgtgctccctgactggctaaaggacaacgactatctgctacatggtcatagacctcccatgccctcctttcgggcttgcttcaagagcatcttccgcattcatacagaaactggcaacatctggacccatctgcttgccacggctcatctacctctccatcgtctgtgtcctgggcatttctgccatcattgtggcgcagtgggaccggtttgccactcctaagcaccggcagacaagagcaggcgtgttcctgggacttggcttgagtggcgtcgtgcccaccatgcactttactatcgctgagggctttgtcaaggccaccacagtgggccagatgggctggttcttcctcatggctgtgatgtacatcactggagctggcctttatgctgctcgaattcctgagcgcttctttcctggaaaatttgacatatggttccagtctcatcagattttccatgtcctggtggtggcagcagcctttgtccacttctatggagtctccaaccttcaggaattccgttacggcctagaaggcggctgtactgatgacacccttctctgagccttcccacctgcggggtggaggaggaacttcccaagtgcttttaaaaataacttctttgctgaagtgagaggaagagtctg

SEQ ID NO: 105632 - DNA, 879 bp, Homo sapiens
  Payload ID: 709
  Gene Symbol: ADIPOR1
  Gene Name: adiponectin receptor 1
  ENST ID: ENST00000426229
  CDS Start-End: 263-879
agggcgctgaagatcggggccgctcggccgcaggccgcctccagcgccgcgggatgtagcgcgggggaccgcggcccccagcagagcccgcctgcccggcttttagaagaccaaactggacaatggactttgctcactatgatgacatgatctccattgacctccatttgtctaccatcagagggagatctctgccccctggggctgagagaccccaacctttccccaagctgaagctgcagggtattgaggtaccagccagatgtcttcccacaaaggatctgtggtggcacaggggaatggggctcctgccagtaacagggaagctgacacggtggaactggctgaactgggacccctgctagaagagaagggcaaacgggtaatcgccaacccacccaaagctgaagaagagcaaacatgcccagtgccccaggaagaagaggaggaggtgcgggtactgacacttcccctgcaagcccaccacgccatggagaagatggaagagtttgtgtacaaggtctgggagggacgttggagggtcatcccatatgatgtgctccctgactggctaaaggacaacgactatctgctacatggtcatagacctcccatgccctcctttcgggcttgcttcaagagcatcttccgcattcatacagaaactggcaacatctggacccatctgcttggtttcgtgctgtttctctttttgggaatcttgaccatgctcagaccaaatatgtacttcatggcccctctacaggagaaggtggtttttgggatgttctttttgggtgcagtgctctgcctcagcttctcctggctctttcacaccgtctattgtcattcagagaaagtctctcggactttttccaa

SEQ ID NO: 105633 - DNA, 1058 bp, Homo sapiens
  Payload ID: 709
  Gene Symbol: ADIPOR1
  Gene Name: adiponectin receptor 1
  ENST ID: ENST00000417068
  CDS Start-End: 260-1058
atcacgcacttcaggctgcgataacgaggtggagtgtagaatccgacgaacgtcctctaccccggggcgggtggaggttacctggctgcggcggggagtttagaagaccaaactggacaatggactttgctcactatgatgacatgatctccattgacctccatttgtctaccatcagagggagatctctgccccctggggctgagagaccccaacctttccccaagctgaagctgcagggtattgaggtaccagccagatgtcttcccacaaaggatctgtggtggcacaggggaatggggctcctgccagtaacagggaagctgacacggtggaactggctgaactgggacccctgctagaagagaagggcaaacgggtaatcgccaacccacccaaagctgaagaagagcaaacatgcccagtgccccaggaagaagaggaggaggtgcgggtactgacacttcccctgcaagcccaccacgccatggagaagatggaagagtttgtgtacaaggtctgggagggacgttggagggtcatcccatatgatgtgctccctgactggctaaaggacaacgactatctgctacatggtcatagacctcccatgccctcctttcgggcttgcttcaagagcatcttccgcattcatacagaaactggcaacatctggacccatctgcttggtttcgtgctgtttctctttttgggaatcttgaccatgctcagaccaaatatgtacttcatggcccctctacaggagaaggtggtttttgggatgttctttttgggtgcagtgctctgcctcagcttctcctggctctttcacaccgtctattgtcattcagagaaagtctctcggactttttccaaactggactattcagggattgctcttctaattatggggagctttgtcccctggctctattattccttctactgctccccacagccacggctcatctacctctccatcgtctgtgtcctgggcatttctgccatcattgtggcgcagtgggaccggtttgccactcctaagcaccggcagacaa

SEQ ID NO: 105634 - DNA, 4018 bp, Homo sapiens
  Payload ID: 710
  Gene Symbol: ADIPOR2
  Gene Name: adiponectin receptor 2
  Uniprot ID: Q86V24
  ENST ID: ENST00000357103
  CDS Start-End: 252-1412
gcggcggcggcggtcgctgtcgcggcggcgagagcgcgattccagaagcggcatcgcggcggcggcagcggcggcggctacaccgggcttggccccctccctcctccgttcccccctcctcccccctcccctcagcggtggctcccaagaagtccgagacacgcggatcaactcactatcctgaaggtccattctcccaagaagaggggacagaaagacagatctatttgtaagaaaggcttgggtatcccatgaacgagccaacagaaaaccgattggggtgcagcaggactccagagccagatataaggctcagaaaagggcaccaactggatggtacacgaagaggtgataatgacagccaccaaggagatttggagcccattttagaggcatctgttctatcttcccatcataaaaaaagctctgaggaacatgaatacagtgatgaagctcctcaggaagatgagggctttatgggcatgtcccctctcttacaagcccatcatgctatggaaaaaatggaagaatttgtttgtaaggtatgggaaggtcggtggcgagtgatccctcatgatgtactaccagactggctcaaggataatgacttcctcttgcatggacaccggcctcctatgccttctttccgggcctgttttaagagcattttcagaatacacacagaaacaggcaacatttggacacatctcttaggttgtgtattcttcctgtgcctggggatcttttatatgtttcgcccaaatatctcctttgtggcccctctgcaagagaaggtggtctttggattatttttcttaggagccattctctgcctttctttttcatggctcttccacacagtctactgccactcagagggggtctctcggctcttctctaaactggattactctggtattgctcttctgattatgggaagttttgttccttggctttattattctttctactgtaatccacaaccttgcttcatctacttgattgtcatctgtgtgctgggcattgcagccattatagtctcccagtgggacatgtttgccacccctcagtatcggggagtaagagcaggagtgtttttgggcctaggcctgagtggaatcattcctaccttgcactatgtcatctcggaggggttccttaaggccgccaccatagggcagataggctggttgatgctgatggccagcctctacatcacaggagctgccctgtatgctgcccggatccccgaacgctttttccctggcaaatgtgacatctggtttcactctcatcagctgtttcatatctttgtggttgctggagcttttgttcacttccatggtgtctcaaacctccaggagtttcgtttcatgatcggcgggggctgcagtgaagaggatgcactgtgatacctaccagtctccagggactatgaccctaaaccagggcctgcggcacttgcgggcctccctgctggctactgatgccagtaccagaggagccccaaaactttgacagcctcgtgggctttgtgacggcccagtggctctgcgtggtacatgactgagaagagaaaaacaaaaataaatcatacctcaaaggatggagtgcatcaattgggagaaaaggagacatagcccaaaccctggcttattcttgggatctactgattgcgggctctgcaagacccttggcaaactggcttctgatccatatcatatttatttgtagaagatggcgaaacagtttagctggtggttctttcttctccctttctctctctctatgacaataatacaaaccaatttaagtgaacatttatatccgataaggggtgggagtgtgattttaaatgctcttttgggagaacaaagaaattaatgtaaataagatttctaactgtttaaataagactttatataaatgtttaaaacataggggtaagggagggagggagaatttttgtatagaatgaaacatgcaagtaccacacactgtttgaattttgcacaaaaagtgactgtaggatcaggtgatagccccggaatgtacagtgtcttggtgcaccaagatgccttctaaaggctgacataccttggaccctaatggggcagagagtatagccctagcccagtggtgacatgaccactccctttgggaggcctgaggtagaggggagtggtatgtgttttctcagtggaagcagcacatgagtgggtgacaggatgttagataaaggctctagttagggtgtcattgtcatttgagagactgacacactcctagcagctggtaaaggggtgctggaggccatggaggagctctagaaacattagcatgggctgatctgattacttcctggcatcccgctcacttttatgggaagtcttattagagggatgggacagttttccatatccttgctgtggagctctggaacactctctaaatttccctctattaaaaatcactgccctaactacacttcctccttgagggaatagaaatggacctttctctgacatagttcttggcatgggagccagccacaaatgagattctgacgtgtccaggtttctcctgagctcatctacatagattggtagacccttcctttggattaggaaagatgagttttacctctggtacactgtcttggtaagcctggatgtgacagacacctcggctctccttgaataagaaagccagcagaactcttaaagccagttgtagtacggagttgtcagcactcactgaacctcactttacagggataagagtggtgtggcattttaaatacaatggtatgttattgccagggagtgaggtacaagacgatggctcatgtcacaggcctacctgatacggtgtcagagaaagtggtggggaaaggatctggttcatggaattctgatcttggcccataggtgaaccaccaaaatagtgctcgagtcttaggttactgtcatcaaagacttgggatgactccattatatcctggggttgtgggtattagaactaaatatggaggtcctgagcatggggactggcgtcctcagtaggtgtttgggaatatgggaagggtctcctatttattcaatagagttttctcagttattttcctcccttgcccttgcaatctccagcaaaaggtgggatctaggaagaaagaatccagtgtagaagttgagaagaacttgaacgttttggttctggataaggtcactgtcctaggtgctaggtggaccgagcaaaagactcagtggatgaactggtgcagtgcctgacagaataaagaacagtattaatccctttgagaaagcatagtccagcaggacagtggccatttggacagaagcccacttagtttcttgggagcaacagcacgtatcagaagccagacttgctcttcggtcatgcactttgggatacagcgtataggtgcagccctgtcacaacaccaacagaagtagcagcctctgggtgcagtcacccacaccccaaagctggaaggatctggttcaacatagcacaaacccttaggaaaaatgaaattaacatcactgatgtgtaatccagtaaaatctccctttttcgggtgtgtatgtgggcatgtgcccatttctatgtgtgtgtctacgtgcagctcactaccaacagcctcatgtgcacttgacctgacagtgctcgctgagaactctcaccaggttggcgcctgaatgccttactctcagcagtcagaggcttgcttgctctgtgcagatttttaattttcttttttggccctaggctggttgggacctctacagcttcattctttcaccattaaatagtggcctttttcagtattttccctcttcccctttataaattatgctaaagccacaaagcacatttttggggatcatagaaggttggggttccagaaaggcatctgtgtgatggttccattgatgtgggatttccctacttgctgtattctcagtttctaataaaaagaaccaaatgaaatatg

SEQ ID NO: 105635 - DNA, 4562 bp, Homo sapiens
  Payload ID: 711
  Gene Symbol: ADIPOQ
  Gene Name: adiponectin, C1Q and collagen domain containing
  Uniprot ID: Q15848
  ENST ID: ENST00000320741
  CDS Start-End: 69-803
gccatctcctcctcacttccattctgactgcagtctgtggttctgattccataccagaggggctcaggatgctgttgctgggagctgttctactgctattagctctgcccggtcatgaccaggaaaccacgactcaagggcccggagtcctgcttcccctgcccaagggggcctgcacaggttggatggcgggcatcccagggcatccgggccataatggggccccaggccgtgatggcagagatggcacccctggtgagaagggtgagaaaggagatccaggtcttattggtcctaagggagacatcggtgaaaccggagtacccggggctgaaggtccccgaggctttccgggaatccaaggcaggaaaggagaacctggagaaggtgcctatgtataccgctcagcattcagtgtgggattggagacttacgttactatccccaacatgcccattcgctttaccaagatcttctacaatcagcaaaaccactatgatggctccactggtaaattccactgcaacattcctgggctgtactactttgcctaccacatcacagtctatatgaaggatgtgaaggtcagcctcttcaagaaggacaaggctatgctcttcacctatgatcagtaccaggaaaataatgtggaccaggcctccggctctgtgctcctgcatctggaggtgggcgaccaagtctggctccaggtgtatggggaaggagagcgtaatggactctatgctgataatgacaatgactccaccttcacaggctttcttctctaccatgacaccaactgatcaccactaactcagagcctcctccaggccaaacagccccaaagtcaattaaaggctttcagtacggttaggaagttgattattatttagttggaggcctttagatattattcattcatttactcattcatttattcattcattcatcgagtaactttaaaaaaatcatatgctatgttcccagtcctggggagcttcacaaacatgaccagataactgactagaaagaagtagttgacagtgctattttgtgcccactgtctctcctgatgctcatatcaatcctataaggcacagggaacaagcattctcctgtttttacagattgtatcctgaggctgagagagttaagtgaatgtctaaggtcacacagtattaagtgacagtgctagaaatcaaacccagagctgtggactttgttcactagactgtgcccttttatagaggtacatgttctctttggagtgttggtaggtgtctgtttcccacctcacctgagagccattgaatttgccttcctcatgaattaaaacctcccccaagcagagcttcctcagagaaagtggttctatgatgacgtcctgtcttggaaggactactactcaatggcccctgcactactctacttcctcttacctatgtcccttctcatgcctttccctccaacggggaaagccaactccatctctaagtgccgaactcatccctgttcctcaaggccacctggccaggagcttctctgatgtgatatccactttttttttttttgagatggagtctcactctgtcacccaggctggagtacagtgacacgacctcggctcactgcagcctccttctcctgggtccaagcaattattgtgcctcagcctcccgagtagctgagacttcaggtgcattccaccacacatggctaatttttgtatttttagtagaaatggggtttcgtcatgttggccaggctggtctcgaactcctggcctaggtgatccacccgcctcgacctcccaaagtgctgggattacaggcatgagccaccatgcccagtcgatatctcactttttattttgccatggatgagagtcctgggtgtgaggaacacctcccaccaggctagaggcaactgcccaggaaggactgtgcttccgtcacctctaaatcccttgcagatccttgataaatgcctcatgaagaccaatctcttgaatcccatatctacccagaattaactccattccagtctctgcatgtaatcagttttatccacagaaacattttcattttaggaaatccctggttttaagtatcaatccttgttcagctggacaatatgaatcttttccactgaagttagggatgactgtgattttcagaacacgtccagaatttttcatcaagaaggtagcttgagcctgaaatgcaaaacccatggaggaattctgaagccattgtctccttgagtaccaacagggtcagggaagactgggcctcctgaatttattattgttctttaagaattacaggttgaggtagttgatggtggtaaacattctctcaggagacaataactccagtgatgttcttcaaagattttagcaaaaacagagtaaatagcattctctatcaatatataaatttaaaaaactatctttttgcttacagttttaaattctgaacaattctctcttatatgtgtattgctaatcattaaggtattattttttccacatataaagctttgtctttttgttgttgttgttgtttttaagatggagtttccctctgttgccaggctagagtgcagtggcatgatctcggcttactgcaacctttgcctcccaggttcaagcgattcttctgcctcagcctcccgagtagctgggaccacaggtgcctaccaccatgccaggctaatttttgtatttttagtaaagacagggtttcaccatattggccaggctggtctcgaactcctgaccttgtgatctgcccgcctccatttttgttgttattttttgagaaagatagatatgaggtttagagagggatgaagaggtgagagtaagccttgtgttagtcagaactctgtgttgtgaatgtcattcacaacagaaaacccaaaatattatgcaaactactgtaagcaagaaaaataaaggaaaaatggaaacatttattcctttgcataatagaaattaccagagttgttctgtctttagataaggtttgaaccaaagctcaaaacaatcaagacccttttctgtatgtccttctgttctgccttccgcagtgtaggctttaccctcaggtgctacacagtatagttctagggtttccctcccgatatcaaaaagactgtggcctgcccagctctcgtatccccaagccacaccatctggctaaatggacatcatgttttctggtgatgcccaaagaggagagaggaagctctctttcccagatgccccagcaagtgtaaccttgcatctcattgctctggctgagttgtgtgcctgtttctgaccaatcactgagtcaggaggatgaaatattcatattgacttaattgcagcttaagttaggggtatgtagaggtattttccctaaagcaaaattgggacactgttatcagaaataggagagtggatgatagatgcaaaataatacctgtccacaacaaactcttaatgctgtgtttgagctttcatgagtttcccagagagacatagctggaaaattcctattgattttctctaaaatttcaacaagtagctaaagtctggctatgctcacagtctcacatctggttggggtgggctccttacagaacacgctttcacagttaccctaaactctctggggcagggttattcctttgtggaaccagaggcacagagagagtcaactgaggccaaaagaggcctgagagaaactgaggtcaagatttcaggattaatggtcctgtgatgctttgaagtacaattgtggatttgtccaattctctttagttctgtcagcttttgcttcatatattttagcgctctattattagatatatacatgtttagtattatgtcttattggtgcatttactctcttatcattatgtaatgtccttctttatctgtgataattttctgtgttctgaagtctactttgtctaaaaataacatacgcactcaacttccttttctttcttccttcctttctttcttccttcctttctttctctctctctctctttccttccttccttcctccttttctttctctctctctctctctctctttttttgacagactctcgttctgtggccctggctggagttcagtggtgtgatcttggctcactgctacctctaccatgagcaattctcctgcctcagcctcccaagtagctggaactacaggctcatgccactgcgcccagctaatttttgtatttttcgtagagacggggtttcaccacattcgtcaggttggtttcaaactcctgactttgtgatccacccgcctcggcctcccaaagtgctgggattacaggcatgagccatcacacctggtcaactttcttttgattagtgtttttgtggtatatctttttccatcatgttactttaaatatatctatattattgtatttaaaatgtgtttcttacagactgcatgtagttgggtataatttttatccagtctaaaaatatctgtcttttaattggtgtttagacaatttatatttaataaaattgttgaatttaa

SEQ ID NO: 105636 - DNA, 4599 bp, Homo sapiens
  Payload ID: 711
  Gene Symbol: ADIPOQ
  Gene Name: adiponectin, C1Q and collagen domain containing
  Uniprot ID: Q15848
  ENST ID: ENST00000444204
  CDS Start-End: 106-840
acttccattctgactgcagtctgtggttctgattccataccagaggagacgggatttcaccatgttgtccaggctggtctgaaactcctgacatcagggctcaggatgctgttgctgggagctgttctactgctattagctctgcccggtcatgaccaggaaaccacgactcaagggcccggagtcctgcttcccctgcccaagggggcctgcacaggttggatggcgggcatcccagggcatccgggccataatggggccccaggccgtgatggcagagatggcacccctggtgagaagggtgagaaaggagatccaggtcttattggtcctaagggagacatcggtgaaaccggagtacccggggctgaaggtccccgaggctttccgggaatccaaggcaggaaaggagaacctggagaaggtgcctatgtataccgctcagcattcagtgtgggattggagacttacgttactatccccaacatgcccattcgctttaccaagatcttctacaatcagcaaaaccactatgatggctccactggtaaattccactgcaacattcctgggctgtactactttgcctaccacatcacagtctatatgaaggatgtgaaggtcagcctcttcaagaaggacaaggctatgctcttcacctatgatcagtaccaggaaaataatgtggaccaggcctccggctctgtgctcctgcatctggaggtgggcgaccaagtctggctccaggtgtatggggaaggagagcgtaatggactctatgctgataatgacaatgactccaccttcacaggctttcttctctaccatgacaccaactgatcaccactaactcagagcctcctccaggccaaacagccccaaagtcaattaaaggctttcagtacggttaggaagttgattattatttagttggaggcctttagatattattcattcatttactcattcatttattcattcattcatcgagtaactttaaaaaaatcatatgctatgttcccagtcctggggagcttcacaaacatgaccagataactgactagaaagaagtagttgacagtgctattttgtgcccactgtctctcctgatgctcatatcaatcctataaggcacagggaacaagcattctcctgtttttacagattgtatcctgaggctgagagagttaagtgaatgtctaaggtcacacagtattaagtgacagtgctagaaatcaaacccagagctgtggactttgttcactagactgtgcccttttatagaggtacatgttctctttggagtgttggtaggtgtctgtttcccacctcacctgagagccattgaatttgccttcctcatgaattaaaacctcccccaagcagagcttcctcagagaaagtggttctatgatgacgtcctgtcttggaaggactactactcaatggcccctgcactactctacttcctcttacctatgtcccttctcatgcctttccctccaacggggaaagccaactccatctctaagtgccgaactcatccctgttcctcaaggccacctggccaggagcttctctgatgtgatatccactttttttttttttgagatggagtctcactctgtcacccaggctggagtacagtgacacgacctcggctcactgcagcctccttctcctgggtccaagcaattattgtgcctcagcctcccgagtagctgagacttcaggtgcattccaccacacatggctaatttttgtatttttagtagaaatggggtttcgtcatgttggccaggctggtctcgaactcctggcctaggtgatccacccgcctcgacctcccaaagtgctgggattacaggcatgagccaccatgcccagtcgatatctcactttttattttgccatggatgagagtcctgggtgtgaggaacacctcccaccaggctagaggcaactgcccaggaaggactgtgcttccgtcacctctaaatcccttgcagatccttgataaatgcctcatgaagaccaatctcttgaatcccatatctacccagaattaactccattccagtctctgcatgtaatcagttttatccacagaaacattttcattttaggaaatccctggttttaagtatcaatccttgttcagctggacaatatgaatcttttccactgaagttagggatgactgtgattttcagaacacgtccagaatttttcatcaagaaggtagcttgagcctgaaatgcaaaacccatggaggaattctgaagccattgtctccttgagtaccaacagggtcagggaagactgggcctcctgaatttattattgttctttaagaattacaggttgaggtagttgatggtggtaaacattctctcaggagacaataactccagtgatgttcttcaaagattttagcaaaaacagagtaaatagcattctctatcaatatataaatttaaaaaactatctttttgcttacagttttaaattctgaacaattctctcttatatgtgtattgctaatcattaaggtattattttttccacatataaagctttgtctttttgttgttgttgttgtttttaagatggagtttccctctgttgccaggctagagtgcagtggcatgatctcggcttactgcaacctttgcctcccaggttcaagcgattcttctgcctcagcctcccgagtagctgggaccacaggtgcctaccaccatgccaggctaatttttgtatttttagtaaagacagggtttcaccatattggccaggctggtctcgaactcctgaccttgtgatctgcccgcctccatttttgttgttattttttgagaaagatagatatgaggtttagagagggatgaagaggtgagagtaagccttgtgttagtcagaactctgtgttgtgaatgtcattcacaacagaaaacccaaaatattatgcaaactactgtaagcaagaaaaataaaggaaaaatggaaacatttattcctttgcataatagaaattaccagagttgttctgtctttagataaggtttgaaccaaagctcaaaacaatcaagacccttttctgtatgtccttctgttctgccttccgcagtgtaggctttaccctcaggtgctacacagtatagttctagggtttccctcccgatatcaaaaagactgtggcctgcccagctctcgtatccccaagccacaccatctggctaaatggacatcatgttttctggtgatgcccaaagaggagagaggaagctctctttcccagatgccccagcaagtgtaaccttgcatctcattgctctggctgagttgtgtgcctgtttctgaccaatcactgagtcaggaggatgaaatattcatattgacttaattgcagcttaagttaggggtatgtagaggtattttccctaaagcaaaattgggacactgttatcagaaataggagagtggatgatagatgcaaaataatacctgtccacaacaaactcttaatgctgtgtttgagctttcatgagtttcccagagagacatagctggaaaattcctattgattttctctaaaatttcaacaagtagctaaagtctggctatgctcacagtctcacatctggttggggtgggctccttacagaacacgctttcacagttaccctaaactctctggggcagggttattcctttgtggaaccagaggcacagagagagtcaactgaggccaaaagaggcctgagagaaactgaggtcaagatttcaggattaatggtcctgtgatgctttgaagtacaattgtggatttgtccaattctctttagttctgtcagcttttgcttcatatattttagcgctctattattagatatatacatgtttagtattatgtcttattggtgcatttactctcttatcattatgtaatgtccttctttatctgtgataattttctgtgttctgaagtctactttgtctaaaaataacatacgcactcaacttccttttctttcttccttcctttctttcttccttcctttctttctctctctctctctttccttccttccttcctccttttctttctctctctctctctctctctttttttgacagactctcgttctgtggccctggctggagttcagtggtgtgatcttggctcactgctacctctaccatgagcaattctcctgcctcagcctcccaagtagctggaactacaggctcatgccactgcgcccagctaatttttgtatttttcgtagagacggggtttcaccacattcgtcaggttggtttcaaactcctgactttgtgatccacccgcctcggcctcccaaagtgctgggattacaggcatgagccatcacacctggtcaactttcttttgattagtgtttttgtggtatatctttttccatcatgttactttaaatatatctatattattgtatttaaaatgtgtttcttacagactgcatgtagttgggtataatttttatccagtctaaaaatatctgtcttttaattggtgtttagacaatttatatttaataaaattgttgaatttaa

SEQ ID NO: 105637 - DNA, 5393 bp, Homo sapiens
  Payload ID: 712
  Gene Symbol: ADNP2
  Gene Name: ADNP homeobox 2
  Uniprot ID: Q6IQ32
  ENST ID: ENST00000262198
  CDS Start-End: 456-3851
acgagagtttgcacagatgtggaaaggagctggcagggcagttccctgggacagaagggagtcagggggtccaacaggggccccccactgccaccccagagcctccagtccatctttagccaggggccccggggggcctgtgggaagtgccaggggcccccaagcacactctgctctcattggctggctgcgcctacatgcaaatgagggccaacgtcacttcctgaggccaatcgagcgccattttctctttctggctgcgcgggaggaggggaccagtcgcgctgggggtgggcgcgcgctgaggcgggggtcccgccgcgcggggcggaggcgcgggcgggcgcaggcggccccacgggacgcggctgcgctcggcggaagacgcggcagccctgcgagaggcagcagcggagacgcggtgctcctcgggcgccaagcggaaaatttcaaaaatgtttcaaattcctgtggaaaatcttgacaacatcagaaaggtgcgaaaaaaggtgaaaggtattcttgtggatattgggcttgacagctgcaaggagttactgaaggaccttaaaggctttgatccaggagagaaatactttcataacacatcatggggtgatgtttctctctgggaaccttctggaaagaaagtgagatatcgaacaaagccatactgttgtggcctctgtaaatactctacaaaggtgcttacttcattcaagaatcatttacatcgttaccatgaagatgaaattgaccaagagctggtgatcccttgcccaaactgtgtatttgcatctcagcccaaagttgtgggaaggcacttcagaatgttccatgcacctgtccggaaagtccagaactacacagtgaatattttaggtgaaactaaatcatctaggagcgatgtgataagtttcacatgtctaaaatgtaacttttcaaacactttgtactacagcatgaagaagcatgtgctggtagcccattttcactacttaattaactcctactttggcctaagaactgaggaaatgggtgagcaaccgaaaactaacgatactgtttctatagagaagatcccaccacctgacaaatattactgtaaaaagtgcaacgccaatgccagcagccaggatgcgttaatgtatcacattttgacatcagacatacacagagatttggagaataagcttagatctgtgatttcagaacatattaagaggactggactcttgaagcaaacgcacattgctccaaaaccagcagcacatttggctgcaccagcaaatggcagtgctccaagcgctccagcgcagcctccttgcttccatcttgctttgccacagaacagtccaagcccagccgcaggacagccagtgactgtggcccagggtgcccctggaagcctcactcattccccccctgctgctggccaatcccacatgactctggtctccagccctctgcctgtgggccagaacagcctcaccctgcagcccccagcacctcagcccgtctttctttctcacggggttccacttcatcagtctgtgaatcctcctgtgttgcccttgagtcagccagtcggacctgtcaataagtctgttggaactagtgtcctccccataaatcagactgttcgccctggggttttacccctcacccagcctgtgggacccataaacagacctgttgggcctggtgttcttcctgtgagcccctctgtcacccctggggtcctgcaggctgtctcgccaggggtgctttctgtgagtcgggcggtcccgtctggagtccttcctgcaggccagatgactcctgcaggccagatgactcctgcaggggttatccctgggcaaacagcaacttctggggttcttcctactggccagatggtccagtcaggagttctccctgtgggccagacagctccgtcacgggttcttcccccaggccagacagccccattgagggttatctctgcaggccaggtggtcccgtctgggcttctttctcccaaccagacagtctcctcctcagctgttgtgcctgtaaaccagggtgtgaattctggtgttctgcagcttagtcagcctgttgtgtcgggagttcttcctgtgggccagccagtgaggcctggggtcttgcaactcaaccagactgtgggcaccaacattctgcctgtgaatcagccagtgagacctggtgcttcgcagaacaccaccttcctgacatcaggctctattctcagacagctcatccctacagggaaacaagtgaatgggattccaacctacacgctggcccccgtgtctgtcactctgccggttccccctggaggccttgcgactgtcgctccgccccagatgcccatccagctcctgccgtcaggtgcagctgcaccaatggccggttccatgcccggcatgccctctcctccagtgctggtgaatgctgctcagagcgtgtttgttcaggcctcctcctctgcagcagacacaaaccaggtgctcaaacaggccaagcagtggaagacctgccctgtctgcaacgagctctttccgtccaacgtctaccaggtccacatggaggtagcgcataagcacagcgagtccaagtctggtgagaaacttgagcctgaaaaactggcagcgtgtgcaccatttctaaagtggatgagagagaaaacggtgcgatgtctgtcttgtaagtgcttggtctctgaggaagagcttatacaccacttgctgatgcatggcttggggtgcttgttctgtccatgcaccttccatgatatcaaaggtctttcagagcacagcaggaataggcacctggggaagaagaagttgcctatggattatagcaacagaggttttcaattagatgtcgatgccaatggcaacctgctctttccccaccttgatttcatcaccatattgccaaaggagaagcttggggagcgggaagtctacttggcaatcctggctgggatacactccaagtcactggtgcctgtgtatgtgaaggtgaggcctcaggctgagggcacccccgggagcaccggcaagcgagtgtccacctgccccttttgctttggcccctttgtgacaactgaggcctatgagctgcatttgaaggagaggcaccacatcatgcccacagtccacacggtcctgaagtctcccgccttcaagtgcatccactgctgtggggtctacacgggaaatatgaccctggctgccatcgccgtccatttggtgcgctgcagaagtgctcccaaggacagcagctcagacctgcaggcccagccgggttttattcacaacagtgaactgcttttagtcagtggtgaagtgatgcatgattccagtttttctgttaagagaaagctgcctgacggccacttaggggccgaagaccagcggcatggggaggagcagcctcccatcctaaatgccgatgcagccccgggtccagaaaaggtgacgagtgttgtgccttttaaaagacaaaggaatgaaagcagaacagagggacctattgtcaaggacgaggctcttcagattttagcattagatcctaaaaaatatgaaggccgttcttatgaagaaaagaagcaatttcttaaagattatttccataagaaaccatatcctagtaaaaaggaaatagaactgttgtcctcactcttttgggtgtggaaaattgatgtggcttcattttttggaaaaagaaggtatatttgcatgaaagcaataaaaaatcacaagccttctgtacttttaggctttgatatgtctgaacttaaaaatgtgaaacatagattgaactttgaatatgaaccataaaacttgcaaaaaaaaaaaaaagtaactctaaagtagtaggtagatttttttcagttgaaatttcacagtgttgtcctcactgtgttggtgaatcaacctcagtggtcactgtgctgctctgcagagttacttcaggtgctggagagacccctgttaccaggaagccagtagttatttcacatctattgtttcctgcagtttgatttgtaacagaacagttgttttcaggtttttttctctgtcatgtaaatgaaatcttttgatatttcatgcacgccttgttttcccactagtgtcagtatcgtatgataagaaactgaaatctataaataatttgctttttcattaaggacatttcagcctttttcagaatacttgatttaactgcgagtggaagcatcgatctccttcagctttccctgtagcagcagatggtacagtgagtgttcagagacgtgggtacaaaccctgtgatgtatgtataaggctccctgaggatgcactgcattaacttacgctgacttctttgtaagatctttgcttatagattataatttagatctgtatttttttaggtttatcctaatagctgtttttttttttaaccataactcatagaaaatcaaatgtttttatttgttaaaagtagactgaatttgacatctggtatgctggtatgtagctcatacatcaagagttattttacaaataaatttattctgtagatgcagaaatatttttcagtgtagattttcccttttgatatgctaagtcatttctccgttcagaggtaaaacaataaatttttagtgcctttagaataaacattgaaagaatacaccccaaaactcttctcctaacttaactactcataaactagtgaaagggaaggtctatgatactcaggaataagattattgcccctgagtgtgaaaactaacttaaatttcagcatagggtttcaggggacatggcgaagtttacagactgagatctcagtctccatggttggtacagtaagtctttgaccacattttctgaaggtcatgtttagtggagaaacgggcttttctctagctggtttaggctggaagctgtgtccgggtcgatgggatggcatattgttaaagaatctccattgtcgtcactgtcctgtggatgttaaacctcgtttttttccccacacgatattaaaacttaaagcaccagaaccagtcatggagaccagccagtttagatggtaagtcatatttctggtggtacacagcagaggaaccccttcactctatctttaggtagaaatatttggaggatgtgacagcctctgagaaacataatgttactatgtggattttaaaaaatataatacttgcatgtaattgctataatgttcatatttgaggcagttgtgaaactggtttatgattgttggtgtactctgttgtaaattcaaagagagcttgttgaacattttttttttttacctattgttttcagagtgtctattttgaattaaaatttgttacaccgctgcaaatagaa

SEQ ID NO: 105638 - DNA, 823 bp, Homo sapiens
  Payload ID: 712
  Gene Symbol: ADNP2
  Gene Name: ADNP homeobox 2
  ENST ID: ENST00000559951
  CDS Start-End: 310-823
acgtgggagcgggggccgccccgggagggcggagaaggggatggggacctgaggggagagtaggaataggggaaagacgaggacggggaccgagggagagaggggggctggtgaagggagcgaggagtagagggagagggaacggggatggagaagaagagagggggcaaggagctgtggcgacccctgtaaggactccagaaacgccccgcccgctggcccgcccgccgcatccccgagaccgggttctcctggaagcttctctctggaggagccttgagtgacggcagatgtaggaaaatttcaaaaatgtttcaaattcctgtggaaaatcttgacaacatcagaaaggtgcgaaaaaaggtgaaaggtattcttgtggatattgggcttgacagctgcaaggagttactgaaggaccttaaaggctttgatccaggagagaaatactttcataacacatcatggggtgatgtttctctctgggaaccttctggaaagaaagtgagatatcgaacaaagccatactgttgtggcctctgtaaatactctacaaaggtgcttacttcattcaagaatcatttacatcgttaccatgaagatgaaattgaccaagagctggtgatcccttgcccaaactgtgtatttgcatctcagcccaaagttgtgggaaggcacttcagaatgttccatgcacctgtccggaaagtccagaactacacagtgaatattttaggtgaaactaaatcatctaggagcgatgtgataagtttcacatgtctaaaatgtaacttttcaaacactttgtactacagcatgaaga

SEQ ID NO: 105639 - DNA, 880 bp, Homo sapiens
  Payload ID: 712
  Gene Symbol: ADNP2
  Gene Name: ADNP homeobox 2
  ENST ID: ENST00000560752
  CDS Start-End: 194-880
cgggaggaggggaccagtcgcgctgggggtgggcgcgcgctgaggcgggggtcccgccgcgcggggcggaggcgcgggcgggcgcaggcggccccacgggacgcggctgcgctcggcggaagacgcggcagccctgcgagaggcagcagcggagacgcggtgctcctcgggcgccaagcggaaaatttcaaaaatgtttcaaattcctgtggaaaatcttgacaacatcagaaaggaccttaaaggctttgatccaggagagaaatactttcataacacatcatggggtgatgtttctctctgggaaccttctggaaagaaagtgagatatcgaacaaagccatactgttgtggcctctgtaaatactctacaaaggtgcttacttcattcaagaatcatttacatcgttaccatgaagatgaaattgaccaagagctggtgatcccttgcccaaactgtgtatttgcatctcagcccaaagttgtgggaaggcacttcagaatgttccatgcacctgtccggaaagtccagaactacacagtgaatattttaggtgaaactaaatcatctaggagcgatgtgataagtttcacatgtctaaaatgtaacttttcaaacactttgtactacagcatgaagaagcatgtgctggtagcccattttcactacttaattaactcctactttggcctaagaactgaggaaatgggtgagcaaccgaaaactaacgatactgtttctatagagaagatcccaccacctgacaaatattactgtaaaaagtgcaacgccaatgccagcagccaggatgcgttaatgtatcacattttgacatcagacatacacagagatttggagaataagcttagatctgtgatt

SEQ ID NO: 105640 - DNA, 124 bp, Homo sapiens
  Payload ID: 712
  Gene Symbol: ADNP2
  Gene Name: ADNP homeobox 2
  ENST ID: ENST00000561195
  CDS Start-End: 1-80
atattgggcttgacagctgcaaggagttactgaagcccgacaggaagagtggagccctgcgctgtgtgcgtgcgttttaaagcgtgctggaaacgtctacaatggcagcgcagccagcagccac

SEQ ID NO: 105641 - DNA, 647 bp, Homo sapiens
  Payload ID: 712
  Gene Symbol: ADNP2
  Gene Name: ADNP homeobox 2
  ENST ID: ENST00000560561
  CDS Start-End: 1-247
tcttgtggatattgggcttgacagctgcaaggagttactgaaggaccttaaaggctttgatccaggagagaaatactttcataacacatcatggggtgatgtttctctctgggaaccttctggaaagaaagtgttgttagcaccttcctcggtatcagactcagctcatcccagacttgacttggctgtcccctctcaccagcttctgtggtcaaagtcatgctggccttgggaatttgggctttaagagatatcgaacaaagccatactgttgtggcctctgtaaatactctacaaaggtgcttacttcattcaagaatcatttacatcgttaccatgaagatgaaattgaccaagagctggtgatcccttgcccaaactgtgtatttgcatctcagcccaaagttgtgggaaggcacttcagaatgttccatgcacctgtccggaaagtccagaactacacagtgaatattttaggtgaaactaaatcatctaggagcgatgtgataagtttcacatgtctaaaatgtaacttttcaaacactttgtactacagcatgaagaagcatgtgctggtagcccattttcactacttaattaactcctactttggcctaagaactgaggaaatgggtgagcaaccgaaa

SEQ ID NO: 105642 - DNA, 2557 bp, Homo sapiens
  Payload ID: 713
  Gene Symbol: ADPGK
  Gene Name: ADP-dependent glucokinase
  Uniprot ID: Q9BRR6
  ENST ID: ENST00000311669
  CDS Start-End: 95-1585
gtagcgcttgtgtcgacatcggcgcgcgccgagcccggaagaggcgcgggctaggaaaggagttggttcgcgcaggtgcggcgcctgggtccccatggcgctgtggcgcggctccgcgtacgcgggcttcctggcgctggccgtgggctgcgtcttcctgctggagccagagctgccaggctcggcgctgcgctctctctggagctcgctgtgtctggggcccgcgcctgcgcccccgggacccgtctcccccgagggccggttggcggcagcctgggacgcgcttatcgtgcggccagtccggcgctggcgccgcgtggcagtgggagtcaatgcatgtgttgatgtggtgctctcaggggtgaagctcttgcaggcacttggccttagtcctgggaatgggaaagatcacagcattctgcattcaaggaatgatctggaagaagccttcattcacttcatggggaagggagcagctgctgagcgcttcttcagtgataaggaaacttttcacgacattgcccaggttgcatcagagttcccaggagcccagcactatgtaggaggaaatgcagctttaattggacagaaatttgcagccaactcagatttaaaggttcttctttgcggtccagttggtccaaagctacatgagcttcttgatgacaatgtctttgttccaccagagtcattgcaggaagtggatgagttccacctcattttagagtatcaagcaggggaggagtggggccagttaaaagctccccatgccaaccgattcatcttctctcacgacctctccaacggggccatgaatatgctggaggtgtttgtgtctagcctggaggagtttcagccagacctggtggtcctctctggattgcacatgatggagggacaaagcaaggagctccagaggaagagactcttggaggttgtaacctccatttctgacatccccactggtattccagttcacctagagctggccagtatgactaacagggagctcatgagcagcattgtccatcaggtctttcccgcggtgacttcccttgggctgaatgaacaggagctgttatttctcacccagtcagcctctggacctcactcttctctctcttcctggaacggtgttcctgatgtgggcatggtcagtgacatcctcttctggatcttgaaagaacatgggaggagtaaaagcagagcctcggatctcaccaggatccatttccacacgctggtctaccacatcctggcaactgtggatggacactgggccaaccagctggcagccgtggctgcaggagctcgtgtggctgggacacaggcctgcgccacagaaaccatagacaccagccgagtgtctctgagggcaccccaagagttcatgacttcccattcggaggcaggctccaggattgtattaaacccaaacaagccagtagtagaatggcacagagagggaatatccttccacttcacaccagtattggtgtgtaaagaccccattcgaactgtaggccttggagatgccatttcagccgaaggactcttctattcggaagtacaccctcactattaggaagattcttaggggtaatttttctgaggaaggagaactagccaacttaagaattacaggaagaaagtggtttggaagacagccaaagaaataaaagcagattaaactgtatcaggtacattccagcctgttggcaactccataaaaacatttcagattttaatccgaatttagctaatgagactggatttttgttttttatgttgtgtgtcacagagctaaaaactcagttcccaaatccccagtttatgcagcgccatcaggtattttaagctaaacttcttcacccctgagagcatgtcagctggagaaaagcagttcttccttgcccacttgagaagtgcacgcccactcacccaacatcctggtctctaggaaagcctcatgtgaggttcctctttctttcagctcagtgcccatgggcaaggatcatgatttccattccgtgttacaatgacaatatttaatgagcataaccttctcagtctcctgctctcaaatttaggacagagccgctaaggacaaaacaatccctcccgtgctttatgatggcagcaggggctggggagcctctgagggactctttcattctgcagttgtctggaagcctgggtggcgtcatgagctgaaggatcatgctttcctgtcctggctccataggttataggctggctggtgaaaggttcacgtggcccaggctgaacttcattgcctagctttggatgtgctttctgccataaagactgatttttgttcgttctgagccttcaaggaatttgttttttacaactggaatatgctcctgtgtgtgttaacagatcatggatgttttatgttttcactgatcatttaaagagtttgacctcagagctccaggatcatcagtaaatttgtcatgttatatatttatttttttataaatcaagacttctgtgtgctcttaaatatattaaaaacaatttacatttcagg

SEQ ID NO: 105643 - DNA, 808 bp, Homo sapiens
  Payload ID: 713
  Gene Symbol: ADPGK
  Gene Name: ADP-dependent glucokinase
  Uniprot ID: Q9BRR6
  ENST ID: ENST00000456471
  CDS Start-End: 1-669
atggctgcaagctgcagggttgtaacctccatttctgacatccccactggtattccagttcacctagagctggccagtatgactaacagggagctcatgagcagcattgtccatcaggtctttcccgcggtgacttcccttgggctgaatgaacaggagctgttatttctcacccagtcagcctctggacctcactcttctctctcttcctggaacggtgttcctgatgtgggcatggtcagtgacatcctcttctggatcttgaaagaacatgggaggagtaaaagcagagcctcggatctcaccaggatccatttccacacgctggtctaccacatcctggcaactgtggatggacactgggccaaccagctggcagccgtggctgcaggagctcgtgtggctgggacacaggcctgcgccacagaaaccatagacaccagccgagtgtctctgagggcaccccaagagttcatgacttcccattcggaggcaggctccaggattgtattaaacccaaacaagccagtagtagaatggcacagagagggaatatccttccacttcacaccagtattggtgtgtaaagaccccattcgaactgtaggccttggagatgccatttcagccgaaggactcttctattcggaagtacaccctcactattaggaagattcttaggggtaatttttctgaggaaggagaactagccaacttaagaattacaggaagaaagtggtttggaagacagccaaagaaataaaagcagattaaactgtatcaggtacattccagcctgttggcaact

SEQ ID NO: 105644 - DNA, 951 bp, Homo sapiens
  Payload ID: 713
  Gene Symbol: ADPGK
  Gene Name: ADP-dependent glucokinase
  Uniprot ID: Q9BRR6
  ENST ID: ENST00000569517
  CDS Start-End: 25-261
cgcaggtgcggcgcctgggtccccatggcgctgtggcgcggctccgcgtacgcgggcttcctggcgctggccgtgggctgcgtcttcctgctggagccagagctgccaggctcggcgctgcgctctctctggagctcgctgtgtctggggcccgcgcctgcgcccccgggacccgtctcccccgagggccggttggcggcagcctgggacgcgcttatcgtgcggccagtccggcgctggcgccgcgtggcagtggggtgagtgccaacggggcctgggtctctgagcctccgaggtcggccttggaggtcgggcggagccgcgcagaaacagggcttctcagaggtccccgggaggcgctgctgtccgcgctggccccttggcgagaagtgtcggacgtctgagtggaacccggttcgtcaccgctgctctttccactcggctggcctctgcgcctttctctcatcccggttcttctttgcggtccagttggtccaaagctacatgagcttcttgatgacaatgtctttgttccaccagagtcattgcaggaagtggatgagttccacctcattttagagtatcaagcaggttgtaacctccatttctgacatccccactggtattccagttcacctagagctggccagtatgactaacagggagctcatgagcagcattgtccatcagcaggtctttcccgcggtgacttcccttgggctgaatgaacaggagctgttatttctcacccagtcagcctctggacctcactcttctctctcttcctggaacggtgttcctgatgtgggcatggtcagtgacatcctcttctggatcttgaaagaacatgggaggagtaaaagcagagcctcggatctcaccaggatccatttccacacgctggtctaccacatcctggcaactgtggatggacactgggccaaccagctg

SEQ ID NO: 105645 - DNA, 514 bp, Homo sapiens
  Payload ID: 713
  Gene Symbol: ADPGK
  Gene Name: ADP-dependent glucokinase
  Uniprot ID: Q9BRR6
  ENST ID: ENST00000562823
  CDS Start-End: 40-276
aaaggagttggttcgcgcaggtgcggcgcctgggtccccatggcgctgtggcgcggctccgcgtacgcgggcttcctggcgctggccgtgggctgcgtcttcctgctggagccagagctgccaggctcggcgctgcgctctctctggagctcgctgtgtctggggcccgcgcctgcgcccccgggacccgtctcccccgagggccggttggcggcagcctgggacgcgcttatcgtgcggccagtccggcgctggcgccgcgtggcagtggggtgagtgccaacggggcctgggtctctgagcctccgaggtcggccttggaggtcgggcggagccgcgcagaaacagggcttctcagaggtccccgggaggcgctgctgtccgcgctggccccttggcgagaagtgtcggacgtctgagtggaacccggttcttctttgcggtccagttggtccaaagctacatgagcttcttgatgacaatgtctttgttccaccagagtcattgcaggaag

SEQ ID NO: 105646 - DNA, 2262 bp, Homo sapiens
  Payload ID: 713
  Gene Symbol: ADPGK
  Gene Name: ADP-dependent glucokinase
  ENST ID: ENST00000569534
  CDS Start-End: 86-427
gtgtcgacatcggcgcgcgccgagcccggaagaggcgcgggctaggaaaggagttggttcgcgcaggtgcggcgcctgggtccccatggcgctgtggcgcggctccgcgtacgcgggcttcctggcgctggccgtgggctgcgtcttcctgctggagccagagctgccaggctcggcgctgcgctctctctggagctcgctgtgtctggggcccgcgcctgcgcccccgggacccgtctcccccgagggccggttggcggcagcctgggacgcgcttatcgtgcggccagtccggcgctggcgccgcgtggcagtggggttcttctttgcggtccagttggtccaaagctacatgagcttcttgatgacaatgtctttgttccaccagagtcattgcaggaagtggatgagttccacctcattttagagtatcaagcaggggaggagtggggccagttaaaagctccccatgccaaccgattcatcttctctcacgacctctccaacggggccatgaatatgctggaggtgtttgtgtctagcctggaggagtttcagccagacctggtggtcctctctggattgcacatgatggagggacaaagcaaggagctccagaggaagagactcttggaggttgtaacctccatttctgacatccccactggtattccagttcacctagagctggccagtatgactaacagggagctcatgagcagcattgtccatcagcaggtctttcccgcggtgacttcccttgggctgaatgaacaggagctgttatttctcacccagtcagcctctggacctcactcttctctctcttcctggaacggtgttcctgatgtgggcatggtcagtgacatcctcttctggatcttgaaagaacatgggaggagtaaaagcagagcctcggatctcaccaggatccatttccacacgctggtctaccacatcctggcaactgtggatggacactgggccaaccagctggcagccgtggctgcaggagctcgtgtggctgggacacaggcctgcgccacagaaaccatagacaccagccgagtgtctctgagggcaccccaagagttcatgacttcccattcggaggcaggctccaggattgtattaaacccaaacaagccagtagtagaatggcacagagagggaatatccttccacttcacaccagtattggtgtgtaaagaccccattcgaactgtaggccttggagatgccatttcagccgaaggactcttctattcggaagtacaccctcactattaggaagattcttaggggtaatttttctgaggaaggagaactagccaacttaagaattacaggaagaaagtggtttggaagacagccaaagaaataaaagcagattaaactgtatcaggtacattccagcctgttggcaactccataaaaacatttcagattttaatccgaatttagctaatgagactggatttttgttttttatgttgtgtgtcacagagctaaaaactcagttcccaaatccccagtttatgcagcgccatcaggtattttaagctaaacttcttcacccctgagagcatgtcagctggagaaaagcagttcttccttgcccacttgagaagtgcacgcccactcacccaacatcctggtctctaggaaagcctcatgtgaggttcctctttctttcagctcagtgcccatgggcaaggatcatgatttccattccgtgttacaatgacaatatttaatgagcataaccttctcagtctcctgctctcaaatttaggacagagccgctaaggacaaaacaatccctcccgtgctttatgatggcagcaggggctggggagcctctgagggactctttcattctgcagttgtctggaagcctgggtggcgtcatgagctgaaggatcatgctttcctgtcctggctccataggttataggctggctggtgaaaggttcacgtggcccaggctgaacttcattgcctagctttggatgtgctttctgccataaagactgatttttgttcgttctgagccttcaaggaatttgttttttacaactggaatatgctcctgtgtgtgttaacagatcatggatgttttatgttttcactgatcatttaaagagtttgacctcagagctccaggatcatcagtaaatttgtcatgttatatatttatttttttataaatcaagacttctgtgtgctcttaaatatattaaaaacaatttacatttcagg

SEQ ID NO: 105647 - DNA, 1041 bp, Homo sapiens
  Payload ID: 713
  Gene Symbol: ADPGK
  Gene Name: ADP-dependent glucokinase
  ENST ID: ENST00000563907
  CDS Start-End: 1-613
ggagccagagctgccaggctcggcgctgcgctctctctggagctcgctgtgtctggggcccgcgcctgcgcccccgggacccgtctcccccgagggccggttggcggcagcctgggacgcgcttatcgtgcggccagtccggcgctggcgccgcgtggcagtgggagtcaatgcatgtgttgatgtggtgctctcaggggtgaagctcttgcaggcacttggccttagtcctgggaatgggaaagatcacagcattctgcattcaaggaatgatctggaagaagccttcattcacttcatggggaagggagcagctgctgagcgcttcttcagtgataaggaaacttttcacgacattgcccaggttgcatcagagttcccaggagcccagcactatgtaggaggaaatgcagctttaattggacagaaatttgcagccaactcagatttaaaggttcttctttgcggtccagttggtccaaagctacatgagcttcttgatgacaatgtctttgttccaccagagtcattgcaggaagtggatgagttccacctcattttagagtatcaagcagcaggtctttcccgcggtgacttcccttgggctgaatgaacaggagctgttatttctcacccagtcagcctctggacctcactcttctctctcttcctggaacggtgttcctgatgtgggcatggtcagtgacatcctcttctggatcttgaaagaacatgggaggagtaaaagcagagcctcggatctcaccaggatccatttccacacgctggtctaccacatcctggcaactgtggatggacactgggccaaccagctggcagccgtggctgcaggagctcgtgtggctgggacacaggcctgcgccacagaaaccatagacaccagccgagtgtctctgagggcaccccaagagttcatgacttcccattcggaggcaggctccaggattgtattaaacccaaacaagccagtagtagaatggcacagagagggaatatccttccacttcacaccagtattgg

SEQ ID NO: 105648 - DNA, 556 bp, Homo sapiens
  Payload ID: 713
  Gene Symbol: ADPGK
  Gene Name: ADP-dependent glucokinase
  ENST ID: ENST00000562286
  CDS Start-End: 1-174
ctgctggagccagagctgccaggctcggcgctgcgctctctctggagctcgctgtgtctggggcccgcgcctgcgcccccgggacccgtctcccccgagggccggttggcggcagcctgggacgcgcttatcgtgcggccagtccggcgctggcgccgcgtggcagtggggtgagtgccaacggggcctgggtctctgagcctccgaggtcggccttggaggtcgggcggagccgcgcagaaacagggcttctcagaggtccccgggaggcgctgctgtccgcgctggccccttggcgagaagtgtcggacgtctgagtggaacccggttcgtcaccgctgctctttccactcggctggcctctgcgcctttctctcatcccgcactatgtaggaggaaatgcagctttaattggacagaaatttgcagccaactcagatttaaaggttcttctttgcggtccagttggtccaaagctacatgagcttcttgatgacaatgtctttgttccaccagagtcattgcaggaagtggatgagttccacctcattttaga

SEQ ID NO: 105649 - DNA, 795 bp, Homo sapiens
  Payload ID: 713
  Gene Symbol: ADPGK
  Gene Name: ADP-dependent glucokinase
  ENST ID: ENST00000565814
  CDS Start-End: 332-795
gaaatatttcaagagggactgtggcaccaagacagtgaatgcctgcccctgagccccgatgagaaggaattaagggccctgtgactctgtatgtgaccagaagccacatcaggctccgccaggcctggcaactgtccctggtgttctgttcttcacctcctgcggctcctgactcttcagttctcagttggaattgagagtcaatgcatgtgttgatgtggtgctctcaggggtgaagctcttgcaggcacttggccttagtcctgggaatgggaaagatcacagcattctgcattcaaggaatgatctggaagaagccttcattcacttcatggggaagggagcagctgctgagcgcttcttcagtgataaggaaacttttcacgacattgcccaggttgcatcagagttcccaggagcccagcactatgtaggaggaaatgcagctttaattggacagaaatttgcagccaactcagatttaaaggttcttctttgcggtccagttggtccaaagctacatgagcttcttgatgacaatgtctttgttccaccagagtcattgcaggaagtggatgagttccacctcattttagagtatcaagcaggggaggagtggggccagttaaaagctccccatgccaaccgattcatcttctctcacgacctctccaacggggccatgaatatgctggaggtgtttgtgtctagcctggaggagtttcagccagacctggtggtcctctctggattgcacatgatggagggacaaagcaaggagctccagaggaagag

SEQ ID NO: 105650 - DNA, 1820 bp, Homo sapiens
  Payload ID: 713
  Gene Symbol: ADPGK
  Gene Name: ADP-dependent glucokinase
  ENST ID: ENST00000569693
  CDS Start-End: 1-80
ggaagagactcttggaggtcctggcctcccagggacatatcttggcagctggctgtggagcttgcctcctgctgcagtgaggcacctcactgtatcccttcagatgtgggcagcagcttgagtaggacagggcagaacatcttcttgcctgagcctctgcatcctgtgctaaaccgaccatggctgcaagctgcagggttgtaacctccatttctgacatccccactggtattccagttcacctagagctggccagtatgactaacagggagctcatgagcagcattgtccatcaggtctttcccgcggtgacttcccttgggctgaatgaacaggagctgttatttctcacccagtcagcctctggacctcactcttctctctcttcctggaacggtgttcctgatgtgggcatggtcagtgacatcctcttctggatcttgaaagaacatgggaggagtaaaagcagagcctcggatctcaccaggatccatttccacacgctggtctaccacatcctggcaactgtggatggacactgggccaaccagctggcagccgtggctgcaggagctcgtgtggctgggacacaggcctgcgccacagaaaccatagacaccagccgagtgtctctgagggcaccccaagagttcatgacttcccattcggaggcaggctccaggattgtattaaacccaaacaagccagtagtagaatggcacagagagggaatatccttccacttcacaccagtattggtgtgtaaagaccccattcgaactgtaggccttggagatgccatttcagccgaaggactcttctattcggaagtacaccctcactattaggaagattcttaggggtaatttttctgaggaaggagaactagccaacttaagaattacaggaagaaagtggtttggaagacagccaaagaaataaaagcagattaaactgtatcaggtacattccagcctgttggcaactccataaaaacatttcagattttaatccgaatttagctaatgagactggatttttgttttttatgttgtgtgtcacagagctaaaaactcagttcccaaatccccagtttatgcagcgccatcaggtattttaagctaaacttcttcacccctgagagcatgtcagctggagaaaagcagttcttccttgcccacttgagaagtgcacgcccactcacccaacatcctggtctctaggaaagcctcatgtgaggttcctctttctttcagctcagtgcccatgggcaaggatcatgatttccattccgtgttacaatgacaatatttaatgagcataaccttctcagtctcctgctctcaaatttaggacagagccgctaaggacaaaacaatccctcccgtgctttatgatggcagcaggggctggggagcctctgagggactctttcattctgcagttgtctggaagcctgggtggcgtcatgagctgaaggatcatgctttcctgtcctggctccataggttataggctggctggtgaaaggttcacgtggcccaggctgaacttcattgcctagctttggatgtgctttctgccataaagactgatttttgttcgttctgagccttcaaggaatttgttttttacaactggaatatgctcctgtgtgtgttaacagatcatggatgttttatgttttcactgatcatttaaagagtttgacctcagagctccaggatcatcagtaaatttgtcatgttatatatttatttttttataaatcaagacttctgtgtgctcttaaatatattaaaaacaatttacatttcagg

SEQ ID NO: 105651 - DNA, 2716 bp, Homo sapiens
  Payload ID: 713
  Gene Symbol: ADPGK
  Gene Name: ADP-dependent glucokinase
  Uniprot ID: Q9BRR6
  ENST ID: ENST00000567941
  CDS Start-End: 41-277
gaaaggagttggttcgcgcaggtgcggcgcctgggtccccatggcgctgtggcgcggctccgcgtacgcgggcttcctggcgctggccgtgggctgcgtcttcctgctggagccagagctgccaggctcggcgctgcgctctctctggagctcgctgtgtctggggcccgcgcctgcgcccccgggacccgtctcccccgagggccggttggcggcagcctgggacgcgcttatcgtgcggccagtccggcgctggcgccgcgtggcagtggggtgagtgccaacggggcctgggtctctgagcctccgaggtcggccttggaggtcgggcggagccgcgcagaaacagggcttctcagaggtccccgggaggcgctgctgtccgcgctggccccttggcgagaagtgtcggacgtctgagtggaacccggttcgtcaccgctgctctttccactcggctggcctctgcgcctttctctcatcccgagtcaatgcatgtgttgatgtggtgctctcaggggtgaagctcttgcaggcacttggccttagtcctgggaatgggaaagatcacagcattctgcattcaaggaatgatctggaagaagccttcattcacttcatggggaagggagcagctgctgagcgcttcttcagtgataaggaaacttttcacgacattgcccaggttgcatcagagttcccaggagcccagcactatgtaggaggaaatgcagctttaattggacagaaatttgcagccaactcagatttaaaggttcttctttgcggtccagttggtccaaagctacatgagcttcttgatgacaatgtctttgttccaccagagtcattgcaggaagtggatgagttccacctcattttagagtatcaagcaggggaggagtggggccagttaaaagctccccatgccaaccgattcatcttctctcacgacctctccaacggggccatgaatatgctggaggtgtttgtgtctagcctggaggagtttcagccagacctggtggtcctctctggattgcacatgatggagggacaaagcaaggagctccagaggaagagactcttggaggttgtaacctccatttctgacatccccactggtattccagttcacctagagctggccagtatgactaacagggagctcatgagcagcattgtccatcaggtctttcccgcggtgacttcccttgggctgaatgaacaggagctgttatttctcacccagtcagcctctggacctcactcttctctctcttcctggaacggtgttcctgatgtgggcatggtcagtgacatcctcttctggatcttgaaagaacatgggaggagtaaaagcagagcctcggatctcaccaggatccatttccacacgctggtctaccacatcctggcaactgtggatggacactgggccaaccagctggcagccgtggctgcaggagctcgtgtggctgggacacaggcctgcgccacagaaaccatagacaccagccgagtgtctctgagggcaccccaagagttcatgacttcccattcggaggcaggctccaggattgtattaaacccaaacaagccagtagtagaatggcacagagagggaatatccttccacttcacaccagtattggtgtgtaaagaccccattcgaactgtaggccttggagatgccatttcagccgaaggactcttctattcggaagtacaccctcactattaggaagattcttaggggtaatttttctgaggaaggagaactagccaacttaagaattacaggaagaaagtggtttggaagacagccaaagaaataaaagcagattaaactgtatcaggtacattccagcctgttggcaactccataaaaacatttcagattttaatccgaatttagctaatgagactggatttttgttttttatgttgtgtgtcacagagctaaaaactcagttcccaaatccccagtttatgcagcgccatcaggtattttaagctaaacttcttcacccctgagagcatgtcagctggagaaaagcagttcttccttgcccacttgagaagtgcacgcccactcacccaacatcctggtctctaggaaagcctcatgtgaggttcctctttctttcagctcagtgcccatgggcaaggatcatgatttccattccgtgttacaatgacaatatttaatgagcataaccttctcagtctcctgctctcaaatttaggacagagccgctaaggacaaaacaatccctcccgtgctttatgatggcagcaggggctggggagcctctgagggactctttcattctgcagttgtctggaagcctgggtggcgtcatgagctgaaggatcatgctttcctgtcctggctccataggttataggctggctggtgaaaggttcacgtggcccaggctgaacttcattgcctagctttggatgtgctttctgccataaagactgatttttgttcgttctgagccttcaaggaatttgttttttacaactggaatatgctcctgtgtgtgttaacagatcatggatgttttatgttttcactgatcatttaaagagtttgacctcagagctccaggatcatcagtaaatttgtcatgttatatatttatttttttataaatcaagacttctgtgtgctcttaaatatattaaaaacaatttacatttcagg

SEQ ID NO: 105652 - DNA, 1209 bp, Homo sapiens
  Payload ID: 714
  Gene Symbol: ADPRM
  Gene Name: ADP-ribose/CDP-alcohol diphosphatase, manganese -dependent
  Uniprot ID: Q3LIE5
  ENST ID: ENST00000379774
  CDS Start-End: 92-1120
gtccgtcccgctcgttggtggcgctgttacatagcccgtagtcagaggcctttcagcccaggggccggcgcacgaaacctgtttggaggttatggatgataaacccaatcctgaagccctaagtgacagttcagagcgtcttttctcctttggcgtcatcgcagatgttcaatttgcagacttagaagatggctttaatttccaaggaaccaggcggcgatactacagacatagtcttcttcacttacagggtgccattgaagactggaataatgaaagcagcatgccctgttgtgtccttcagcttggagatatcatcgatggatataatgcacagtataatgcatccaaaaagtccctagaacttgttatggacatgttcaagaggcttaaagttccagttcatcatacatggggaaaccatgaattctataacttcagtagagagtatttaacacactctaaacttaacactaagtttctagaagatcagattgtacatcatcctgagaccatgccttcagaagattattatgcttatcattttgtaccattccctaaattccggttcattttacttgatgcatatgacttgagtgtcttgggcgtggatcagtcttctccaaaatacgagcagtgtatgaagatattgagggagcacaatccaaatacggaactgaatagtcctcaaggactttctgagccccagtttgtccagtttaatggaggattcagccaagaacagctaaactggttgaatgaagtgctaacattctctgacacaaaccaagaaaaggtggtgattgtgagccatcttcccatttacccggacgcctctgacaatgtgtgcctggcctggaactacagagatgccctggcagtcatttggtctcatgagtgtgtggtgtgtttctttgctggtcacacccatgatggtggctactctgaggatccttttggtgtataccacgtcaacctagaaggagttattgaaacagctccagacagccaagcctttggcacagttcatgtctatcctgacaaaatgatgttgaaagggagaggcagagttccagatagaattatgaattacaagaaagaaagagccttccattgttagtctaatttattttaacttgatagaaaatgagctttgtgtttgtccctcctaaacaaaaaaataaaaatcctctgtctcattgtttagta

SEQ ID NO: 105653 - DNA, 1277 bp, Homo sapiens
  Payload ID: 714
  Gene Symbol: ADPRM
  Gene Name: ADP-ribose/CDP-alcohol diphosphatase, manganese -dependent
  Uniprot ID: Q3LIE5
  ENST ID: ENST00000468843
  CDS Start-End: 72-689
gcgctgttacatagcccgtagtcagaggcctttcagcccaggggccggcgcacgaaacctgtttggaggttatggatgataaacccaatcctgaagccctaagtgacagttcagagcgtcttttctcctttggcgtcatcgcagatgttcaatttgcagacttagaagatggctttaatttccaaggaaccaggcggcgatactacagacatagtcttcttcacttacagggtgccattgaagactggaataatgaaagcagcatgccctgttgtgtccttcagcttggagatatcatcgatggatataatgcacagtataatgcatccaaaaagtccctagaacttgttatggacatgttcaagaggcttaaagttccagttcatcatacatggggaaaccatgaattctataacttcagtagagagtatttaacacactctaaacttaacactaagtttctagaagatcagattgtacatcatcctgagaccatgccttcagaagattattatgcttatcattttgtaccattccctaaattccggttcattttacttgatgcatatgacttgagtgtcttgggcgtggatcagtcttctccaaaatacgagcagtgtatgaagatattgagggagcacaatccaaatacggaactgaatagtcctcaaggtgaattattcctttgagctgagaatctaatagattgtctttaaattcttcagctaccttttattcagcaggaagatggacaattaaggactttctgagccccagtttgtccagtttaatggaggattcagccaagaacagctaaactggttgaatgaagtgctaacattctctgacacaaaccaagaaaaggtggtgattgtgagccatcttcccatttacccggacgcctctgacaatgtgtgcctggcctggaactacagagatgccctggcagtcatttggtctcatgagtgtgtggtgtgtttctttgctggtcacacccatgatggtggctactctgaggatccttttggtgtataccacgtcaacctagaaggagttattgaaacagctccagacagccaagcctttggcacagttcatgtctatcctgacaaaatgatgttgaaagggagaggcagagttccagatagaattatgaattacaagaaagaaagagccttccattgttagtctaatttattttaacttgatagaaaatgagctttgtgtttgtccctcctaaacaaaaaaataaaaatcctctgtctcattgtttagta

SEQ ID NO: 105654 - DNA, 1138 bp, Homo sapiens
  Payload ID: 714
  Gene Symbol: ADPRM
  Gene Name: ADP-ribose/CDP-alcohol diphosphatase, manganese -dependent
  ENST ID: ENST00000609540
  CDS Start-End: 28-912
ctttatttagaaacctgtttggaggttatggatgataaacccaatcctgaagccctaagtgacagttcagagcgtcttttctcctttggcgtcatcgcagatgttcaatttgcagacttagaagatggctttaatttccaaggaaccaggcggcgatactacagacatagtcttcttcacttacagggtgccattgaagactggaataatgaaagcagcatgccctgttgtgtccttcagcttggagatatcatcgatggatataatgcacagtataatgcatccaaaaagtccctagaacttgttatggacatgttcaagaggcttaaagttccagttcatcatacatggggaaaccatgaattctataacttcagtagagagtatttaacacactctaaacttaacactaagtttctagaagatcagattgtacatcatcctgagaccatgccttcagaagattattatgcttatcattttgtaccattccctaaattccggttcattttacttgatgcatatgacttgagtgtcttgggcgtggatcagtcttctccaaaatacgagcagtgtatgaagatattgagggagcacaatccaaatacggaactgaatagtcctcaaggactttctgagccccagtttgtccagtttaatggaggattcagccaagaacagctaaactggttgaatgaagtgctaacattctctgacacaaaccaagaaaaggtggtgattgccatcttcccatttacccggacgcctctgacaatgtgtgcctggcctggaactacagagatgccctggcagtcatttggtctcatgagtgtgtggtgtgtttctttgctggtcacacccatgatggtggctactctgaggatccttttggtgtataccacgtcaacctagaaggagttattgaaacagctccagacagccaagcctttggcacagttcatgtctatcctgacaaaatgatgttgaaagggagaggcagagttccagatagaattatgaattacaagaaagaaagagccttccattgttagtctaatttattttaacttgatagaaaatgagctttgtgtttgtccctcctaaacaaaaaaataaaaatcctctgtctcattgttta

SEQ ID NO: 105655 - DNA, 3439 bp, Homo sapiens
  Payload ID: 715
  Gene Symbol: ADPRH
  Gene Name: ADP-ribosylarginine hydrolase
  Uniprot ID: P54922
  ENST ID: ENST00000357003
  CDS Start-End: 299-1372
caggtgcgggggccctcgccgccaccctgcttatctggggacagtcccggaacccggtgacccggctccgccccaacccgcgccctcgtccacccgcagcagccaaggcctcttccccggccccgggagcccgcgccacgcccgtcgctcgcgcgttccagtccaggctacagcaggggctctccagcctgcattccatggccaacagcagtgcagctgcagaagcacttctggaagcctcctgacttgaactagaccttggacaccctctccagagcccagcaattgtgagggactgatggagaagtatgtggctgctatggtgctgagtgcagctggagatgccctggggtactacaatgggaagtgggagttcctccaggatggggagaagatacaccggcagttggcccagctgggcggcttggatgccctagacgtgggaaggtggagagttagtgacgacacagtgatgcacttggccacagcagaagctcttgtggaagctgggaaagcccctaagttgactcaactgtattacctccttgctaagcattaccaagactgcatggaagacatggatgggcgggcaccaggtggtgcctcggtgcacaacgccatgcagctgaagccgggcaagcccaatggctggaggattcccttcaacagccatgagggcggctgtggggctgccatgcgggccatgtgcatcggtctcaggttcccacaccatagccaactggacacactgatccaagtgagcatcgagagtggtcggatgacccaccaccacccaacaggctacctgggggcccttgcgtctgctctttttacagcctatgctgtgaatagcagaccacccttgcagtggggaaaaggactgatggagctgctaccagaagctaaaaagtacattgtccaatcaggctactttgtagaggaaaatcttcaacactggtcctacttccaaaccaaatgggaaaattacctaaaacttagagggattttggatggagaatcagcccctaccttccctgagtctttcggtgtgaaggagagggatcagttctacacctccctgagctactctggctggggtggcagcagtgggcacgatgcccccatgattgcctacgatgctgttcttgctgcaggagactcctggaaggagcttgcccaccgagcctttttccatggtggagacagtgattctacagctgccattgctggctgctggtggggagttatgtatggttttaaaggagtgagtccctccaactatgagaaactagaatacagaaaccggctggaagagacagctagggctttatattctctcgggtcaaaagaagacactgtaatttccctttagggagacgtgatgttcacttctgatggattcttcttttgtgtatttccttttctgctatttcttttcagtttttccaaagtcaagagtcttaaccttgtactcagggaattttgagataacaagtcccttgggcaccttaagctcagttttttcaggctcatcctgttcttccagaatctatcccttttcttacactgaagagtcctttagctcaattgatagggtcagcgtctcgcaagcaaaaaatctcatgacctcatatttgagtcttcattttcatcatctacttgttctaaaagttttttctgtttgtctcaagttgggttcccacaaagtggactttgagacaaagatctgaatgcaagcagtttatatgggagatgattccaggaaataccgatatgagaatggggaaatgaaaccaggaagggaagagagctagtatggggtatgttaatgagcaggtttccactgtgggcggttggcactctgccatctgagtcctctgcctaaagcattcctcagaactgtcccatttgaagggcaagcaaacctggggtatttatccactgacttccatctgacactggttgaggaccactgccagggatgctaactccctggtaattcttggcttaccctttgtacaaaccaaaccttagtgtcttcaggtaaagactcagagatacttgcaggggcaagctgtaaagggcatgggaacagtgagggacatatgtggggtcctaacaatatctgctaggctggtctacctcctaaatatactctgaatctatcacctctattgccttcttgcactgaggatttttcagctggatttctgcaatccaagctactcaagtctgggagatgctgctctgagctgctctcagtactctcctcatcatggcagttaacacattaccaattttgttattgtctgtttgcttgtttgcattatttctaaacagaacctagcacagtgcttgggcagccaataggcattaatcagtatctattgagtgttatgaactagcctcctagctcgtgcttccctcattaccctccagagttatgtttacgaataacaaattgaccatgctaaactaatcatgttccaatgaatacatcacctttcttcatttcttgatgctcttcccaatccttgtctacctgataataaattcttacttgtccttcaagacccaactcagatagatagagcttcctgagtgaaacctgctttgattgttcaggcacttggccaccttctcctcactcctcccacagccttctgtcttggccttgtcatcacatcaatcctgttgtgtggtgctgtgtgtcttctgggtcagtcctaggcacatgctgcccagcacatgtccacctgggaaatgagatgccatcgtcacattcatttggtcaccctcagtccagccagtgggcttgctctcatttggcctgttctcaggggtgggaaggaagagcgtcccttccttctccttttgagaaaaccacagaactatgactctcatgatttttcctttgtgaaatccctggttttcagctggaagcggtgggtaaatgaggtctgatgatagcagtcctgccaccttctagttcatcccataggaatgtttttccaagtccttccagtctttttagaacgtggtggaggagggttgtgtgtgccccagggggtcgggggtaggggatgcagggaggatcttagcatttgttgttttctagtgcagggctttagccacaattgtaaacaacaggaaaaggctctttagagatcctattagatttgctttgccgattgtcactcttcatcacaggcacatttcaaaaagaggttagactttcagacttcttttttctcaaacctcaaaacttccaccccaaacttcgctctcagctggtgactttgcttctttatgtgtgtgtatgtgtgtcagagaaagagagagagagagagagaagggaggatgagaacgaatggggggaagagataaactttatgcataacattagggtaaatcaataaagatggtctgacacatcgta

SEQ ID NO: 105656 - DNA, 1365 bp, Homo sapiens
  Payload ID: 715
  Gene Symbol: ADPRH
  Gene Name: ADP-ribosylarginine hydrolase
  Uniprot ID: P54922
  ENST ID: ENST00000465513
  CDS Start-End: 106-1179
agagtcgttgttttttctgattcttcttgctcctcatcctatttcctttgtcttaatttccccacaaagacaccctctccagagcccagcaattgtgagggactgatggagaagtatgtggctgctatggtgctgagtgcagctggagatgccctggggtactacaatgggaagtgggagttcctccaggatggggagaagatacaccggcagttggcccagctgggcggcttggatgccctagacgtgggaaggtggagagttagtgacgacacagtgatgcacttggccacagcagaagctcttgtggaagctgggaaagcccctaagttgactcaactgtattacctccttgctaagcattaccaagactgcatggaagacatggatgggcgggcaccaggtggtgcctcggtgcacaacgccatgcagctgaagccgggcaagcccaatggctggaggattcccttcaacagccatgagggcggctgtggggctgccatgcgggccatgtgcatcggtctcaggttcccacaccatagccaactggacacactgatccaagtgagcatcgagagtggtcggatgacccaccaccacccaacaggctacctgggggcccttgcgtctgctctttttacagcctatgctgtgaatagcagaccacccttgcagtggggaaaaggactgatggagctgctaccagaagctaaaaagtacattgtccaatcaggctactttgtagaggaaaatcttcaacactggtcctacttccaaaccaaatgggaaaattacctaaaacttagagggattttggatggagaatcagcccctaccttccctgagtctttcggtgtgaaggagagggatcagttctacacctccctgagctactctggctggggtggcagcagtgggcacgatgcccccatgattgcctacgatgctgttcttgctgcaggagactcctggaaggagcttgcccaccgagcctttttccatggtggagacagtgattctacagctgccattgctggctgctggtggggagttatgtatggttttaaaggagtgagtccctccaactatgagaaactagaatacagaaaccggctggaagagacagctagggctttatattctctcgggtcaaaagaagacactgtaatttccctttagggagacgtgatgttcacttctgatggattcttcttttgtgtatttccttttctgctatttcttttcagtttttccaaagtcaagagtcttaaccttgtactcagggaattttgagataacaagtcccttgggcaccttaagctcagttttttcaggctcatcctgttcttccagaatctatccctt

SEQ ID NO: 105657 - DNA, 1501 bp, Homo sapiens
  Payload ID: 715
  Gene Symbol: ADPRH
  Gene Name: ADP-ribosylarginine hydrolase
  Uniprot ID: P54922
  ENST ID: ENST00000478927
  CDS Start-End: 299-1372
actctcgcttgggtgcagaagggcgcggcggtgccaggaagccgccttggaggctccaagattagctcactcagcgcggccaagcgcaggtgcgggggccctcgccgccaccctgcttatctggggacagtcccggaacccggtgacccggctccgccccaacccgcgccctcgtccacccgcagcagccaaggcctcttccccggccccgggagcccgcgccacgcccgtcgctcgcgcgttccagtccaggctacagcagacaccctctccagagcccagcaattgtgagggactgatggagaagtatgtggctgctatggtgctgagtgcagctggagatgccctggggtactacaatgggaagtgggagttcctccaggatggggagaagatacaccggcagttggcccagctgggcggcttggatgccctagacgtgggaaggtggagagttagtgacgacacagtgatgcacttggccacagcagaagctcttgtggaagctgggaaagcccctaagttgactcaactgtattacctccttgctaagcattaccaagactgcatggaagacatggatgggcgggcaccaggtggtgcctcggtgcacaacgccatgcagctgaagccgggcaagcccaatggctggaggattcccttcaacagccatgagggcggctgtggggctgccatgcgggccatgtgcatcggtctcaggttcccacaccatagccaactggacacactgatccaagtgagcatcgagagtggtcggatgacccaccaccacccaacaggctacctgggggcccttgcgtctgctctttttacagcctatgctgtgaatagcagaccacccttgcagtggggaaaaggactgatggagctgctaccagaagctaaaaagtacattgtccaatcaggctactttgtagaggaaaatcttcaacactggtcctacttccaaaccaaatgggaaaattacctaaaacttagagggattttggatggagaatcagcccctaccttccctgagtctttcggtgtgaaggagagggatcagttctacacctccctgagctactctggctggggtggcagcagtgggcacgatgcccccatgattgcctacgatgctgttcttgctgcaggagactcctggaaggagcttgcccaccgagcctttttccatggtggagacagtgattctacagctgccattgctggctgctggtggggagttatgtatggttttaaaggagtgagtccctccaactatgagaaactagaatacagaaaccggctggaagagacagctagggctttatattctctcgggtcaaaagaagacactgtaatttccctttagggagacgtgatgttcacttctgatggattcttcttttgtgtatttccttttctgctatttcttttcagtttttccaaagtcaagagtcttaaccttgtactcagggaattttgagataacaagtccctt

SEQ ID NO: 105658 - DNA, 984 bp, Homo sapiens
  Payload ID: 715
  Gene Symbol: ADPRH
  Gene Name: ADP-ribosylarginine hydrolase
  ENST ID: ENST00000481816
  CDS Start-End: 608-984
aaagtcggacgtgagcacgggcgaaggcgtcagccggggccacacgggagtcactgaccacagccaggcgagagccggctttccggtgccgccacattccgggcaccaggctccgggctcttcagagcatttggggcgggcgacggaggtcccgtccactctcgcttgggtgcagaagggcgcggcggtgccaggaagccgccttggaggctccaagattagctcactcagcgcggccaagcgcaggtgcgggggccctcgccgccaccctgcttatctggggacagtcccggaacccggtgacccggctccgccccaacccgcgccctcgtccacccgcagcagccaaggcctcttccccggccccgggagcccgcgccacgcccgtcgctcgcgcgttccagtccaggctacagcagaaactcagcattaccagtaactgggtagtggaacgcatccatcttcgtcgtttactccttctccaggggctctccagcctgcattccatggccaacagcagtgcagctgcagaagcacttctggaagcctcctgacttgaactagaccttggacaccctctccagagcccagcaattgtgagggactgatggagaagtatgtggctgctatggtgctgagtgcagctggagatgccctggggtactacaatgggaagtgggagttcctccaggatggggagaagatacaccggcagttggcccagctgggcggcttggatgccctagacgtgggaaggtggagagttagtgacgacacagtgatgcacttggccacagcagaagctcttgtggaagctgggaaagcccctaagttgactcaactgtattacctccttgctaagcattaccaagactgcatggaagacatggatgggcgggcaccaggtggtgcctcggtgcacaacgccatgcagctgaagccgggcaagcccaatggctggaggattcccttcaacagccatga

SEQ ID NO: 105659 - DNA, 4546 bp, Homo sapiens
  Payload ID: 715
  Gene Symbol: ADPRH
  Gene Name: ADP-ribosylarginine hydrolase
  Uniprot ID: P54922
  ENST ID: ENST00000478399
  CDS Start-End: 1406-2479
aaataaatgactagttaaaattaactaactgaatccttaacaaccattctaagaggcagatattattatcccactttatgcgtgagggcccagaaccctggcaagggcggcacactcagtacgctcttcaagcatctgggcacacccggtccactacagtcctacaaagtcggacgtgagcacgggcgaaggcgtcagccggggccacacgggagtcactgaccacagccaggcgagagccggctttccggtgccgccacattccgggcaccaggctccgggctcttcagagcatttggggcgggcgacggaggtcccgtccactctcgcttgggtgcagaagggcgcggcggtgccaggaagccgccttggaggctccaagattagctcactcagcgcggccaagcgcaggtgcgggggccctcgccgccaccctgcttatctggggacagtcccggaacccggtgacccggctccgccccaacccgcgccctcgtccacccgcagcagccaaggcctcttccccggccccgggagcccgcgccacgcccgtcgctcgcgcgttccagtccaggctacagcaggtatcgcgatcccggccctcggccccgcgctcccctcccccgcccctggcgctctccgagtgtggccgaccatgaggattcccagtcttgcaaatcgtgggagcgtgtcaaccgccccgtttctttccaaagccgggcatggcccggaagcagctgatcagatcttagttctgaatgtatagttcgggtacgagaatgtgacccgtgaaagttcagaggagttaagtaattacagcgttctgaaagcgaacgttaaagggaatttacaaccgaaaaaagatgccggtcttcttcccccatcccagcttgcaattcacagaagcacacattagggtggagccagaaggaattacggaaaggacaatgaggacattgagagggagggtatggggggttaaagttagtcctccgaggccaagaagcagagtgtcttggcctagtgtctgaaaatcgcagcgcaggacggaacttccgagagcctatacctccccacttccccctccagtttacagatgggcaaaccgctgtcccgggtgtctgtcaggtctagtagcccagaatctcagtgcctaggcttcactgtaaataataaactatgtaaataacatttacaaatatcctttgtgagctcagaaactcagcattaccagtaactgggtagtggaacgcatccatcttcgtcgtttactccttctccaggggctctccagcctgcattccatggccaacagcagtgcagctgcagaagcacttctggaagcctcctgacttgaactagaccttggacaccctctccagagcccagcaattgtgagggactgatggagaagtatgtggctgctatggtgctgagtgcagctggagatgccctggggtactacaatgggaagtgggagttcctccaggatggggagaagatacaccggcagttggcccagctgggcggcttggatgccctagacgtgggaaggtggagagttagtgacgacacagtgatgcacttggccacagcagaagctcttgtggaagctgggaaagcccctaagttgactcaactgtattacctccttgctaagcattaccaagactgcatggaagacatggatgggcgggcaccaggtggtgcctcggtgcacaacgccatgcagctgaagccgggcaagcccaatggctggaggattcccttcaacagccatgagggcggctgtggggctgccatgcgggccatgtgcatcggtctcaggttcccacaccatagccaactggacacactgatccaagtgagcatcgagagtggtcggatgacccaccaccacccaacaggctacctgggggcccttgcgtctgctctttttacagcctatgctgtgaatagcagaccacccttgcagtggggaaaaggactgatggagctgctaccagaagctaaaaagtacattgtccaatcaggctactttgtagaggaaaatcttcaacactggtcctacttccaaaccaaatgggaaaattacctaaaacttagagggattttggatggagaatcagcccctaccttccctgagtctttcggtgtgaaggagagggatcagttctacacctccctgagctactctggctggggtggcagcagtgggcacgatgcccccatgattgcctacgatgctgttcttgctgcaggagactcctggaaggagcttgcccaccgagcctttttccatggtggagacagtgattctacagctgccattgctggctgctggtggggagttatgtatggttttaaaggagtgagtccctccaactatgagaaactagaatacagaaaccggctggaagagacagctagggctttatattctctcgggtcaaaagaagacactgtaatttccctttagggagacgtgatgttcacttctgatggattcttcttttgtgtatttccttttctgctatttcttttcagtttttccaaagtcaagagtcttaaccttgtactcagggaattttgagataacaagtcccttgggcaccttaagctcagttttttcaggctcatcctgttcttccagaatctatcccttttcttacactgaagagtcctttagctcaattgatagggtcagcgtctcgcaagcaaaaaatctcatgacctcatatttgagtcttcattttcatcatctacttgttctaaaagttttttctgtttgtctcaagttgggttcccacaaagtggactttgagacaaagatctgaatgcaagcagtttatatgggagatgattccaggaaataccgatatgagaatggggaaatgaaaccaggaagggaagagagctagtatggggtatgttaatgagcaggtttccactgtgggcggttggcactctgccatctgagtcctctgcctaaagcattcctcagaactgtcccatttgaagggcaagcaaacctggggtatttatccactgacttccatctgacactggttgaggaccactgccagggatgctaactccctggtaattcttggcttaccctttgtacaaaccaaaccttagtgtcttcaggtaaagactcagagatacttgcaggggcaagctgtaaagggcatgggaacagtgagggacatatgtggggtcctaacaatatctgctaggctggtctacctcctaaatatactctgaatctatcacctctattgccttcttgcactgaggatttttcagctggatttctgcaatccaagctactcaagtctgggagatgctgctctgagctgctctcagtactctcctcatcatggcagttaacacattaccaattttgttattgtctgtttgcttgtttgcattatttctaaacagaacctagcacagtgcttgggcagccaataggcattaatcagtatctattgagtgttatgaactagcctcctagctcgtgcttccctcattaccctccagagttatgtttacgaataacaaattgaccatgctaaactaatcatgttccaatgaatacatcacctttcttcatttcttgatgctcttcccaatccttgtctacctgataataaattcttacttgtccttcaagacccaactcagatagatagagcttcctgagtgaaacctgctttgattgttcaggcacttggccaccttctcctcactcctcccacagccttctgtcttggccttgtcatcacatcaatcctgttgtgtggtgctgtgtgtcttctgggtcagtcctaggcacatgctgcccagcacatgtccacctgggaaatgagatgccatcgtcacattcatttggtcaccctcagtccagccagtgggcttgctctcatttggcctgttctcaggggtgggaaggaagagcgtcccttccttctccttttgagaaaaccacagaactatgactctcatgatttttcctttgtgaaatccctggttttcagctggaagcggtgggtaaatgaggtctgatgatagcagtcctgccaccttctagttcatcccataggaatgtttttccaagtccttccagtctttttagaacgtggtggaggagggttgtgtgtgccccagggggtcgggggtaggggatgcagggaggatcttagcatttgttgttttctagtgcagggctttagccacaattgtaaacaacaggaaaaggctctttagagatcctattagatttgctttgccgattgtcactcttcatcacaggcacatttcaaaaagaggttagactttcagacttcttttttctcaaacctcaaaacttccaccccaaacttcgctctcagctggtgactttgcttctttatgtgtgtgtatgtgtgtcagagaaagagagagagagagagagaagggaggatgagaacgaatggggggaagagataaactttatgcataacattagggtaaatcaataaagatggtctgacacatcgta

SEQ ID NO: 105660 - DNA, 1888 bp, Homo sapiens
  Payload ID: 716
  Gene Symbol: ARF1
  Gene Name: ADP-ribosylation factor 1
  Uniprot ID: P84077
  ENST ID: ENST00000272102
  CDS Start-End: 144-689
ccttacccggcgtgccccgcgcccggaggcgctgacgtggccgccgtcagagccgccatcttgtgggagcaaaaccaacgcctggctcggagcagcagcctctgaggtgtccctggccagtgtccttccacctgtccacaagcatggggaacatcttcgccaacctcttcaagggcctttttggcaaaaaagaaatgcgcatcctcatggtgggcctggatgctgcagggaagaccacgatcctctacaagcttaagctgggtgagatcgtgaccaccattcccaccataggcttcaacgtggaaaccgtggagtacaagaacatcagcttcactgtgtgggacgtgggtggccaggacaagatccggcccctgtggcgccactacttccagaacacacaaggcctgatcttcgtggtggacagcaatgacagagagcgtgtgaacgaggcccgtgaggagctcatgaggatgctggccgaggacgagctccgggatgctgtcctcctggtgttcgccaacaagcaggacctccccaacgccatgaatgcggccgagatcacagacaagctggggctgcactcactacgccacaggaactggtacattcaggccacctgcgccaccagcggcgacgggctctatgaaggactggactggctgtccaatcagctccggaaccagaagtgaacgcgacccccctccctctcactcctcttgccctctgctttactctcatgtggcaaacgtgcggctcgtggtgtgagtgccagaagctgcctccgtggtttggtcaccgtgtgcatcgcaccgtgctgtaaatgtggcagacgcagcctgcggccaggctttttatttaatgtaaatagtttttgtttccaatgaggcagtttctggtactcctatgcaatattactcagctttttttattgtaaaaagaaaaatcaactcactgttcagtgctgagaggggatgtaggcccatgggcacctggcctccaggagtcgctgtgttgggagagccggccacgcccttggctttagagctgtgttgaaatccattttggtggttggtttttaacccaaactcagtgcattttttaaaatagttaagaatccaagtcgagaacacttgaacacacagaagggagaccccgcctagcatagatttgcagttacggcctggatgccagtcgccagcccagctgttcccctcgggaacatgaggtggtggtggcgcagcagactgcgatcaattctgcatggtcacagtagagatccccgcaactcgcttgtccttgggtcaccctgcattccatagccatgtgcttgtccctgtgctcccacggttcccaggggccaggctgggagcccacagccaccccactatgccgcaggccgccctacccaccttcaggcagcctatgggacgcagggccccatctgtccctcggtcgccgtgtggccagagtgggtccgtcgtccccaacactcgtgctcgctcagacactttggcaggatgtctggggcctcaccagcaggagcgcgtgcaagccgggcaggcggtccacctagacccacagcccctcgggagcaccccacctctgtgtgtgatgtagctttctctccctcagcctgcaagggtccgatttgccatcgaaaaagacaacctctacttttttcttttgtattttgataaacactgaagctggagctgttaaatttatcttggggaaacctcagaactggtctatttggtgtcgtggaacctcttactgctttcaatacacgattagtaatcaactgttttgtatacttgttttcagttttcatttcgacaaacaagcactgtaattatagctattagaataaaatctcttaactatttca

SEQ ID NO: 105661 - DNA, 2006 bp, Homo sapiens
  Payload ID: 716
  Gene Symbol: ARF1
  Gene Name: ADP-ribosylation factor 1
  Uniprot ID: P84077
  ENST ID: ENST00000541182
  CDS Start-End: 263-808
gcccgcgcgtggacggttgggattagcggccgcgggggccggtgggggtcgtggggcctcccccacccgagtacaggcgagcgagcggcatccgggcggacccccgcctcggggaccgggaaactgaggctcgggcggcctgagacgccgtcaaggtcatgtaggtggtgggggcttgcatcttcgcctcccgactccatccagttcgtgtttgctgtgaagacggtgtccctggccagtgtccttccacctgtccacaagcatggggaacatcttcgccaacctcttcaagggcctttttggcaaaaaagaaatgcgcatcctcatggtgggcctggatgctgcagggaagaccacgatcctctacaagcttaagctgggtgagatcgtgaccaccattcccaccataggcttcaacgtggaaaccgtggagtacaagaacatcagcttcactgtgtgggacgtgggtggccaggacaagatccggcccctgtggcgccactacttccagaacacacaaggcctgatcttcgtggtggacagcaatgacagagagcgtgtgaacgaggcccgtgaggagctcatgaggatgctggccgaggacgagctccgggatgctgtcctcctggtgttcgccaacaagcaggacctccccaacgccatgaatgcggccgagatcacagacaagctggggctgcactcactacgccacaggaactggtacattcaggccacctgcgccaccagcggcgacgggctctatgaaggactggactggctgtccaatcagctccggaaccagaagtgaacgcgacccccctccctctcactcctcttgccctctgctttactctcatgtggcaaacgtgcggctcgtggtgtgagtgccagaagctgcctccgtggtttggtcaccgtgtgcatcgcaccgtgctgtaaatgtggcagacgcagcctgcggccaggctttttatttaatgtaaatagtttttgtttccaatgaggcagtttctggtactcctatgcaatattactcagctttttttattgtaaaaagaaaaatcaactcactgttcagtgctgagaggggatgtaggcccatgggcacctggcctccaggagtcgctgtgttgggagagccggccacgcccttggctttagagctgtgttgaaatccattttggtggttggtttttaacccaaactcagtgcattttttaaaatagttaagaatccaagtcgagaacacttgaacacacagaagggagaccccgcctagcatagatttgcagttacggcctggatgccagtcgccagcccagctgttcccctcgggaacatgaggtggtggtggcgcagcagactgcgatcaattctgcatggtcacagtagagatccccgcaactcgcttgtccttgggtcaccctgcattccatagccatgtgcttgtccctgtgctcccacggttcccaggggccaggctgggagcccacagccaccccactatgccgcaggccgccctacccaccttcaggcagcctatgggacgcagggccccatctgtccctcggtcgccgtgtggccagagtgggtccgtcgtccccaacactcgtgctcgctcagacactttggcaggatgtctggggcctcaccagcaggagcgcgtgcaagccgggcaggcggtccacctagacccacagcccctcgggagcaccccacctctgtgtgtgatgtagctttctctccctcagcctgcaagggtccgatttgccatcgaaaaagacaacctctacttttttcttttgtattttgataaacactgaagctggagctgttaaatttatcttggggaaacctcagaactggtctatttggtgtcgtggaacctcttactgctttcaatacacgattagtaatcaactgttttgtatacttgttttcagttttcatttcgacaaacaagcactgtaattatagctattagaataaaatctcttaactatttc

SEQ ID NO: 105662 - DNA, 1972 bp, Homo sapiens
  Payload ID: 716
  Gene Symbol: ARF1
  Gene Name: ADP-ribosylation factor 1
  Uniprot ID: P84077
  ENST ID: ENST00000540651
  CDS Start-End: 229-774
ccttacccggcgtgccccgcgcccggaggcgctgacgtggccgccgtcagagccgccatcttgtgggagcaaaaccaacgcctggctcggagcagcagcctctgaggtgagggcgaggggcgcgggccggtgtgggccgcagagacgttggagccggcgggggctggggactggcctcggggcgacttgaggtgtccctggccagtgtccttccacctgtccacaagcatggggaacatcttcgccaacctcttcaagggcctttttggcaaaaaagaaatgcgcatcctcatggtgggcctggatgctgcagggaagaccacgatcctctacaagcttaagctgggtgagatcgtgaccaccattcccaccataggcttcaacgtggaaaccgtggagtacaagaacatcagcttcactgtgtgggacgtgggtggccaggacaagatccggcccctgtggcgccactacttccagaacacacaaggcctgatcttcgtggtggacagcaatgacagagagcgtgtgaacgaggcccgtgaggagctcatgaggatgctggccgaggacgagctccgggatgctgtcctcctggtgttcgccaacaagcaggacctccccaacgccatgaatgcggccgagatcacagacaagctggggctgcactcactacgccacaggaactggtacattcaggccacctgcgccaccagcggcgacgggctctatgaaggactggactggctgtccaatcagctccggaaccagaagtgaacgcgacccccctccctctcactcctcttgccctctgctttactctcatgtggcaaacgtgcggctcgtggtgtgagtgccagaagctgcctccgtggtttggtcaccgtgtgcatcgcaccgtgctgtaaatgtggcagacgcagcctgcggccaggctttttatttaatgtaaatagtttttgtttccaatgaggcagtttctggtactcctatgcaatattactcagctttttttattgtaaaaagaaaaatcaactcactgttcagtgctgagaggggatgtaggcccatgggcacctggcctccaggagtcgctgtgttgggagagccggccacgcccttggctttagagctgtgttgaaatccattttggtggttggtttttaacccaaactcagtgcattttttaaaatagttaagaatccaagtcgagaacacttgaacacacagaagggagaccccgcctagcatagatttgcagttacggcctggatgccagtcgccagcccagctgttcccctcgggaacatgaggtggtggtggcgcagcagactgcgatcaattctgcatggtcacagtagagatccccgcaactcgcttgtccttgggtcaccctgcattccatagccatgtgcttgtccctgtgctcccacggttcccaggggccaggctgggagcccacagccaccccactatgccgcaggccgccctacccaccttcaggcagcctatgggacgcagggccccatctgtccctcggtcgccgtgtggccagagtgggtccgtcgtccccaacactcgtgctcgctcagacactttggcaggatgtctggggcctcaccagcaggagcgcgtgcaagccgggcaggcggtccacctagacccacagcccctcgggagcaccccacctctgtgtgtgatgtagctttctctccctcagcctgcaagggtccgatttgccatcgaaaaagacaacctctacttttttcttttgtattttgataaacactgaagctggagctgttaaatttatcttggggaaacctcagaactggtctatttggtgtcgtggaacctcttactgctttcaatacacgattagtaatcaactgttttgtatacttgttttcagttttcatttcgacaaacaagcactgtaattatagctattagaataaaatctcttaactatttc

SEQ ID NO: 105663 - DNA, 4105 bp, Homo sapiens
  Payload ID: 717
  Gene Symbol: ARF3
  Gene Name: ADP-ribosylation factor 3
  Uniprot ID: P61204
  ENST ID: ENST00000256682
  CDS Start-End: 336-881
accgcgcagctatcgcgcgatcggggaggtgggaagtatcccgggctgggggtgggggtacgccgcacagctccagtcgccgtcgcggcttccggtgctaggtggagggaaggaaggagggagccggggagtgggccagggcagcagccgggctgaagtcggcttggggagccagagggagcggagcggaacctgcggggcagaggcggcggccgcagcggcgcagctgatagcaggaacaggatcaagtcttccataccagggaccaggccaaaaccagactgccactgcccctacttgggccccactgtccccagaaagcagctgctgtgatcatgggcaatatctttggaaaccttctcaagagcctgattgggaagaaggagatgcgcatcctgatggtgggcctggatgccgcaggaaagaccaccatcctatacaagctgaaactcggggagatcgtcaccaccatccctaccattgggttcaatgtggagacagtggagtataagaacatcagctttacagtgtgggatgtgggtggccaggacaagattcgacccctctggagacactacttccagaacacccaagggttgatatttgtggtcgacagcaatgatcgggagcgagtaaatgaggcccgggaagagctgatgagaatgctggcggaggacgagctccgggatgctgtactccttgtctttgcaaacaaacaggatctgcctaatgctatgaacgctgctgagatcacagacaagctgggcctgcattcccttcgtcaccgtaactggtacattcaggccacctgtgccaccagcggggacgggctgtacgaaggcctggactggctggccaatcagctcaaaaacaagaagtgaaagccagacagccctaacaaagcaccccacccacccctgacatacctactgtcaccctgccccagtcctaccccttcctctccatgcaagtgtggccagggccctgggtatcatgtccacatgcccagcaagagccttgcctcccctgcctcccctcctttttcctgtccacctatatgaccaatccctaattgctgtcctgatgatgagtcattccaatttactggatttaaaacaaaaagttgttacggtttcatggggtggcccctctctctctcaccctctgggtttcgggaggtcgagtggggtattctctttgtttggcagtggttgctgtcctcttggcatctgagtcctttccctgtccccacaagcccttctactccctgtttgcctttcctttgccaccctctccctgttttacatggaaattgcacgggcctctctgtgtttgcgtgcatgtgtgcgcctgtatatacatgtatagagagatatatttgtgggggccggggggagcggggagggggtggagtgaagctcagggcttgcagccaggacactgcccactggagcctgtcatctgccccttccgtgttggtgagattaagggaagaaggtgggagggcattagtcaagccggactgccccagtctttgactggttaccctcctctctgcaggtaggtttttctggatgataggacagatgatggattcttcaccaccattttccttgtactcttctctccacccttcttagggctggaggatggcatttatctctagatgactgttcccaaggagatgccactctgctctgccttactgttgggaaggagagaggaacccactcactcttatcagcttagagtgttcaactgatccttccccaccatcttcagatctgttcctctggagcttgactggggggtggggatggcaagtccatggtgtgtgttagggacccagggcattgggggaagggaggcgaaggcctgaggttttccatcttcattctcttttgttattaggagaaggtgaggcatgggccaatcccattcctgccttccagtgccccaccacccttctgatcttaggggttggatgggtcatctgtccttggtcagaattttctcaccctagtactcctactggcctgaccagggctgactgggtattctaatgaggagctgggaagtggggtgacatagctgaccttagtatcaacccccctcttctccaactcttgttttctagtccaggatatgctaaaggacgaagattttctattgtttccaggccctcagaccatccttgctgtcccttcaccctccatgcccctgccatcctcactcacttctcataaatggatctgggggttagagtggaggaaataaaatcctgaagtggttgtcagtgcttgtgggatgcagtggtcttcaggattctccccgcattattatgtagttgttcagaagctgttgctactgcgtctctctgtctgcagggggcacttgttcctgaggtcctcgcctgggtcctgacttctgtagtttctgtgaagacgtggctgtcctgtgggctcctgtgtgtgctggctgcgccctgagctccgagacagctgcccataacctgctaaggtcagggcccagggccccccacagcatggctgagggaccccttcccagtagggctgtcccaagccccactccatggggccaggtttcctggccacttttgttgatagcagatggatcaatattagtaaccccatccaagattgaactgtgaaagagaggttccaggggtatctccctcagtgccagttacttagtgatgtgttacccaggatgcagcaggtgtgtgcaggtatcttgctctctaggcctgtgtgtgtgtgtgagtgtgtgtgtatatgggtgtgggtgtgtttgtgtgtggtggttgtggggggggtgttggaggttctatttcatttaaaaatgtattcatttccctggccccacagatgcttccctccatactttttatttgctctgtttcctcagatttattttgtcttgccccattgcctctccttccttgaactctttccttttcaatctcaactcattcactgctgttgctcatttgcccttttccatgtattttttcctacttaggattttccactctatctttgtggttcatgaggactttgcctcttctcctgcctcattccctgactttctctagttagatgtcagtcctaaataggttttcctcacttcaggcctcacccctcaccttgtttttttgggggctccagggaccaatctggggctggaaatgttaggaggttgccttggtgctgccccagatctgtccagcagggggcagtaagtgatcttggtagtatccctggctgctaagcccttggcaggggtggtcctttctacattcccattcacttaacagctcttttgggattgggtgtttcattccatttctgcccactccctctcctctcctctctggtaggtttaattttatgctttccctgattccagctttctgcttcctgaggactcccgctccccccaccccaaagtttgtctgtggtgttatagtggtaactgcagttcctcctctggaatgtagactgtatatgtttaataactcaccttctctatccttgctcaaaatgtgggataacgcgatgactgtgaccctggttggaaattaaacttgttttatgcagctttggagccgaccttcatctttgctgtgcagcagccgtgggacagtagtttcatggtgaggggagtcctgtttctggtccctctctccatagtgctccttctttcagcaaaggggtaaaaggcacacttgattgatagagagtaaggttatggaggaacttagtgccactccacactggttatttcttcccatcataccccgcggcgggggagcccaaatgaattgggcatcagagtgtgagggcttcgtgactttcctcctctagttctaaagggtttaaacctgaaatcagctgtatttctcacctgttggtagactgtatggacttcactggctgaagggccctgaacttggagggccccatgtgcctctactctcagatctcctcagccttgcacatgaggtgcttctagtttgaacagagaccccctcactagtctagttctggactttggcagtgaataaacatgaaggataaacgtc

SEQ ID NO: 105664 - DNA, 1089 bp, Homo sapiens
  Payload ID: 717
  Gene Symbol: ARF3
  Gene Name: ADP-ribosylation factor 3
  Uniprot ID: P61204
  ENST ID: ENST00000447318
  CDS Start-End: 262-696
agtcgccgtcgcggcttccggtgctaggtggagggaaggaaggagggagccggggagtgggccagggcagcagccgggctgaagtcggcttggggagccagagggagcggagcggaacctgcggggcagaggcggcggccgcagcggcgcagctgatagcaggaacaggatcaagtcttccataccagggaccaggccaaaaccagactgccactgcccctacttgggccccactgtccccagaaagcagctgctgtgatcatgggcaatatctttggaaaccttctcaagagcctgattgggaagaaggagatgcgcatcctgatggtgggcctggatgccgcaggaaagaccaccatcctatacaagctgaaactcggggagatcgtcaccaccatccctaccattgggttgatatttgtggtcgacagcaatgatcgggagcgagtaaatgaggcccgggaagagctgatgagaatgctggcggaggacgagctccgggatgctgtactccttgtctttgcaaacaaacaggatctgcctaatgctatgaacgctgctgagatcacagacaagctgggcctgcattcccttcgtcaccgtaactggtacattcaggccacctgtgccaccagcggggacgggctgtacgaaggcctggactggctggccaatcagctcaaaaacaagaagtgaaagccagacagccctaacaaagcaccccacccacccctgacatacctactgtcaccctgccccagtcctaccccttcctctccatgcaagtgtggccagggccctgggtatcatgtccacatgcccagcaagagccttgcctcccctgcctcccctcctttttcctgtccacctatatgaccaatccctaattgctgtcctgatgatgagtcattccaatttactggatttaaaacaaaaagttgttacggtttcatggggtggcccctctctctctcaccctctgggtttcgggaggtcgagtggggtattctctttgtttggcagtggttgctgtcctcttggcatctgagtcctttccctgtccccacaagcccttctactccctgtttg

SEQ ID NO: 105665 - DNA, 576 bp, Homo sapiens
  Payload ID: 717
  Gene Symbol: ARF3
  Gene Name: ADP-ribosylation factor 3
  ENST ID: ENST00000539611
  CDS Start-End: 425-576
agagggagcggagcggaacctgcggggcagaggcggcggccgcagcggcgcagctgatagcaggaacagttttattgggaggagatctgctgcaagagtctgattgcttgggtcagtgcaacaggacagaatctagtcgctgcatacctccttccctgtcctcaatcagaacctgtgggctctgaggacatggaaaccatttcttcagtttgtcagatacagggaaaaggatcagagaccacctatagaatacagtcttcttcaaccccacaagtgttttgccaccctcagtagaaccgttctcaacacgcctgtcagtcactagctataggatcaagtcttccataccagggaccaggccaaaaccagactgccactgcccctacttgggccccactgtccccagaaagcagctgctgtgatcatgggcaatatctttggaaaccttctcaagagcctgattgggaagaaggagatgcgcatcctgatggtgggcctggatgccgcaggaaagaccaccatcctatacaagctgaaactcggggagatcgtcaccaccatccctaccattgggtt

SEQ ID NO: 105666 - DNA, 485 bp, Homo sapiens
  Payload ID: 717
  Gene Symbol: ARF3
  Gene Name: ADP-ribosylation factor 3
  ENST ID: ENST00000541236
  CDS Start-End: 179-485
gctcaagggggcgacctgggctgcagttaggttgtcgcctgcaggaggtgtgctgttgagggagaggaaaaccgtccgaggagaggatcaagtcttccataccagggaccaggccaaaaccagactgccactgcccctacttgggccccactgtccccagaaagcagctgctgtgatcatgggcaatatctttggaaaccttctcaagagcctgattgggaagaaggagatgcgcatcctgatggtgggcctggatgccgcaggaaagaccaccatcctatacaagctgaaactcggggagatcgtcaccaccatccctaccattgggttcaatgtggagacagtggagtataagaacatcagctttacagtgtgggatgtgggtggccaggacaagattcgacccctctggagacactacttccagaacacccaagggttgatatttgtggtcgacagcaatgatcgggagcgagtaaatgagg

SEQ ID NO: 105667 - DNA, 807 bp, Homo sapiens
  Payload ID: 717
  Gene Symbol: ARF3
  Gene Name: ADP-ribosylation factor 3
  Uniprot ID: P61204
  ENST ID: ENST00000541959
  CDS Start-End: 240-785
gggaaggaaggagggagccggggagtgggccagggcagcagccgggctgaagtcggcttggggagccagagggagcggagcggaacctgcggggcagaggcggcggccgcagcggcgcagctgatagcaggaacagaagtctcagggatcaagtcttccataccagggaccaggccaaaaccagactgccactgcccctacttgggccccactgtccccagaaagcagctgctgtgatcatgggcaatatctttggaaaccttctcaagagcctgattgggaagaaggagatgcgcatcctgatggtgggcctggatgccgcaggaaagaccaccatcctatacaagctgaaactcggggagatcgtcaccaccatccctaccattgggttcaatgtggagacagtggagtataagaacatcagctttacagtgtgggatgtgggtggccaggacaagattcgacccctctggagacactacttccagaacacccaagggttgatatttgtggtcgacagcaatgatcgggagcgagtaaatgaggcccgggaagagctgatgagaatgctggcggaggacgagctccgggatgctgtactccttgtctttgcaaacaaacaggatctgcctaatgctatgaacgctgctgagatcacagacaagctgggcctgcattcccttcgtcaccgtaactggtacattcaggccacctgtgccaccagcggggacgggctgtacgaaggcctggactggctggccaatcagctcaaaaacaagaagtgaaagccagacagccctaacaaag

SEQ ID NO: 105668 - DNA, 557 bp, Homo sapiens
  Payload ID: 717
  Gene Symbol: ARF3
  Gene Name: ADP-ribosylation factor 3
  ENST ID: ENST00000545855
  CDS Start-End: 437-557
aaaacgggccacttgattagcaaagtggtagctgttattttgggggaattcccgtcttgattgcattaaggcgggtctccatctttccaggccaggaggaatgtggtggtggaggtggaggattgtggtatgtggtcaggagtgagaagaaatagtaaggccgtcccggtgagggagaaatgtaacctaaaacctgtctctgctgttgttggattgggtcacccctggtctatggcatgaaagttttattgggaggagatctgctgcaagagtctgattgcttgggtcagtgcaacaggacagaatctagtcgctgcatacctccttccctgtcctcaatcaggatcaagtcttccataccagggaccaggccaaaaccagactgccactgcccctacttgggccccactgtccccagaaagcagctgctgtgatcatgggcaatatctttggaaaccttctcaagagcctgattgggaagaaggagatgcgcatcctgatggtgggcctggatgccgcaggaaagaccaccatcctatacaagctgaaactcgggg

SEQ ID NO: 105669 - DNA, 1660 bp, Homo sapiens
  Payload ID: 718
  Gene Symbol: ARF4
  Gene Name: ADP-ribosylation factor 4
  Uniprot ID: P18085
  ENST ID: ENST00000303436
  CDS Start-End: 269-811
gccgcggccgccgcgtgacgtggcacagccagagcctaaaggctagagccggagctgccgcgccagtcgcctagcaggtcctctaccggcttattcctgtgccggatcttcatcggcacaggggccactgagacgtttctgcctccctctttcttcctccgctctttctcttccctctcgtttagtttgcctgggagcttgaaaggagaaagcacggggtcgccccaaaccccttctgcttctgcccatcacaagtgccactaccgccatgggcctcactatctcctccctcttctcccgactatttggcaagaagcagatgcgcattttgatggttggattggatgctgctggcaagacaaccattctgtataaactgaagttaggggagatagtcaccaccattcctaccattggttttaatgtggaaacagtagaatataagaacatttgtttcacagtatgggatgttggtggtcaagatagaattaggcctctctggaagcattacttccagaatacccagggtcttatttttgtggtagatagcaacgatcgtgaaagaattcaggaagtagcagatgagctgcagaaaatgcttctggtagatgaattgagagatgcagtgctgctactttttgcaaacaaacaggatttgccaaatgctatggccatcagtgaaatgacagataaactagggcttcagtctcttcgtaacagaacatggtatgttcaagccacttgtgcaacacaaggaactggtctgtatgaaggacttgactggctgtcaaatgagctttcaaaacgttaaatgaaattggatatctaaccaaggacatgtttgataaaattggtctaggcttgttacaacaaaattagtttgtatcttggttattaaacagtatctgggactggtttgggcagaatattaaacttattttgttgccaattattgtttaccgagtataatgttgctatttagcaatgtgcttggttttaaagaaattctccttgggaaaaaagtatcctcttttaattttacttcccataagcgtaaatgcctggacatagctcttgtgcaacctttaaataaattgttttgagtgttttttgagccccagacaaataatgttttaaagttatccccttgctactttactgatacctttatcattcctgagacagtttgctaatttaaaaatgtagcattccatttgtatttatttctctcccttgccaaaaagattttctaatactgcttgtaccagccagagaaagatccaaaacactactcagctctcttgcactgaggaaatttttccccctacattgactcctggcctacatcagccaaacttaaccttggtggggtttggatttgatagccaattagttctgtgctggttgcaaagaattgatatttagatggtttttaatactcagcagattgtcttcctttatattgtgtcttttttatgttgcatgttgcttttgttatcagcctgattttttgctcagtatatgatagttctgctgatgttttgtttattgggcagacatatcttcattaagagtttttggaaaactcatcaaattcgatgaatacattttcttcataacccatttggaattattcctaataaaatgataaaatacgtaa

SEQ ID NO: 105670 - DNA, 1467 bp, Homo sapiens
  Payload ID: 718
  Gene Symbol: ARF4
  Gene Name: ADP-ribosylation factor 4
  ENST ID: ENST00000496292
  CDS Start-End: 186-647
taccggcttattcctgtgccggatcttcatcggcacaggggccactgagacgtttctgcctccctctttcttcctccgctctttctcttccctctcgtttagtttgcctgggagcttgaaaggagaaagcacggggtcgccccaaaccccttctgcttctgcccatcacaagtgccactaccgccatgggcctcactatctcctccctcttctcccgactatttggcaagaagcagatgcgcattttgatgggttttaatgtggaaacagtagaatataagaacatttgtttcacagtatgggatgttggtggtcaagatagaattaggcctctctggaagcattacttccagaatacccagggtcttatttttgtggtagatagcaacgatcgtgaaagaattcaggaagtagcagatgagctgcagaaaatgcttctggtagatgaattgagagatgcagtgctgctactttttgcaaacaaacaggatttgccaaatgctatggccatcagtgaaatgacagataaactagggcttcagtctcttcgtaacagaacatggtatgttcaagccacttgtgcaacacaaggaactggtctgtatgaaggacttgactggctgtcaaatgagctttcaaaacgttaaatgaaattggatatctaaccaaggacatgtttgataaaattggtctaggcttgttacaacaaaattagtttgtatcttggttattaaacagtatctgggactggtttgggcagaatattaaacttattttgttgccaattattgtttaccgagtataatgttgctatttagcaatgtgcttggttttaaagaaattctccttgggaaaaaagtatcctcttttaattttacttcccataagcgtaaatgcctggacatagctcttgtgcaacctttaaataaattgttttgagtgttttttgagccccagacaaataatgttttaaagttatccccttgctactttactgatacctttatcattcctgagacagtttgctaatttaaaaatgtagcattccatttgtatttatttctctcccttgccaaaaagattttctaatactgcttgtaccagccagagaaagatccaaaacactactcagctctcttgcactgaggaaatttttccccctacattgactcctggcctacatcagccaaacttaaccttggtggggtttggatttgatagccaattagttctgtgctggttgcaaagaattgatatttagatggtttttaatactcagcagattgtcttcctttatattgtgtcttttttatgttgcatgttgcttttgttatcagcctgattttttgctcagtatatgatagttctgctgatgttttgtttattgggcagacatatcttcattaagagtttttggaaaactcatcaaattcgatgaatacattttcttcataacccatttggaat

SEQ ID NO: 105671 - DNA, 732 bp, Homo sapiens
  Payload ID: 718
  Gene Symbol: ARF4
  Gene Name: ADP-ribosylation factor 4
  ENST ID: ENST00000488156
  CDS Start-End: 666-732
ctgtgaattttaaaaggtgtagcaggccgggcgcggtgagtcaccgcgccaggcccgatcataaacacttttaaagtgaagaggctttccgcttcctcaacataaggagtaaatctttaatgctgcttctaggaaaaaaagtacaagaaaagcaagacttcctccttgccttctctttaaaaagcaacagccgatgaacacgtgttggagcgctctcgccttgacagaattagagatcttcagaatcacttggcgtggtggtcgaagcgtctagccctagctcattagggtgccacagtttctcggcccacaagtcagcttttaaccacttttctccgcaaaagaccggaccggtcttcatgcgtcaactaaagcaagcgtctggtcccgtgtgtgaaacgtgtaagttcatggcatcagggaatacccatcgcgcgtaccgtaatagaagagggcgaggttcctcacctaacccataatgctcagctcgcctttccggaagcaaggactatcaccccgacaataccttcatccgggcggaagcgtctcaccctgagtctgatttggcagtgacgaagcgagtttgcctgggagcttgaaaggagaaagcacggggtcgccccaaaccccttctgcttctgcccatcacaagtgccactaccgccatgggcctcactatctcctccctcttctcccgactatttggcaagaagcagatgcgcattttgatgg

SEQ ID NO: 105672 - DNA, 641 bp, Homo sapiens
  Payload ID: 718
  Gene Symbol: ARF4
  Gene Name: ADP-ribosylation factor 4
  ENST ID: ENST00000463880
  CDS Start-End: 261-641
gcgcaagcgcagtggctcgggcgcaccggaagcgcagggggatggggcggcggtgacgcgattctgtccgcgttggaggggccgggccgctgctggagtcgccgcggccgccgcgtgacgtggcacagccagagcctaaaggctagagccggagctgccgcgccagtcgcctagcagtttgcctgggagcttgaaaggagaaagcacggggtcgccccaaaccccttctgcttctgcccatcacaagtgccactaccgccatgggcctcactatctcctccctcttctcccgactatttggcaagaagcagatgcgcattttgatggttggattggatgctgctggcaagacaaccattctgtataaactgaagttaggggagatagtcaccaccattcctaccattggttttaatgtggaaacagtagaatataagaacatttgtttcacagtatgggatgttggtggtcaagatagaattaggcctctctggaagcattacttccagaatacccagggtcttatttttgtggtagatagcaacgatcgtgaaagaattcaggaagtagcagatgagctgcagaaaatgcttctggtagatgaattgagagatgcagtgctgctactttttgcaaacaaa

SEQ ID NO: 105673 - DNA, 1601 bp, Homo sapiens
  Payload ID: 718
  Gene Symbol: ARF4
  Gene Name: ADP-ribosylation factor 4
  ENST ID: ENST00000486310
  CDS Start-End: 227-406
ctagagccggagctgccgcgccagtcgcctagcaggtcctctaccggcttattcctgtgccggatcttcatcggcacaggggccactgagacgtttctgcctccctctttcttcctccgctctttctcttccctctcgtttagtttgcctgggagcttgaaaggagaaagcacggggtcgccccaaaccccttctgcttctgcccatcacaagtgccactaccgccatgggcctcactatctcctccctcttctcccgactatttggcaagaagcagatgcgcattttgatggttggattggatgctgctggcaagacaaccattctgtataaactgaagttaggggagatagtcaccaccattcctaccattgcggtcatttttgtttttctttgtaggttttaatgtggaaacagtagaatataagaacatttgtttcacagtatgggatgttggtggtcaagatagaattaggcctctctggaagcattacttccagaatacccagggtcttatttttgtggtagatagcaacgatcgtgaaagaattcaggaagtagcagatgagctgcagaaaatgcttctggtagatgaattgagagatgcagtgctgctactttttgcaaacaaacaggatttgccaaatgctatggccatcagtgaaatgacagataaactagggcttcagtctcttcgtaacagaacatggtatgttcaagccacttgtgcaacacaaggaactggtctgtatgaaggacttgactggctgtcaaatgagctttcaaaacgttaaatgaaattggatatctaaccaaggacatgtttgataaaattggtctaggcttgttacaacaaaattagtttgtatcttggttattaaacagtatctgggactggtttgggcagaatattaaacttattttgttgccaattattgtttaccgagtataatgttgctatttagcaatgtgcttggttttaaagaaattctccttgggaaaaaagtatcctcttttaattttacttcccataagcgtaaatgcctggacatagctcttgtgcaacctttaaataaattgttttgagtgttttttgagccccagacaaataatgttttaaagttatccccttgctactttactgatacctttatcattcctgagacagtttgctaatttaaaaatgtagcattccatttgtatttatttctctcccttgccaaaaagattttctaatactgcttgtaccagccagagaaagatccaaaacactactcagctctcttgcactgaggaaatttttccccctacattgactcctggcctacatcagccaaacttaaccttggtggggtttggatttgatagccaattagttctgtgctggttgcaaagaattgatatttagatggtttttaatactcagcagattgtcttcctttatattgtgtcttttttatgttgcatgttgcttttgttatcagcctgattttttgctcagtatatgatagttctgctgatgttttgtttattgggcagacatatcttcattaagagtttttggaaaactcatcaaattcgatgaatacattttcttcata

SEQ ID NO: 105674 - DNA, 1360 bp, Homo sapiens
  Payload ID: 718
  Gene Symbol: ARF4
  Gene Name: ADP-ribosylation factor 4
  ENST ID: ENST00000489843
  CDS Start-End: 331-546
caggtcctctaccggcttattcctgtgccggatcttcatcggcacaggggccactgagacgtttctgcctccctctttcttcctccgctctttctcttccctctcgtttagtttgcctgggagcttgaaaggagaaagcacggggtcgccccaaaccccttctgcttctgcccatcacaagtgccactaccgccatgggcctcactatctcctccctcttctcccgactatttggcaagaagcagatgcgcattttgatggggtcttatttttgtggtagatagcaacgatcgtgaaagaattcaggaagtagcagatgagctgcagaaaatgcttctggtagatgaattgagagatgcagtgctgctactttttgcaaacaaacaggatttgccaaatgctatggccatcagtgaaatgacagataaactagggcttcagtctcttcgtaacagaacatggtatgttcaagccacttgtgcaacacaaggaactggtctgtatgaaggacttgactggctgtcaaatgagctttcaaaacgttaaatgaaattggatatctaaccaaggacatgtttgataaaattggtctaggcttgttacaacaaaattagtttgtatcttggttattaaacagtatctgggactggtttgggcagaatattaaacttattttgttgccaattattgtttaccgagtataatgttgctatttagcaatgtgcttggttttaaagaaattctccttgggaaaaaagtatcctcttttaattttacttcccataagcgtaaatgcctggacatagctcttgtgcaacctttaaataaattgttttgagtgttttttgagccccagacaaataatgttttaaagttatccccttgctactttactgatacctttatcattcctgagacagtttgctaatttaaaaatgtagcattccatttgtatttatttctctcccttgccaaaaagattttctaatactgcttgtaccagccagagaaagatccaaaacactactcagctctcttgcactgaggaaatttttccccctacattgactcctggcctacatcagccaaacttaaccttggtggggtttggatttgatagccaattagttctgtgctggttgcaaagaattgatatttagatggtttttaatactcagcagattgtcttcctttatattgtgtcttttttatgttgcatgttgcttttgttatcagcctgattttttgctcagtatatgatagttctgctgatgttttgtttattgggcagacatatcttcattaagagtttttggaaaactcatcaaattcgatgaatacattttcttcataacccatt

SEQ ID NO: 105675 - DNA, 1103 bp, Homo sapiens
  Payload ID: 719
  Gene Symbol: ARF5
  Gene Name: ADP-ribosylation factor 5
  Uniprot ID: P84085
  ENST ID: ENST00000000233
  CDS Start-End: 155-697
acgggggcgggcccgcggtgacgtcgggagggcagcgacgcgcggaggcggcggcggagcctcctcctgctgctgctgcgccccatccccccgcggccggccagttccagcccgcaccccgcgtcggtgcccgcgcccctccccgggccccgccatgggcctcaccgtgtccgcgctcttttcgcggatcttcgggaagaagcagatgcggattctcatggttggcttggatgcggctggcaagaccacaatcctgtacaaactgaagttgggggagattgtcaccaccatcccaaccataggcttcaatgtagaaacagtggaatataagaacatctgtttcacagtctgggacgtgggaggccaggacaagattcggcctctgtggcggcactacttccagaacactcagggcctcatctttgtggtggacagtaatgaccgggagcgggtccaagaatctgctgatgaactccagaagatgctgcaggaggacgagctgcgggatgcagtgctgctggtatttgccaacaagcaggacatgcccaacgccatgcccgtgagcgagctgactgacaagctggggctacagcacttacgcagccgcacgtggtatgtccaggccacctgtgccacccaaggcacaggtctgtacgatggtctggactggctgtcccacgagctgtcaaagcgctaaccagccaggggcaggcccctgatgcccggaagctcctgcgtgcatccccgggatgaccagactcccggactcctcaggcagtgccctttcctcccacttttcctcccccatagccacaggcctctgctcctgctcctgcctgcatgttctctctgttgttggagcctggagccttgctctctgggcacagaggggtccactctcctgcctgctgggacctatggaaggggcttcctggccaaggccccctcttccagaggaggagcagggatctgggtttccttttttttttctgttttgggtgtactctaggggccaggttgggagggggaaggtgagggcttcgggtggtgctataatgtggcactggatcttgagtaataaatttgctgtggtttgtacacgg

SEQ ID NO: 105676 - DNA, 546 bp, Homo sapiens
  Payload ID: 719
  Gene Symbol: ARF5
  Gene Name: ADP-ribosylation factor 5
  ENST ID: ENST00000415666
  CDS Start-End: 97-546
gcctcctcctgctgctgctgcgccccatccccccgcggccggccagttccagcccgcaccccgcgtcggtgcccgcgcccctccccgggccccgccatgggcctcaccgtgtccgcgctcttttcgcggatcttcgggaagaagcagatgcggattctcatggttggcttggatgcggctggcaagaccacaatcctgtacaaactgaagttgggggagattgtcaccaccatcccaaccataggcttcaatgtagaaacagtggaatataagaacatctgtttcacagtctgggacgtgggaggccaggacaagattcggcctctgtggcggcactacttccagaacactcagggcctcatctttgtggtggacagtaatgaccgggagcgggtccaagaatctgctgatgaactccagaagatggaggacgagctgcgggatgcagtgctgctggtatttgccaacaagcaggacatgcccaacgccatgcccgtgagcgagctgactgacaagctggggctacagcacttacgcagccgcacg

SEQ ID NO: 105677 - DNA, 3865 bp, Homo sapiens
  Payload ID: 720
  Gene Symbol: ARF6
  Gene Name: ADP-ribosylation factor 6
  Uniprot ID: P62330
  ENST ID: ENST00000298316
  CDS Start-End: 548-1075
cggcggcagaactgggaggaggagttggaggccggagggagcccgcgctcggggcggcggctggaggcagcgcaccgagttcccgcgaggatccatgacctgacggggccccggagccgcgctgcctctcgggtgtcctgggtcggtggggagcccagtgctcgcaggccggcgggcgggccggagggctgcagtctccctcgcggtgagaggaaggcggaggagcgggaaccgcggcggcgctcgcgcggcgcctgcggggggaagggcagttccgggccgggccgcgcctcagcagggcggcggctcccagcgcagtctcagggcccgggtggcggcggcgactggagaaatcaagttgtgcggtcggtgatgcccgagtgagcggggggcctgggcctctgcccttaggaggcaactcccacgcaggccgcaaaggcgctctcgcggccgagaggcttcgtttcggtttcgcggcggcggcggcgttgttggctgaggggacccgggacacctgaatgcccccggccccggctcctccgacgcgatggggaaggtgctatccaaaatcttcgggaacaaggaaatgcggatcctcatgttgggcctggacgcggccggcaagacaacaatcctgtacaagttgaagctgggccagtcggtgaccaccattcccactgtgggtttcaacgtggagacggtgacttacaaaaatgtcaagttcaacgtatgggatgtgggcggccaggacaagatccggccgctctggcggcattactacactgggacccaaggtctcatcttcgtagtggactgcgccgaccgcgaccgcatcgatgaggctcgccaggagctgcaccgcattatcaatgaccgggagatgagggacgccataatcctcatcttcgccaacaagcaggacctgcccgatgccatgaaaccccacgagatccaggagaaactgggcctgacccggattcgggacaggaactggtatgtgcagccctcctgtgccacctcaggggacggactctatgaggggctcacatggttaacctctaactacaaatcttaatgagcattctccacccatcccctggaaggagagaaatcaaaaacccattcataggattatcgccaccatcacctctttcaattgccactttctcttcttttgaatttgaactctggagttactgttctacagtttggcggggacggggcttgggggttttctcttttgtttgtttccctttctttttccttttttttttttttttttttttgttggctttgcgttaggatgctctgatctgacatttgacatgaacacaaagttgctagatgctcttgttgacttccagcagatgggatgggggaaacacagcagttcttggtaaagtcctttgtaataatagtttgatttttttatttcgagagaatctttcattttcctatgtatgcttttttccttttttgcccagtttccttatcacttgctgtagatggcttattttgcattcatgcagactatgttgcaagtctgtttcatctagtaaactgaaaattattgcttaatcaaactgccgtttgtcttttatatttaaggccttccccccccttccttatgagttctaacttagtaatttcaaatgtgaccttttatatctaagaccagtatagtaaacttagcccacagtggcaaataatgagtaatattgtaatatgttccagttgcacctcagtatgttaaacaggtaatgtaagaagttctctgaaatgtcagcaagtaagttctgaaacacatcatgcatgagtaggaataaaacccaagttccccataacgtagataacttaatgctgcataaaaatatgaaagtgtaacccatgaaggacactttttctttccactgcaaagttagccactttgctgtttttcctcttttttaaactttgaaaatagactctttccagaaattggagcaataatggtgttaccacacacagattaaataatttgtagatattttaagtgacttttgggcaaaactggaatgtatacttttaccttgtttcaaacacctaagaccagtaatttaaaaattactaaaaggtttactttgttcattaataaaacatttaacaattcaaattatatgcaccttttacctagttgaaaaaaatacacattcctgttttcacattatagcaactgattaagctgaagctgtaagtcattttttatagatgagtgatccgcatctccatcaattagaacactggaaaagatgttttataaaagaggtatttaattttgtttgtaggattaactcatgcaaataataaaaaagatatcctgttggttcaatagtacactgtctcctttaaggaaggaagcgtgatgaatgaatgatgtgtagacttgagggatgactattaaaggggacgtaggatgaagagaaagaacctacagatgacaatgaatgtaaacttatttttcttcatgtgtaagcagtgtgctcgctggtgatatccagatcctaacaagattacttggttagctggttaggaccagtaactggattgcgaccactatgataatattttgaaccaaatgttaatgcttgatgcagaattgtaaagcagcatctggttcctatatagccttaaggattaattttagtgatcctcaaggaattaaatagggaatttcagaaatgtagactgcaaaggcagtatacaggaaaaggtggagtgggttttgtttatgagggtgtctgaaaactaaaattgagcgggatatcatggtatagttggacagtattggtccttcacactttggccatattgtataatggagcttttaccaaagatgtatgagaagtgtaagactataaaaaaatgaactattcaaagtaaaactcttaacaaacattttacttaaagcagatgcaaaagggtattctcatgtaggctcctgttggtgcagagggatttttttgatttcaggatacaactaaagtacgaagttctcagtttcactttagtagaaagagctctagaaatgaggctgataaacacatctaagaacactggttgctttctaaaatttccaaagctccaccataaatgtaatttttagtgtttcaaatgattgcattttaaagtatataaatatgggttatccaatatcaatgctatagtaacatcctgaaacaaaacaagcacaaaggtataaatgcctaaactggaggaaacttgaaaccctcatgttaaatcttaaatgtagtatttctaacttgtgaagacagattggtaggcagccatttttttgtgtcttaaaataactgggggcatagttaaaattttatacatcaagtgattgctattattgaatgttgcaggtgagatgtggttatttttagtttatttgaaatgtttgactggaaaggggggagggggaagcaaatatttgaaatttggaaaaccctaaaccttttggtaagaaattgtaattttcacttaaaattttctttaaggatataagaggtttataattgatgtagttaaattgaacaataaccattggtgactggagcaggtaattatagcctgcagaaaaaattatctaagaattttaaaaataagatcctgaagttgtttaattgcatccatttctgtatttatgtgaatttataaactgcagtaagttttgaatgaggttaatcttgtttaatataagtaaatgagtctgtagactgtgatctccccaaactaaaaagtacagtacttggaattgtgttctttatggttgtagtgttggtaaagcactaatatgcagaaaataaaggaattacacagtgca

SEQ ID NO: 105678 - DNA, 2776 bp, Homo sapiens
  Payload ID: 721
  Gene Symbol: ARFGAP1
  Gene Name: ADP-ribosylation factor GTPase activating protein 1
  Uniprot ID: Q8N6T3
  ENST ID: ENST00000353546
  CDS Start-End: 61-1305
cggccctacctcggccctggcctgaccccggcggccctgcccgcccctccctccagcatcatggccagcccaagaaccaggaaggttcttaaagaagtcagggtgcaggatgagaacaacgtttgttttgagtgtggcgcgttcaatcctcagtgggtcagtgtgacctacggcatctggatctgcctggagtgctcggggagacaccgcgggcttggggttcacctcagctttgtgcgctctgttactatggacaagtggaaggacattgagcttgagaagatgaaagctggtgggaatgctaagttccgagagttcctggagtctcaggaggattacgatccttgctggtccttgcaggagaagtacaacagcagagccgcggccctctttagggataaggtggtcgctctggccgaaggcagagagtggtctctggagtcatcacctgcccagaactggaccccacctcagcccaggacgctgccgtccatggtgcaccgagtctctggccagccgcagagtgtgaccgcctcctcggacaaggcttttgaagactggctgaatgatgacctcggctcctatcaaggggcccaggggaatcgctacgtggggtttgggaacacgccaccgcctcagaagaaagaagatgacttcctcaacaacgccatgtcctccctgtactcgggctggagcagcttcaccactggagccagccggtttgcctcggcagccaaggagggcgctacaaagtttggatcccaagcgagtcagaagttttggggtcacaagcagcagccggagccggcgtccgagctgggccacagcctgaacgagaacgtcctcaagcctgcgcaggagaaggtgaaggagggaaagatttttgatgatgtctccagtggggtctctcagttggcgtccaagggagtcggtagtaagggatggcgggacgtcaccacctttttttcggggaaagcagagggccccttggacagcccctcggagggccacagttatcagaacagcggtctggaccacttccaaaacagcaacatagaccagagcttctgggagacctttggaagtgctgagcccaccaagacccgcaagtccccgagcagcgacagctggacgtgcgcggacacctccaccgagaggaggagctcggacagctgggaggtgtggggctcggcctccaccaacaggaacagcaacagcgacggcggggagggcggggagggcaccaagaaggcagtgccgccggccgtgcccactgatgatggctgggacaaccagaactggtagggcccactgcgcccccgtccccagcgcccccgggcgacttcgtgtttgcactctgccctcgtcgttcctcctccttccatttgacccaagaatcagcaactgcagtgtgaggacagcgtctcgggaggcaggaccctagggagacccgggtgtgcgccgcctgcgcgtggggagtcttcggtgcgtgggggcggcttgctgtccagcctgtgtgggggccgtcccgtcccacactcccctgggcattcttggactcaaggccggggctctgcgtggcttgctgggaggtgggctgcagcacagaggcctgtgactgcgttccagcggccagttcactacgcagtatctctggggcctgggaccagccacgtgccgagctgtcagcgacgtgaggtgtcccttctcgttgagatatttaactttggttttgctctagttctttctttttgaagagagtgactggagtggtaaagatggaaatgctggaaatgatactggcgctcacgctgccatccgaccaccctcggctcccgagtccacgcctgcctgggcctgtgctgtcagacccgcgtcggtcgtaaccctctgtggctcccctgcatcagcaccgtcccaccaccaagttcaccaggttcaccagacacggcctccacaatagccacacccacacctgagctgttctcagtgctggaacttgaccatcctggaacaccctggaagaaaaaggagcgcagggtgggccctcggccctgatgcaggagggtgcgatagcggacgtggccaggcaggaggggccgggttcaggagctgagcaggggatgcctgtgcgtggtgcctgggtctagggaagctccagccccaggatggggctgccctgcacaccggtgcccgccacatgccaaccctcacctccccgaggactggatgatgtgctgccacgtgtgactcgtctcccttgtctgccctgtgtgaccctcagtcttggccagccatgcatgcgcccgaagctcgtgcagtttgtacgtgaggtgctctcctccctgccaccatgctcatcactctggccttggccatgctccctggtcaccccacttcccggtcgccgtctgcagcactcctggagcagcctgggcccttcagcccctgtgctcgtcccaccctagggactcagccacttgcagaacaggatgggaccgagatttcagcgagccctcctggcgcccggtcctccctgtgggcaccagccctcttggtagctggtgtggagggccggtgtccttggctgccacggagggatttgatcaccgaagcagccacctgctgtagttggacctgaggtcagaggcggggcatcagaggctcaaggtgctgagaagccaccgggaaagcagccagcacaaagggcccaggaagccagcccccgagagctgagcgtgggggtctttgagtgtctttctccaagctgagacgt

SEQ ID NO: 105679 - DNA, 3467 bp, Homo sapiens
  Payload ID: 721
  Gene Symbol: ARFGAP1
  Gene Name: ADP-ribosylation factor GTPase activating protein 1
  Uniprot ID: Q8N6T3
  ENST ID: ENST00000370275
  CDS Start-End: 93-1304
gggcgaccgggcgcatcctcattgcagtgcggcggccctacctcggccctggcctgaccccggcggccctgcccgcccctccctccagcatcatggccagcccaagaaccaggaaggttcttaaagaagtcagggtgcaggatgagaacaacgtttgttttgagtgtggcgcgttcaatcctcagtgggtcagtgtgacctacggcatctggatctgcctggagtgctcggggagacaccgcgggcttggggttcacctcagctttgtgcgctctgttactatggacaagtggaaggacattgagcttgagaagatgaaagctggtgggaatgctaagttccgagagttcctggagtctcaggaggattacgatccttgctggtccttgcaggagaagtacaacagcagagccgcggccctctttagggataaggtggtcgctctggccgaaggcagagagtggtctctggagtcatcacctgcccagaactggaccccacctcagcccaggacgctgccgtccatggtgcaccgagtctctggccagccgcagagtgtgaccgcctcctcggacaaggcttttgaagactggctgaatgatgacctcggctcctatcaaggggcccaggggaatcgctacgtggggtttgggaacacgccaccgcctcagaagaaagaagatgacttcctcaacaacgccatgtcctccctgtactcgggctggagcagcttcaccactggagccagccggtttgcctcggcagccaaggagggcgctacaaagtttggatcccaagcgagtcagaaggcgtccgagctgggccacagcctgaacgagaacgtcctcaagcctgcgcaggagaaggtgaaggagggaaagatttttgatgatgtctccagtggggtctctcagttggcgtccaagtgccagcgccgtctttgctgccatcagtcccactgctctgcgggccatttggggcgtgcattttgtcctgtttcctggcatgaggcgctctgcggacagacggggagggaagagcaggcctcgctcctcccccccaagcatgtggtgggagctcttgaggtctgtgcacgaggctgtcctcgctgccatgtcccgcacacacctggcaccgctgcagagtggccggggcgtctgtgtctgtccagggagtcggtagtaagggatggcgggacgtcaccacctttttttcggggaaagcagagggccccttggacagcccctcggagggccacagttatcagaacagcggtctggaccacttccaaaacagcaacatagaccagagcttctgggagacctttggaagtgctgagcccaccaagacccgcaagtccccgagcagcgacagctggacgtgcgcggacacctccaccgagaggaggagctcggacagctgggaggtgtggggctcggcctccaccaacaggaacagcaacagcgacggcggggagggcggggagggcaccaagaaggcagtgccgccggccgtgcccactgatgatggctgggacaaccagaactggtagggcccactgcgcccccgtccccagcgcccccgggcgacttcgtgtttgcactctgccctcgtcgttcctcctccttccatttgacccaagaatcagcaactgcagtgtgaggacagcgtctcgggaggcaggaccctagggagacccgggtgtgcgccgcctgcgcgtggggagtcttcggtgcgtgggggcggcttgctgtccagcctgtgtgggggccgtcccgtcccacactcccctgggcattcttggactcaaggccggggctctgcgtggcttgctgggaggtgggctgcagcacagaggcctgtgactgcgttccagcggccagttcactacgcagtatctctggggcctgggaccagccacgtgccgagctgtcagcgacgtgaggtgtcccttctcgttgagatatttaactttggttttgctctagttctttctttttgaagagagtgactggagtggtaaagatggaaatgctggaaatgatactggcgctcacgctgccatccgaccaccctcggctcccgagtccacgcctgcctgggcctgtgctgtcagacccgcgtcggtcgtaaccctctgtggctcccctgcatcagcaccgtcccaccaccaagttcaccaggttcaccagacacggcctccacaatagccacacccacacctgagctgttctcagtgctggaacttgaccatcctggaacaccctggaagaaaaaggagcgcagggtgggccctcggccctgatgcaggagggtgcgatagcggacgtggccaggcaggaggggccgggttcaggagctgagcaggggatgcctgtgcgtggtgcctgggtctagggaagctccagccccaggatggggctgccctgcacaccggtgcccgccacatgccaaccctcacctccccgaggactggatgatgtgctgccacgtgtgactcgtctcccttgtctgccctgtgtgaccctcagtcttggccagccatgcatgcgcccgaagctcgtgcagtttgtacgtgaggtgctctcctccctgccaccatgctcatcactctggccttggccatgctccctggtcaccccacttcccggtcgccgtctgcagcactcctggagcagcctgggcccttcagcccctgtgctcgtcccaccctagggactcagccacttgcagaacaggatgggaccgagatttcagcgagccctcctggcgcccggtcctccctgtgggcaccagccctcttggtagctggtgtggagggccggtgtccttggctgccacggagggatttgatcaccgaagcagccacctgctgtagttggacctgaggtcagaggcggggcatcagaggctcaaggtgctgagaagccaccgggaaagcagccagcacaaagggcccaggaagccagcccccgagagctgagcgtgggggtctttgagtgtctttctccaagctgagacgtgggcggccgcgtggtatctcccgagggctgcttggaccctggtgggctgagtgctccgaggaggggtggactccaccttggacagtgggatgtggtgttccacatgtgcctgtttccacgccagcaccttgacttggcagcatggagccaaggtctgtccccgcccaggagggtgccttcctcgggggtagggggacggcccactctgccccagggagtcccttttgatgggaagtgcagtcagcagcgtggaggtgtctgggccaccttcagaaggtggatgtggtggccgagaccccgtccacggagggtgatggcctttcccttctgcaggtgcgggcaggtgggcctgggaccggtgctggggcctctccttgctgtgtgtgagggcccaggtggaaggcgcggacctgacagcattccaataaagcatacgggaacatg

SEQ ID NO: 105680 - DNA, 3281 bp, Homo sapiens
  Payload ID: 721
  Gene Symbol: ARFGAP1
  Gene Name: ADP-ribosylation factor GTPase activating protein 1
  Uniprot ID: Q8N6T3
  ENST ID: ENST00000370283
  CDS Start-End: 141-1361
gtgagaccttgcaaagcgcaacgtagccggaagctggtggcggctggtgggcgaccgggcgcatcctcattgcagtgcggcggccctacctcggccctggcctgaccccggcggccctgcccgcccctccctccagcatcatggccagcccaagaaccaggaaggttcttaaagaagtcagggtgcaggatgagaacaacgtttgttttgagtgtggcgcgttcaatcctcagtgggtcagtgtgacctacggcatctggatctgcctggagtgctcggggagacaccgcgggcttggggttcacctcagctttgtgcgctctgttactatggacaagtggaaggacattgagcttgagaagatgaaagctggtgggaatgctaagttccgagagttcctggagtctcaggaggattacgatccttgctggtccttgcaggagaagtacaacagcagagccgcggccctctttagggataaggtggtcgctctggccgaaggcagagagtggtctctggagtcatcacctgcccagaactggaccccacctcagcccaggacgctgccgtccatggtgcaccgagtctctggccagccgcagagtgtgaccgcctcctcggacaaggcttttgaagactggctgaatgatgacctcggctcctatcaaggggcccaggggaatcgctacgtggggtttgggaacacgccaccgcctcagaagaaagaagatgacttcctcaacaacgccatgtcctccctgtactcgggctggagcagcttcaccactggagccagccggtttgcctcggcagccaaggagggcgctacaaagtttggatcccaagcgagtcagaaggcgtccgagctgggccacagcctgaacgagaacgtcctcaagcctgcgcaggagaaggtgaaggagggaaagatttttgatgatgtctccagtggggtctctcagttggcgtccaaggtccagggagtcggtagtaagggatggcgggacgtcaccacctttttttcggggaaagcagagggccccttggacagcccctcggagggccacagttatcagaacagcggtctggaccacttccaaaacagcaacatagaccagagcttctgggagacctttggaagtgctgagcccaccaagacccgcaagtccccgagcagcgacagctggacgtgcgcggacacctccaccgagaggaggagctcggacagctgggaggtgtggggctcggcctccaccaacaggaacagcaacagcgacggcggggagggcggggagggcaccaagaaggcagtgccgccggccgtgcccactgatgatggctgggacaaccagaactggtagggcccactgcgcccccgtccccagcgcccccgggcgacttcgtgtttgcactctgccctcgtcgttcctcctccttccatttgacccaagaatcagcaactgcagtgtgaggacagcgtctcgggaggcaggaccctagggagacccgggtgtgcgccgcctgcgcgtggggagtcttcggtgcgtgggggcggcttgctgtccagcctgtgtgggggccgtcccgtcccacactcccctgggcattcttggactcaaggccggggctctgcgtggcttgctgggaggtgggctgcagcacagaggcctgtgactgcgttccagcggccagttcactacgcagtatctctggggcctgggaccagccacgtgccgagctgtcagcgacgtgaggtgtcccttctcgttgagatatttaactttggttttgctctagttctttctttttgaagagagtgactggagtggtaaagatggaaatgctggaaatgatactggcgctcacgctgccatccgaccaccctcggctcccgagtccacgcctgcctgggcctgtgctgtcagacccgcgtcggtcgtaaccctctgtggctcccctgcatcagcaccgtcccaccaccaagttcaccaggttcaccagacacggcctccacaatagccacacccacacctgagctgttctcagtgctggaacttgaccatcctggaacaccctggaagaaaaaggagcgcagggtgggccctcggccctgatgcaggagggtgcgatagcggacgtggccaggcaggaggggccgggttcaggagctgagcaggggatgcctgtgcgtggtgcctgggtctagggaagctccagccccaggatggggctgccctgcacaccggtgcccgccacatgccaaccctcacctccccgaggactggatgatgtgctgccacgtgtgactcgtctcccttgtctgccctgtgtgaccctcagtcttggccagccatgcatgcgcccgaagctcgtgcagtttgtacgtgaggtgctctcctccctgccaccatgctcatcactctggccttggccatgctccctggtcaccccacttcccggtcgccgtctgcagcactcctggagcagcctgggcccttcagcccctgtgctcgtcccaccctagggactcagccacttgcagaacaggatgggaccgagatttcagcgagccctcctggcgcccggtcctccctgtgggcaccagccctcttggtagctggtgtggagggccggtgtccttggctgccacggagggatttgatcaccgaagcagccacctgctgtagttggacctgaggtcagaggcggggcatcagaggctcaaggtgctgagaagccaccgggaaagcagccagcacaaagggcccaggaagccagcccccgagagctgagcgtgggggtctttgagtgtctttctccaagctgagacgtgggcggccgcgtggtatctcccgagggctgcttggaccctggtgggctgagtgctccgaggaggggtggactccaccttggacagtgggatgtggtgttccacatgtgcctgtttccacgccagcaccttgacttggcagcatggagccaaggtctgtccccgcccaggagggtgccttcctcgggggtagggggacggcccactctgccccagggagtcccttttgatgggaagtgcagtcagcagcgtggaggtgtctgggccaccttcagaaggtggatgtggtggccgagaccccgtccacggagggtgatggcctttcccttctgcaggtgcgggcaggtgggcctgggaccggtgctggggcctctccttgctgtgtgtgagggcccaggtggaaggcgcggacctgacagcattccaataaagcatacgggaacatgcagaa

SEQ ID NO: 105681 - DNA, 1548 bp, Homo sapiens
  Payload ID: 721
  Gene Symbol: ARFGAP1
  Gene Name: ADP-ribosylation factor GTPase activating protein 1
  ENST ID: ENST00000520485
  CDS Start-End: 110-502
agctggtggcggctggtgggcgaccgggcgcatcctcattgcagtgcggcggccctacctcggccctggcctgaccccggcggccctgcccgcccctccctccagcatcatggccagcccaagaaccaggaaggttcttaaagaagtcagggtgcaggatgagaacaacgtttgttttgagtgtggcgcgttcaatcctcagtgggtcagtgtgacctacggcatctggatctgcctggagtgctcggggagacaccgcgggcttggggttcacctcagctttgtgcgctctgttactatggacaagtggaaggacattgagcttgagaagatgaaagctggtgggaatgctaagttccgagagttcctggagtctcaggaggattacgatccttgctggtccttgcaggagaagtacaacagcagagccgcggccctctttagggataagagtctctggccagccgcagagtgtgaccgcctcctcggacaaggcttttgaagactggctgaatgatgacctcggctcctatcaaggggcccaggggaatcgctacgtggggtttgggaacacgccaccgcctcagaagaaagaagatgacttcctcaacaacgccatgtcctccctgtactcgggctggagcagcttcaccactggagccagccggtttgcctcggcagccaaggagggcgctacaaagtttggatcccaagcgagtcagaaggcgtccgagctgggccacagcctgaacgagaacgtcctcaagcctgcgcaggagaaggtgaaggagggaaagatttttgatgatgtctccagtggggtctctcagttggcgtccaaggtccagggagtcggtagtaagggatggcgggacgtcaccacctttttttcggggaaagcagagggccccttggacagcccctcggagggccacagttatcagaacagcggtctggaccacttccaaaacagcaacatagaccagagcttctgggagacctttggaagtgctgagcccaccaagacccgcaagtccccgagcagcgacagctggacgtgcgcggacacctccaccgagaggaggagctcggacagctgggaggtgtggggctcggcctccaccaacaggaacagcaacagcgacggcggggagggcggggagggcaccaagaaggcagtgccgccggccgtgcccactgatgatggctgggacaaccagaactggtagggcccactgcgcccccgtccccagcgcccccgggcgacttcgtgtttgcactctgccctcgtcgttcctcctccttccatttgacccaagaatcagcaactgcagtgtgaggacagcgtctcgggaggcaggaccctagggagacccgggtgtgcgccgcctgcgcgtggggagtcttcggtgcgtgggggcggcttgctgtccagcctgtgtgggggccgtcccgtcccacactcccctgggcattcttggactcaaggccggggctctgcgtggcttgctgggaggtgggctgcagcacagaggcctgtgactgcgt

SEQ ID NO: 105682 - DNA, 579 bp, Homo sapiens
  Payload ID: 721
  Gene Symbol: ARFGAP1
  Gene Name: ADP-ribosylation factor GTPase activating protein 1
  ENST ID: ENST00000523114
  CDS Start-End: 342-579
gcaaagcgcaacgtagccggaagctggtggcggctggtgggcgaccgggcgcatcctcattgcagtgcggcggccctacctcggccctggcctgaccccggcggccctgcccgcccctccctccagtcggctgtataggtggatgctcagtttgatgacggtatccgcctgaatgagtcatgctgggggtccaagtcctgcggtcaggagtgagcattcagatgtctgcctcatgatctgtggttcctggacactcttacagaaggcacagaattatggagcagaagggagcccagggtgaacttttggttttgttttgatgaactgcagaaaacagcatcatggccagcccaagaaccaggaaggttcttaaagaagtcagggtgcaggatgagaacaacgtttgttttgagtgtggcgcgttcaatcctcagtgggtcagtgtgacctacggcatctggatctgcctggagtgctcggggagacaccgcgggcttggggttcacctcagctttgtgcgctctgttactatggacaagtggaaggacattgagcttgagaagatgaaagctggtggga

SEQ ID NO: 105683 - DNA, 905 bp, Homo sapiens
  Payload ID: 721
  Gene Symbol: ARFGAP1
  Gene Name: ADP-ribosylation factor GTPase activating protein 1
  ENST ID: ENST00000518601
  CDS Start-End: 174-905
gcggccctacctcggccctggcctgaccccggcggccctgcccgcccctccctccagcatcatggccagcccaagaaccaggaaggttcttaaagaagtcagggtgcaggatgagaacaacctttgtgcgctctgttactatggacaagtggaaggacattgagcttgagaagatgaaagctggtgggaatgctaagttccgagagttcctggagtctcaggaggattacgatccttgctggtccttgcaggagaagtacaacagcagagccgcggccctctttagggataaggtggtcgctctggccgaaggcagagagtggtctctggagtcatcacctgcccagaactggaccccacctcagcccaggacgctgccgtccatggtgcaccgagtctctggccagccgcagagtgtgaccgcctcctcggacaaggcttttgaagactggctgaatgatgacctcggctcctatcaaggggcccaggggaatcgctacgtggggtttgggaacacgccaccgcctcagaagaaagaagatgacttcctcaacaacgccatgtcctccctgtactcgacggagtcttgctttgtcgcccaggctgcagactggagggcagtggtgcgacctcagctcactgcaacctctgcctcccaggttcagggctggagcagcttcaccactggagccagccggtttgcctcggcagccaaggagggcgctacaaagtttggatcccaagcgagtcagaaggcgtccgagctgggccacagcctgaacgagaacgtcctcaagcctgcgcaggagaaggtgaaggagggaaagatttttgatgatgtctccagtggggtctctcagttggcgtccaaggtccagggagtcggtagtaagggatggcgggac

SEQ ID NO: 105684 - DNA, 572 bp, Homo sapiens
  Payload ID: 721
  Gene Symbol: ARFGAP1
  Gene Name: ADP-ribosylation factor GTPase activating protein 1
  ENST ID: ENST00000523460
  CDS Start-End: 113-572
ggaagctggtggcggctggtgggcgaccgggcgcatcctcattgcagtgcggcggccctacctcggccctggcctgaccccggcggccctgcccgcccctccctccagcatcatggccagcccaagaaccaggaaggttcttaaagaagtcagggtgaaggagggaaagatttttgatgatgtctccagtggggtctctcagttggcgtccaaggtccagggagtcggtagtaagggatggcgggacgtcaccacctttttttcggggaaagcagagggccccttggacagcccctcggagggccacagttatcagaacagcggtctggaccacttccaaaacagcaacatagaccagagcttctgggagacctttggaagtgctgagcccaccaagacccgcaagtccccgagcagcgacagctggacgtgcgcggacacctccaccgagaggaggagctcggacagctgggaggtgtggggctcggcctccaccaacaggaacagcaacagcgacggcggggagggcggggagggcaccaagaaggcagtgccgccggccgtgcccactg

SEQ ID NO: 105685 - DNA, 3191 bp, Homo sapiens
  Payload ID: 721
  Gene Symbol: ARFGAP1
  Gene Name: ADP-ribosylation factor GTPase activating protein 1
  Uniprot ID: Q8N6T3
  ENST ID: ENST00000519604
  CDS Start-End: 190-1275
gtgagaccttgcaaagcgcaacgtagccggaagctggtggcggctggtgggcgaccgggcgcatcctcattgcagtgcggcggccctacctcggccctggcctgaccccggcggccctgcccgcccctccctccagcatcatggccagcccaagaaccaggaaggttcttaaagaagtcagggtgcaggatgagaacaacctttgtgcgctctgttactatggacaagtggaaggacattgagcttgagaagatgaaagctggtgggaatgctaagttccgagagttcctggagtctcaggaggattacgatccttgctggtccttgcaggagaagtacaacagcagagccgcggccctctttagggataaggtggtcgctctggccgaaggcagagagtggtctctggagtcatcacctgcccagaactggaccccacctcagcccaggacgctgccgtccatggtgcaccgagtctctggccagccgcagagtgtgaccgcctcctcggacaaggcttttgaagactggctgaatgatgacctcggctcctatcaaggggcccaggggaatcgctacgtggggtttgggaacacgccaccgcctcagaagaaagaagatgacttcctcaacaacgccatgtcctccctgtactcgggctggagcagcttcaccactggagccagccggtttgcctcggcagccaaggagggcgctacaaagtttggatcccaagcgagtcagaagttttggggtcacaagcagcagccggagccggcgtccgagctgggccacagcctgaacgagaacgtcctcaagcctgcgcaggagaaggtgaaggagggaaagatttttgatgatgtctccagtggggtctctcagttggcgtccaagggagtcggtagtaagggatggcgggacgtcaccacctttttttcggggaaagcagagggccccttggacagcccctcggagggccacagttatcagaacagcggtctggaccacttccaaaacagcaacatagaccagagcttctgggagacctttggaagtgctgagcccaccaagacccgcaagtccccgagcagcgacagctggacgtgcgcggacacctccaccgagaggaggagctcggacagctgggaggtgtggggctcggcctccaccaacaggaacagcaacagcgacggcggggagggcggggagggcaccaagaaggcagtgccgccggccgtgcccactgatgatggctgggacaaccagaactggtagggcccactgcgcccccgtccccagcgcccccgggcgacttcgtgtttgcactctgccctcgtcgttcctcctccttccatttgacccaagaatcagcaactgcagtgtgaggacagcgtctcgggaggcaggaccctagggagacccgggtgtgcgccgcctgcgcgtggggagtcttcggtgcgtgggggcggcttgctgtccagcctgtgtgggggccgtcccgtcccacactcccctgggcattcttggactcaaggccggggctctgcgtggcttgctgggaggtgggctgcagcacagaggcctgtgactgcgttccagcggccagttcactacgcagtatctctggggcctgggaccagccacgtgccgagctgtcagcgacgtgaggtgtcccttctcgttgagatatttaactttggttttgctctagttctttctttttgaagagagtgactggagtggtaaagatggaaatgctggaaatgatactggcgctcacgctgccatccgaccaccctcggctcccgagtccacgcctgcctgggcctgtgctgtcagacccgcgtcggtcgtaaccctctgtggctcccctgcatcagcaccgtcccaccaccaagttcaccaggttcaccagacacggcctccacaatagccacacccacacctgagctgttctcagtgctggaacttgaccatcctggaacaccctggaagaaaaaggagcgcagggtgggccctcggccctgatgcaggagggtgcgatagcggacgtggccaggcaggaggggccgggttcaggagctgagcaggggatgcctgtgcgtggtgcctgggtctagggaagctccagccccaggatggggctgccctgcacaccggtgcccgccacatgccaaccctcacctccccgaggactggatgatgtgctgccacgtgtgactcgtctcccttgtctgccctgtgtgaccctcagtcttggccagccatgcatgcgcccgaagctcgtgcagtttgtacgtgaggtgctctcctccctgccaccatgctcatcactctggccttggccatgctccctggtcaccccacttcccggtcgccgtctgcagcactcctggagcagcctgggcccttcagcccctgtgctcgtcccaccctagggactcagccacttgcagaacaggatgggaccgagatttcagcgagccctcctggcgcccggtcctccctgtgggcaccagccctcttggtagctggtgtggagggccggtgtccttggctgccacggagggatttgatcaccgaagcagccacctgctgtagttggacctgaggtcagaggcggggcatcagaggctcaaggtgctgagaagccaccgggaaagcagccagcacaaagggcccaggaagccagcccccgagagctgagcgtgggggtctttgagtgtctttctccaagctgagacgtgggcggccgcgtggtatctcccgagggctgcttggaccctggtgggctgagtgctccgaggaggggtggactccaccttggacagtgggatgtggtgttccacatgtgcctgtttccacgccagcaccttgacttggcagcatggagccaaggtctgtccccgcccaggagggtgccttcctcgggggtagggggacggcccactctgccccagggagtcccttttgatgggaagtgcagtcagcagcgtggaggtgtctgggccaccttcagaaggtggatgtggtggccgagaccccgtccacggagggtgatggcctttcccttctgcaggtgcgggcaggtgggcctgggaccggtgctggggcctctccttgctgtgtgtgagggcccaggtggaaggcgcggacctgacagcattccaataaagcatacgggaacatgc

SEQ ID NO: 105686 - DNA, 995 bp, Homo sapiens
  Payload ID: 721
  Gene Symbol: ARFGAP1
  Gene Name: ADP-ribosylation factor GTPase activating protein 1
  ENST ID: ENST00000522403
  CDS Start-End: 212-995
acccgcaccccggatctggaatctcccaccggttacgggagtccagagggtccctgcccacgcacgtcgcctcccggggcgcgagcaggaccctgccccgtccgcttcaacacccttttcccgagctccttcggacccaggactcggcctggacacatcccagtcaggtggcctctgaagcccggtggggcttccaccccctaagaacatcatggccagcccaagaaccaggaaggttcttaaagaagtcagggtgcaggatgagaacaacgtttgttttgagtgtggcgcgttcaatcctcagtgggtcagtgtgacctacggcatctggatctgcctggagtgctcggggagacaccgcgggcttggggttcacctcagctttgtgcgctctgttactatggacaagtggaaggacattgagcttgagaagatgaaagctggtgggaatgctaagttccgagagttcctggagtctcaggaggattacgatccttgctggtccttgcaggagaagtacaacagcagagccgcggccctctttagggataaggtggtcgctctggccgaaggcagagagtggtctctggagtcatcacctgcccagaactggaccccacctcagcccaggacgctgccgtccatggtgcaccgagtctctggccagccgcagagtgtgaccgcctcctcggacaaggcttttgaagactggctgaatgatgacctcggctcctatcaaggggcccaggggaatcgctacgtggggtttgggaacacgccaccgcctcagaagaaagaagatgacttcctcaacaacgccatgtcctccctgtactcgggctggagcagcttcaccactggagccagccggtttgcctcggcagccaaggagggcgctacaaagtttggatcccaagcgagtcagaaggcgtccgagctgggccacagcctgaacgagaacgtcctcaagcctgcgcaggagaaggtgaaggagg

SEQ ID NO: 105687 - DNA, 3176 bp, Homo sapiens
  Payload ID: 721
  Gene Symbol: ARFGAP1
  Gene Name: ADP-ribosylation factor GTPase activating protein 1
  Uniprot ID: Q8N6T3
  ENST ID: ENST00000519273
  CDS Start-End: 379-1260
gtgagaccttgcaaagcgcaacgtagccggaagctggtggcggctggtgggcgaccgggcgcatcctcattgcagtgcggcggccctacctcggccctggcctgaccccggcggccctgcccgcccctccctccagcatcatggccagcccaagaaccaggaaggttcttaaagaagtcagggtgcaggatgagaacaacgtttgttttgagtgtggcgcgttcaatcctcagtgggtcagtgtgacctacggcatctggatctgcctggagtgctcggggagacaccgcgggcttggggttcacctcagctttgtgcgctctgttactatggacaagtggaaggacattgagcttgagaagatgaaagctggtgggaatgctaagttccgagagttcctggagtctcaggaggattacgatccttgctggtccttgcaggagaagtacaacagcagagccgcggccctctttagggataagagtctctggccagccgcagagtgtgaccgcctcctcggacaaggcttttgaagactggctgaatgatgacctcggctcctatcaaggggcccaggggaatcgctacgtggggtttgggaacacgccaccgcctcagaagaaagaagatgacttcctcaacaacgccatgtcctccctgtactcgggctggagcagcttcaccactggagccagccggtttgcctcggcagccaaggagggcgctacaaagtttggatcccaagcgagtcagaaggcgtccgagctgggccacagcctgaacgagaacgtcctcaagcctgcgcaggagaaggtgaaggagggaaagatttttgatgatgtctccagtggggtctctcagttggcgtccaaggtccagggagtcggtagtaagggatggcgggacgtcaccacctttttttcggggaaagcagagggccccttggacagcccctcggagggccacagttatcagaacagcggtctggaccacttccaaaacagcaacatagaccagagcttctgggagacctttggaagtgctgagcccaccaagacccgcaagtccccgagcagcgacagctggacgtgcgcggacacctccaccgagaggaggagctcggacagctgggaggtgtggggctcggcctccaccaacaggaacagcaacagcgacggcggggagggcggggagggcaccaagaaggcagtgccgccggccgtgcccactgatgatggctgggacaaccagaactggtagggcccactgcgcccccgtccccagcgcccccgggcgacttcgtgtttgcactctgccctcgtcgttcctcctccttccatttgacccaagaatcagcaactgcagtgtgaggacagcgtctcgggaggcaggaccctagggagacccgggtgtgcgccgcctgcgcgtggggagtcttcggtgcgtgggggcggcttgctgtccagcctgtgtgggggccgtcccgtcccacactcccctgggcattcttggactcaaggccggggctctgcgtggcttgctgggaggtgggctgcagcacagaggcctgtgactgcgttccagcggccagttcactacgcagtatctctggggcctgggaccagccacgtgccgagctgtcagcgacgtgaggtgtcccttctcgttgagatatttaactttggttttgctctagttctttctttttgaagagagtgactggagtggtaaagatggaaatgctggaaatgatactggcgctcacgctgccatccgaccaccctcggctcccgagtccacgcctgcctgggcctgtgctgtcagacccgcgtcggtcgtaaccctctgtggctcccctgcatcagcaccgtcccaccaccaagttcaccaggttcaccagacacggcctccacaatagccacacccacacctgagctgttctcagtgctggaacttgaccatcctggaacaccctggaagaaaaaggagcgcagggtgggccctcggccctgatgcaggagggtgcgatagcggacgtggccaggcaggaggggccgggttcaggagctgagcaggggatgcctgtgcgtggtgcctgggtctagggaagctccagccccaggatggggctgccctgcacaccggtgcccgccacatgccaaccctcacctccccgaggactggatgatgtgctgccacgtgtgactcgtctcccttgtctgccctgtgtgaccctcagtcttggccagccatgcatgcgcccgaagctcgtgcagtttgtacgtgaggtgctctcctccctgccaccatgctcatcactctggccttggccatgctccctggtcaccccacttcccggtcgccgtctgcagcactcctggagcagcctgggcccttcagcccctgtgctcgtcccaccctagggactcagccacttgcagaacaggatgggaccgagatttcagcgagccctcctggcgcccggtcctccctgtgggcaccagccctcttggtagctggtgtggagggccggtgtccttggctgccacggagggatttgatcaccgaagcagccacctgctgtagttggacctgaggtcagaggcggggcatcagaggctcaaggtgctgagaagccaccgggaaagcagccagcacaaagggcccaggaagccagcccccgagagctgagcgtgggggtctttgagtgtctttctccaagctgagacgtgggcggccgcgtggtatctcccgagggctgcttggaccctggtgggctgagtgctccgaggaggggtggactccaccttggacagtgggatgtggtgttccacatgtgcctgtttccacgccagcaccttgacttggcagcatggagccaaggtctgtccccgcccaggagggtgccttcctcgggggtagggggacggcccactctgccccagggagtcccttttgatgggaagtgcagtcagcagcgtggaggtgtctgggccaccttcagaaggtggatgtggtggccgagaccccgtccacggagggtgatggcctttcccttctgcaggtgcgggcaggtgggcctgggaccggtgctggggcctctccttgctgtgtgtgagggcccaggtggaaggcgcggacctgacagcattccaataaagcatacgggaacatgc

SEQ ID NO: 105688 - DNA, 1040 bp, Homo sapiens
  Payload ID: 721
  Gene Symbol: ARFGAP1
  Gene Name: ADP-ribosylation factor GTPase activating protein 1
  ENST ID: ENST00000549047
  CDS Start-End: 227-1040
ccggaagctggtggcggctggtgggcgaccgggcgcatcctcattgcagtgcggcggccctacctcggccctggcctgaccccggcggccctgcccgcccctccctccagcatcatggccagcccaagaaccaggaaggttcttaaagaagtcagggtgcaggatgagaacaacctttgtgcgctctgttactatggacaagtggaaggacattgagcttgagaagatgaaagctggtgggaatgctaagttccgagagttcctggagtctcaggaggattacgatccttgctggtccttgcaggagaagtacaacagcagagccgcggccctctttagggataaggtggtcgctctggccgaaggcagagagtggtctctggagtcatcacctgcccagaactggaccccacctcagcccaggacgctgccgtccatggtgcaccgagtctctggccagccgcagagtgtgaccgcctcctcggacaaggcttttgaagactggctgaatgatgacctcggctcctatcaaggggcccaggggaatcgctacgtggggtttgggaacacgccaccgcctcagaagaaagaagatgacttcctcaacaacgccatgtcctccctgtactcgggctggagcagcttcaccactggagccagccggtttgcctcggcagccaaggagggcgctacaaagtttggatcccaagcgagtcagaaggcgtccgagctgggccacagcctgaacgagaacgtcctcaagcctgcgcaggagaaggtgaaggagggaaagatttttgatgatgtctccagtggggtctctcagttggcgtccaaggtccagggagtcggtagtaagggatggcgggacgtcaccacctttttttcggggaaagcagagggccccttggacagcccctcggagggccacagttatcagaacagcggtctggaccacttccaaaacagcaacatagaccagagcttctgggagacctttggaagtgctgagcccaccaagacccgcaagtccccgagca

SEQ ID NO: 105689 - DNA, 572 bp, Homo sapiens
  Payload ID: 721
  Gene Symbol: ARFGAP1
  Gene Name: ADP-ribosylation factor GTPase activating protein 1
  ENST ID: ENST00000550188
  CDS Start-End: 206-572
cttttcccgagctccttcggacccaggactcggcctggacacatcccagtcaggtggcctctgaagcccggtggggcttccaccccctaagaagtgagggtcctaagaaggagatatatttttacatcttggtttcaagcgttcagagtttttgcgttatttttcaagataaactatatttgtacttttgaaggttaggagcatcatggccagcccaagaaccaggaaggttcttaaagaagtcagggtgcaggatgagaacaacgtttgttttgagtgtggcgcgttcaatcctcagtgggtcagtgtgacctacggcatctggatctgcctggagtgctcggggagacaccgcgggcttggggttcacctcagctttgtgcgctctgttactatggacaagtggaaggacattgagcttgagaagatgaaagctggtgggaatgctaagttccgagagttcctggagtctcaggaggattacgatccttgctggtccttgcaggagaagtacaacagcagagccgcggccctctttagggataaggtggtcgctctggccgaaggcagag

SEQ ID NO: 105690 - DNA, 1327 bp, Homo sapiens
  Payload ID: 721
  Gene Symbol: ARFGAP1
  Gene Name: ADP-ribosylation factor GTPase activating protein 1
  ENST ID: ENST00000547204
  CDS Start-End: 241-1263
aaagcgcaacgtagccggaagctggtggcggctggtgggcgaccgggcgcatcctcattgcagtgcggcggccctacctcggccctggcctgaccccggcggccctgcccgcccctccctccagcatcatggccagcccaagaaccaggaaggttcttaaagaagtcagggtgcaggatgagaacaacctttgtgcgctctgttactatggacaagtggaaggacattgagcttgagaagatgaaagctggtgggaatgctaagttccgagagttcctggagtctcaggaggattacgatccttgctggtccttgcaggagaagtacaacagcagagccgcggccctctttagggataaggtggtcgctctggccgaaggcagagagtggtctctggagtcatcacctgcccagaactggaccccacctcagcccaggacgctgccgtccatggtgcaccgagtctctggccagccgcagagtgtgaccgcctcctcggacaaggcttttgaagactggctgaatgatgacctcggctcctatcaaggggcccaggggaatcgctacgtggggtttgggaacacgccaccgcctcagaagaaagaagatgacttcctcaacaacgccatgtcctccctgtactcgggctggagcagcttcaccactggagccagccggtttgcctcggcagccaaggagggcgctacaaagtttggatcccaagcgagtcagaagttttggggtcacaagcagcagccggagccggcgtccgagctgggccacagcctgaacgagaacgtcctcaagcctgcgcaggagaaggtgaaggagggaaagatttttgatgatgtctccagtggggtctctcagttggcgtccaagggagtcggtagtaagggatggcgggacgtcaccacctttttttcggggaaagcagagggccccttggacagcccctcggagggccacagttatcagaacagcggtctggaccacttccaaaacagcaacatagaccagagcttctgggagacctttggaagtgctgagcccaccaagacccgcaagtccccgagcagcgacagctggacgtgcgcggacacctccaccgagaggaggagctcggacagctgggaggtgtggggctcggcctccaccaacaggaacagcaacagcgacggcggggagggcggggagggcaccaagaaggcagtgccgccggccgtgcccactgatgatggctgggacaaccagaactggtagggcccactgcgcccccgtccccagcgcccccgggcgacttcgtgtttgcactctgccctcgtcg

SEQ ID NO: 105691 - DNA, 913 bp, Homo sapiens
  Payload ID: 721
  Gene Symbol: ARFGAP1
  Gene Name: ADP-ribosylation factor GTPase activating protein 1
  ENST ID: ENST00000549076
  CDS Start-End: 1-314
ctgagcccaccaagacccgcaagtccccgagcagcgacagctggacgtgcgcggacacctccaccgagaggaggagctcggacagctgggagttctttctttttgaagagagtgactggagtggtaaagatggaaatgctggaaatgatactggcgctcacgctgccatccgaccaccctcggctcccgagtccacgcctgcctgggcctgtgctgtcagacccgcgtcggtcgtaaccctctgtggctcccctgcatcagcaccgtcccaccaccaagttcaccaggttcaccagacacggcctccacaatagccacacccacacctgagctgttctcagtgctggaacttgaccatcctggaacaccctggaagaaaaaggagcgcagggtgggccctcggccctgatgcaggagggtgcgatagcggacgtggccaggcaggaggggccgggttcaggagctgagcaggggatgcctgtgcgtggtgcctgggtctagggaagctccagccccaggatggggctgccctgcacaccggtgcccgccacatgccaaccctcacctccccgaggactggatgatgtgctgccacgtgtgactcgtctcccttgtctgccctgtgtgaccctcagtcttggccagccatgcatgcgcccgaagctcgtgcagtttgtacgtgaggtgctctcctccctgccaccatgctcatcactctggccttggccatgctccctggtcaccccacttcccggtcgccgtctgcagcactcctggagcagcctgggcccttcagcccctgtgctcgtcccaccctagggactcagccacttgcagaacaggatgggaccgagatttcagcgagccctcctggcgcccggtcctccctgtgggcaccagccctcttggtagc

SEQ ID NO: 105692 - DNA, 2937 bp, Homo sapiens
  Payload ID: 722
  Gene Symbol: ARFGAP2
  Gene Name: ADP-ribosylation factor GTPase activating protein 2
  ENST ID: ENST00000426335
  CDS Start-End: 273-1754
actacgcgcgcgaggaggtttgggccggtccgcgcgccgtcgccccgccccggctgcggattggcccggcgcggcgttgattcttgcggccgcggttgtcgtcgccgcccccgtcccgccggctgcccattggtccagatcggactccaatcaccccacccctcggctggcccaggcaccgctgaggccggcctggtgagcccgccctccccgccgtggattggcccgcggcgggacccgtcagccgcggttgtgtctgggaaggagagaaaatggcggcggagccgaacaagaccgaaatccagactctttttaagaggcttcgcgcagttccaaccaacaaggcctgtttcgactgcggcgccaagaatccgagttgggccagcatcacgtacggtgttttcttgtgcattgactgttccggggtgcaccgctccctgggcgtccatctgagcttcatcaggtccacagagttggattccaactggaactggttccagctgaggtgtatgcaggtcggcgggaatgccaatgcgacggctttttttcgccaacatggatgcacagccaatgatgccaacaccaaatataatagccgagctgcccagatgtaccgggagaagatccggcagctggggagtgcggccctggctaggcatggcactgatccccctgcctgggatgcgccagccactgagccttcagggacccagcagccagccccgtctacagagagcagtggcctggcacagccggagcatggccccaacacagacctgcttggcacctcacccaaagcctcactggaactgaaaagctccatcattggcaagaagaagccagcagcagctaagaaagggctgggtgccaagaaaggcctaggggcccagaaggtgagcagccagagcttcagtgagattgagcggcaggctcaggtggcagagaagctccgtgagcagcaggcagccgatgccaagaagcaggcggaggagtccatggtcgcctccatgcgtctggcctaccaggagctccagattgatcgtaagaaagaggaaaagaagctacagaatctggaagggaagaagcgagagcaggcagaaaggttgggcatgggcttggtatcccgaagctctgtctcccactccgtgctgtctgagatgcaggtgattgagcaggaaaccccagtgagtgcaaaatcctctcgctcgcagctggacttgtttgacgatgttggtactttcgcctctggacccccaaagtacaaggacaatcccttttccttaggggaaagctttggctcccgctgggatacagatgctgcctggggtatggacagggtagaggagaaggagccagaagtgaccatctcaagcatccggcctatttcagaaagagccacaaaccggagggaagtggagagccggagctcaggcctcgagtctagtgaggcgcgtcagaaattcgcaggagccaaagccatctcatctgacatgttctttgggcgggaggtggatgcagagtatgaggccaggtctcggctgcagcagctctcaggcagcagtgccatcagctcttcagacctctttggggacatggatggagctcacggagcaggaagtgtatctctggggaacgtgctgcctacagcggacattgcccagtttaagcagggtgtcaagtctgtggctgggaaaatggctgtgctggccaatggtgtgatgaattccttgcaggatcgctacggttcctactgatccgagctctgtgactcaggcttacgatggtgacggcaacaagaactccacagttcccaggctggggatgctttgccttgtggaagctggggaggatttgttacttcgtatgtgtggtgtgtgtgtggggtggcctttgaggcgctcactcctgtgaggggaatggtcagtaccagcccttgtcctctgcctgtggactgagccctttattccctctcacaccaccctccgtgtgttagactcttgtccttctgtcctgcccccacagctgctgctcacttatcctgccatactgggaaagggggttcccccacgatggcttattctgggtccagactttccccaggtagggaaagcggaaggtagaaggctttttttgctggctctagggttcttctagttcgaggccttgggtccccatcctctggaaccagggggaggcctggaaggagttcactgtagacccgtcccatggggaaagaggctgcggacttgctgctgctgctgctgccagtggcctcttctgggtgccaggagaggggaaggacctttgtctgggcgttaccaagggctggaaactttacctggtacctaaaggtttcatttgggatcagaccggagacccttgggttctcccgtctcaccacccctttctacagtaagcacttggaagattgtttcagggtgtctcagggtccctctgtaccatctgctgtggaatgcaggaccctctgtgacattctttatcccttcttccccgggttggtggccatggagggtcttgtctgctgtgattcgactctggatgctgtgagcttgatgctggccagggaagcagaggatgtgagaggcagaggcaggctcctggggctgagctccttcctctgcatcattctgggcttggcctggacagcacccgccagtgagagctgtgggcctcaccctctggcagctgagccaagcactgtcattcttggtgccatcttcccctgccgcaccggcagtctcagcccagcccccacctttgggttgtaggttgggctcccaagcaacacagaccactcttccccttgcccctcccccagagggacttgactttctttctggactgtttgtattgaaacaaagtggtgtcaaaataaagcccctgcagggcctggctccctgttggtctgagtgaagc

SEQ ID NO: 105693 - DNA, 556 bp, Homo sapiens
  Payload ID: 722
  Gene Symbol: ARFGAP2
  Gene Name: ADP-ribosylation factor GTPase activating protein 2
  ENST ID: ENST00000529439
  CDS Start-End: 1-51
aaggtgcgtgagcagggggcgcgcggagtctctcgtcccgctggggcctgagggagggagaagggcggaggtgggttatgtttctggggtgtcggtgcctggcctttactcggggcccctgacgattcgctcatcgccgcctccacccaggcctgtttcgactgcggcgccaagaatccgagttgggccagcatcacgtacggtgttttcttgtgcattgactgttccggggtgcaccgctccctgggcgtccatctgagcttcatcaggtccacagagttggattccaactggaactggttccagctgaggtgtatgcaggtcggcgggaatgccaatgcgacggctttttttcgccaacatggatgcacagccaatgatgccaacaccaaatataatagccgagctgcccagatgtaccgggagaagatccggcagctggggagtgcggccctggctaggcatggcactgatccccctgcctgggatgcgccagccactgagccttcagggacccagcagccagccccgtctacagagagcagtggcctggcac

SEQ ID NO: 105694 - DNA, 730 bp, Homo sapiens
  Payload ID: 722
  Gene Symbol: ARFGAP2
  Gene Name: ADP-ribosylation factor GTPase activating protein 2
  ENST ID: ENST00000528444
  CDS Start-End: 15-730
gggaaggagagaaaatggcggcggagccgaacaagaccgaaatccagactctttttaagaggcttcgcgcagttccaaccaacaaggcctgtttcgactgcggcgccaagaatccgagttgggccagcatcacgtacggtgttttcttgtgcattgactgttccggggtgcaccgctccctgggcgtccatctgagcttcatcaggtccacagagttggattccaactggaactggttccagctgaggtgtatgcaggtcggcgggaatgccaatgcgacggctttttttcgccaacatggatgcacagccaatgatgccaacaccaaatataatagccgagctgcccagatgtaccgggagaagatccggcagctggggagtgcggccctggctaggcatggcactgatctttggatagacaacatgagtagtgccgttcctaatcactccccagagaagaaggactctgatttcttcacagaacacactcaagtgcttgtaggtcttggtgcttcttgccagcaggagtggctcaccgaggcatctgtgatctggcctccttttcagccccctgcctgggatgcgccagccactgagccttcagggacccagcagccagccccgtctacagagagcagtggcctggcacagccggagcatggccccaacacagacctgcttggcacctcacccaaagcctcactggaactgaaaagctccatcattgg

SEQ ID NO: 105695 - DNA, 550 bp, Homo sapiens
  Payload ID: 722
  Gene Symbol: ARFGAP2
  Gene Name: ADP-ribosylation factor GTPase activating protein 2
  ENST ID: ENST00000528708
  CDS Start-End: 1-54
aacaaggtgcgtgagcagggggcgcgcggagtctctcgtcccgctggggcctgagggagggagaagggcggaggtgggttatgtttctggggtgtcggtgcctggcctttactcggggcccctgacgattcgctcatcgccgcctccacccaggcctgtttcgactgcggcgccaagaatccgagttgggccagcatcacgtacggtgttttcttgtgcattgactgttccggggtgcaccgctccctgggcgtccatctgagcttcatcaggtccacagagttggattccaactggaactggttccagctgaggtgtatgcaggtcggcgggaatgccaatgcgacggctttttttcgccaacatggatgcacagccaatgatgccaacaccaaatataatagccgagctgcccagatgtaccgggagaagatccggcagctggggagtgcggccctggctaggcatggcactgatctttggatagacaacatgagtagtgccgttcctaatcactccccagagaagaaggactctgatttcttcacag

SEQ ID NO: 105696 - DNA, 1000 bp, Homo sapiens
  Payload ID: 722
  Gene Symbol: ARFGAP2
  Gene Name: ADP-ribosylation factor GTPase activating protein 2
  ENST ID: ENST00000525398
  CDS Start-End: 18-1000
tctgggaaggagagaaaatggcggcggagccgaacaagaccgaaatccagactctttttaagaggcttcgcgcagttccaaccaacaaggcctgtttcgactgcggcgccaagaatccgagttgggccagcatcacgtacggtgttttcttgtgcattgactgttccggggtgcaccgctccctgggcgtccatctgagcttcatcaggtccacagagttggattccaactggaactggttccagctgaggtgtatgcaggtcggcgggaatgccaatgcgacggctttttttcgccaacatggatgcacagccaatgatgccaacaccaaatataatagccgagctgcccagatgtaccgggagaagatccggcagctggggagtgcggccctggctaggcatggcactgatctttggatagacaacatgagtagtgccgttcctaatcactccccagagaagaaggactctgatttcttcacagaacacactcaagagtggctcaccgaggcatctgtgatctggcctccttttcagccccctgcctgggatgcgccagccactgagccttcagggacccagcagccagccccgtctacagagagcagtggcctggcacagccggagcatggccccaacacagacctgcttggcacctcacccaaagcctcactggaactgaaaagctccatcattggcaagaagaagccagcagcagctaagaaagggctgggtgccaagaaaggcctaggggcccagaaggtgagcagccagagcttcagtgagattgagcggcaggctcaggtggcagagaagctccgtgagcagcaggcagccgatgccaagaagcaggcggaggagtccatggtcgcctccatgcgtctggcctaccaggagctccagattgatcgtaagaaagaggaaaagaagctacagaatctggaagggaagaagcgagagcaggcagaaaggttgggcatgggcttggtatcccgaag

SEQ ID NO: 105697 - DNA, 740 bp, Homo sapiens
  Payload ID: 722
  Gene Symbol: ARFGAP2
  Gene Name: ADP-ribosylation factor GTPase activating protein 2
  ENST ID: ENST00000532438
  CDS Start-End: 27-296
gcggttgtgtctgggaaggagagaaaatggcggcggagccgaacaagaccgaaatccagactctttttaagaggcttcgcgcagttccaaccaacaaggcctgtttcgactgcggcgccaagaatccgagttgggccagcatcacgtacggtgttttcttgtgcattgactgttccggggtgcaccgctccctgggcgtccatctgagcttcatcaggtccacagagttggattccaactggaactggttccagctgaggtgtatgcaggtcggcgggaatgccaatgcgaactgaaaagctccatcattggcaagaagaagccagcagcagctaagaaagggctgggtgccaagaaaggcctaggggcccagaaggtgagcagccagagcttcagtgagattgagcggcaggctcaggtggcagagaagctccgtgagcagcaggcagccgatgccaagaagcaggcggaggagtccatggtcgcctccatgcgtctggcctaccaggagctccagattgatcgtaagaaagaggaaaagaagctacagaatctggaagggaagaagcgagagcaggcagaaaggttgggcatgggcttggtatcccgaagctctgtctcccactccgtgctgtctgagatgcaggtgattgagcaggaaaccccagtgagtgcaaaatcctctcgctcgcagctggacttgtttgacgatgttggtactttcgcctctggacccccaa

SEQ ID NO: 105698 - DNA, 548 bp, Homo sapiens
  Payload ID: 722
  Gene Symbol: ARFGAP2
  Gene Name: ADP-ribosylation factor GTPase activating protein 2
  ENST ID: ENST00000524586
  CDS Start-End: 15-299
gggaaggagagaaaatggcggcggagccgaacaagaccgaaatccagactctttttaagaggcttcgcgcagttccaaccaacaaggcctgtttcgactgcggcgccaagaatccgagttgggccagcatcacgtacggtgttttcttgtgcattgactgttccggggtgcaccgctccctgggcgtccatctgagcttcatcaggtccacagagttggattccaactggaactggttccagctgaggtgtatgcaggtcggcgggaatgccaatgcgataataacttcgctgtcataaggagatgtctcctacagccaacacgtttccttcttgagaatcacccgtagcacgcgctgctctcttctttgctctccagacggctttttttcgccaacatggatgcacagccaatgatgccaacaccaaatataatagccgagctgcccagatgtaccgggagaagatccggcagctggggagtgcggccctggctaggcatggcactgatctttggatagacaacatgagtagtgccgttcctaatca

SEQ ID NO: 105699 - DNA, 1558 bp, Homo sapiens
  Payload ID: 722
  Gene Symbol: ARFGAP2
  Gene Name: ADP-ribosylation factor GTPase activating protein 2
  ENST ID: ENST00000533243
  CDS Start-End: 273-485
actacgcgcgcgaggaggtttgggccggtccgcgcgccgtcgccccgccccggctgcggattggcccggcgcggcgttgattcttgcggccgcggttgtcgtcgccgcccccgtcccgccggctgcccattggtccagatcggactccaatcaccccacccctcggctggcccaggcaccgctgaggccggcctggtgagcccgccctccccgccgtggattggcccgcggcgggacccgtcagccgcggttgtgtctgggaaggagagaaaatggcggcggagccgaacaagaccgaaatccagactctttttaagaggcttcgcgcagttccaaccaacaaggcctgtttcgactgcggcgccaagaatccgagttgggccagcatcacgtacggtgttttcttgtgcattgactgttccggggtgcaccgctccctgggcgtccatctgagcttcatcagctgggtgccaagaaaggcctaggggcccagaaggtgagcagccagagcttcagtgagattgagcggcaggctcaggtggcagagaagctccgtgagcagcaggcagccgatgccaagaagcaggcggaggagtccatggtcgcctccatgcgtctggcctaccaggagctccagattgatcgtaagaaagaggaaaagaagctacagaatctggaagggaagaagcgagagcaggcagaaaggttgggcatgggcttggtatcccgaagctctgtctcccactccgtgctgtctgagatgcaggtgattgagcaggaaaccccagtgagtgcaaaatcctctcgctcgcagctggacttgtttgacgatgttggtactttcgcctctggacccccaaagtacaaggacaatcccttttccttaggggaaagctttggctcccgctgggatacagatgctgcctggggtatggacagggtagaggagaaggagccagaagtgaccatctcaagcatccggcctatttcagaaagagccacaaaccggagggaagtggagagccggagctcaggcctcgagtctagtgaggcgcgtcagaaattcgcaggagccaaagccatctcatctgacatgttctttgggcgggaggtggatgcagagtatgaggccaggtctcggctgcagcagctctcaggcagcagtgccatcagctcttcagacctctttggggacatggatggagctcacggagcaggaagtgtatctctggggaacgtgctgcctacagcggacattgcccagtttaagcagggtgtcaagtctgtggctgggaaaatggctgtgctggccaatggtgtgatgaattccttgcaggatcgctacggttcctactgatccgagctctgtgactcaggcttacgatggtgacggcaacaagaactccacagttcccaggctggggatgctttgccttgtggaagctggggaggatttgttacttcgtatgtgtggtgtgtgtgtggggtggcctttgaggcgctcactcctgtgaggggaatggtcagtaccagcccttgtcctctgcctgtggactga

SEQ ID NO: 105700 - DNA, 709 bp, Homo sapiens
  Payload ID: 722
  Gene Symbol: ARFGAP2
  Gene Name: ADP-ribosylation factor GTPase activating protein 2
  ENST ID: ENST00000527776
  CDS Start-End: 1-709
ggtcgcctccatgcgtctggcctaccaggagctccagattgatcgtaagaaagaggaaaagaagctacagaatctggaagggaagaagcgagagcaggcagaaagctctgtctcccactccgtgctgtctgagatgcaggtgattgagcaggaaaccccagtgagtgcaaaatcctctcgctcgcagctggacttgtttgacgatgttggtactttcgcctctggacccccaaagtacaaggacaatcccttttccttaggggaaagctttggctcccgctgggatacagatgctgcctggggtatggacagggtagaggagaaggagccagaagtgaccatctcaagcatccggcctatttcagaaagagccacaaaccggagggaagtggagagccggagctcaggcctcgagtctagtgaggcgcgtcagaaattcgcaggagccaaagccatctcatctgacatgttctttgggcgggaggtggatgcagagtatgaggccaggtctcggctgcagcagctctcaggcagcagtgccatcagctcttcagacctctttggggacatggatggagctcacggagcaggaagtgtatctctggggaacgtgctgcctacagcggacattgcccagtttaagcagggtgtcaagtctgtggctgggaaaatggctgtgctggccaatggtgtgatgaattccttgcag

SEQ ID NO: 105701 - DNA, 850 bp, Homo sapiens
  Payload ID: 722
  Gene Symbol: ARFGAP2
  Gene Name: ADP-ribosylation factor GTPase activating protein 2
  ENST ID: ENST00000527927
  CDS Start-End: 28-850
cgcggttgtgtctgggaaggagagaaaatggcggcggagccgaacaagaccgaaatccagactctttttaagaggcttcgcgcagttccaaccaacaaggcctgtttcgactgcggcgccaagaatccgagttgggccagcatcacgtacggtgttttcttgtgcattgactgttccggggtgcaccgctccctgggcgtccatctgagcttcatcaggtccacagagttggattccaactggaactggttccagctgaggtgtatgcaggtcggcgggaatgccaatgcgctgggtgccaagaaaggcctaggggcccagaaggtgagcagccagagcttcagtgagattgagcggcaggctcaggtggcagagaagctccgtgagcagcaggcagccgatgccaagaagcaggcggaggagtccatggtcgcctccatgcgtctggcctaccaggagctccagattgatcgtaagaaagaggaaaagaagctacagaatctggaagggaagaagcgagagcaggcagaaaggttgggcatgggcttggtatcccgaagctctgtctcccactccgtgctgtctgagatgcaggtgattgagcaggaaaccccagtgagtgcaaaatcctctcgctcgcagctggacttgtttgacgatgttggtactttcgcctctggacccccaaagtacaaggacaatcccttttccttaggggaaagctttggctcccgctgggatacagatgctgcctggggtatggacagggtagaggagaaggagccagaagtgaccatctcaagcatccggcctatttcagaaagagccacaaaccggagggaagtggaga

SEQ ID NO: 105702 - DNA, 2976 bp, Homo sapiens
  Payload ID: 722
  Gene Symbol: ARFGAP2
  Gene Name: ADP-ribosylation factor GTPase activating protein 2
  Uniprot ID: Q8N6H7
  ENST ID: ENST00000524782
  CDS Start-End: 230-1795
cccgccccggctgcggattggcccggcgcggcgttgattcttgcggccgcggttgtcgtcgccgcccccgtcccgccggctgcccattggtccagatcggactccaatcaccccacccctcggctggcccaggcaccgctgaggccggcctggtgagcccgccctccccgccgtggattggcccgcggcgggacccgtcagccgcggttgtgtctgggaaggagagaaaatggcggcggagccgaacaagaccgaaatccagactctttttaagaggcttcgcgcagttccaaccaacaaggcctgtttcgactgcggcgccaagaatccgagttgggccagcatcacgtacggtgttttcttgtgcattgactgttccggggtgcaccgctccctgggcgtccatctgagcttcatcaggtccacagagttggattccaactggaactggttccagctgaggtgtatgcaggtcggcgggaatgccaatgcgacggctttttttcgccaacatggatgcacagccaatgatgccaacaccaaatataatagccgagctgcccagatgtaccgggagaagatccggcagctggggagtgcggccctggctaggcatggcactgatctttggatagacaacatgagtagtgccgttcctaatcactccccagagaagaaggactctgatttcttcacagaacacactcaaccccctgcctgggatgcgccagccactgagccttcagggacccagcagccagccccgtctacagagagcagtggcctggcacagccggagcatggccccaacacagacctgcttggcacctcacccaaagcctcactggaactgaaaagctccatcattggcaagaagaagccagcagcagctaagaaagggctgggtgccaagaaaggcctaggggcccagaaggtgagcagccagagcttcagtgagattgagcggcaggctcaggtggcagagaagctccgtgagcagcaggcagccgatgccaagaagcaggcggaggagtccatggtcgcctccatgcgtctggcctaccaggagctccagattgatcgtaagaaagaggaaaagaagctacagaatctggaagggaagaagcgagagcaggcagaaaggttgggcatgggcttggtatcccgaagctctgtctcccactccgtgctgtctgagatgcaggtgattgagcaggaaaccccagtgagtgcaaaatcctctcgctcgcagctggacttgtttgacgatgttggtactttcgcctctggacccccaaagtacaaggacaatcccttttccttaggggaaagctttggctcccgctgggatacagatgctgcctggggtatggacagggtagaggagaaggagccagaagtgaccatctcaagcatccggcctatttcagaaagagccacaaaccggagggaagtggagagccggagctcaggcctcgagtctagtgaggcgcgtcagaaattcgcaggagccaaagccatctcatctgacatgttctttgggcgggaggtggatgcagagtatgaggccaggtctcggctgcagcagctctcaggcagcagtgccatcagctcttcagacctctttggggacatggatggagctcacggagcaggaagtgtatctctggggaacgtgctgcctacagcggacattgcccagtttaagcagggtgtcaagtctgtggctgggaaaatggctgtgctggccaatggtgtgatgaattccttgcaggatcgctacggttcctactgatccgagctctgtgactcaggcttacgatggtgacggcaacaagaactccacagttcccaggctggggatgctttgccttgtggaagctggggaggatttgttacttcgtatgtgtggtgtgtgtgtggggtggcctttgaggcgctcactcctgtgaggggaatggtcagtaccagcccttgtcctctgcctgtggactgagccctttattccctctcacaccaccctccgtgtgttagactcttgtccttctgtcctgcccccacagctgctgctcacttatcctgccatactgggaaagggggttcccccacgatggcttattctgggtccagactttccccaggtagggaaagcggaaggtagaaggctttttttgctggctctagggttcttctagttcgaggccttgggtccccatcctctggaaccagggggaggcctggaaggagttcactgtagacccgtcccatggggaaagaggctgcggacttgctgctgctgctgctgccagtggcctcttctgggtgccaggagaggggaaggacctttgtctgggcgttaccaagggctggaaactttacctggtacctaaaggtttcatttgggatcagaccggagacccttgggttctcccgtctcaccacccctttctacagtaagcacttggaagattgtttcagggtgtctcagggtccctctgtaccatctgctgtggaatgcaggaccctctgtgacattctttatcccttcttccccgggttggtggccatggagggtcttgtctgctgtgattcgactctggatgctgtgagcttgatgctggccagggaagcagaggatgtgagaggcagaggcaggctcctggggctgagctccttcctctgcatcattctgggcttggcctggacagcacccgccagtgagagctgtgggcctcaccctctggcagctgagccaagcactgtcattcttggtgccatcttcccctgccgcaccggcagtctcagcccagcccccacctttgggttgtaggttgggctcccaagcaacacagaccactcttccccttgcccctcccccagagggacttgactttctttctggactgtttgtattgaaacaaagtggtgtcaaaataaagcccctgcagggcctggctccctgttggtctgagtgaa

SEQ ID NO: 105703 - DNA, 840 bp, Homo sapiens
  Payload ID: 722
  Gene Symbol: ARFGAP2
  Gene Name: ADP-ribosylation factor GTPase activating protein 2
  ENST ID: ENST00000529455
  CDS Start-End: 1-400
ggcggcggagccgaacaagaccgaaatccagactctttttaagaggcttcgcgcagttccaaccaacaaggcctgtttcgactgcggcgccaagaatccgagttgggccagcatcacgtacggtgttttcttgtgcattgactgttccggggtgcaccgctccctgggcgtccatctgagcttcatcaggtccacagagttggattccaactggaactggttccagctgaggtgtatgcaggtcggcgggaatgccaatgcgacggctttttttcgccaacatggatgcacagccaatgatgccaacaccaaatataatagccgagctgcccagatgtaccgggagaagatccggcagctggggagtgcggccctggctaggcatggcactgataactgaaaagctccatcattggcaagaagaagccagcagcagctaagaaagggctgggtgccaagaaaggcctaggggcccagaaggtgagcagccagagcttcagtgagattgagcggcaggctcaggtggcagagaagctccgtgagcagcaggcagccgatgccaagaagcaggcggaggagtccatggtcgcctccatgcgtctggcctaccaggagctccagattgatcgtaagaaagaggaaaagaagctacagaatctggaagggaagaagcgagagcaggcagaaaggttgggcatgggcttggtatcccgaagctctgtctcccactccgtgctgtctgagatgcaggtgattgagcaggaaaccccagtgagtgcaaaatcctctcgctcgcagctggacttgtttgacgatgttggtactttcgcctctggaccc

SEQ ID NO: 105704 - DNA, 785 bp, Homo sapiens
  Payload ID: 722
  Gene Symbol: ARFGAP2
  Gene Name: ADP-ribosylation factor GTPase activating protein 2
  ENST ID: ENST00000525314
  CDS Start-End: 30-785
gccgcggttgtgtctgggaaggagagaaaatggcggcggagccgaacaagaccgaaatccagactctttttaagaggcttcgcgcagttccaaccaacaaggcctgtttcgactgcggcgccaagaatccgagttgggccagcatcacgtacggtgttttcttgtgcattgactgttccggggtgcaccgctccctgggcgtccatctgagcttcatcaggtccacagagttggattccaactggaactggttccagctgaggtgtatgcaggtcggcgggaatgccaatgcgacggctttttttcgccaacatggatgcacagccaatgatgccaacaccaaatataatagccgagctgcccagatgtaccgggagaagatccggcagctggggagtgcggccctggctaggcatggcactgatctttggatagacaacatgagtagtgccgttcctaatcactccccagagaagaaggactctgatttcttcacagaacacactcaaccccctgcctgggatgcgccagccactgagccttcagggacccagcagccagccccgtctacagagagcagtggcctggcacagccggagcatggccccaacacagacctgcttggcacctcacccaaagcctcactggagtccgtgtatctgtcagctaaaggggcccttcctgccagagaactgaaaagctccatcattggcaagaagaagccagcagcagctaagaaagggctgggtgccaagaaaggcctaggggcccagaaggtgagcagc

SEQ ID NO: 105705 - DNA, 534 bp, Homo sapiens
  Payload ID: 722
  Gene Symbol: ARFGAP2
  Gene Name: ADP-ribosylation factor GTPase activating protein 2
  ENST ID: ENST00000530596
  CDS Start-End: 16-534
tgggaaggagagaaaatggcggcggagccgaacaagaccgaaatccagactctttttaagaggcttcgcgcagttccaaccaacaaggcctgtttcgactgcggcgccaagaatccgagttgggccagcatcacgtacggtgttttcttgtgcattgactgttccggggtgcaccgctccctgggcgtccatctgagcttcatcaggtccacagagttggattccaactggaactggttccagctgaggtgtatgcagacggctttttttcgccaacatggatgcacagccaatgatgccaacaccaaatataatagccgagctgcccagatgtaccgggagaagatccggcagctggggagtgcggccctggctaggcatggcactgatctttggatagacaacatgagtagtgccgttcctaatcactccccagagaagaaggactctgatttcttcacagaacacactcaaccccctgcctgggatgcgccagccactgagccttcagggacccagcagccagccccgtct

SEQ ID NO: 105706 - DNA, 578 bp, Homo sapiens
  Payload ID: 722
  Gene Symbol: ARFGAP2
  Gene Name: ADP-ribosylation factor GTPase activating protein 2
  ENST ID: ENST00000528041
  CDS Start-End: 27-359
gcggttgtgtctgggaaggagagaaaatggcggcggagccgaacaagaccgaaatccagactctttttaagaggcttcgcgcagttccaaccaacaaggcctgtttcgactgcggcgccaagaatccgagttgggccagcatcacgtacggtgttttcttgtgcattgactgttccggggtgcaccgctccctgggcgtccatctgagcttcatcagacggctttttttcgccaacatggatgcacagccaatgatgccaacaccaaatataatagccgagctgcccagatgtaccgggagaagatccggcagctggggagtgcggccctggctaggcatggcactgatctttggatagacaacatgagtagtgccgttcctaatcactccccagagaagaaggactctgatttcttcacagaacacactcaagagtggctcaccgaggcatctgtgatctggcctccttttcagccccctgcctgggatgcgccagccactgagccttcagggacccagcagccagccccgtctacagagagcagtggcctggcacagccggagcatggccccaaca

SEQ ID NO: 105707 - DNA, 940 bp, Homo sapiens
  Payload ID: 722
  Gene Symbol: ARFGAP2
  Gene Name: ADP-ribosylation factor GTPase activating protein 2
  ENST ID: ENST00000532478
  CDS Start-End: 1-360
cggagccgaacaagaccgaaatccagactctttttaagaggcttcgcgcagttccaaccaacaaggtccacagagttggattccaactggaactggttccagctgaggtgtatgcaggtcggcgggaatgccaatgcgacggctttttttcgccaacatggatgcacagccaatgatgccaacaccaaatataatagccgagctgcccagatgtaccgggagaagatccggcagctggggagtgcggccctggctaggcatggcactgatctttggatagacaacatgagtagtgccgttcctaatcactccccagagaagaaggactctgatttcttcacagaacacactcaaaactgaaaagctccatcattggcaagaagaagccagcagcagctaagaaagggctgggtgccaagaaaggcctaggggcccagaaggtgagcagccagagcttcagtgagattgagcggcaggctcaggtggcagagaagctccgtgagcagcaggcagccgatgccaagaagcaggcggaggagtccatggtcgcctccatgcgtctggcctaccaggagctccagattgatcgtaagaaagaggaaaagaagctacagaatctggaagggaagaagcgagagcaggcagaaaggttgggcatgggcttggtatcccgaagctctgtctcccactccgtgctgtctgagatgcaggtgattgagcaggaaaccccagtgagtgcaaaatcctctcgctcgcagctggacttgtttgacgatgttggtactttcgcctctggacccccaaagtacaaggacaatcccttttccttaggggaaagctttggctcccgctgggatacagatgctgcctggggtatggacagggtagaggagaaggagccagaagtgaccatctcaagcatccggcctatttcagaaag

SEQ ID NO: 105708 - DNA, 474 bp, Homo sapiens
  Payload ID: 722
  Gene Symbol: ARFGAP2
  Gene Name: ADP-ribosylation factor GTPase activating protein 2
  ENST ID: ENST00000526342
  CDS Start-End: 7-474
gagaaaatggcggcggagccgaacaagaccgaaatccagactctttttaagaggcttcgcgcagttccaaccaacaaggcctgtttcgactgcggcgccaagaatccgagttgggccagcatcacgtacggtgttttcttgtgcattgactgttccggggtgcaccgctccctgggcgtccatctgagcttcatcaggtacaaggacaatcccttttccttaggggaaagctttggctcccgctgggatacagatgctgcctggggtatggacagggtagaggagaaggagccagaagtgaccatctcaagcatccggcctatttcagaaagagccacaaaccggagggaagtggagagccggagctcaggcctcgagtctagtgaggcgcgtcagaaattcgcaggagccaaagccatctcatctgacatgttctttgggcgggaggtggatgcagagtatgaggccaggtct

SEQ ID NO: 105709 - DNA, 213 bp, Homo sapiens
  Payload ID: 722
  Gene Symbol: ARFGAP2
  Gene Name: ADP-ribosylation factor GTPase activating protein 2
  ENST ID: ENST00000629231
  CDS Start-End: 1-213
atggcggcggagccgaacaagaccgaaatccagactctttttaagaggcttcgcgcagttccaaccaacaaggcctgtttcgactgcggcgccaagaatccgagttgggccagcatcacgtacggtgttttcttgtgcattgactgttccggggtgcaccgctccctgggcgtccatctgagcttcatcagctgggtgccaagaaaggcctag

SEQ ID NO: 105710 - DNA, 2613 bp, Homo sapiens
  Payload ID: 722
  Gene Symbol: ARFGAP2
  Gene Name: ADP-ribosylation factor GTPase activating protein 2
  ENST ID: ENST00000627920
  CDS Start-End: 273-1430
actacgcgcgcgaggaggtttgggccggtccgcgcgccgtcgccccgccccggctgcggattggcccggcgcggcgttgattcttgcggccgcggttgtcgtcgccgcccccgtcccgccggctgcccattggtccagatcggactccaatcaccccacccctcggctggcccaggcaccgctgaggccggcctggtgagcccgccctccccgccgtggattggcccgcggcgggacccgtcagccgcggttgtgtctgggaaggagagaaaatggcggcggagccgaacaagaccgaaatccagactctttttaagaggcttcgcgcagttccaaccaacaaggcctgtttcgactgcggcgccaagaatccgagttgggccagcatcacgtacggtgttttcttgtgcattgactgttccggggtgcaccgctccctgggcgtccatctgagcttcatcaggtccacagagttggattccaactggaactggttccagctgaggtgtatgcaggtcggcgggaatgccaatgcgctgggtgccaagaaaggcctaggggcccagaaggtgagcagccagagcttcagtgagattgagcggcaggctcaggtggcagagaagctccgtgagcagcaggcagccgatgccaagaagcaggcggaggagtccatggtcgcctccatgcgtctggcctaccaggagctccagattgatcgtaagaaagaggaaaagaagctacagaatctggaagggaagaagcgagagcaggcagaaaggttgggcatgggcttggtatcccgaagctctgtctcccactccgtgctgtctgagatgcaggtgattgagcaggaaaccccagtgagtgcaaaatcctctcgctcgcagctggacttgtttgacgatgttggtactttcgcctctggacccccaaagtacaaggacaatcccttttccttaggggaaagctttggctcccgctgggatacagatgctgcctggggtatggacagggtagaggagaaggagccagaagtgaccatctcaagcatccggcctatttcagaaagagccacaaaccggagggaagtggagagccggagctcaggcctcgagtctagtgaggcgcgtcagaaattcgcaggagccaaagccatctcatctgacatgttctttgggcgggaggtggatgcagagtatgaggccaggtctcggctgcagcagctctcaggcagcagtgccatcagctcttcagacctctttggggacatggatggagctcacggagcaggaagtgtatctctggggaacgtgctgcctacagcggacattgcccagtttaagcagggtgtcaagtctgtggctgggaaaatggctgtgctggccaatggtgtgatgaattccttgcaggatcgctacggttcctactgatccgagctctgtgactcaggcttacgatggtgacggcaacaagaactccacagttcccaggctggggatgctttgccttgtggaagctggggaggatttgttacttcgtatgtgtggtgtgtgtgtggggtggcctttgaggcgctcactcctgtgaggggaatggtcagtaccagcccttgtcctctgcctgtggactgagccctttattccctctcacaccaccctccgtgtgttagactcttgtccttctgtcctgcccccacagctgctgctcacttatcctgccatactgggaaagggggttcccccacgatggcttattctgggtccagactttccccaggtagggaaagcggaaggtagaaggctttttttgctggctctagggttcttctagttcgaggccttgggtccccatcctctggaaccagggggaggcctggaaggagttcactgtagacccgtcccatggggaaagaggctgcggacttgctgctgctgctgctgccagtggcctcttctgggtgccaggagaggggaaggacctttgtctgggcgttaccaagggctggaaactttacctggtacctaaaggtttcatttgggatcagaccggagacccttgggttctcccgtctcaccacccctttctacagtaagcacttggaagattgtttcagggtgtctcagggtccctctgtaccatctgctgtggaatgcaggaccctctgtgacattctttatcccttcttccccgggttggtggccatggagggtcttgtctgctgtgattcgactctggatgctgtgagcttgatgctggccagggaagcagaggatgtgagaggcagaggcaggctcctggggctgagctccttcctctgcatcattctgggcttggcctggacagcacccgccagtgagagctgtgggcctcaccctctggcagctgagccaagcactgtcattcttggtgccatcttcccctgccgcaccggcagtctcagcccagcccccacctttgggttgtaggttgggctcccaagcaacacagaccactcttccccttgcccctcccccagagggacttgactttctttctggactgtttgtattgaaacaaagtggtgtcaaaataaagcccctgcagggcctggctccctgttggtctgagtgaagc

SEQ ID NO: 105711 - DNA, 2857 bp, Homo sapiens
  Payload ID: 723
  Gene Symbol: ARFGAP3
  Gene Name: ADP-ribosylation factor GTPase activating protein 3
  Uniprot ID: Q9NP61
  ENST ID: ENST00000263245
  CDS Start-End: 221-1771
gggccagcggcgcggctgaagcgagggcggggagggaaagcgagcggcgcctgcgccccggcggtggacgggcccggtcgtgggcggggattggggcggagcctgaccgttacgcgcagccccgcccccgcggcctcgtcgctcctgctgaggcggtagccgcttttcgtcgactcttaccggttggctgggccagctgcgccgcggctcacagctgacgatgggggaccccagcaagcaggacatcttgaccatcttcaagcgcctccgctcggtgcccactaacaaggtgtgttttgattgtggtgccaaaaatcccagctgggcaagcataacctatggagtgttcctttgcattgattgctcagggtcccaccggtcacttggtgttcacttgagttttattcgatctacagagttggattccaactggtcatggtttcagttgcgatgcatgcaagtcggaggaaacgctagtgcatcttccttttttcatcaacatgggtgttccaccaatgacaccaatgccaagtacaacagtcgtgctgctcagctctatagggagaaaatcaaatcgctcgcctctcaagcaacacggaagcatggcactgatctgtggcttgatagttgtgtggttccacctttgtcccctccaccaaaggaggaagatttttttgcctctcacgtttctcctgaggtgagtgacacagcgtgggcatcagcaatagcagaaccatcttctttaacatcaaggcctgtggaaaccactttggaaaataatgaaggtggacaagagcaaggaccaagtgtggaaggtcttaatgtaccaacaaaggctactttagaggtatcctctatcataaaaaagaaaccaaatcaagctaaaaaaggccttggggccaaaaaaggaagtttgggagctcagaaactggcaaacacatgctttaatgaaattgaaaaacaagctcaagctgcggataaaatgaaggagcaggaagacctggccaaggtggtatctaaagaagaatcaattgtttcatcattacgattagcctataaggatcttgaaattcaaatgaagaaagacgaaaagatgaacattagtggcaaaaaaaatgttgactcagacagactcggcatgggatttggaaattgcagaagtgttatttcacattcagtgacttcagatatgcagaccatagagcaggaatcacccattatggcaaaaccaagaaaaaagtataatgatgacagtgacgattcatattttacttccagctcaagttactttgacgagccagtggagttaaggagcagttctttctctagctgggatgacagttcagattcctattggaaaaaagagaccagcaaagatactgaaacagttctgaaaaccacaggctattcagacagacctactgctcgccgcaagccagattatgagccagttgaaaatacagatgaggcccagaagaagtttggcaatgtcaaggccatttcatcagatatgtattttggaagacaatcccaggctgattatgagaccagggcccgcctagagaggctgtcggcaagttcctccataagctcggctgatctgttcgaggagccgaggaagcagccagcagggaactacagcctgtccagtgtgctgcccaacgcccccgacatggcgcagttcaagcagggagtgagatcggttgctggaaaactctccgtctttgctaatggagtcgtgacttcaattcaggatcgctacggttcttaatactgaagtcatgatgtgtatttcctggagaaattcctctttaaatgaacaagtaaccacatctcaggcggcagtgaagtccagatagttttgcagattgttttgctactttttcatatggtatatgtttctgatttttaatatttcttttgagaaattctgagttctgatgtaggagctttcctgtgatttctgtttcacgttccttcctgtcacaccctcctttggcgtctctgtgtatatccttgctttattttcttggaacctttgatttcaacactgagggcctggagacctcggctcctcctgctcctgaaccaggaggcttcatgtgggggaggaggagaggtctccatgtgacacatgggctcagggctgccagaatcagcggatgctggatgggcctgcagaaacaacactcaccacacacacttccttcaaaagaccaaaagtgactggtgtctcgtgtgacagattgcttcatttatgtttctacatagtaaggtgactgccaaataatatttgaagtcatctgtctctttgtaaattattttatatgacctataaatttaaaaatgtttttcagtgagtgcttttaacaaacttaagcttctgccctgccaagggaattaatgttatcttgtgaaaggtgttgctgtttgaattgatgagaaatggaagatgagaactccctaagagttctcataataaatcatctcatcacaaatcaatacggtatacagagttaaagtggaatgaggtaagaagatacagctacagaaaatagttgcgtgtatgggagaacagtcattgtaattgggtagttttgttaataaatatttttaaatcttgcttttcagaaattaccgaatgtgtataaacaaataaagaaaaataatttagctgtgttttagacagcattagaatatattgttcagcacagtaaaatatatttgaaatttgataagccaaaaatgtggttttgaatgaatattttgtgaatctttcttaaaagctcaaatttgtagacttctaaatagaataaacacttgcagcagatggcattgcctacatttttccctgaaa

SEQ ID NO: 105712 - DNA, 1650 bp, Homo sapiens
  Payload ID: 723
  Gene Symbol: ARFGAP3
  Gene Name: ADP-ribosylation factor GTPase activating protein 3
  Uniprot ID: Q9NP61
  ENST ID: ENST00000437119
  CDS Start-End: 58-1476
ttttcgtcgactcttaccggttggctgggccagctgcgccgcggctcacagctgacgatgggggaccccagcaagcaggacatcttgaccatcttcaagcgcctccgctcggtgcccactaacaaggtgtgttttgattgtggtgccaaaaatcccagctgggcaagcataacctatggagtgttcctttgcattgattgctcagggtcccaccggtcacttggtgttcacttgagttttattcgatctacagagttggattccaactggtcatggtttcagttgcgatgcatgcaagtcggaggaaacgctagtgcactgtggcttgatagttgtgtggttccacctttgtcccctccaccaaaggaggaagatttttttgcctctcacgtttctcctgaggtgagtgacacagcgtgggcatcagcaatagcagaaccatcttctttaacatcaaggcctgtggaaaccactttggaaaataatgaaggtggacaagagcaaggaccaagtgtggaaggtcttaatgtaccaacaaaggctactttagaggtatcctctatcataaaaaagaaaccaaatcaagctaaaaaaggccttggggccaaaaaaggaagtttgggagctcagaaactggcaaacacatgctttaatgaaattgaaaaacaagctcaagctgcggataaaatgaaggagcaggaagacctggccaaggtggtatctaaagaagaatcaattgtttcatcattacgattagcctataaggatcttgaaattcaaatgaagaaagacgaaaagatgaacattagtggcaaaaaaaatgttgactcagacagactcggcatgggatttggaaattgcagaagtgttatttcacattcagtgacttcagatatgcagaccatagagcaggaatcacccattatggcaaaaccaagaaaaaagtataatgatgacagtgacgattcatattttacttccagctcaagttactttgacgagccagtggagttaaggagcagttctttctctagctgggatgacagttcagattcctattggaaaaaagagaccagcaaagatactgaaacagttctgaaaaccacaggctattcagacagacctactgctcgccgcaagccagattatgagccagttgaaaatacagatgaggcccagaagaagtttggcaatgtcaaggccatttcatcagatatgtattttggaagacaatcccaggctgattatgagaccagggcccgcctagagaggctgtcggcaagttcctccataagctcggctgatctgttcgaggagccgaggaagcagccagcagggaactacagcctgtccagtgtgctgcccaacgcccccgacatggcgcagttcaagcagggagtgagatcggttgctggaaaactctccgtctttgctaatggagtcgtgacttcaattcaggatcgctacggttcttaatactgaagtcatgatgtgtatttcctggagaaattcctctttaaatgaacaagtaaccacatctcaggcggcagtgaagtccagatagttttgcagattgttttgctactttttcatatggtatatgtttctgatttttaatatttcttttgagaaattctgagttctgatgta

SEQ ID NO: 105713 - DNA, 542 bp, Homo sapiens
  Payload ID: 723
  Gene Symbol: ARFGAP3
  Gene Name: ADP-ribosylation factor GTPase activating protein 3
  ENST ID: ENST00000454099
  CDS Start-End: 87-542
ctcgtcgctcctgctgaggcggtagccgcttttcgtcgactcttaccggttggctgggccagctgcgccgcggctcacagctgacgatgggggaccccagcaagcaggacatcttgaccatcttcaagcgcctccgctcggtgcccactaacaaggtgtgttttgattgtggtgccaaaaatcccagctgggcaagcataacctatggagtgttcctttgcattgattgctcagggtcccaccggtcacttggtgttcacttgagttttattcgatctacagagttggattccaactggtcatggtttcagttgcgatgcatgcaagtcggaggaaacgctagtgcagtgagtgacacagcgtgggcatcagcaatagcagaaccatcttctttaacatcaaggcctgtggaaaccactttggaaaataatgaaggtggacaagagcaaggaccaagtgtggaaggtcttaatgtaccaacaaaggctactttagaggtatcctctatcataaaaaagaaaccaaatcaagctaaaaaaggc

SEQ ID NO: 105714 - DNA, 817 bp, Homo sapiens
  Payload ID: 723
  Gene Symbol: ARFGAP3
  Gene Name: ADP-ribosylation factor GTPase activating protein 3
  ENST ID: ENST00000453516
  CDS Start-End: 1-817
tctcgccttgtttcaggtgagtgacacagcgtgggcatcagcaatagcagaaccatcttctttaacatcaaggcctgtggaaaccactttggaaaataatgaaggtggacaagagcaaggaccaagtgtggaaggtcttaatgtaccaacaaaggctactttagaggtatcctctatcataaaaaagaaaccaaatcaagctaaaaaaggccttggggccaaaaaaggaagtttgggagctcagaaactggcaaacacatgctttaatgaaattgaaaaacaagctcaagctgcggataaaatgaaggagcaggaagacctggccaaggtggtatctaaagaagaatcaattgtttcatcattacgattagcctataaggatcttgaaattcaaatgaagaaagacgaaaagatgaacattagtggcaaaaaaaatgttgactcagacagactcggcatgggatttggaaattgcagaagtgttatttcacattcagtgacttcagatatgcagaccatagagcaggaatcacccattatggcaaaaccaagaaaaaagtataatgatgacagtgacgattcatattttacttccagctcaagacctactgctcgccgcaagccagattatgagccagttgaaaatacagatgaggcccagaagaagtttggcaatgtcaaggccatttcatcagatatgtattttggaagacaatcccaggctgattatgagaccagggcccgcctagagaggctgtcggcaagttcctccataagctcggctgatctgttcgaggagccgaggaagcagccagca

SEQ ID NO: 105715 - DNA, 501 bp, Homo sapiens
  Payload ID: 723
  Gene Symbol: ARFGAP3
  Gene Name: ADP-ribosylation factor GTPase activating protein 3
  ENST ID: ENST00000435208
  CDS Start-End: 226-501
cctcaacccgcactgccatctctccatgaacgtgacacaaaagcccttggtttcagaaagccagtttccgggcaaagaaagctttccacccagggcctggcgtgagctgagggcaagaattaaaaagagtcgggcgcggcggctcacgtctgtaatcccagcaatttggaaggccgaagtgggtggatcacctgaagtcaggagttcgagaccagcctgggcaacatggtgtgttttgattgtggtgccaaaaatcccagctgggcaagcataacctatggagtgttcctttgcattgattgctcagggtcccaccggtcacttggtgttcacttgagttttattcgatctacagagttggattccaactggtcatggtttcagttgcgatgcatgcaagtcggaggaaacgctagtgcatcttccttttttcatcaacatgggtgttccaccaatgacaccaatgccaagtacaacagtcgtgctgctcagctctatagg

SEQ ID NO: 105716 - DNA, 7225 bp, Homo sapiens
  Payload ID: 724
  Gene Symbol: ARFGEF1
  Gene Name: ADP-ribosylation factor guanine nucleotide-exchange factor 1 (brefeldin A-inhibited)
  Uniprot ID: Q9Y6D6
  ENST ID: ENST00000262215
  CDS Start-End: 391-5940
gcggtgcctctgagagccgccgccacctcgtccctcagttcccggcagacagccgcccgggccgggctccctcaccgccaccagggccggagggacgagtgagaggggcggccgggacgcgacccccgggccgggagaagcggaggcccgacgggcgcggccctcgaggtacggcttcttgggggcggcgaggacctcgacgcccttcgccgacaccgcggctggtcccgctcgcccgccccttcctgatcctgccgctgccctccacgcctccaatcccccacctccaccccctctcctttctctcttctcttccttcctctcctcctcctcccctccagccgctgggagccgcgggtcggacgagccgccgcctccttctctgcgtccatgtatgaggggaagaagacgaagaacatgttcctgacccgggctctggagaagatattggccgacaaggaagtgaagaaggcgcatcactcccagctgcgcaaagcttgcgaggtggcgttagaggaaataaaagcggaaactgaaaaacagagtcctcctcatggagaagcaaaagctggatcaagcacccttccaccagtgaaatcaaagacaaattttattgaagcagacaagtacttcttgccttttgagttggcatgccagtccaaatgtcctcgcatagttagtacatctctagattgcttacagaaacttattgcttatgggcacttgactggcaatgctccagatagtacaacaccaggcaaaaaattaattgatagaattattgaaacaatatgtggctgctttcagggccctcagacagatgaaggagttcagctgcagataataaaggctttacttactgcagtaacatcacaacacatagaaattcatgaagggactgtactgcaagctgtgagaacatgttacaatatctacttagcaagcaaaaatctcatcaatcagacaacagccaaagctactctcactcagatgctaaatgttatctttgcacgcatggaaaaccaagcattacaggaagcaaaacaaatggaaaaagaaaggcatcggcagcatcatcatctgttacagtctccagtaagccatcacgagcctgaatcacctcaacttagatatttgccacctcagactgttgatcatatatcccaagaacacgaaggggaccttgacctccatacaaatgatgtagataaaagtcttcaggatgacacagagcctgaaaatggatctgatatttccagtgcagaaaatgaacagactgaagctgatcaggcaactgcagctgaaacattatctaaaaatgaagtgttatatgacggagaaaaccatgattgtgaggaaaagccacaagacattgtacagaacattgtagaagaaatggtgaacattgttgttggagatatgggagaagggactactataaatgcaagtgcagatggcaacattggaactatagaggatggtagtgacagtgaaaatattcaagcaaatggaattccaggaacaccaatttctgttgcatatacaccatccttacctgatgatagattgtcagtctcttccaatgatactcaggaatctggaaattcttcaggaccttcacctggtgctaagttttcccacattttacaaaaggatgcctttctagtattcaggtcattgtgtaaactgtcaatgaaaccactgtcagatggaccaccagatccaaagtctcatgaactacgatccaagattctttcattgcagttacttctatccattctgcagaatgcaggacctattttcaggacaaatgagatgtttattaatgctattaagcagtatctttgtgttgcactctcaaaaaatggagtctcatctgttccagaggtttttgagctttctctttctatatttcttactttgttgtcaaatttcaagacacatctgaagatgcaaattgaggtgttctttaaagaaattttcttatacattttggaaacttctaccagctcatttgatcacaaatggatggttattcagacactgacgaggatttgtgcagatgctcagagtgtagtggatatttatgtaaactatgactgtgacttaaatgcagccaatatatttgaaagactagtaaatgatctatcaaaaattgctcaaggaaggggcagtcaagaacttggtatgagtaatgttcaggaattgagcctgaggaaaaaaggtttagaatgcttagtgtcgattttgaagtgtatggttgaatggagtaaggatcagtatgtgaatcccaactcccagacaactcttggtcaggaaaaaccctcagagcaagagatgagtgaaatcaaacaccctgagacaataaacagatacggaagtttaaattccctggagtcaacatcatcatcaggaataggcagctacagtacacagatgtctggcactgataatccagaacaatttgaggtcctaaagcaacaaaaagaaataatagaacaagggatagatttatttaataagaaaccaaagagaggaatacagtacctccaagaacaagggatgcttggcaccacacctgaagatattgcccaattcttacatcaagaggaaagattagactctactcaagtgggtgagttcctgggagataatgataaatttaacaaagaagtcatgtatgcatatgtggaccaacatgacttttcaggaaaagacttcgtttcagcccttcgtatgtttctagaaggatttcgtcttccaggggaagctcagaaaatcgatcgattaatggaaaaatttgctgcaagatacctagaatgcaaccaaggacaaactctctttgctagtgcggatacagcttatgttttggcttattcaattatcatgttgaccacagaccttcacagtccacaggtgaaaaataaaatgacaaaggaacaatacattaagatgaatagaggtatcaatgacagtaaagaccttcctgaagagtatctatcagccatctataatgaaatagctgggaaaaagatatcaatgaaagaaacaaaagaactaacaatccctacaaaatcaagtaaacagaatgtagccagtgaaaaacaaagaagacttctgtataacttagaaatggagcagatggccaagacagctaaagcactcatggaggccgtgagccatgttcaggcaccctttacaagtgcaacacatttggagcatgtgaggcccatgtttaagttggcttggacgccttttctggctgcattcagtgtgggtctacaagattgtgatgatactgaagtagcctctctttgcctggaaggtataagatgtgcaatcagaattgcatgcattttcagcattcagctggagagagatgcatatgtccaggcactagcaagatttaccttactcacagtgagttccggtattactgaaatgaaacagaagaacattgacacaataaaaacacttatcacagtggctcatacagatggaaattatttaggaaattcatggcatgagattctgaagtgcatcagtcagttggagctggcacagcttataggaactggagtgaaacctcgatacatttctggaacagtgcgaggcagagaaggatctcttactggaacaaaagatcaggctcctgatgaatttgtgggtttagggctagttggaggaaatgtggactggaaacagatagcaagtattcaggaatccattggagaaaccagttctcagagtgttgttgttgctgtagatagaatattcacaggatctacaaggctagatggaaatgccattgtggattttgtccgttggctctgtgctgtgtctatggatgaattactttccacgacacacccaagaatgtttagtctacaaaaaatagtagaaatatcatattacaacatgggaagaataagattacagtggtctcgaatttgggaagttattggagatcattttaataaggttgggtgtaatcctaatgaagatgtagctatttttgcagtagactccttgaggcagttgtcaatgaagttcttagagaaaggggagcttgctaacttcagattccagaaggatttcttaagaccttttgaacatataatgaaacggaacaggtctccaacaattcgagatatggttgtacggtgtatagcacagatggttaattctcaagctgctaacattcgatctggatggaagaacattttctctgtatttcatctagctgcatctgatcaagatgaaagcatagtggaacttgcattccaaacaaccgggcacattgtcacccttgtatttgaaaaacactttccagcgaccattgattctttccaggatgcagtgaagtgtttgtctgaatttgcgtgcaatgcagctttcccagacacaagtatggaagcaattcgacttattcgccattgtgcaaaatatgtgtctgatagacctcaggctttcaaggaatacacaagcgatgatatgaacgtagcacctgaagacagggtgtgggtgagaggatggttcccaattctctttgagttatcctgtatcatcaatagatgcaaattagatgtaagaaccaggggtttaacagtaatgtttgaaataatgaaaacatatggccacacttatgagaaacactggtggcaggatttatttagaattgttttcagaatctttgacaatatgaaattgccagaacaacagacagagaaagctgaatggatgacaacaacttgcaatcatgcactttatgcaatctgtgatgtattcactcagtatttagaagtactcagtgatgtacttttggatgacatttttgctcagctctactggtgtgtgcagcaagacaatgagcagttagcgcgatctggtacaaactgtttagagaatgttgttattctgaatggtgaaaaatttaccctagaaatctgggataaaacttgcaactgcacactggatatcttcaaaaccacaatcccacatgcgctgttgacctggcgacccaattctggagaaactgcccccccacctccatctcctgtaagtgaaaagccattggatacaatatcacagaagtctgtagatattcatgattctattcaaccaaggtctgtggataacagaccacaagcaccactggtttctgcgtctgctgttaatgaagaagtcagcaaaattaaatctacagcaaaatttccagaacaaaaattgtttgctgccctgttgattaaatgtgttgtgcagctggaactcatccagactatcgacaacattgtcttcttcccagccacaagtaagaaagaagatgcagaaaacttagctgcagcacagagagatgcggtggactttgatgttcgcgttgatactcaagaccaaggaatgtaccgctttttaacatcacaacaactttttaagctactggactgcttattagagtcacatagatttgcaaaagcgtttaattccaacaacgaacagaggactgccctgtggaaagcaggattcaaaggcaaatccaagcccaaccttctgaagcaggagaccagcagcctggcctgtgggctgcgcattctcttccggatgtacatggatgagagccgcgttagtgcctgggaggaggtccagcagaggcttttgaatgtctgcagtgaagcactaagttacttcctcactctaacatcagaaagtcatcgagaagcctggactaacttactgcttttgtttctaactaaagttctaaagataagtgataataggtttaaagctcatgcatcattctactaccctctcttatgtgaaattatgcaatttgacttgattcctgaacttcgtgctgttcttagaagattttttctgcgaatcggagtagtttttcagatatcacaaccacctgaacaggaacttggaataaacaagcaatgatgggaacttaatatttttgttggcatttacatccctctgctctttaaaaggacgctggagctgaggtttcctacctgaaaaatgatttctctggattgcagtgtctgagttactggtaaagatgcttagaagtcttactcaaacttgcaacactccagtcccttttagtgctggtggattttgtgtgttatattggcctcatgttgagcagaaagcctgtttaaacagtgtcagctcatgctcacgggtccttccctgtcttccacggcaggaaaagccccacgtttttggcaggtgtggaagtgaaacttacccaaagaactatagatgtaaagattgaacttctacaagaagtacaactcaggagagctgtattttgaaggataaaatgtttataattggggagtggggagagaagaagaaattattgttcatggtaaaagatatttagcaactatggtattcttattctgaagatttttgcacactcaggctatctgagatactggtaatcatcctgtgaaaaatgtacagagatgcaggtctgtaatataaaaatcttaaaacattatatagttcttcctgcactgttttctttattttcttattcatttgctaaatacccataatattttgtcaaatgcactaaacatttgggtggaactttcttttttattttatagggatttttagttttgccctttttggtaggtggtgattttgaggctgtaacatgcccagaagctgttgtggccgacacttcaacaatagggaaaaaaaggtagaaaatatccctactgacagtaactacctgtcacatatttctcttaggacttttaaagatgagccattaaaatagaatgatcctttatggaccaaaacttgaatcactgcaaaatgaatccagattgctgtcattttcttttcttttgggtggtggggcttgatgtagattttactctatgtacagaatttaacgttgaatatattaaaataacaaatctggcatggtttgcggaggttagatttactggaaatgtattcatactgtgaattgtgctctgatggttaaaagacaagattgtcaagcattccgtattaacagtggatgtagaaaattttttcagatggacaaaatgtatatggtacagatgtaaagttttctatgtaaaaaattctgtacaactttctgtacaatattgattcccatctggcatattctaatcaggttataggtcaataaagtttttgaattatttcatcagtgcaatcaaaacctgtataa

SEQ ID NO: 105717 - DNA, 5882 bp, Homo sapiens
  Payload ID: 724
  Gene Symbol: ARFGEF1
  Gene Name: ADP-ribosylation factor guanine nucleotide-exchange factor 1 (brefeldin A-inhibited)
  ENST ID: ENST00000520381
  CDS Start-End: 1-3838
aattgaggtgttctttaaagaaattttcttatacattttggaaacttctaccagctcatttgatcacaaatggatggttattcagacactgacgaggatttgtgcagatgctcagagtgtagtggatatttatgtaaactatgactgtgacttaaatgcagccaatatatttgaaagactagtaaatgatctatcaaaaattgctcaaggaaggggcagtcaagaacttggtatgagtaatgttcaggaattgagcctgaggaaaaaaggtttagaatgcttagtgtcgattttgaagtgtatggttgaatggagtaaggatcagtatgtgaatcccaactcccagacaactcttggtcaggaaaaaccctcagagcaagagatgagtgaaatcaaacaccctgagacaataaacagatacggaagtttaaattccctggagtcaacatcatcatcaggaataggcagctacagtacacagatgtctggcactgataatccagaacaatttgaggtcctaaagcaacaaaaagaaataatagaacaagggatagatttatttaataagaaaccaaagagaggaatacagtacctccaagaacaagggatgcttggcaccacacctgaagatattgcccaattcttacatcaagaggaaagattagactctactcaagtgggtgagttcctgggagataatgataaatttaacaaagaagtcatgtatgcatatgtggaccaacatgacttttcaggaaaagacttcgtttcagcccttcgtatgtttctagaaggatttcgtcttccaggggaagctcagaaaatcgatcgattaatggaaaaatttgctgcaagatacctagaatgcaaccaaggacaaactctctttgctagtgcggatacagcttatgttttggcttattcaattatcatgttgaccacagaccttcacagtccacaggtgaaaaataaaatgacaaaggaacaatacattaagatgaatagaggtatcaatgacagtaaagaccttcctgaagagtatctatcagccatctataatgaaatagctgggaaaaagatatcaatgaaagaaacaaaagaactaacaatccctacaaaatcaagtaaacagaatgtagccagtgaaaaacaaagaagacttctgtataacttagaaatggagcagatggccaagacagctaaagcactcatggaggccgtgagccatgttcaggcaccctttacaagtgcaacacatttggagcatgtgaggcccatgtttaagttggcttggacgccttttctggctgcattcagtgtgggtctacaagattgtgatgatactgaagtagcctctctttgcctggaaggtataagatgtgcaatcagaattgcatgcattttcagcattcagctggagagagatgcatatgtccaggcactagcaagatttaccttactcacagtgagttccggtattactgaaatgaaacagaagaacattgacacaataaaaacacttatcacagtggctcatacagatggaaattatttaggaaattcatggcatgagattctgaagtgcatcagtcagttggagctggcacagcttataggaactggagtgaaacctcgatacatttctggaacagtgcgaggcagagaaggatctcttactggaacaaaagatcaggctcctgatgaatttgtgggtttagggctagttggaggaaatgtggactggaaacagatagcaagtattcaggaatccattggagaaaccagttctcagagtgttgttgttgctgtagatagaatattcacaggatctacaaggctagatggaaatgccattgtggattttgtccgttggctctgtgctgtgtctatggatgaattactttccacgacacacccaagaatgtttagtctacaaaaaatagtagaaatatcatattacaacatgggaagaataagattacagtggtctcgaatttgggaagttattggagatcattttaataaggttgggtgtaatcctaatgaagatgtagctatttttgcagtagactccttgaggcagttgtcaatgaagttcttagagaaaggggagcttgctaacttcagattccagaaggatttcttaagaccttttgaacatataatgaaacggaacaggtctccaacaattcgagatatggttgtacggtgtatagcacagatggttaattctcaagctgctaacattcgatctggatggaagaacattttctctgtatttcatctagctgcatctgatcaagatgaaagcatagtggaacttgcattccaaacaaccgggcacattgtcacccttgtatttgaaaaacactttccagcgaccattgattctttccaggatgcagtgaagtgtttgtctgaatttgcgtgcaatgcagctttcccagacacaagtatggaagcaattcgacttattcgccattgtgcaaaatatgtgtctgatagacctcaggctttcaaggaatacacaagcgatgatatgaacgtagcacctgaagacagggtgtgggtgagaggatggttcccaattctctttgagttatcctgtatcatcaatagatgcaaattagatgtaagaaccaggggtttaacagtaatgtttgaaataatgaaaacatatggccacacttatgagaaacactggtggcaggatttatttagaattgttttcagaatctttgacaatatgaaattgccagaacaacagacagagaaagctgaatggatgacaacaacttgcaatcatgcactttatgcaatctgtgatgtattcactcagtatttagaagtactcagtgatgtacttttggatgacatttttgctcagctctactggtgtgtgcagcaagacaatgagcagttagcgcgatctggtacaaactgtttagagaatgttgttattctgaatggtgaaaaatttaccctagaaatctgggataaaacttgcaactgcacactggatatcttcaaaaccacaatcccacatgcgctgttgacctggcgacccaattctggagaaactgcccccccacctccatctcctgtaagtgaaaagccattggatacaatatcacagaagtctgtagatattcatgattctattcaaccaaggtctgtggataacagaccacaagcaccactggtttctgcgtctgctgttaatgaagaagtcagcaaaattaaatctacagcaaaatttccagaacaaaaattgtttgctgccctgttgattaaatgtgttgtgcagctggaactcatccagactatcgacaacattgtcttcttcccagccacaagtaagaaagaagatgcagaaaacttagctgcagcacagagagatgcggtggactttgatgttcgcgttgatactcaagaccaaggaatgtaccgctttttaacatcacaacaactttttaagctactggactgcttattagagtcacatagatttgcaaaagcgtttaattccaacaacgaacagaggactgccctgtggaaagcaggattcaaaggcaaatccaagcccaaccttctgaagcaggagaccagcagcctggcctgtgggctgcgcattctcttccggatgtacatggatgagagccgcgttagtgcctgggaggaggtccagcagaggcttttgaatgtctgcagtgaagcactaagttacttcctcactctaacatcagaaagtcatcgagaagcctggactaacttactgcttttgtttctaactaaagttctaaagataagtgataataggaccaaacggaccctgtgagcatggggctgccagtgaaaggaggatgcctgggaatgaaatcaatagaagagatgcagaaagcctacggaaaaacagcgtgctgatactatttgacacagcaatgattatttcttacctttggcaccttcctgcatttttattctgttcagcctcttctgctgctctcttagcagggcttgctgctgaatctctaaggtgtgatgatctcttggaggatccaggtacataaatttcagatcaactcgtgtttctgaatctggtataaaaaatatgttatataactaagttaaatgttgttttcaaatgggattttgtaaaacttcactgtaagtaacatgagtaacctaatttcaaaatcaaggaaatgatagaaatagtgaaacatcactaaagtcaaaggacagtaaaatagccacaaaactaaagaatatgaaattaatattctttaataagtgtcttttcacaaacttaccaacataaggaataccccagaacaagcagtggatgttgcattgtccatctctacctgtcctagccctgccaggatgccacccagaacacagactacgtgcaggtatatccaagcagatggtcacatggctatgactaaggcagccatgagacactgtaatcacggctgatctctaaaatatactggaaacgtgaaaaaataatgttactggccaattaatattttagtccttacaaatatcatgcagaaagcaagataaatgtagactggctggaacttgagggggaatgccatttctttttttttttttttcttgagacggagtcttgctctgtcgcccaggctggagtgcagtggcacggtcttggctcactgccagctctgcctcctgggttcatgccattctcctgcctcagtctcccaagtagctgggactacaagcacccaccactatgcccggctaatttttcttgtagtttttagtagagacgaggtttcactatgttggccaggctggtcttgaactcctgacctcgtgatccacacgcctcggcctctcaaagtgctgggattacaggcattagccactgtgcctggccaagaataaaaattttttaatcttgagaagaaacatacagttcatacatataaaaagccttgaaaatattattccctttgactcactaattacactgctggaatataaagaaatgatcctaaatatatatgtagttttatggtcctaaatatgtataaagctttatgatcagaaattatcaaaagaacaaaatagtgaaaatggttaacagccattttcagaagttaacagaagtttctggacacataaacttggattggtccctggcttcactgcttccaaactcattaaaaaaacaataccaaccaccaagtcatgggtgaatgagggcaagatgtagtaacacagggaaatgaacagcccaattctatggcttaaacctttttggtctcaagatcttttttacactcttaaaaattgaggaccccaaagagctttacttatgtatgtcacacacacacacgccatattagaaattaaaactaagagattcctaaaacacaagaatacacaaggacacattttgctagcttcaaagagatgaaatcattacatgtcatgtagtctctggccaatctatatacacatgagagaatgagaatgaaaaagacaaataatgtcttagtttataatacaaacagttttgacttcagaccaaactcctcatgagacccactgggttaacacaatgcctggcagatagtaagtaatcaatatttgatagcataaaaaataacagtatacgtaattgataatacgtgtaaatctaggtgaaaaacaatagagaaaattaaataaataacacaatttatctttttttttcttttaattatgctcagaaagactagaaaacatccaaaatgataatggtacttacatataggtagtttgactaaagtgatttttccttcttactatctttctgtattttgaaaatttgctataataaacagatagtattttcaaaagga

SEQ ID NO: 105718 - DNA, 571 bp, Homo sapiens
  Payload ID: 724
  Gene Symbol: ARFGEF1
  Gene Name: ADP-ribosylation factor guanine nucleotide-exchange factor 1 (brefeldin A-inhibited)
  ENST ID: ENST00000519436
  CDS Start-End: 218-571
gcggtgcctctgagagccgccgccacctcgtccctcagttcccggcagacagccgcccgggccgggctccctcaccgccaccagggccggagggacgagtgagaggggcggccgggacgcgacccccgggccgggagaagcggaggcccgacgggcgcggccctcgagccgctgggagccgcgggtcggacgagccgccgcctccttctctgcgtccatgtatgaggggaagaagacgaagaacatgttcctgacccgggctctggagaagatattggccgacaaggaagtgaagaaggcgcatcactcccagctgcgcaaagcttgcgaggtggcgttagaggaaataaaagcggaaactgaaaaacagagtcctcctcatggagaagcaaaagctggatcaagcacccttccaccagtgaaatcaaagacaaattttattgaagcagacaagtacttcttgccttttgagttggcatgccagtccaaatgtcctcgcatagttagtacatctctagattgcttacagaaacttattgcttatgggcacttgactggcaatgctccagat

SEQ ID NO: 105719 - DNA, 646 bp, Homo sapiens
  Payload ID: 724
  Gene Symbol: ARFGEF1
  Gene Name: ADP-ribosylation factor guanine nucleotide-exchange factor 1 (brefeldin A-inhibited)
  ENST ID: ENST00000518789
  CDS Start-End: 1-578
tgcgtctgctgttaatgaagaagtcagcaaaattaaatctacagcaactggaactcatccagactatcgacaacattgtcttcttcccagccacaagtaagaaagaagatgcagaaaacttagctgcagcacagagagatgcggtggactttgatgttcgcgttgatactcaagaccaaggaatgtaccgctttttaacatcacaacaactttttaagctactggactgcttattagagtcacatagatttgcaaaagcgtttaattccaacaacgaacagaggactgccctgtggaaagcaggattcaaaggcaaatccaagcccaaccttctgaagcaggagaccagcagcctggcctgtgggctgcgcattctcttccggatgtacatggatgagagccgcgttagtgcctgggaggaggtccagcagaggcttttgaatgtctgcagtgaagcactaagttacttcctcactctaacatcagaaagtcatcgagaagcctggactaacttactgcttttgtttctaactaaagttctaaagataagtgataataggaccaaacggaccctgtgagcatggggctgccagtgaaaggaggatgcctgggaatgaaatcaatagaagagatgcagaaagcctac

SEQ ID NO: 105720 - DNA, 2734 bp, Homo sapiens
  Payload ID: 724
  Gene Symbol: ARFGEF1
  Gene Name: ADP-ribosylation factor guanine nucleotide-exchange factor 1 (brefeldin A-inhibited)
  ENST ID: ENST00000518230
  CDS Start-End: 1-2477
taggaaattcatggcatgagattctgaagtgcatcagtcagttggagctggcacagcttataggaactggagtgaaacctcgatacatttctggaacagtgcgaggcagagaaggatctcttactggaacaaaagatcaggctcctgatgaatttgtgggtttagggctagttggaggaaatgtggactggaaacagatagcaagtattcaggaatccattggagaaaccagttctcagagtgttgttgttgctgtagatagaatattcacaggatctacaaggctagatggaaatgccattgtggattttgtccgttggctctgtgctgtgtctatggatgaattactttccacgacacacccaagaatgtttagtctacaaaaaatagtagaaatatcatattacaacatgggaagaataagattacagtggtctcgaatttgggaagttattggagatcattttaataaggttgggtgtaatcctaatgaagatgtagctatttttgcagtagactccttgaggcagttgtcaatgaagttcttagagaaaggggagcttgctaacttcagattccagaaggatttcttaagaccttttgaacatataatgaaacggaacaggtctccaacaattcgagatatggttgtacggtgtatagcacagatggttaattctcaagctgctaacattcgatctggatggaagaacattttctctgtatttcatctagctgcatctgatcaagatgaaagcatagtggaacttgcattccaaacaaccgggcacattgtcacccttgtatttgaaaaacactttccagcgaccattgattctttccaggatgcagtgaagtgtttgtctgaatttgcgtgcaatgcagctttcccagacacaagtatggaagcaattcgacttattcgccattgtgcaaaatatgtgtctgatagacctcaggctttcaaggaatacacaagcgatgatatgaacgtagcacctgaagacagggtgtgggtgagaggatggttcccaattctctttgagttatcctgtatcatcaatagatgcaaattagatgtaagaaccaggggtttaacagtaatgtttgaaataatgaaaacatatggccacacttatgagaaacactggtggcaggatttatttagaattgttttcagaatctttgacaatatgaaattgccagaacaacagacagagaaagctgaatggatgacaacaacttgcaatcatgcactttatgcaatctgtgatgtattcactcagtatttagaagtactcagtgatgtacttttggatgacatttttgctcagctctactggtgtgtgcagcaagacaatgagcagttagcgcgatctggtacaaactgtttagagaatgttgttattctgaatggtgaaaaatttaccctagaaatctgggataaaacttgcaactgcacactggatatcttcaaaaccacaatcccacatgcgctgttgacctggcgacccaattctggagaaactgcccccccacctccatctcctgtaagtgaaaagccattggatacaatatcacagaagtctgtagatattcatgattctattcaaccaaggtctgtggataacagaccacaagcaccactggtttctgcgtctgctgttaatgaagaagtcagcaaaattaaatctacagcaaaatttccagaacaaaaattgtttgctgccctgttgattaaatgtgttgtgcagctggaactcatccagactatcgacaacattgtcttcttcccagccacaagtaagaaagaagatgcagaaaacttagctgcagcacagagagatgcggtggactttgatgttcgcgttgatactcaagaccaaggaatgtaccgctttttaacatcacaacaactttttaagctactggactgcttattagagtcacatagatttgcaaaagcgtttaattccaacaacgaacagaggactgccctgtggaaagcaggattcaaaggcaaatccaagcccaaccttctgaagcaggagaccagcagcctggcctgtgggctgcgcattctcttccggatgtacatggatgagagccgcgttagtgcctgggaggaggtccagcagaggcttttgaatgtctgcagtgaagcactaagttacttcctcactctaacatcagaaagtcatcgagaagcctggactaacttactgcttttgtttctaactaaagttctaaagataagtgataatagggtaagtatgaggcttcgaatccagccccacatttctagcccaattcgcattgggatgcggggtcccagagccgccgtgcaagagctctcagagatgaatcaagcagtgcccaggctgcactgctgcttgtgcaaagccaccagtggccttgctgtatcttcctcagtccttgcttttctccccccttacccagctttgttcactaattagcagttctctaggggattcagtaggcgagggatcagaatcccttgggataccttgacaagttcccattatgaccccaggaatctccccctttgccccattttgaaaactgctgtccaaccacctcatggccttgtactctgcctactactcaagactacatctggttcctgggcctgtgctctgggctgcagctgttcctttggcatatttagtggttccaggtaacccagagtccctagtgaatgggcctcatctaa

SEQ ID NO: 105721 - DNA, 8852 bp, Homo sapiens
  Payload ID: 725
  Gene Symbol: ARFGEF2
  Gene Name: ADP-ribosylation factor guanine nucleotide-exchange factor 2 (brefeldin A-inhibited)
  Uniprot ID: Q9Y6D5
  ENST ID: ENST00000371917
  CDS Start-End: 1-5358
atgcaggagagccagaccaagagcatgttcgtgtcccgggccctggagaagatcctagccgacaaggaggtgaagcggccccagcactcccagctgcgcagggcctgccaggtggcgctcgatgaaattaaagcagaaatagaaaagcagaggcttggcactgctgcaccaccaaaggcaaacttcattgaagctgacaagtattttcttccattcgagctagcttgccagtccaagtccccaagggtagtcagcacatcccttgactgcttgcagaaactcatcgcatacgggcacatcactggcaacgcccctgacagtggagcccctgggaagcggctgatcgacagaattgttgaaaccatttgcagttgttttcagggccctcagactgatgaaggggttcagttacaaataattaaggctcttctgactgcagtgacttccccacacattgaaattcatgagggtactatcctgcagacagtgagaacatgttacaatatctatttggccagcaaaaatctcatcaatcaaaccactgccaaggctacccttactcagatgctgaacgtcattttcacccgcatggaaaaccaagtgttgcaggaggccagagaactggaaaaaccaatccagtcaaaaccccagtcccctgtgatccaagctgcagcagtatccccaaagttcgttcgtttgaagcacagtcaggcacaaagcaaaccaacaactcccgaaaaaacagatttaaccaacggtgaacatgccaggagtgattctggaaaagtaagcacagaaaatggagacgcacccagagaaagaggctcatcactgtcagggactgatgacggagcccaggaggtggtgaaggacatcttggaagatgtagtcacatctgccattaaagaagcagcggaaaagcatggtctgacagaacctgagagagttctaggtgaactggagtgccaggaatgtgctattcccccaggagttgatgaaaactcacagaccaacgggatagccgatgacaggcagtccttgtcgtcagcagataatctggaatcggatgcacaaggacatcaagtggctgccaggttctcccacgttctgcagaaggatgccttccttgtgttccgctccctgtgcaagctgtccatgaaaccccttggtgaaggccctccagacccaaaatcccatgagctgcgttccaaggtggtttccctgcagctgctcctctctgtgttgcaaaatgctggccccgtattcaggactcacgagatgttcatcaatgcaatcaagcaatatctctgtgtggccttgtccaaaaacggcgtctcttcagtgcctgatgtctttgagctctctcttgccatttttcttactcttctttcaaactttaaaatgcacttgaaaatgcagatagaggtctttttcaaagagattttcctgaacattttagaaacatcaacaagttcttttgagcacaggtggatggtcattcagactctgacgaggatctgtgcagatgcccagtgtgttgtggatatttatgtcaactacgactgtgatttaaatgctgctaacatttttgagcgccttgtaaatgatttatccaaaattgctcagggaagaagtggacatgagctgggaatgacacctctgcaggagctcagcctgaggaagaaaggcctggagtgcctcgtgtccattctcaagtgcatggtggagtggagcaaagacctgtatgtgaatcccaaccaccagaccagcctcggtcaggagaggctcacggatcaggaaataggggatgggaaaggccttgacatggcaagacggtgtagtgtgacgtccatggagtccacagtgtcctcggggacccagacaactgttcaggatgaccctgagcaatttgaggtcatcaagcaacaaaaagaaatcattgaacacggcatcgagctgttcaacaagaaacccaagagggggatccagtttctccaggagcagggcatgctgggaacgtcagttgaagacatagcccaattcctgcaccaggaggagcgcctggattccacccaagtaggcgattttctgggagatagcgcaaggttcaacaaggaggtgatgtatgcctacgtggaccaacttgacttctgtgaaaaagaatttgtctcagccctgcggacattcctagaaggtttccgcctacctggagaagcccaaaagattgaccgattaatggagaagtttgccgcaagatacatagaatgcaaccaagggcaaactctgtttgctagtgctgacactgcttatgtcctagcgtattcaattattatgctgactacagacttgcacagtcctcaggtaaaaaataaaatgacgaaagagcagtatattaaaatgaatcggggtatcaatgatagtaaagatctgccagaagagtatctctcaagcatctatgaagagatagaaggcaagaaaattgcaatgaaagaaacaaaagagctaacgattgcaaccaaatctactaagcagaatgtagctagtgaaaagcagcggcggctgctgtacaacttagagatggagcaaatggctaaaacagccaaagctctgatggaggctgtgagccatgccaaagccccgtttaccagtgccactcacctggaccatgtccggccaatgttcaaactggtgtggacgccactattggcagcctacagcatcggactccagaactgtgatgacactgaagtggcctccttgtgtttggaaggcatccgatgtgcaatccgaatcgcctgcatctttggaatgcagctggaacgagatgcctatgttcaggctcttgctcgcttctccctactcacagccagctccagcatcacagaaatgaagcagaaaaacatcgacaccattaagacgcttatcacagtggctcacaccgatggcaactaccttgggaattcctggcatgagatcttgaaatgcatcagccagctggagctcgctcagctgataggaaccggtgtgaagacgcgctacctgtctggatctgggcgtgaaagagaagggagcctgaagggccacacattggcaggagaagagttcatgggccttggcctcggtaatttggtgagtggcggagtggataaaagacagatggccagcttccaagaatcggttggtgagaccagctcgcagagtgtggttgtagctgtggacaggatttttactgggtctaccagactggatggaaatgcaatagttgactttgtccgctggctgtgtgctgtgtccatggatgaactggcttccccccaccatcctcgcatgttcagcttgcagaagattgtggagatatcatactacaacatgaatcggatccgactacagtggtctcgaatatggcatgtgattggagatcacttcaataaggttggctgcaaccctaatgaagatgtggctatctttgctgttgactcattaaggcaactctccatgaagtttcttgagaagggtgaattagccaacttccgtttccagaaagattttctgaggccctttgagcatattatgaagaaaaacaggtctcccaccatccgggacatggcgatccgctgcattgcccagatggtgaactcccaggcggccaacatccgctcaggttggaagaacatctttgccgtgttccaccaggcagcctctgatcatgatgggaacattgtggagctggccttccagaccacttgccacattgtcacaactattttccagcaccattttcctgcagccatcgattcctttcaggatgctgtgaagtgcttatcagagttcgcctgcaacgccgctttccctgacacgagcatggaagcgattcggctcatccgcttctgtggcaaatacgtctctgagaggcctcgggtgctacaagaatacacaagtgatgacatgaatgtagctcctggtgacagagtctgggtccgaggctggttccccatcttattcgaactctcctgcatcattaatagatgcaagttagatgtacgaacaaggggactcacagtcatgtttgagatcatgaagagctatggccacacctttgaaaagcactggtggcaggacctgttcagaatcgtgtttcggatttttgacaatatgaaactccctgagcaactgtcagagaaatctgagtggatgacaacaacctgcaatcacgcactttatgctatttgtgatgtttttacccagttttatgaagctttgaatgaagttcttctttctgatgtatttgcacaattgcagtggtgtgtcaaacaagataatgaacagttggcgcgatcaggtacaaattgcttagaaaacttagtaatatccaatggagagaaattcagtcctgaagtctgggatgaaacctgcaactgtatgttggatattttcaaaacaaccatcccacatgttttgctgacatggagacctgtaggaatggaggaagattcatcagaaaagcatttggatgtggatctggaccgccagtctttaagcagcatagataaaaatccctctgagaggggacagagccagctctctaacccaacagatgacagctggaagggtagaccatacgcaaatcagaaactgtttgccagcctcctcatcaagtgtgtggtccagttggaattgatacagaccattgacaacattgtgttctaccctgcgacgagcaaaaaggaggatgcagagcacatggttgccgcccagcaagacacgctggatgcagatatccacatagagacggaggatcagggcatgtataagtacatgtcttcccagcacctcttcaagctgttggactgtttgcaggaatcccattcattctcaaaggccttcaactccaattacgagcagcggactgtcctgtggcgagcaggttttaagggcaagtctaaacccaatcttctaaaacaagaaaccagcagcctggcctgttgtttgaggatcctgtttcgaatgtatgttgatgagaaccgcagggattcctgggaagaaatacagcagagacttttaactgtttgcagtgaagctcttgcctatttcatcactgtgaattctgagagccatcgggaggcctggacaagtctcttgttgttacttctaactaaaaccctcaaaataaatgatgaaaagttcaaagcacatgcttcaatgtactacccctacttgtgtgaaattatgcagtttgacctgatccctgagctccgagcagttctgcggaagttcttcctacggataggtgttgtgtataagatatggataccagaagagccatcacaggtaccagcagcactgtcaccagtgtggtagccctggctgcccaggccagtgctgcagctctgcagaatgttcagcatgccatttctgactggcacatctcgtgaagtttcatagaaacaaggagttggcatcttggatctcagaatggcctggaaacggatggcctctacgctgttccatcacagtctccaactaaggcttatggtatttcattaaactgttgcatacccagttagcacagtaggtggggagtctgcttcatttctatcattccatttttctgattaaactgtcaaatctgtcattgcatatgccatcgttttctagcaaaatcccatgattggctataaacgttttgtaagaagtcactctccttgaaaatactgaacatagctgtataggtttgtgattattagagaatatgttaataaaacttcttgtaacggctaactgccacctaaaatatgctgggttttctgttgtttgagtgtgttagagaaatttgaatgtttttgtcagttacgagtcagccgtaattagattagtttaaggacaggtcaggattagagaagagttgtttttgtgttttgttaatgtctgagtgatttttaaagtattttacaaaaagatattgaaaatttggttgaaggcagagtttagtaattaagttagaattaagagttttgcgaggttaaaaaaatgtgcctcgtggatctccctgttttagtaacatggagagaaaaagtctacacgaaaaagtgaacaatttaatgaagatgattagccttccttgaaataagtatttgtggatgggtgttaaattaaaatttccagaatacactgtccatctcacacactctgaaatctaatatatgaagtagtaatgaaaatgaagtagtaatttaaccagagttcatttatccttgaataaacctttttattttcacctcagaaaagtgagtgtactggcagttagtgtcactgctttgcacagtccccattaaaggaccctccagagagggacagtaactgtgcatgagaagccgctcccataagcctcctcagccagatgtcatgggtggaactggagctgtgtcggggccagcacagctgaactgtgacaatggcaggaggtggcatgtgcccagcacttccattaatctgagcctaggagttgaattctttggcaaggttggattctgaggtccttattatgttaatgatggtgcaatactctcacctgcagtagaactgagttctgctgcagcttgtgtaaaagtgggcagtacacaagtacgtcccaaagcctgtgagcagtatacgtggatgctcacccatgagaaggagcacacacgcctcattctctgccctcacccactgctcacctagagcatcgctgagcgttagacaaagtgttacacagaatgattaaaactttcagacttctacctatgctctttagtcctgtaaattgggttgtattgatgtcaactctggtgccttagaagttagtagtttgggaacctatctgtaaaatcagatgttttttctttgtagagaaggatttctggtgcttttgcttactaagagaccgatattcttaagttgttttcttgttttaacagccttgagaaatgtttggttttggccagcagaattcttgtctacttttttctttcccaaaaagtgttttttaatttctctaccaaagaaaaaatgagcaggtttaggtttttacatgacttatatacattagataaaaggagctgtataatttagcaggaagggactatgggagaatactttactgtgagtggaaaatgttagcacatttgactggtttgccctggaatccactgcacctttacactgcaccatgaaacctacactccctggtatcatagcgcgtcatcacctcaacaagtcagtcgtctccattgatatttgtacaaaaggtatacatggggaacacgtgttcattcattaagtccatcttgcgtgcagctatatccctgattggttatttttcctttccttctgaggttctcatgtcattttcttcatcggatgtgactaaaatttttctggtgtcttctgccctctctttaattttgcctcttgaggggtagcagatgtgtcagtgcattttattacttgctgaaacattcaggcttacatttcttattagtttagtattttaaaagatttaattttctgaatgaggcatttgaattgtaccagcaatggacttttaaaaaattggatgtaaaaccattcagggtgatttttcttgtcagtggacagtgacgaacagagatttgaaatcccttacctccaataataagccattcagcctaaattcatttttatgaataaatctcttctttctcatggtaaatgtggcttgtgccactcaaacactagtgaaagggtatgtacaaccgcaacatcaggccaggacaccatttatttaaccaagtaatggaggagagtgaaacattttccaaggccttatttctttttcagaatgctttaagtgttgattatatgtgctgggtctctagagaagtttttatttgttacaatactgctgctttgagcaattttgtttctcttcattgtctgttagggaaatcaccagctttggcatcttaacaacaaacagtggatgggtaatttttatttctgatacgcatctttagagtcaaatatatcttttccctgtactcctcatgtacaaccaaagaacatacattatgaaaattgtattataatatctggaaacacaacattttcctctggcaggtgacttttgtacgaaatgaaaaaaaaaaaacctgtattttttttgttgttcttttgtgattaaggatatacatttagtagtctttgttattaaaggaacctgctgataagtacaagtgtgaccatctcattcaaatgtttgttgttatgatgcaaatggatattggtttcaatagaagctggatccttaatactgcattttctgaattctgttttaatatttgtgttaaagtagacatagctgaactcacatggaatcctggagttttgttatcagcagctttgcagtttgggaaacaaagaaaccaaagctgagtgttttaaagaatgaacatatctggaaatccttgctctcaaaacaaaacaatataatctatcaaaggtgttttactcagtgttctaatttttaaaaaattttatctgcatatttgcatcaaatatttatgtgtaaaatgtatgttttacctccttaaaatgcctaaaagttagttaatagttactttggtttaacctatacacaatgattaagtgcatttaatattggtaatttaatgaaaaccattccttgcccaatggatgtataaatttttgaaagaataagcagaattatataatatgaaatgctatgtaaagttttctatgtaaaaatattatgtataatactattaaaatatcccatgctttgatcaggtggtacatcaataaaattttaaaaagta

SEQ ID NO: 105722 - DNA, 3111 bp, Homo sapiens
  Payload ID: 726
  Gene Symbol: ARFIP1
  Gene Name: ADP-ribosylation factor interacting protein 1
  Uniprot ID: P53367
  ENST ID: ENST00000353617
  CDS Start-End: 300-1421
acaacgctacttccggtctcctcacttccggcttcgctgctcttggttctggttctggaggctgggttgagaggtcgccggtccgactgtcctcggcggttggtcagtgtgaatttgtgacagctgcagttgctccccgcccccgagcagccgaggtgcgtgggggaaggggaagaaggaaaaggtccgggtcgcgtttccgctcagtttttgccagggttgaggcgattccagagagcggcggaaaggataagcctcgacttagaagctaccgagttaccctaagaaaggagtctaccatggctcaagaatctcccaaaaattcagcagcagaaattccagtgactagtaatggagaagttgatgactctcgtgaacatagctttaatagggatttgaagcattcattaccatctggacttggtctctcagaaacccaaattacatctcatggctttgacaataccaaagagggtgttattgaagcaggagcatttcaaggttccccagcaccgccactgccatctgttatgtctcctagcagggttgcagctagtcgactggctcagcaaggaagtgatttaattgttcctgcaggtggccagagaacacagacaaaaagtggaccagttattctagcagatgaaattaaaaatcctgcaatggaaaagttagaacttgttagaaaatggagtctaaacacctataagtgtactcgacagattatctctgagaagctaggccgtggctcaagaactgtggaccttgaacttgaagctcagattgatatattaagggataacaagaaaaaatatgaaaatattttaaaactggctcaaacattgtcgacccagcttttccagatggtacatacccaaaggcaacttggagatgcatttgctgacctgagtttgaagtcactagaacttcatgaagaatttggctataatgccgatacccagaaactgctggctaaaaatggagagactcttcttggggccattaattttttcattgctagtgtgaacactttggtgaataaaaccattgaagatacattaatgactgtgaaacagtatgaaagtgccaggattgaatatgatgcatatcgcactgatttggaagaactgaatcttggaccacgtgacgcaaacactctgccaaagattgagcagtcacagcatctcttccaagcacataaggaaaaatatgataaaatgcgcaatgatgtttctgtcaaattgaaatttctagaagaaaataaggttaaagtattgcacaatcagctggtccttttccacaatgccattgccgcttactttgctgggaatcagaagcagcttgaacagacacttaaacagttccatatcaaattgaaaacccctggagtggatgccccatcttggcttgaagaacagtaaaatcacagcggaaaataaaaagaaagtcgcgttgttatatttctaaaccaacctaacaagaattaagcagagttgggggaagtgggaggggtgacaagcattatagtgattcttgcacaaacagctttaatttttccctttttcatactttaacaattgaactgttaagggtggttttaatgtaaacatagtttctataatctgaacacaataattttcctttttgagaaatccttttgtattgtgagggttgatggctatttctgtagtttgaaaacatctaatagagatttgcactgacaagataaaaattcaaggtttttggtcctggaaatgagggccgattgtaacttttccaaagggaggtttacatgatttgtatcaacatcagatattttatatgtgaatatattaaacatctttaagagattcattttcatgtattaaagaaaaaagaaactattttgcagagtaaagttatatggtgttcctgcagcgtccacacagaggcagcagctctaatgaatgattagcttgtggagttgtggcaaatacctttttaaaaatgaatctgtaccactgtaattttatttagacttttttttaaagacacagaaatcacactgtcatttctgtgaggcttttaagcttatgaatttgcttcacccgaagtcattggacagttacatttgcaatttcttttggttcataacaaaacctgcttaagagaatttttttttttgacaggtggacgtgggaatggaaattcttaatggtttctggagtagaaatctgtacttagaaaactagtttttgggtcagttccattttgatagaagtgaatacatagacagcttttattgacttccatatgtaacaataccgtttaagccttaaatcacagatatgtgccttctcagatacagtaattcttgttcaaccaatgtacaaaatccataaagaaacccctgttggataatgtttgatgtgtctattccttccatggaatggagcactatgtatgaatgttgggtttctttgtacttgttaagccacatttgaggtttatggtaaaaatcatcttttgagtttgctctttggtttttcttcattccttttgaggattgggaaaacagaaagattctttgatttgggtaatgaagaggtaatttgggacagtgtggtggtaccaggaagaaagaggattggaaaggccagtactgttttagttgctcggcactgttggttttgttttaatgtggttgccctgtccactacatggttctatcagtagtgtaatccattttcaatgtaaagctcttttagtttttgtcatagacataaattaatattttgagaggcatccctcacctgttcatttcttctgtgttgaaatgaagtacttaaaattaccgttatacatgaactttgtggactgtaagatttgttatatatgttcaaatgccttttagctggctttttaattaatatgcctgttttgagtgcttaatacaatgtaatgtgattgtaaatcatacctattttaaatcattccttcctgtatatttgtactcagagagccttattttattcttccagcagaattactacttgtgatagttcatttacattccccagaatgtgcctctagtgtgaattttgtattcttattaaacgtgtttgctgcagt

SEQ ID NO: 105723 - DNA, 1302 bp, Homo sapiens
  Payload ID: 726
  Gene Symbol: ARFIP1
  Gene Name: ADP-ribosylation factor interacting protein 1
  Uniprot ID: P53367
  ENST ID: ENST00000356064
  CDS Start-End: 252-1277
ctggttctggaggctgggttgagaggtcgccggtccgactgtcctcggcggttggtcagtgtgaatttgtgacagctgcagttgctccccgcccccgagcagccgaggtgcgtgggggaaggggaagaaggaaaaggtccgggtcgcgtttccgctcagtttttgccagggttgaggcgattccagagagcggcggaaaggataagcctcgacttagaagctaccgagttaccctaagaaaggagtctaccatggctcaagaatctcccaaaaattcagcagcagaaattccagtgactagtaatggagaagttgatgactctcgtgaacatagctttaatagggatttgaagcattcattaccatctggacttggtctctcagaaacccaaattacatctcatggctttgacaataccaaagagggtgttattgaagcaggagcatttcaaggtggccagagaacacagacaaaaagtggaccagttattctagcagatgaaattaaaaatcctgcaatggaaaagttagaacttgttagaaaatggagtctaaacacctataagtgtactcgacagattatctctgagaagctaggccgtggctcaagaactgtggaccttgaacttgaagctcagattgatatattaagggataacaagaaaaaatatgaaaatattttaaaactggctcaaacattgtcgacccagcttttccagatggtacatacccaaaggcaacttggagatgcatttgctgacctgagtttgaagtcactagaacttcatgaagaatttggctataatgccgatacccagaaactgctggctaaaaatggagagactcttcttggggccattaattttttcattgctagtgtgaacactttggtgaataaaaccattgaagatacattaatgactgtgaaacagtatgaaagtgccaggattgaatatgatgcatatcgcactgatttggaagaactgaatcttggaccacgtgacgcaaacactctgccaaagattgagcagtcacagcatctcttccaagcacataaggaaaaatatgataaaatgcgcaatgatgtttctgtcaaattgaaatttctagaagaaaataaggttaaagtattgcacaatcagctggtccttttccacaatgccattgccgcttactttgctgggaatcagaagcagcttgaacagacacttaaacagttccatatcaaattgaaaacccctggagtggatgccccatcttggcttgaagaacagtaaaatcacagcggaaaataaaaagaaa

SEQ ID NO: 105724 - DNA, 1601 bp, Homo sapiens
  Payload ID: 726
  Gene Symbol: ARFIP1
  Gene Name: ADP-ribosylation factor interacting protein 1
  Uniprot ID: P53367
  ENST ID: ENST00000405727
  CDS Start-End: 131-1156
cgctgctcttggttctggttctggaggctgggttgagaggtcgccggtccgactgtcctcggcggttggtcagtgtgaatttgtgacagctgcagttgctccccgcccccgagcagccgaggagtctaccatggctcaagaatctcccaaaaattcagcagcagaaattccagtgactagtaatggagaagttgatgactctcgtgaacatagctttaatagggatttgaagcattcattaccatctggacttggtctctcagaaacccaaattacatctcatggctttgacaataccaaagagggtgttattgaagcaggagcatttcaaggtggccagagaacacagacaaaaagtggaccagttattctagcagatgaaattaaaaatcctgcaatggaaaagttagaacttgttagaaaatggagtctaaacacctataagtgtactcgacagattatctctgagaagctaggccgtggctcaagaactgtggaccttgaacttgaagctcagattgatatattaagggataacaagaaaaaatatgaaaatattttaaaactggctcaaacattgtcgacccagcttttccagatggtacatacccaaaggcaacttggagatgcatttgctgacctgagtttgaagtcactagaacttcatgaagaatttggctataatgccgatacccagaaactgctggctaaaaatggagagactcttcttggggccattaattttttcattgctagtgtgaacactttggtgaataaaaccattgaagatacattaatgactgtgaaacagtatgaaagtgccaggattgaatatgatgcatatcgcactgatttggaagaactgaatcttggaccacgtgacgcaaacactctgccaaagattgagcagtcacagcatctcttccaagcacataaggaaaaatatgataaaatgcgcaatgatgtttctgtcaaattgaaatttctagaagaaaataaggttaaagtattgcacaatcagctggtccttttccacaatgccattgccgcttactttgctgggaatcagaagcagcttgaacagacacttaaacagttccatatcaaattgaaaacccctggagtggatgccccatcttggcttgaagaacagtaaaatcacagcggaaaataaaaagaaagtcgcgttgttatatttctaaaccaacctaacaagaattaagcagagttgggggaagtgggaggggtgacaagcattatagtgattcttgcacaaacagctttaatttttccctttttcatactttaacaattgaactgttaagggtggttttaatgtaaacatagtttctataatctgaacacaataattttcctttttgagaaatccttttgtattgtgagggttgatggctatttctgtagtttgaaaacatctaatagagatttgcactgacaagataaaaattcaaggtttttggtcctggaaatgagggccgattgtaacttttccaaagggaggtttacatgatttgtatcaacatcagatattttatatgtgaatatattaaacatctttaagagattcattttcatgtatt

SEQ ID NO: 105725 - DNA, 3424 bp, Homo sapiens
  Payload ID: 726
  Gene Symbol: ARFIP1
  Gene Name: ADP-ribosylation factor interacting protein 1
  Uniprot ID: P53367
  ENST ID: ENST00000451320
  CDS Start-End: 165-1286
acaacgctacttccggtctcctcacttccggcttcgctgctcttggttctggttctggaggctgggttgagaggtcgccggtccgactgtcctcggcggttggtcagtgtgaatttgtgacagctgcagttgctccccgcccccgagcagccgaggagtctaccatggctcaagaatctcccaaaaattcagcagcagaaattccagtgactagtaatggagaagttgatgactctcgtgaacatagctttaatagggatttgaagcattcattaccatctggacttggtctctcagaaacccaaattacatctcatggctttgacaataccaaagagggtgttattgaagcaggagcatttcaaggttccccagcaccgccactgccatctgttatgtctcctagcagggttgcagctagtcgactggctcagcaaggaagtgatttaattgttcctgcaggtggccagagaacacagacaaaaagtggaccagttattctagcagatgaaattaaaaatcctgcaatggaaaagttagaacttgttagaaaatggagtctaaacacctataagtgtactcgacagattatctctgagaagctaggccgtggctcaagaactgtggaccttgaacttgaagctcagattgatatattaagggataacaagaaaaaatatgaaaatattttaaaactggctcaaacattgtcgacccagcttttccagatggtacatacccaaaggcaacttggagatgcatttgctgacctgagtttgaagtcactagaacttcatgaagaatttggctataatgccgatacccagaaactgctggctaaaaatggagagactcttcttggggccattaattttttcattgctagtgtgaacactttggtgaataaaaccattgaagatacattaatgactgtgaaacagtatgaaagtgccaggattgaatatgatgcatatcgcactgatttggaagaactgaatcttggaccacgtgacgcaaacactctgccaaagattgagcagtcacagcatctcttccaagcacataaggaaaaatatgataaaatgcgcaatgatgtttctgtcaaattgaaatttctagaagaaaataaggttaaagtattgcacaatcagctggtccttttccacaatgccattgccgcttactttgctgggaatcagaagcagcttgaacagacacttaaacagttccatatcaaattgaaaacccctggagtggatgccccatcttggcttgaagaacagtaaaatcacagcggaaaataaaaagaaagtcgcgttgttatatttctaaaccaacctaacaagaattaagcagagttgggggaagtgggaggggtgacaagcattatagtgattcttgcacaaacagctttaatttttccctttttcatactttaacaattgaactgttaagggtggttttaatgtaaacatagtttctataatctgaacacaataattttcctttttgagaaatccttttgtattgtgagggttgatggctatttctgtagtttgaaaacatctaatagagatttgcactgacaagataaaaattcaaggtttttggtcctggaaatgagggccgattgtaacttttccaaagggaggtttacatgatttgtatcaacatcagatattttatatgtgaatatattaaacatctttaagagattcattttcatgtattaaagaaaaaagaaactattttgcagagtaaagttatatggtgttcctgcagcgtccacacagaggcagcagctctaatgaatgattagcttgtggagttgtggcaaatacctttttaaaaatgaatctgtaccactgtaattttatttagacttttttttaaagacacagaaatcacactgtcatttctgtgaggcttttaagcttatgaatttgcttcacccgaagtcattggacagttacatttgcaatttcttttggttcataacaaaacctgcttaagagaatttttttttttgacaggtggacgtgggaatggaaattcttaatggtttctggagtagaaatctgtacttagaaaactagtttttgggtcagttccattttgatagaagtgaatacatagacagcttttattgacttccatatgtaacaataccgtttaagccttaaatcacagatatgtgccttctcagatacagtaattcttgttcaaccaatgtacaaaatccataaagaaacccctgttggataatgtttgatgtgtctattccttccatggaatggagcactatgtatgaatgttgggtttctttgtacttgttaagccacatttgaggtttatggtaaaaatcatcttttgagtttgctctttggtttttcttcattccttttgaggattgggaaaacagaaagattctttgatttgggtaatgaagaggtaatttgggacagtgtggtggtaccaggaagaaagaggattggaaaggccagtactgttttagttgctcggcactgttggttttgttttaatgtggttgccctgtccactacatggttctatcagtagtgtaatccattttcaatgtaaagctcttttagtttttgtcatagacataaattaatattttgagaggcatccctcacctgttcatttcttctgtgttgaaatgaagtacttaaaattaccgttatacatgaactttgtggactgtaagatttgttatatatgttcaaatgccttttagctggctttttaattaatatgcctgttttgagtgcttaatacaatgtaatgtgattgtaaatcatacctattttaaatcattccttcctgtatatttgtactcagagagccttattttattcttccagcagaattactacttgtgatagttcatttacattccccagaatgtgcctctagtgtgaattttgtattcttattaaacgtgtttgctgcagtaaatcgtttctctggaccttcatagtttaagaagtaactatttggaaattctgaagacacataatttgcgttttctgaaccttaaaaaaaaaggtacttctgtcacttataattgttttagctcagtaagctattttttttcaatgtgaatctcttttgagagctgaacatgtccattcttaaccacatttcaataacagttactgtagctaaggagctaaatagtttcatggattaatttttttcagaataaatttaaaatatccatgattctgatagtgggcacatgaccaaaagaaaaaagtaaatcaatatatttagccaatggtacatttactttgttaggaatgtaatttatgttcattatagaaaagaattagaagaaaatttcaagtaatagaagataagtaccttcccaagtgaataaatactgcatggaaccactcaa

SEQ ID NO: 105726 - DNA, 1599 bp, Homo sapiens
  Payload ID: 726
  Gene Symbol: ARFIP1
  Gene Name: ADP-ribosylation factor interacting protein 1
  Uniprot ID: P53367
  ENST ID: ENST00000429148
  CDS Start-End: 163-744
aacgctacttccggtctcctcacttccggcttcgctgctcttggttctggttctggaggctgggttgagaggtcgccggtccgactgtcctcggcggttggtcagtgtgaatttgtgacagctgcagttgctccccgcccccgagcagccgaggagtctaccatggctcaagaatctcccaaaaattcagcagcagaaattccagtgactagtaatggagaagttgatgactctcgtgaacatagctttaatagggaagaatttggctataatgccgatacccagaaactgctggctaaaaatggagagactcttcttggggccattaattttttcattgctagtgtgaacactttggtgaataaaaccattgaagatacattaatgactgtgaaacagtatgaaagtgccaggattgaatatgatgcatatcgcactgatttggaagaactgaatcttggaccacgtgacgcaaacactctgccaaagattgagcagtcacagcatctcttccaagcacataaggaaaaatatgataaaatgcgcaatgatgtttctgtcaaattgaaatttctagaagaaaataaggttaaagtattgcacaatcagctggtccttttccacaatgccattgccgcttactttgctgggaatcagaagcagcttgaacagacacttaaacagttccatatcaaattgaaaacccctggagtggatgccccatcttggcttgaagaacagtaaaatcacagcggaaaataaaaagaaagtcgcgttgttatatttctaaaccaacctaacaagaattaagcagagttgggggaagtgggaggggtgacaagcattatagtgattcttgcacaaacagctttaatttttccctttttcatactttaacaattgaactgttaagggtggttttaatgtaaacatagtttctataatctgaacacaataattttcctttttgagaaatccttttgtattgtgagggttgatggctatttctgtagtttgaaaacatctaatagagatttgcactgacaagataaaaattcaaggtttttggtcctggaaatgagggccgattgtaacttttccaaagggaggtttacatgatttgtatcaacatcagatattttatatgtgaatatattaaacatctttaagagattcattttcatgtattaaagaaaaaagaaactattttgcagagtaaagttatatggtgttcctgcagcgtccacacagaggcagcagctctaatgaatgattagcttgtggagttgtggcaaatacctttttaaaaatgaatctgtaccactgtaattttatttagacttttttttaaagacacagaaatcacactgtcatttctgtgaggcttttaagcttatgaatttgcttcacccgaagtcattggacagttacatttgcaatttcttttggttcataacaaaacctgcttaagagaatttttttttttgacaggtggacgtgggaatggaaattcttaatggtttctggagtagaaatctgtacttagaaaactagtttttgggtcagttccattttgatagaagtgaatacatagacagc

SEQ ID NO: 105727 - DNA, 2746 bp, Homo sapiens
  Payload ID: 726
  Gene Symbol: ARFIP1
  Gene Name: ADP-ribosylation factor interacting protein 1
  Uniprot ID: P53367
  ENST ID: ENST00000618090
  CDS Start-End: 31-1056
gattcctgagtcactggacaggagtctaccatggctcaagaatctcccaaaaattcagcagcagaaattccagtgactagtaatggagaagttgatgactctcgtgaacatagctttaatagggatttgaagcattcattaccatctggacttggtctctcagaaacccaaattacatctcatggctttgacaataccaaagagggtgttattgaagcaggagcatttcaaggtggccagagaacacagacaaaaagtggaccagttattctagcagatgaaattaaaaatcctgcaatggaaaagttagaacttgttagaaaatggagtctaaacacctataagtgtactcgacagattatctctgagaagctaggccgtggctcaagaactgtggaccttgaacttgaagctcagattgatatattaagggataacaagaaaaaatatgaaaatattttaaaactggctcaaacattgtcgacccagcttttccagatggtacatacccaaaggcaacttggagatgcatttgctgacctgagtttgaagtcactagaacttcatgaagaatttggctataatgccgatacccagaaactgctggctaaaaatggagagactcttcttggggccattaattttttcattgctagtgtgaacactttggtgaataaaaccattgaagatacattaatgactgtgaaacagtatgaaagtgccaggattgaatatgatgcatatcgcactgatttggaagaactgaatcttggaccacgtgacgcaaacactctgccaaagattgagcagtcacagcatctcttccaagcacataaggaaaaatatgataaaatgcgcaatgatgtttctgtcaaattgaaatttctagaagaaaataaggttaaagtattgcacaatcagctggtccttttccacaatgccattgccgcttactttgctgggaatcagaagcagcttgaacagacacttaaacagttccatatcaaattgaaaacccctggagtggatgccccatcttggcttgaagaacagtaaaatcacagcggaaaataaaaagaaagtcgcgttgttatatttctaaaccaacctaacaagaattaagcagagttgggggaagtgggaggggtgacaagcattatagtgattcttgcacaaacagctttaatttttccctttttcatactttaacaattgaactgttaagggtggttttaatgtaaacatagtttctataatctgaacacaataattttcctttttgagaaatccttttgtattgtgagggttgatggctatttctgtagtttgaaaacatctaatagagatttgcactgacaagataaaaattcaaggtttttggtcctggaaatgagggccgattgtaacttttccaaagggaggtttacatgatttgtatcaacatcagatattttatatgtgaatatattaaacatctttaagagattcattttcatgtattaaagaaaaaagaaactattttgcagagtaaagttatatggtgttcctgcagcgtccacacagaggcagcagctctaatgaatgattagcttgtggagttgtggcaaatacctttttaaaaatgaatctgtaccactgtaattttatttagacttttttttaaagacacagaaatcacactgtcatttctgtgaggcttttaagcttatgaatttgcttcacccgaagtcattggacagttacatttgcaatttcttttggttcataacaaaacctgcttaagagaatttttttttttgacaggtggacgtgggaatggaaattcttaatggtttctggagtagaaatctgtacttagaaaactagtttttgggtcagttccattttgatagaagtgaatacatagacagcttttattgacttccatatgtaacaataccgtttaagccttaaatcacagatatgtgccttctcagatacagtaattcttgttcaaccaatgtacaaaatccataaagaaacccctgttggataatgtttgatgtgtctattccttccatggaatggagcactatgtatgaatgttgggtttctttgtacttgttaagccacatttgaggtttatggtaaaaatcatcttttgagtttgctctttggtttttcttcattccttttgaggattgggaaaacagaaagattctttgatttgggtaatgaagaggtaatttgggacagtgtggtggtaccaggaagaaagaggattggaaaggccagtactgttttagttgctcggcactgttggttttgttttaatgtggttgccctgtccactacatggttctatcagtagtgtaatccattttcaatgtaaagctcttttagtttttgtcatagacataaattaatattttgagaggcatccctcacctgttcatttcttctgtgttgaaatgaagtacttaaaattaccgttatacatgaactttgtggactgtaagatttgttatatatgttcaaatgccttttagctggctttttaattaatatgcctgttttgagtgcttaatacaatgtaatgtgattgtaaatcatacctattttaaatcattccttcctgtatatttgtactcagagagccttattttattcttccagcagaattactacttgtgatagttcatttacattccccagaatgtgcctctagtgtgaattttgtattcttattaaacgtgtttgctgcagt

SEQ ID NO: 105728 - DNA, 2543 bp, Homo sapiens
  Payload ID: 727
  Gene Symbol: ARFIP2
  Gene Name: ADP-ribosylation factor interacting protein 2
  Uniprot ID: P53365
  ENST ID: ENST00000254584
  CDS Start-End: 85-1110
aggatcgcgacgggaactggagcccgaggtccccgcgcggcccgggcctggcgccctgaggggaagagcggcccggcccgagccatgacggacgggatcctagggaaggcagccacaatggagatccctatccacgggaacggcgaagccaggcagcttcctgaagatgatgggctggagcaggacctccagcaggtgatggtgtcaggacccaacctcaatgaaaccagcattgtgtctggtggctatgggggctctggtgatggactcatccccacagggtctggccgccatccatctcacagcaccactccttctggccctggagatgaggtggctcggggcattgctggagaaaagtttgacatcgtcaagaaatggggcatcaacacctataagtgcacaaagcaactgttatcagaacgatttggtcgaggctcacggactgtggacctggagctagagctgcagattgagttgctgcgtgagacgaagcgcaagtatgagagtgtcctgcagctgggccgggcactgacagcccacctctacagcctgctgcagacccagcatgcactgggtgatgcctttgctgacctcagccagaagtccccagagcttcaggaggaatttggctacaatgcagagacacagaaactactatgcaagaatggggaaacgctgctaggagccgtgaacttctttgtctctagcatcaacacattggtcaccaagaccatggaagacacgctcatgactgtgaaacagtatgaggctgccaggctggaatatgatgcctaccgaacagacttagaggagctgagtctaggcccccgggatgcagggacacgtggtcgacttgagagtgcccaggccactttccaggcccatcgggacaagtatgagaagctgcggggagatgtggccatcaagctcaagttcctggaagaaaacaagatcaaggtgatgcacaagcagctgctgctcttccacaatgctgtgtccgcctactttgctgggaaccagaaacagctggagcagaccctgcagcagttcaacatcaagctgcggcctccaggagctgagaaaccctcctggctagaggagcagtgagctgctcccagcccaacttggctatcaagaaagacattgggaagggcagccccagggtgtgggagattggacatggtacatcctttgtcacttgccctctggcttgggctcctttttctggctggggcctgacaccagttttgcccacattgctatggtgggaagagggcctggaggcccagaagttgctgccctgtctatcttcctggccacagggcttcattcccagatcttttccttccacttcacagccaacggctatgacaaaaccactccctggccaatggcatcactcttcaggctggggtgtgctccctgaccaatgacagagcctgaaaatgccctgtcagccaatggcagctcttctcggactcccctgggccaatgatgttgcgtctaataccctttgtctctcctctatgcgtgcccattgcagagaaggggactgggaccaaaggggtggggataatggggagccccattgctggccttgcatctgaataggcctaccctcacccacccacccagtttaattgtgcttagagcccaagaagattgggatctagcactaggaataaacctttcataaaagcaggcccagcgaggtcaatttgtcggggactctaggagggtggcctgggtggagacaagctcagtctaatcaaacaccagaaccctatcaagtcaaaagagctggggccaggcagctgaagtcacaggtttcagagatggtttgaaggcccagtcttctctcccagcctcagttggagccaaagctttgtcctttagccagcaccaagatagctatggatcttaagagcaccagatccagagggggttgggtttgctgaccttcatcatgcattcattcatacagcaaatatttactgagtgctttcatttgccagggactgcgttaggccctggggaaacatcagtgaataaaacacggtccctgcccacagtgcttagggcctactgagggaaagaagtaaccaggcaactacaaaacagtgataagtattaggatacagaagtacagagggcgctgtgggagcacaaaggaggggcatctggcatggactggggtggaaatggggatgtcagtttgaaagctgagacctggccaggtgcggtggctcactcctgtaatcccagcactttgggaggccgaggcgggcggatcaccaggtcaggagatcaagaccatcctggctaacacggtgaaaacccatctctactaaaaatgcaagaaaattagcccggcacggtggctggcgcctgtagtcctgtagtcccagctactcgggaggctgaggcaggagaatggtgtgaacccgggaggcggagcttgcagtggagccaagattgcgccactgcactccagcctgggcaacagagcgggactccatctcaaaaaaaaaaaaaaaaaa

SEQ ID NO: 105729 - DNA, 1868 bp, Homo sapiens
  Payload ID: 727
  Gene Symbol: ARFIP2
  Gene Name: ADP-ribosylation factor interacting protein 2
  Uniprot ID: P53365
  ENST ID: ENST00000396777
  CDS Start-End: 249-1274
agagctagctcgagtatcgccctgccctggctgcgacgtcagctccgcccttataatctgcgacgtggccggcttcttctgcccggagaggacgtcatttccgccgagtccctgacctgctgctaggatcgcgacgggaactggagcccgaggtccccgcgcggcccgggcctggcgccctgaggggaagagcggcccggcccgagggtgctggggtggagagttttactccaatacctttcctagccatgacggacgggatcctagggaaggcagccacaatggagatccctatccacgggaacggcgaagccaggcagcttcctgaagatgatgggctggagcaggacctccagcaggtgatggtgtcaggacccaacctcaatgaaaccagcattgtgtctggtggctatgggggctctggtgatggactcatccccacagggtctggccgccatccatctcacagcaccactccttctggccctggagatgaggtggctcggggcattgctggagaaaagtttgacatcgtcaagaaatggggcatcaacacctataagtgcacaaagcaactgttatcagaacgatttggtcgaggctcacggactgtggacctggagctagagctgcagattgagttgctgcgtgagacgaagcgcaagtatgagagtgtcctgcagctgggccgggcactgacagcccacctctacagcctgctgcagacccagcatgcactgggtgatgcctttgctgacctcagccagaagtccccagagcttcaggaggaatttggctacaatgcagagacacagaaactactatgcaagaatggggaaacgctgctaggagccgtgaacttctttgtctctagcatcaacacattggtcaccaagaccatggaagacacgctcatgactgtgaaacagtatgaggctgccaggctggaatatgatgcctaccgaacagacttagaggagctgagtctaggcccccgggatgcagggacacgtggtcgacttgagagtgcccaggccactttccaggcccatcgggacaagtatgagaagctgcggggagatgtggccatcaagctcaagttcctggaagaaaacaagatcaaggtgatgcacaagcagctgctgctcttccacaatgctgtgtccgcctactttgctgggaaccagaaacagctggagcagaccctgcagcagttcaacatcaagctgcggcctccaggagctgagaaaccctcctggctagaggagcagtgagctgctcccagcccaacttggctatcaagaaagacattgggaagggcagccccagggtgtgggagattggacatggtacatcctttgtcacttgccctctggcttgggctcctttttctggctggggcctgacaccagttttgcccacattgctatggtgggaagagggcctggaggcccagaagttgctgccctgtctatcttcctggccacagggcttcattcccagatcttttccttccacttcacagccaacggctatgacaaaaccactccctggccaatggcatcactcttcaggctggggtgtgctccctgaccaatgacagagcctgaaaatgccctgtcagccaatggcagctcttctcggactcccctgggccaatgatgttgcgtctaataccctttgtctctcctctatgcgtgcccattgcagagaaggggactgggaccaaaggggtggggataatggggagccccattgctggccttgcatctgaataggcctaccctcacccacccacccagtttaattgtgcttagagcccaagaagattgggatctagcactaggaataaacctttcataaaagca

SEQ ID NO: 105730 - DNA, 1300 bp, Homo sapiens
  Payload ID: 727
  Gene Symbol: ARFIP2
  Gene Name: ADP-ribosylation factor interacting protein 2
  Uniprot ID: P53365
  ENST ID: ENST00000445086
  CDS Start-End: 151-921
gtcatttccgccgagtccctgacctgctgctaggatcgcgacgggaactggagcccgaggtccccgcgcggcccgggcctggcgccctgaggggaagagcggcccggcccgaggacctccagcaggtgatggtgtcaggacccaacctcaatgaaaccagcattgtgtctggtggctatgggggctctggtgatggactcatccccacagtgcacaaagcaactgttatcagaacgatttggtcgaggctcacggactgtggacctggagctagagctgcagattgagttgctgcgtgagacgaagcgcaagtatgagagtgtcctgcagctgggccgggcactgacagcccacctctacagcctgctgcagacccagcatgcactgggtgatgcctttgctgacctcagccagaagtccccagagcttcaggaggaatttggctacaatgcagagacacagaaactactatgcaagaatggggaaacgctgctaggagccgtgaacttctttgtctctagcatcaacacattggtcaccaagaccatggaagacacgctcatgactgtgaaacagtatgaggctgccaggctggaatatgatgcctaccgaacagacttagaggagctgagtctaggcccccgggatgcagggacacgtggtcgacttgagagtgcccaggccactttccaggcccatcgggacaagtatgagaagctgcggggagatgtggccatcaagctcaagttcctggaagaaaacaagatcaaggtgatgcacaagcagctgctgctcttccacaatgctgtgtccgcctactttgctgggaaccagaaacagctggagcagaccctgcagcagttcaacatcaagctgcggcctccaggagctgagaaaccctcctggctagaggagcagtgagctgctcccagcccaacttggctatcaagaaagacattgggaagggcagccccagggtgtgggagattggacatggtacatcctttgtcacttgccctctggcttgggctcctttttctggctggggcctgacaccagttttgcccacattgctatggtgggaagagggcctggaggcccagaagttgctgccctgtctatcttcctggccacagggcttcattcccagatcttttccttccacttcacagccaacggctatgacaaaaccactccctggccaatggcatcactcttcaggctggggtgtgctccctgaccaatgacagagcctgaaaatgccctgtcagccaatggcagctcttctcggactcccctg

SEQ ID NO: 105731 - DNA, 1430 bp, Homo sapiens
  Payload ID: 727
  Gene Symbol: ARFIP2
  Gene Name: ADP-ribosylation factor interacting protein 2
  Uniprot ID: P53365
  ENST ID: ENST00000423813
  CDS Start-End: 220-1131
agctagctcgagtatcgccctgccctggctgcgacgtcagctccgcccttataatctgcgacgtggccggcttcttctgcccggagaggacgtcatttccgccgagtccctgacctgctgctaggatcgcgacgggaactggagcccgaggtccccgcgcggcccgggcctggcgccctgaggggaagagcggcccggcccgaggacctccagcaggtgatggtgtcaggacccaacctcaatgaaaccagcattgtgtctggtggctatgggggctctggtgatggactcatccccacagggtctggccgccatccatctcacagcaccactccttctggccctggagatgaggtggctcggggcattgctggagaaaagtttgacatcgtcaagaaatggggcatcaacacctataagtgcacaaagcaactgttatcagaacgatttggtcgaggctcacggactgtggacctggagctagagctgcagattgagttgctgcgtgagacgaagcgcaagtatgagagtgtcctgcagctgggccgggcactgacagcccacctctacagcctgctgcagacccagcatgcactgggtgatgcctttgctgacctcagccagaagtccccagagcttcaggaggaatttggctacaatgcagagacacagaaactactatgcaagaatggggaaacgctgctaggagccgtgaacttctttgtctctagcatcaacacattggtcaccaagaccatggaagacacgctcatgactgtgaaacagtatgaggctgccaggctggaatatgatgcctaccgaacagacttagaggagctgagtctaggcccccgggatgcagggacacgtggtcgacttgagagtgcccaggccactttccaggcccatcgggacaagtatgagaagctgcggggagatgtggccatcaagctcaagttcctggaagaaaacaagatcaaggtgatgcacaagcagctgctgctcttccacaatgctgtgtccgcctactttgctgggaaccagaaacagctggagcagaccctgcagcagttcaacatcaagctgcggcctccaggagctgagaaaccctcctggctagaggagcagtgagctgctcccagcccaacttggctatcaagaaagacattgggaagggcagccccagggtgtgggagattggacatggtacatcctttgtcacttgccctctggcttgggctcctttttctggctggggcctgacaccagttttgcccacattgctatggtgggaagagggcctggaggcccagaagttgctgccctgtctatcttcctggccacagggcttcattcccagatcttttccttccacttcacagccaacggctatgacaaaaccactccctggccaatggcatcactcttca

SEQ ID NO: 105732 - DNA, 852 bp, Homo sapiens
  Payload ID: 727
  Gene Symbol: ARFIP2
  Gene Name: ADP-ribosylation factor interacting protein 2
  ENST ID: ENST00000525235
  CDS Start-End: 127-735
ctaggatcgcgacgggaactggagcccgaggtccccgcgcggcccgggcctggcgccctgaggggaagagcggcccggcccgagggtgctggggtggagagttttactccaatacctttcctagccatgacggacgggatcctagggaaggcagccacaatggagatccctatccacgggaacggcgaagccaggcagcttcctgaagatgatgggctggagcaggacctccagcaggtgatggtgtcaggacccaacctcaatgaaaccagcattgtgtctggtggctatgggggctctggtgatggactcatccccacagggtctggccgccatccatctcacagcaccactccttctggccctggagatgaggtggctcggggcattgctggagaaaagtttgacatcgtcaagaaatggggcatcaacacctataagtgcacaaagcaactgttatcagaacgatttggtcgaggctcacggactgtggacctggagctagagctgcagattgagttgctgcgtgagacgaagcgcaagtatgagagtgtcctgcagctgggccgggcactgacagcccacctctacagcctgctgcagacccagcatgcactgggtgatgcctttgctgacctcagccagaagtccccagagcttcagcccacagggagaaccccttcagggtgggcccagccctacccccagcagcactcacctgtggaggcagcctaagggaggaatttggctacaatgcagagacacagaaactactatgcaagaatggggaaacgctgctaggagccgtgaacttctttgtctctagcatcaacacattggtcaccaagacca

SEQ ID NO: 105733 - DNA, 1560 bp, Homo sapiens
  Payload ID: 727
  Gene Symbol: ARFIP2
  Gene Name: ADP-ribosylation factor interacting protein 2
  ENST ID: ENST00000531037
  CDS Start-End: 97-576
tgacctgctgctaggatcgcgacgggaactggagcccgaggtccccgcgcggcccgggcctggcgccctgaggggaagagcggcccggcccgagccatgacggacgggatcctagggaaggcagccacaatggagatccctatccacgggaacggcgaagccaggcagcttcctgaagatgatgggctggagcaggacctccagcaggtgatggtgtcaggacccaacctcaatgaaaccagcattgtgtctggtggctatgggggctctggtgatggactcatccccacagggtctggccgccatccatctcacagcaccactccttctggccctggagatgaggtggctcggggcattgctggagaaaagtttgacatcgtcaagaaatggggcatcaacacctataagtgcacaaagcaactgttatcagaacgatttggtcgaggctcacggactgtggacctggagctagagctgcagattgagttgctgcgtgagacgaagcgcaagaggaatttggctacaatgcagagacacagaaactactatgcaagaatggggaaacgctgctaggagccgtgaacttctttgtctctagcatcaacacattggtcaccaagaccatggaagacacgctcatgactgtgaaacagtatgaggctgccaggctggaatatgatgcctaccgaacagacttagaggagctgagtctaggcccccgggatgcagggacacgtggtcgacttgagagtgcccaggccactttccaggcccatcgggacaagtatgagaagctgcggggagatgtggccatcaagctcaagttcctggaagaaaacaagatcaaggtgatgcacaagcagctgctgctcttccacaatgctgtgtccgcctactttgctgggaaccagaaacagctggagcagaccctgcagcagttcaacatcaagctgcggcctccaggagctgagaaaccctcctggctagaggagcagtgagctgctcccagcccaacttggctatcaagaaagacattgggaagggcagccccagggtgtgggagattggacatggtacatcctttgtcacttgccctctggcttgggctcctttttctggctggggcctgacaccagttttgcccacattgctatggtgggaagagggcctggaggcccagaagttgctgccctgtctatcttcctggccacagggcttcattcccagatcttttccttccacttcacagccaacggctatgacaaaaccactccctggccaatggcatcactcttcaggctggggtgtgctccctgaccaatgacagagcctgaaaatgccctgtcagccaatggcagctcttctcggactcccctgggccaatgatgttgcgtctaataccctttgtctctcctctatgcgtgcccattgcagagaaggggactgggaccaaaggggtggggataatggggagccccattgctggccttgcatctgaataggcctaccctcacccacccacccagtttaattgtgcttagagcccaagaagattgg

SEQ ID NO: 105734 - DNA, 3846 bp, Homo sapiens
  Payload ID: 727
  Gene Symbol: ARFIP2
  Gene Name: ADP-ribosylation factor interacting protein 2
  ENST ID: ENST00000614314
  CDS Start-End: 292-1416
agcttctcggtgccgccccggaagtaacctctcgctgatctcgagagctagctcgagtatcgccctgccctggctgcgacgtcagctccgcccttataatctgcgacgtggccggcttcttctgcccggagaggacgtcatttccgccgagtccctgacctgctgctaggatcgcgacgggaactggagcccgaggtccccgcgcggcccgggcctggcgccctgaggggaagagcggcccggcccgagggtgctggggtggagagttttactccaatacctttcctagccatgacggacgggatcctagggaaggcagccacaatggagatccctatccacgggaacggcgaagccaggcagcttcctgaagatgatgggctggagcaggacctccagcaggtgatggtgtcaggacccaacctcaatgaaaccagcattgtgtctggtggctatgggggctctggtgatggactcatccccacagggaagtcaatttcatgtgctcgaagagaagtatgggtggggccacagaggtgtctggtgtatctgagagaggctggtgtcagagaacttgatcctttagggtctggccgccatccatctcacagcaccactccttctggccctggagatgaggtggctcggggcattgctggagaaaagtttgacatcgtcaagaaatggggcatcaacacctataagtgcacaaagcaactgttatcagaacgatttggtcgaggctcacggactgtggacctggagctagagctgcagattgagttgctgcgtgagacgaagcgcaagtatgagagtgtcctgcagctgggccgggcactgacagcccacctctacagcctgctgcagacccagcatgcactgggtgatgcctttgctgacctcagccagaagtccccagagcttcaggaggaatttggctacaatgcagagacacagaaactactatgcaagaatggggaaacgctgctaggagccgtgaacttctttgtctctagcatcaacacattggtcaccaagaccatggaagacacgctcatgactgtgaaacagtatgaggctgccaggctggaatatgatgcctaccgaacagacttagaggagctgagtctaggcccccgggatgcagggacacgtggtcgacttgagagtgcccaggccactttccaggcccatcgggacaagtatgagaagctgcggggagatgtggccatcaagctcaagttcctggaagaaaacaagatcaaggtgatgcacaagcagctgctgctcttccacaatgctgtgtccgcctactttgctgggaaccagaaacagctggagcagaccctgcagcagttcaacatcaagctgcggcctccaggagctgagaaaccctcctggctagaggagcagtgagctgctcccagcccaacttggctatcaagaaagacattgggaagggcagccccagggtgtgggagattggacatggtacatcctttgtcacttgccctctggcttgggctcctttttctggctggggcctgacaccagttttgcccacattgctatggtgggaagagggcctggaggcccagaagttgctgccctgtctatcttcctggccacagggcttcattcccagatcttttccttccacttcacagccaacggctatgacaaaaccactccctggccaatggcatcactcttcaggctggggtgtgctccctgaccaatgacagagcctgaaaatgccctgtcagccaatggcagctcttctcggactcccctgggccaatgatgttgcgtctaataccctttgtctctcctctatgcgtgcccattgcagagaaggggactgggaccaaaggggtggggataatggggagccccattgctggccttgcatctgaataggcctaccctcacccacccacccagtttaattgtgcttagagcccaagaagattgggatctagcactaggaataaacctttcataaaagcaggcccagcgaggtcaatttgtcggggactctaggagggtggcctgggtggagacaagctcagtctaatcaaacaccagaaccctatcaagtcaaaagagctggggccaggcagctgaagtcacaggtttcagagatggtttgaaggcccagtcttctctcccagcctcagttggagccaaagctttgtcctttagccagcaccaagatagctatggatcttaagagcaccagatccagagggggttgggtttgctgaccttcatcatgcattcattcatacagcaaatatttactgagtgctttcatttgccagggactgcgttaggccctggggaaacatcagtgaataaaacacggtccctgcccacagtgcttagggcctactgagggaaagaagtaaccaggcaactacaaaacagtgataagtattaggatacagaagtacagagggcgctgtgggagcacaaaggaggggcatctggcatggactggggtggaaatggggatgtcagtttgaaagctgagacctggccaggtgcggtggctcactcctgtaatcccagcactttgggaggccgaggcgggcggatcaccaggtcaggagatcaagaccatcctggctaacacggtgaaaacccatctctactaaaaatgcaagaaaattagcccggcacggtggctggcgcctgtagtcctgtagtcccagctactcgggaggctgaggcaggagaatggtgtgaacccgggaggcggagcttgcagtggagccaagattgcgccactgcactccagcctgggcaacagagcgggactccatctcaaaaaaaaaaaaaaaaaagctgagacctgaagggtgagtagatgacaaacaggcagggtaaagggaagagcatcccaggcagagaggctagcatataatgaaggctctgagtaggaactgggaggaattgcttggaatgaaaaatgaagagggagtggctagatgaagactgcaggctggttaaggacttttgccctctggagaaggagctgagaagtgttttaagcagaaatttgactgcatgggagaagtatagagttgagaaaagtagtcctctgaggcttaagatagtgtcatctagactccagttccctcatcttgggtagcatagtagccccagcccaaaactgcaagcatgatccccgtctgggtttccttcacaagcactggagcatcttgtgctatgtgctgaactcaggtggataagaggttgaggcggttcccaaagctcctgctgcacccaggtgttgagcctaaatctgaaccttgtggagaggtcacaagaaagatccctaacagcactttggtttagtcagggctaggtgtcatcacctgtatgccctttggccaaggaaaccagaatttttcaggattttccccacctctggaaggctggaggaaggggaagacccactcagcagattcccatagtgcagggatcctcacaggcatgactttgccctttgtcatggatactgcagctcccagacagtcttctgggctttgatcagcctgcaatcatctgactagagcttgatttttggggcagggaaggtggtccttatatgagctgccacttaatgggccactggggatttttcaacatgaaaggtaccgagtctccaaatgctggttgtagggcctaaaaacagggctcaactccaggttctgccactttctagctgagtgatgagggctaacgtctggggagcaagatccctattttttcccattgtaaaattgggctaataaaagatgctacctactgactattaaataatatatgtaaagtggc

SEQ ID NO: 105735 - DNA, 1061 bp, Homo sapiens
  Payload ID: 728
  Gene Symbol: ARFRP1
  Gene Name: ADP-ribosylation factor related protein 1
  Uniprot ID: Q13795
  ENST ID: ENST00000607873
  CDS Start-End: 208-672
gggcagccgggaagcggagcgcggaggccgctgggacgcggttcagctcattccctgaggccggcccgcgtcccgtcaggcgccgcgcggggttagcgcggggtcagcggaggtcagcgggggtcagcagcagcggctccgagggcgcggcggacgcagaccttcctggagcagtcgaaaacccgatttaacaagaactacaaggggatgagtctatccaaaatcaccaccaccgtgggcctaaacatcggcactgtggatgtgggaaaggctcggctcatgttctgggacttaggagggcaggaagagctgcagtctttgtgggacaagtattatgcggagtgtcacggcgtcatctacgtcattgactccaccgacgaggagaggctggctgagtccaagcaggcgtttgagaaggtggtgaccagcgaggcgctgtgcggtgtccccgtcttggtgctggccaacaagcaggatgtggagacgtgcctctcaatccctgacatcaagacggccttcagcgactgcaccagcaagatcggcaggcgagattgcctgacccaggcctgctcggccctcacaggcaaaggggtgcgcgagggcatcgagtggatggtgaagtgtgtcgtgcggaatgtgcaccggccgccgcggcagagggacatcacgtaggcgcagccgcgctgccgtcgggacggctggtcccctggtgctggaggagtggcctcctgttggctcccatgctgctgatctggggggtgggtttgctttgctttggggttcttctatttactttgttttctcgaagacaaactttcctctatgtctggaaaagcgtaggcatccggaggctttggaggggagtctggcagcccggctggcccaggccctgcagcggcagcctttccacagggcgcagcggcggcctttcgaggccctttctggggggtctgagggagacctggttgggaattggggctccagtgctcaggctggcttgggctgcatgaggacagccctgtgggaccctcgggagaccccgtggctgtctccgccccatc

SEQ ID NO: 105736 - DNA, 1698 bp, Homo sapiens
  Payload ID: 728
  Gene Symbol: ARFRP1
  Gene Name: ADP-ribosylation factor related protein 1
  Uniprot ID: Q13795
  ENST ID: ENST00000612157
  CDS Start-End: 57-578
gaggtcagcgggggtcagcagcagcggctccgagggcgcggcggacgcagggcaggatgtacacgctgctgtcgggcttgtacaagtacatgtttcagaaggacgagtactgcatcctgatcctgggcctggacaatgctgggaagacgaccttcctggagcagtcgaaaacccgatttaacaagaactacaaggggatgagtctatccaaaatcaccaccaccgtgggcctaaacatcggcactgtggatgtgggaaaggctcggctcatgttctgggacttaggagggcaggaagagctgcagtctttgtgggacaagtattatgcggagtgtcacggcgtcatctacgtcattgactccaccgacgaggagaggctggctgagtccaagcaggcgtttgagaaggtggtgaccagcgaggcgctgtgcggtgtccccgtcttggtgctggccaacaagcaggatgtggagacgtgcctctcaatccctgacatcaagacggccttcagcgactgcaccagcaagatcggcaggcgagattgcctgacccaggcctgctcggccctcacagggtgagtgggggctgcacctgcgggggctttggggaccgagaccccccgcctcacacccgctgtcttcacagcaaaggggtgcgcgagggcatcgagtggatggtgaagtgtgtcgtgcggaatgtgcaccggccgccgcggcagagggacatcacgtaggcgcagccgcgctgccgtcgggacggctggtcccctggtgctggaggagtggcctcctgttggctcccatgctgctgatctggggggtgggtttgctttgctttggggttcttctatttactttgttttctcgaagacaaactttcctctatgtctggaaaagcgtaggcatccggaggctttggaggggagtctggcagcccggctggcccaggccctgcagcggcagcctttccacagggcgcagcggcggcctttcgaggccctttctggggggtctgagggagacctggttgggaattggggctccagtgctcaggctggcttgggctgcatgaggacagccctgtgggaccctcgggagaccccgtggctgtctccgccccatcgaggaggaggcccgtcagccatggctgccatctggcttctgccctgtgaccccgtgaccccgtgaccccggaagtggtctggggctgatcttgccttgaggaagacccaggccatgttcccaaaggccagcgggggccctggattgtgatgcagcctcgggacagggctgaggcctgcgggggaagacctataccccacgcctgggcctggcttcacctcaccctaatcccccgggagggagctgactgatgcaaaaagctgagggggcctgctgggagtggctgtttttatgccccagccccgcaagttggggagtgtttgtgggggtccagagccctcccccagccaggagagaacctcccggaggggttctctgtggggccctgtgtcccctgctcgggagtaaggctggtcctggggtcctccctgcacggaccccactgggcctgccgagtgctgtgttcttcctcagtctggctgtgggcaggagcggcctgcccagtgtcacccagggtgagtgcaaaataaagacggcgagtgtggctctgtccatcccttccctcctggagggtgga

SEQ ID NO: 105737 - DNA, 1623 bp, Homo sapiens
  Payload ID: 728
  Gene Symbol: ARFRP1
  Gene Name: ADP-ribosylation factor related protein 1
  Uniprot ID: Q13795
  ENST ID: ENST00000618838
  CDS Start-End: 31-636
gaggcccgaggggcggcccaggactcgaggatgtacacgctgctgtcgggcttgtacaagtacatgtttcagaaggacgagtactgcatcctgatcctgggcctggacaatgctgggaagacgaccttcctggagcagtcgaaaacccgatttaacaagaactacaaggggatgagtctatccaaaatcaccaccaccgtgggcctaaacatcggcactgtggatgtgggaaaggctcggctcatgttctgggacttaggagggcaggaagagctgcagtctttgtgggacaagtattatgcggagtgtcacggcgtcatctacgtcattgactccaccgacgaggagaggctggctgagtccaagcaggcgtttgagaaggtggtgaccagcgaggcgctgtgcggtgtccccgtcttggtgctggccaacaagcaggatgtggagacgtgcctctcaatccctgacatcaagacggccttcagcgactgcaccagcaagatcggcaggcgagattgcctgacccaggcctgctcggccctcacaggcaaaggggtgcgcgagggcatcgagtggatggtgaagtgtgtcgtgcggaatgtgcaccggccgccgcggcagagggacatcacgtaggcgcagccgcgctgccgtcgggacggctggtcccctggtgctggaggagtggcctcctgttggctcccatgctgctgatctggggggtgggtttgctttgctttggggttcttctatttactttgttttctcgaagacaaactttcctctatgtctggaaaagcgtaggcatccggaggctttggaggggagtctggcagcccggctggcccaggccctgcagcggcagcctttccacagggcgcagcggcggcctttcgaggccctttctggggggtctgagggagacctggttgggaattggggctccagtgctcaggctggcttgggctgcatgaggacagccctgtgggaccctcgggagaccccgtggctgtctccgccccatcgaggaggaggcccgtcagccatggctgccatctggcttctgccctgtgaccccgtgaccccgtgaccccggaagtggtctggggctgatcttgccttgaggaagacccaggccatgttcccaaaggccagcgggggccctggattgtgatgcagcctcgggacagggctgaggcctgcgggggaagacctataccccacgcctgggcctggcttcacctcaccctaatcccccgggagggagctgactgatgcaaaaagctgagggggcctgctgggagtggctgtttttatgccccagccccgcaagttggggagtgtttgtgggggtccagagccctcccccagccaggagagaacctcccggaggggttctctgtggggccctgtgtcccctgctcgggagtaaggctggtcctggggtcctccctgcacggaccccactgggcctgccgagtgctgtgttcttcctcagtctggctgtgggcaggagcggcctgcccagtgtcacccagggtgagtgcaaaataaagacggcgagtgtggctctgtccatcccttccctcctggagggtggaggctcctggctgttggacacgg

SEQ ID NO: 105738 - DNA, 2456 bp, Homo sapiens
  Payload ID: 728
  Gene Symbol: ARFRP1
  Gene Name: ADP-ribosylation factor related protein 1
  Uniprot ID: Q13795
  ENST ID: ENST00000619493
  CDS Start-End: 51-656
tgtgcggtgaggcgcgaggcccgaggggcggcccaggactcgagggcaggatgtacacgctgctgtcgggcttgtacaagtacatgtttcagaaggacgagtactgcatcctgatcctgggcctggacaatgctgggaagacgaccttcctggagcagtcgaaaacccgatttaacaagaactacaaggggatgagtctatccaaaatcaccaccaccgtgggcctaaacatcggcactgtggatgtgggaaaggctcggctcatgttctgggacttaggagggcaggaagagctgcagtctttgtgggacaagtattatgcggagtgtcacggcgtcatctacgtcattgactccaccgacgaggagaggctggctgagtccaagcaggcgtttgagaaggtggtgaccagcgaggcgctgtgcggtgtccccgtcttggtgctggccaacaagcaggatgtggagacgtgcctctcaatccctgacatcaagacggccttcagcgactgcaccagcaagatcggcaggcgagattgcctgacccaggcctgctcggccctcacaggcaaaggggtgcgcgagggcatcgagtggatggtgaagtgtgtcgtgcggaatgtgcaccggccgccgcggcagagggacatcacgtaggcgcagccgcgctgccgtcgggacggctggtcccctggtgctggaggagtggcctcctgttggctcccatgctgctgatctggggggtgggtttgctttgctttggggttcttctatttactttgttttctcgaagacaaactttcctctatgtctggaaaagcgtaggcatccggaggctttggaggggagtctggcagcccggctggcccaggccctgcagcggcagcctttccacagggcgcagcggcggcctttcgaggccctttctggggggtctgagggagacctggttgggaattggggctccagtgctcaggctggcttgggctgcatgaggacagccctgtgggaccctcgggagaccccgtggctgtctccgccccatcgaggaggaggcccgtcagccatggctgccatctggcttctgccctgtgaccccgtgaccccgtgaccccggaagtggtctggggctgatcttgccttgaggaagacccaggccatgttcccaaaggccagcgggggccctggattgtgatgcagcctcgggacagggctgaggcctgcgggggaagacctataccccacgcctgggcctggcttcacctcaccctaatcccccgggagggagctgactgatgcaaaaagctgagggggcctgctgggagtggctgtttttatgccccagccccgcaagttggggagtgtttgtgggggtccagagccctcccccagccaggagagaacctcccggaggggttctctgtggggccctgtgtcccctgctcgggagtaaggctggtcctggggtcctccctgcacggaccccactgggcctgccgagtgctgtgttcttcctcagtctggctgtgggcaggagcggcctgcccagtgtcacccagggtgagtgcaaaataaagacggcgagtgtggctctgtccatcccttccctcctggagggtggaggctcctggctgttggacacggtgatggtgttactgggctgctcaggggctggtgggcaggtgaggggctccccaggtgggcctggagagtccaggcactcccttcctgcggatgtgggaaggacatggggtcctgggaggagctgctgggaaggggcatgagtcagggtgggggtggcgcagcagctgcggggctgtgactcacaggagtcgggccctggaagtccccgcgtcctctccaggggaccctgtgtgtgttctgcaggttggttcccaggacctgggggggacctccagccccgggaacctggccgtgctggggaggcgagtggctggtgcagccccccggttgctctgggtgcatcgggaggcttcagagcctgccccagagagggagaagcttcacttcccggaaagcatgggaggcctggaggaggtctttggcaggtcccctctcgggaaatcccctgtgagttgggagtgggaggaattcataagtggggggttagtgtgggccccggcgactagggctggcctgagccccatcctgttcttccagcaatgataccctcccaggccctgaccctcgctgagcttcaggggcccctgccacgtgccacagccactgggggcagaggtggcactccccactgatcctcccagggagggtctgtctgaggtaggggaagccccgggcagcagttctgatggcaggcagcctgagggatctgggcacagcgggcggctcaggtgtccccggctgccctcccagtagctgtgcaactacaaccagttttatgaaaaagctttataaaaataagctttaagaaacctc

SEQ ID NO: 105739 - DNA, 1612 bp, Homo sapiens
  Payload ID: 728
  Gene Symbol: ARFRP1
  Gene Name: ADP-ribosylation factor related protein 1
  Uniprot ID: Q13795
  ENST ID: ENST00000618568
  CDS Start-End: 132-497
gctgggacgcggttcagctcattccctgaggccggcccgcgtcccgtcaggcgccgcgcggggttagcgcggggtcagcggaggtcagcgggggtcagcagcagcggctccgagggcgcggcggacgcaggatgtacacgctgctgtcgggcttgtacaagtacatgtttcagaaggacgagtactgcatcctgatcctgggcctggacaatgctgggaagacgaccttcctggagcagtcgaaaacccgatttaacaagaactacaaggggatgagtctatccaaaatcaccaccaccgtgggcctaaacatcggcactgtggatgtgggaaaggctcggctcatgttctgggacttaggagggcaggaagagctgcagtctttgtgggacaagtattatgcggagtgtcacggcgtcatctacgtcattgactccaccgacgaggagaggctggctgagtccaagcaggcgtttgacgtgcctctcaatccctgacatcaagacggccttcagcgactgcaccagcaagatcggcaggcgagattgcctgacccaggcctgctcggccctcacaggcaaaggggtgcgcgagggcatcgagtggatggtgaagtgtgtcgtgcggaatgtgcaccggccgccgcggcagagggacatcacgtaggcgcagccgcgctgccgtcgggacggctggtcccctggtgctggaggagtggcctcctgttggctcccatgctgctgatctggggggtgggtttgctttgctttggggttcttctatttactttgttttctcgaagacaaactttcctctatgtctggaaaagcgtaggcatccggaggctttggaggggagtctggcagcccggctggcccaggccctgcagcggcagcctttccacagggcgcagcggcggcctttcgaggccctttctggggggtctgagggagacctggttgggaattggggctccagtgctcaggctggcttgggctgcatgaggacagccctgtgggaccctcgggagaccccgtggctgtctccgccccatcgaggaggaggcccgtcagccatggctgccatctggcttctgccctgtgaccccgtgaccccgtgaccccggaagtggtctggggctgatcttgccttgaggaagacccaggccatgttcccaaaggccagcgggggccctggattgtgatgcagcctcgggacagggctgaggcctgcgggggaagacctataccccacgcctgggcctggcttcacctcaccctaatcccccgggagggagctgactgatgcaaaaagctgagggggcctgctgggagtggctgtttttatgccccagccccgcaagttggggagtgtttgtgggggtccagagccctcccccagccaggagagaacctcccggaggggttctctgtggggccctgtgtcccctgctcgggagtaaggctggtcctggggtcctccctgcacggaccccactgggcctgccgagtgctgtgttcttcctcagtctggctgtgggcaggagcggcctgcccagtgtcacccagggtgagtgcaaaataaagacggcgagtgtggctctgtccatccc

SEQ ID NO: 105740 - DNA, 2554 bp, Homo sapiens
  Payload ID: 728
  Gene Symbol: ARFRP1
  Gene Name: ADP-ribosylation factor related protein 1
  Uniprot ID: Q13795
  ENST ID: ENST00000614942
  CDS Start-End: 149-514
agcggagcgcggaggccgctgggacgcggttcagctcattccctgaggccggcccgcgtcccgtcaggcgccgcgcggggttagcgcggggtcagcggaggtcagcgggggtcagcagcagcggctccgagggcgcggcggacgcaggatgtacacgctgctgtcgggcttgtacaagtacatgtttcagaaggacgagtactgcatcctgatcctgggcctggacaatgctgggaagacgaccttcctggagcagtcgaaaacccgatttaacaagaactacaaggggatgagtctatccaaaatcaccaccaccgtgggcctaaacatcggcactgtggatgtgggaaaggctcggctcatgttctgggacttaggagggcaggaagagctgcagtctttgtgggacaagtattatgcggagtgtcacggcgtcatctacgtcattgactccaccgacgaggagaggctggctgagtccaagcaggcgtttgacgtgcctctcaatccctgacatcaagacggccttcagcgactgcaccagcaagatcggcaggcgagattgcctgacccaggcctgctcggccctcacagggtgagtgggggctgcacctgcgggggctttggggaccgagaccccccgcctcacacccgctgtcttcacagcaaaggggtgcgcgagggcatcgagtggatggtgaagtgtgtcgtgcggaatgtgcaccggccgccgcggcagagggacatcacgtaggcgcagccgcgctgccgtcgggacggctggtcccctggtgctggaggagtggcctcctgttggctcccatgctgctgatctggggggtgggtttgctttgctttggggttcttctatttactttgttttctcgaagacaaactttcctctatgtctggaaaagcgtaggcatccggaggctttggaggggagtctggcagcccggctggcccaggccctgcagcggcagcctttccacagggcgcagcggcggcctttcgaggccctttctggggggtctgagggagacctggttgggaattggggctccagtgctcaggctggcttgggctgcatgaggacagccctgtgggaccctcgggagaccccgtggctgtctccgccccatcgaggaggaggcccgtcagccatggctgccatctggcttctgccctgtgaccccgtgaccccgtgaccccggaagtggtctggggctgatcttgccttgaggaagacccaggccatgttcccaaaggccagcgggggccctggattgtgatgcagcctcgggacagggctgaggcctgcgggggaagacctataccccacgcctgggcctggcttcacctcaccctaatcccccgggagggagctgactgatgcaaaaagctgagggggcctgctgggagtggctgtttttatgccccagccccgcaagttggggagtgtttgtgggggtccagagccctcccccagccaggagagaacctcccggaggggttctctgtggggccctgtgtcccctgctcgggagtaaggctggtcctggggtcctccctgcacggaccccactgggcctgccgagtgctgtgttcttcctcagtctggctgtgggcaggagcggcctgcccagtgtcacccagggtgagtgcaaaataaagacggcgagtgtggctctgtccatcccttccctcctggagggtggaggctcctggctgttggacacggtgatggtgttactgggctgctcaggggctggtgggcaggtgaggggctccccaggtgggcctggagagtccaggcactcccttcctgcggatgtgggaaggacatggggtcctgggaggagctgctgggaaggggcatgagtcagggtgggggtggcgcagcagctgcggggctgtgactcacaggagtcgggccctggaagtccccgcgtcctctccaggggaccctgtgtgtgttctgcaggttggttcccaggacctgggggggacctccagccccgggaacctggccgtgctggggaggcgagtggctggtgcagccccccggttgctctgggtgcatcgggaggcttcagagcctgccccagagagggagaagcttcacttcccggaaagcatgggaggcctggaggaggtctttggcaggtcccctctcgggaaatcccctgtgagttgggagtgggaggaattcataagtggggggttagtgtgggccccggcgactagggctggcctgagccccatcctgttcttccagcaatgataccctcccaggccctgaccctcgctgagcttcaggggcccctgccacgtgccacagccactgggggcagaggtggcactccccactgatcctcccagggagggtctgtctgaggtaggggaagccccgggcagcagttctgatggcaggcagcctgagggatctgggcacagcgggcggctcaggtgtccccggctgccctcccagtagctgtgcaactacaaccagttttatgaaaaagctttataaaaataagctttaagaaacctc

SEQ ID NO: 105741 - DNA, 2559 bp, Homo sapiens
  Payload ID: 728
  Gene Symbol: ARFRP1
  Gene Name: ADP-ribosylation factor related protein 1
  Uniprot ID: Q13795
  ENST ID: ENST00000622789
  CDS Start-End: 154-759
agcggagcgcggaggccgctgggacgcggttcagctcattccctgaggccggcccgcgtcccgtcaggcgccgcgcggggttagcgcggggtcagcggaggtcagcgggggtcagcagcagcggctccgagggcgcggcggacgcagggcaggatgtacacgctgctgtcgggcttgtacaagtacatgtttcagaaggacgagtactgcatcctgatcctgggcctggacaatgctgggaagacgaccttcctggagcagtcgaaaacccgatttaacaagaactacaaggggatgagtctatccaaaatcaccaccaccgtgggcctaaacatcggcactgtggatgtgggaaaggctcggctcatgttctgggacttaggagggcaggaagagctgcagtctttgtgggacaagtattatgcggagtgtcacggcgtcatctacgtcattgactccaccgacgaggagaggctggctgagtccaagcaggcgtttgagaaggtggtgaccagcgaggcgctgtgcggtgtccccgtcttggtgctggccaacaagcaggatgtggagacgtgcctctcaatccctgacatcaagacggccttcagcgactgcaccagcaagatcggcaggcgagattgcctgacccaggcctgctcggccctcacaggcaaaggggtgcgcgagggcatcgagtggatggtgaagtgtgtcgtgcggaatgtgcaccggccgccgcggcagagggacatcacgtaggcgcagccgcgctgccgtcgggacggctggtcccctggtgctggaggagtggcctcctgttggctcccatgctgctgatctggggggtgggtttgctttgctttggggttcttctatttactttgttttctcgaagacaaactttcctctatgtctggaaaagcgtaggcatccggaggctttggaggggagtctggcagcccggctggcccaggccctgcagcggcagcctttccacagggcgcagcggcggcctttcgaggccctttctggggggtctgagggagacctggttgggaattggggctccagtgctcaggctggcttgggctgcatgaggacagccctgtgggaccctcgggagaccccgtggctgtctccgccccatcgaggaggaggcccgtcagccatggctgccatctggcttctgccctgtgaccccgtgaccccgtgaccccggaagtggtctggggctgatcttgccttgaggaagacccaggccatgttcccaaaggccagcgggggccctggattgtgatgcagcctcgggacagggctgaggcctgcgggggaagacctataccccacgcctgggcctggcttcacctcaccctaatcccccgggagggagctgactgatgcaaaaagctgagggggcctgctgggagtggctgtttttatgccccagccccgcaagttggggagtgtttgtgggggtccagagccctcccccagccaggagagaacctcccggaggggttctctgtggggccctgtgtcccctgctcgggagtaaggctggtcctggggtcctccctgcacggaccccactgggcctgccgagtgctgtgttcttcctcagtctggctgtgggcaggagcggcctgcccagtgtcacccagggtgagtgcaaaataaagacggcgagtgtggctctgtccatcccttccctcctggagggtggaggctcctggctgttggacacggtgatggtgttactgggctgctcaggggctggtgggcaggtgaggggctccccaggtgggcctggagagtccaggcactcccttcctgcggatgtgggaaggacatggggtcctgggaggagctgctgggaaggggcatgagtcagggtgggggtggcgcagcagctgcggggctgtgactcacaggagtcgggccctggaagtccccgcgtcctctccaggggaccctgtgtgtgttctgcaggttggttcccaggacctgggggggacctccagccccgggaacctggccgtgctggggaggcgagtggctggtgcagccccccggttgctctgggtgcatcgggaggcttcagagcctgccccagagagggagaagcttcacttcccggaaagcatgggaggcctggaggaggtctttggcaggtcccctctcgggaaatcccctgtgagttgggagtgggaggaattcataagtggggggttagtgtgggccccggcgactagggctggcctgagccccatcctgttcttccagcaatgataccctcccaggccctgaccctcgctgagcttcaggggcccctgccacgtgccacagccactgggggcagaggtggcactccccactgatcctcccagggagggtctgtctgaggtaggggaagccccgggcagcagttctgatggcaggcagcctgagggatctgggcacagcgggcggctcaggtgtccccggctgccctcccagtagctgtgcaactacaaccagttttatgaaaaagctttataaaaataagctttaagaaacctc

SEQ ID NO: 105742 - DNA, 2974 bp, Homo sapiens
  Payload ID: 728
  Gene Symbol: ARFRP1
  Gene Name: ADP-ribosylation factor related protein 1
  Uniprot ID: Q13795
  ENST ID: ENST00000612256
  CDS Start-End: 709-1173
gcactccaggagcagccgcgccgctgctcacccgccctgtagtccgctccccccagggccgtccccgttttaagaaatggggtgatggggcgtccctacccggcgcctgcaggggctcctggggagcgcgccggtggctcgctgctcccgggtggggcgcggggctggcgctcgagggtgccgtggcccaggcggggctgcagcgagtgtgttccccgttccgcgcgcgtgaagcgtgggagcgaagcctcgggggagggcgggagcgcggctgagctcactgtgaacacccggctgggtagtcccgcgagcaggggaggggccggaaccgatgtgtatgcggagaggtcgcagtcattgctgtgagcaggacacagtggcggctgacctgggagaagttacagagggacggggtgggagagggacgaggagtcgggaatggcccccaggctctcgtcctgagcggtcggctggacgtggggcgccactgaccaccgtggagaagcccgggggaggggaggtgctttctggctgcacactgacctatgttggggtgcccagggcaggatgtacacgctgctgtcgggcttgtacaagtacatgtttcagaaggacgagtactgcatcctgatcctgggcctggacaatgctgggaagacgaccttcctggagcagtcgaaaacccgatttaacaagaactacaaggggatgagtctatccaaaatcaccaccaccgtgggcctaaacatcggcactgtggatgtgggaaaggctcggctcatgttctgggacttaggagggcaggaagagctgcagtctttgtgggacaagtattatgcggagtgtcacggcgtcatctacgtcattgactccaccgacgaggagaggctggctgagtccaagcaggcgtttgagaaggtggtgaccagcgaggcgctgtgcggtgtccccgtcttggtgctggccaacaagcaggatgtggagacgtgcctctcaatccctgacatcaagacggccttcagcgactgcaccagcaagatcggcaggcgagattgcctgacccaggcctgctcggccctcacaggcaaaggggtgcgcgagggcatcgagtggatggtgaagtgtgtcgtgcggaatgtgcaccggccgccgcggcagagggacatcacgtaggcgcagccgcgctgccgtcgggacggctggtcccctggtgctggaggagtggcctcctgttggctcccatgctgctgatctggggggtgggtttgctttgctttggggttcttctatttactttgttttctcgaagacaaactttcctctatgtctggaaaagcgtaggcatccggaggctttggaggggagtctggcagcccggctggcccaggccctgcagcggcagcctttccacagggcgcagcggcggcctttcgaggccctttctggggggtctgagggagacctggttgggaattggggctccagtgctcaggctggcttgggctgcatgaggacagccctgtgggaccctcgggagaccccgtggctgtctccgccccatcgaggaggaggcccgtcagccatggctgccatctggcttctgccctgtgaccccgtgaccccgtgaccccggaagtggtctggggctgatcttgccttgaggaagacccaggccatgttcccaaaggccagcgggggccctggattgtgatgcagcctcgggacagggctgaggcctgcgggggaagacctataccccacgcctgggcctggcttcacctcaccctaatcccccgggagggagctgactgatgcaaaaagctgagggggcctgctgggagtggctgtttttatgccccagccccgcaagttggggagtgtttgtgggggtccagagccctcccccagccaggagagaacctcccggaggggttctctgtggggccctgtgtcccctgctcgggagtaaggctggtcctggggtcctccctgcacggaccccactgggcctgccgagtgctgtgttcttcctcagtctggctgtgggcaggagcggcctgcccagtgtcacccagggtgagtgcaaaataaagacggcgagtgtggctctgtccatcccttccctcctggagggtggaggctcctggctgttggacacggtgatggtgttactgggctgctcaggggctggtgggcaggtgaggggctccccaggtgggcctggagagtccaggcactcccttcctgcggatgtgggaaggacatggggtcctgggaggagctgctgggaaggggcatgagtcagggtgggggtggcgcagcagctgcggggctgtgactcacaggagtcgggccctggaagtccccgcgtcctctccaggggaccctgtgtgtgttctgcaggttggttcccaggacctgggggggacctccagccccgggaacctggccgtgctggggaggcgagtggctggtgcagccccccggttgctctgggtgcatcgggaggcttcagagcctgccccagagagggagaagcttcacttcccggaaagcatgggaggcctggaggaggtctttggcaggtcccctctcgggaaatcccctgtgagttgggagtgggaggaattcataagtggggggttagtgtgggccccggcgactagggctggcctgagccccatcctgttcttccagcaatgataccctcccaggccctgaccctcgctgagcttcaggggcccctgccacgtgccacagccactgggggcagaggtggcactccccactgatcctcccagggagggtctgtctgaggtaggggaagccccgggcagcagttctgatggcaggcagcctgagggatctgggcacagcgggcggctcaggtgtccccggctgccctcccagtagctgtgcaactacaaccagttttatgaaaaagctttataaaaataagctttaagaaacctca

SEQ ID NO: 105743 - DNA, 3241 bp, Homo sapiens
  Payload ID: 729
  Gene Symbol: ARL1
  Gene Name: ADP-ribosylation factor-like 1
  Uniprot ID: P40616
  ENST ID: ENST00000261636
  CDS Start-End: 176-721
gatgctcaggccaccgttcccggcgcgcagtcgcagctgaccctcgctcccgcccccgcctggagtccgacgtggaagttgctggctgactgggcttgcgaggaaaccgcctcggagctgcagccgaaggccaaggaatcactgaagatcggcgagggaggacagggggttcatcatgggtggctttttctcaagtatattttccagtctgtttggaactcgggaaatgagaattttaattttgggattagatggagcaggaaaaaccacaattttgtacagattacaagtgggagaagttgttactactatacctaccattggatttaatgtagagacggtgacgtacaaaaaccttaaattccaagtctgggatttaggaggacagacaagtatcaggccatactggagatgttactattcaaacacagatgcagtcatttatgtagtagacagttgtgaccgagaccgaattggcatttccaaatcagagttagttgccatgttggaggaagaagagctgagaaaagccattttagtggtgtttgcaaataaacaggacatggaacaggccatgacttcctcagagatggcaaattcacttgggttacctgccttgaaggaccgaaaatggcagatattcaaaacgtcagcaaccaaaggcaccggccttgatgaggcaatggaatggttagttgaaacattaaaaagcagacagtaattcagtccattcttctcccctgaaatgaagactacatcacctctctccctttggaaacagtcaagtgtacttcacactactagatgttaaaactatatgattattggcatatactgactgactgcaatatttgtagtaaatagggaaaataagtatttagttggagggataatttgatcgaatcacctgaatgttctatgtaatgtaaaatattcttttcttgctttcttgtgttaaggtatatattctatttgtatggaattcttattcaaatacagttctattaaagagtatactcctattggatgaaaaaaacctatttttgaatagtagttgcagcttgtttgtataaatactaaaaaatatcttaacagatttttttccccttaaaatgaattatctttccaaagattagactcagtatgagagtaggtgaggaacatagtttgtgtaatataatctttatttgcttacctgaccactttttattaagctgttttgtttaaaagcttttggttataggcatgaatattgttttgatggttaacttcactgacttatctgtaagtgtcattttatagtactttacagttgtcaaaaaaaatcttacatatattgatctagttgatcggtagaggaagcttgtgaagtaggtaggacaggttatgatgtcttcactgtatggacgtgaacccagggttctaataggttggcttgcccaaggtcacctgctagcttgtaaggtaggaatagggctcaaagtaaaacttttggttcagaagcttgactcataaactatactatatattcccaaaaatgtcagtattgacaacacagtctaactcttaaataaaattatgctaattagttacattcaaaataatgtttataaatttatttgtctatactagtagaagtgatcagtgacatactataaataatcctaaatggttatatttgatagaattcataacacattaaagagaaaatttcacattaaaggaaggtttaaaaatctattttcagattataaaaggtgtctttactggttttcattccttttatctacatgtaattggacatgtaaacttgttaaaaatcaaaatcttactgattgtacagggagaaattaagcattctgttttaaaaattaggcttattgctagactgtaagtttaaaaacaattcatgttcaaaggagcttttcaaattacccagtccaccacagaatcagctaatgtgacagaagtaaatatagtgcgtcataattgctaaaaacagggtgaatttctttcacttaagttggaaaaccagcctctaaaaaattaggtgctggtaatgagagcttaataccatggttccctgcaggtctcagaaacattagtagttcctttcttggccctcactgtccttccagtgttggcctctggcctcttcccctcacatttatgttcattctccgggcttatattcattctctgctgctttctcccttcacccgtgggactctcacccttcttgctcattctccagcacccattcctactttagtctctttgaaatcttttttggagattttccttcagctacaaatgttccagtacaaccaatattactcctgaggggcaaagactttttcatatttatgtccctagtatctggtatggcgcctggcatatggcatttcagaatatgttcatagttgaaacagtaggatagatatttgtcatcttgacaagtagccctttgcaatttatacttgagttcactcctggtcaatggcacatggctggaaaatgcagaaagcaagttcacttacagcctgaggcttataaagcttgtacagctgcctcccggcagtccaggaaaactgcaaaaaatgggaagtaaggtcctggcaggcagacccggcatgtagccgctggccatcttgaatcctagggcatgaagttgccccaaagttcagcacttggttaagcctgatccctctggtttatcacaaagaataggatgggataaagaaagtggacacttaaataagctataaattatatggtccttgtctagcaggagacaactgcacaggtatactaccagcgtttggatattgatatatacatggcaaatctgaatattgttttatgagaggcctggcaatgggtaaaacaccaaacttgaaatcagaacataggtgcaaatggccactcctgtagtttcttttctgtaaaatgggatctggacgaatgataccaaacgtttctttctaacattgtattttataactctggcctatgattgtgttgtgtcttgcattaaaaaaaaaaatttgagagtggtagaattacttctgttatctgaaatacctgagatgcactttaaactgttgaaatgtaagctctgagggcagggaccgtatcttatttactgttagtatccgttgcatctagtgtggtgcacctggcacacagtaggcactcaataaatatgtattgattaaaaacaaagacgtcttcaatatgc

SEQ ID NO: 105744 - DNA, 1231 bp, Homo sapiens
  Payload ID: 729
  Gene Symbol: ARL1
  Gene Name: ADP-ribosylation factor-like 1
  ENST ID: ENST00000539055
  CDS Start-End: 102-509
gaagttgctggctgactgggcttgcgaggaaaccgcctcggagctgcagccgaaggccaaggaatcactgaagatcggcgagggaggacagggggttcatcatggccattggatttaatgtagagacggtgacgtacaaaaaccttaaattccaagtctgggatttaggaggacagacaagtatcaggccatactggagatgttactattcaaacacagatgcagtcatttatgtagtagacagttgtgaccgagaccgaattggcatttccaaatcagagttagttgccatgttggaggaagaagagctgagaaaagccattttagtggtgtttgcaaataaacaggacatggaacaggccatgacttcctcagagatggcaaattcacttgggttacctgccttgaaggaccgaaaatggcagatattcaaaacgtcagcaaccaaaggcaccggccttgatgaggcaatggaatggttagttgaaacattaaaaagcagacagtaattcagtccattcttctcccctgaaatgaagactacatcacctctctccctttggaaacagtcaagtgtacttcacactactagatgttaaaactatatgattattggcatatactgactgactgcaatatttgtagtaaatagggaaaataagtatttagttggagggataatttgatcgaatcacctgaatgttctatgtaatgtaaaatattcttttcttgctttcttgtgttaaggtatatattctatttgtatggaattcttattcaaatacagttctattaaagagtatactcctattggatgaaaaaaacctatttttgaatagtagttgcagcttgtttgtataaatactaaaaaatatcttaacagatttttttccccttaaaatgaattatctttccaaagattagactcagtatgagagtaggtgaggaacatagtttgtgtaatataatctttatttgcttacctgaccactttttattaagctgttttgtttaaaagcttttggttataggcatgaatattgttttgatggttaacttcactgacttatctgtaagtgtcattttatagtactttacagttgtcaaaaaaaatcttacatatattgatctagttgatcggtagaggaagcttgtgaagtaggtaggacaggttatgatgtcttcactgtatggacgtgaacccagggttctaataggttggcttgcccaa

SEQ ID NO: 105745 - DNA, 1322 bp, Homo sapiens
  Payload ID: 729
  Gene Symbol: ARL1
  Gene Name: ADP-ribosylation factor-like 1
  Uniprot ID: P40616
  ENST ID: ENST00000536227
  CDS Start-End: 132-626
gttctcctccgtcctctctcggttccccttgattcctgcggggtccagggacccggacagcttggggacgtccgcagagcctgggtggctttttctcaagtatattttccagtctgtttggaactcgggaaatgagaattttaattttgggattagatggagcaggaaaaaccacaattttgtacagattacaagtgggagaagttgttactactatacctaccattggatttaatgtagagacggtgacgtacaaaaaccttaaattccaagtctgggatttaggaggacagacaagtatcaggccatactggagatgttactattcaaacacagatgcagtcatttatgtagtagacagttgtgaccgagaccgaattggcatttccaaatcagagttagttgccatgttggaggaagaagagctgagaaaagccattttagtggtgtttgcaaataaacaggacatggaacaggccatgacttcctcagagatggcaaattcacttgggttacctgccttgaaggaccgaaaatggcagatattcaaaacgtcagcaaccaaaggcaccggccttgatgaggcaatggaatggttagttgaaacattaaaaagcagacagtaattcagtccattcttctcccctgaaatgaagactacatcacctctctccctttggaaacagtcaagtgtacttcacactactagatgttaaaactatatgattattggcatatactgactgactgcaatatttgtagtaaatagggaaaataagtatttagttggagggataatttgatcgaatcacctgaatgttctatgtaatgtaaaatattcttttcttgctttcttgtgttaaggtatatattctatttgtatggaattcttattcaaatacagttctattaaagagtatactcctattggatgaaaaaaacctatttttgaatagtagttgcagcttgtttgtataaatactaaaaaatatcttaacagatttttttccccttaaaatgaattatctttccaaagattagactcagtatgagagtaggtgaggaacatagtttgtgtaatataatctttatttgcttacctgaccactttttattaagctgttttgtttaaaagcttttggttataggcatgaatattgttttgatggttaacttcactgacttatctgtaagtgtcattttatagtactttacagttgtcaaaaaaaatcttacatatattgatctagttgatcggtagaggaagcttgtgaagtaggtaggacaggttatgatgtcttcactgtatggacgtgaaccca

SEQ ID NO: 105746 - DNA, 470 bp, Homo sapiens
  Payload ID: 729
  Gene Symbol: ARL1
  Gene Name: ADP-ribosylation factor-like 1
  ENST ID: ENST00000551688
  CDS Start-End: 160-318
gtggaagttgctggctgactgggcttgcgaggaaaccgcctcggagctgcagccgaaggccaaggaatcactgaagatcggcgagggaggacagggggttcatcatgggaagaagagctgagaaaagccattttagtggtgtttgcaaataaacaggacatggaacaggccatgacttcctcagagatggcaaattcacttgggttacctgccttgaaggaccgaaaatggcagatattcaaaacgtcagcaaccaaaggcaccggccttgatgaggcaatggaatggttagttgaaacattaaaaagcagacagtaattcagtccattcttctcccctgaaatgaagactacatcacctctctccctttggaaacagtcaagtgtacttcacactactagatgttaaaactatatgattattggcatatactgactgactgcaatatttgtagtaaatagggaaaataa

SEQ ID NO: 105747 - DNA, 776 bp, Homo sapiens
  Payload ID: 729
  Gene Symbol: ARL1
  Gene Name: ADP-ribosylation factor-like 1
  Uniprot ID: P40616
  ENST ID: ENST00000551828
  CDS Start-End: 234-728
gcgttctcctccgtcctctctcggttccccttgattcctgcggggtccagggacccggacagcttggggacgtccgcagagcctgggttcgagttctttacccttatcatgaagttttccctcatccccagctccacttgctgggcagagttgttcttgcggaggctggcaacgcgtcagtcgcaggtggctttttctcaagtatattttccagtctgtttggaactcgggaaatgagaattttaattttgggattagatggagcaggaaaaaccacaattttgtacagattacaagtgggagaagttgttactactatacctaccattggatttaatgtagagacggtgacgtacaaaaaccttaaattccaagtctgggatttaggaggacagacaagtatcaggccatactggagatgttactattcaaacacagatgcagtcatttatgtagtagacagttgtgaccgagaccgaattggcatttccaaatcagagttagttgccatgttggaggaagaagagctgagaaaagccattttagtggtgtttgcaaataaacaggacatggaacaggccatgacttcctcagagatggcaaattcacttgggttacctgccttgaaggaccgaaaatggcagatattcaaaacgtcagcaaccaaaggcaccggccttgatgaggcaatggaatggttagttgaaacattaaaaagcagacagtaattcagtccattcttctcccctgaaatgaagactacatcacctctctcc

SEQ ID NO: 105748 - DNA, 879 bp, Homo sapiens
  Payload ID: 729
  Gene Symbol: ARL1
  Gene Name: ADP-ribosylation factor-like 1
  ENST ID: ENST00000551671
  CDS Start-End: 109-693
cgacgtggaagttgctggctgactgggcttgcgaggaaaccgcctcggagctgcagccgaaggccaaggaatcactgaagatcggcgagggaggacagggggttcatcatgggtggctttttctcaagtatattttccagtctgtttggaactcgggaaatgagaattttaattttgggattagatggagcaggaaaaaccacaattttgtacagattacaagtgggagaagttgttactactatacctaccattggatttaatgtagagacggtgacgtacaaaaaccttaaattccaagtctgggatttaggaggacagacaagtatcaggccatactggagatgttactattcaaacacagatgcagtcatttatgtagtagacagttgtgaccgagaccgaattggcatttccaaatcagagttagttgccatgttggaggaagaagagctgagaaaagccattttagtggtgtttgcaaataaacaggacatggaacaggccatgacttcctcagagatggcaaattcacttgggttacctgccttgaaggaccgaaaatggcagatattcaaaacgtcagcaaccaaaggcaccggccttgatgaggcaatggaatggcaagtatcatgcttccagaagccatctgtgcatttgtgtgtgcttgcagctatgcacgtccacgtgtaatttttctcccgtgttgaggatgaaactttgatttacttagcagcttatttcataagttcctcaagcgttttctctcactggtcttcaggtgcatctgtcttctcaaccacacctacctgattacagttacttagataagcaaattctttgccaatttttagccttttccctgcctcacctcaccct

SEQ ID NO: 105749 - DNA, 731 bp, Homo sapiens
  Payload ID: 729
  Gene Symbol: ARL1
  Gene Name: ADP-ribosylation factor-like 1
  ENST ID: ENST00000551092
  CDS Start-End: 118-312
cctggagtccgacgtggaagttgctggctgactgggcttgcgaggaaaccgcctcggagctgcagccgaaggccaaggaatcactgaagatcggcgagggaggacagggggttcatcatgggtggctttttctcaagtatattttccagtctgtttggaactcgggaaatgagaattttaattttgggattagatggagcaggaaaaaccacaattttgtacagattacaagtgggagaagttgttactactatacctaaactgctggcttttaaaaaatatcctgaagatggtattgatcttgctaattgatgttttgtgcacacacctgcacatgtgtgggggagcagagcatactatttcgtcttaaatgccattggatttaatgtagagacggtgacgtacaaaaaccttaaattccaagtctgggatttaggaggacagacaagtatcaggccatactggagatgttactattcaaacacagatgcagtcatttatgtagtagacagttgtgaccgagaccgaattggcatttccaaatcagagttagttgccatgttggaggaagaagagctgagaaaagccattttagtggtgtttgcaaataaacaggacatggaacaggccatgacttcctcagagatggcaaattcacttgggttacctgccttgaaggaccgaaaatggcagatattcaaaacgtcagcaaccaaaggcaccggccttga

SEQ ID NO: 105750 - DNA, 590 bp, Homo sapiens
  Payload ID: 729
  Gene Symbol: ARL1
  Gene Name: ADP-ribosylation factor-like 1
  ENST ID: ENST00000548070
  CDS Start-End: 540-590
actttggatcttcatctgtaggggtggatccggcctctcgcgttctcctccgtcctctctcggttccccttgattcctgcggggtccagggacccggacagcttggggacgtccgcagagcctgggttcgagttctttacccttatcatgaagttttccctcatccccagctccacttgctgggcagagttgttcttgcggaggctggcaacgcgtcagtcgcaggttcgccgaggtttcttggtgaaagatgagctgcggccccagagtggaagcttaatcattctctttaccaggggcgctgggacggcgtcagtttgaaaaacctgagagcaggtgttgcttatgttgttttatggccagtttggcatttgtctgctaatctgctgtagcgtttcatgtaataatacgggtatttctagtcggcaaatgaaactttattcttggttcttggcccgctgattgagggaactgcattctcacaagcatcaggtggctttttctcaagtatattttccagtctgtttggaactcgggaaatgagaattttaattttgggattagatggagcaggaaaaaccacaattttg

SEQ ID NO: 105751 - DNA, 10845 bp, Homo sapiens
  Payload ID: 730
  Gene Symbol: ARL10
  Gene Name: ADP-ribosylation factor-like 10
  Uniprot ID: Q8N8L6
  ENST ID: ENST00000310389
  CDS Start-End: 97-831
gggtgggcgcggccgcagcagtcgcagcggggccatcttcggcgggcgagtgggctcggcctgtgcaacccgcacctgcgtccctcgcccggcccgatggcgccgcggccgctgggccccttggtgctggcgctgggcggcgccgcggcggtgctgggctcggtgctcttcatcctctggaagacctacttcggccgcggccgagagcggcgctgggaccggggagaggcctggtggggcgcggaggctgcccgcctccccgagtgggacgagtgggaccccgaggacgaggaggacgaggagccggcgctggaggagctggaacagcgcgaggtgctggtgctggggctggatggcgcaggcaagagcacgttcctgcgcgtgttgtcggggaagccaccgctggaaggccacatccccacctggggcttcaactccgtgcgtctgcccaccaaggactttgaggtggacctgctagaaattgggggcagccagaacctgcgcttctactggaaggagtttgtgagcgaggtggatgtgctggtgtttgtggtggactcggctgaccgactgcggctgccctgggcccgacaggagctgcacaagctgctggacaaggaccctgacctgcctgtcgtcgtggtggccaacaagcaggacctgagcgaggccatgagtatgggggagctgcagcgggagctgggtctacaggctatcgataaccagcgggaggttttcctcttggcagccagcattgcccctgcaggacccacctttgaagagcctggcaccgtgcacatctggaaactgctcttggagctcctctcctaggctggagctctcctgcttgccacctgcctgtcaagaccatagttgtactgctgctgcttcattgccagactgggcctggggcaagagccacatggcagcatttcccttttcccctcctttgcctttcaagagcagggcctgggcaaggccaagaaccatgcagaagccttcctggtgaggtggccgtgaagccgaagcagggaggtgggtgagacagagggtggggaggatagtgtctggctcattccaggctggaatgtggatccagctttcccttctcttacctgtacagtgagatgctcagtgggctcaatcctccactacaggtcccggtacctgaggaaccagtgtaggtgtcagaaatactcctagagcctcaaggtctcccagtccagaaacagtctggtgacgtcatgcccttctcatgtgggcagcttctgagtggtgacacagcaagcctttgttcctgtcctgcattgtccagccccagctccacctaagtgacttgtggccttgtgcaatctctgcctctctgaccccagggccattatttttaaagggaggtggtttcctaattcggagatgcctttcccagccatgggagtgtgaagtgctaggatgaacctggccatcctagcaaggagctttctgaagacctccctgcctttccctgagcccaggcctggcctgccagcctctcttgactacagaataactgatattcacccaccaaacagaaaaagtgaaggctgggtttttcccctctaatctggagacaagctgctgctctcgtactaactgtgccagtgcccatgtttacagaagtcaggggaaggaaggagcctgtgtccctgggacgacagtcaactggagctaggtgttgacctcagaactgcattttatttattaatttataagcagaacaggccagagttctaggctctgtttctaggtgctgttttcaaaaccccagatgacagtcatagaaaatttggaacttaggaaaatagctggaatcatgaatgacaatgagataacatacagatgtcagtggagacaaagttgtgggttcctcctcccacctggctttgaggctgtcgtcgatatcatagtactttacatggattcacatgaactgaaacgccaccacttggcccaggatgttgaaagggtgcaaattccttctgggtagataagaaatgactctgggagaggatttcccttatgtgaatctaggtaaaaagatggaaaaaaattgtattatgtgatcctaaggacaggaatagcagaccagccaacgggatggccttgggtacatcactcagcctttctggacccaatttttccccagtgaaagccaagttggactgaatttctggagttctcatcagtgcacattccatagttctccagtgcttggcgatcagcccaattgaaggactggctctgtactgacacttattatcggtacaggcaaagaggagcctgttgtctgttagggaccactaaatcaacaaccacaaatggattttttttttaagaggagctgtgcacctcaatttgctgtctagttgagaatagagattgtgtgccttcatttcatttgacatttacccagcatgcctcagttccacaccgtgaccagtgtaagaagaggaactatgataaaaacagttcaacaagccgcaaggagggtgggaaattctgaagtccagaagcgagtgtgatctttggaatagtggctgctgtgcccttgggcgccatttgaagaatcactgttcttgaaagtgctggttcactttctgcagtaagaagtgatttatgggcttttatgtaaaattttaagaatgacttgggtttcagagtagcctttgaaactttgctggcagcttttcattttgtcattggaaggctaagagacttttctcctttgttctatgaactccttgttcttcagggcttgaaggcaaaaaaaccttagacaactttaacgaagtttaaaaagtatgttctgtttttgagcagaaaaaagattcgtgaactggttagtacttagcaccaaaagcagttcagaatgctcagccccacaatgtgtgtaggctacatttatagccagagaaacgaaaataacttaggttgcctgattggctgcagtctggcatttgccttacctgaacatgttttagcagccttcagccgacgattgactgaaggtttggctgctgtgattggctaaaattcggctacttgttagaagaacatacttttaggttaggttacgagttgtttacacgttaagttacaattcactgtgtacagaggcagctttaggccagacttaattcagcttcacagtgtccctcattttgctcagccccttaattttgagagattgaccaaaatcccacgcactgacactaccttctgtcactatttgacctcattatggaactcacagtttacaatgttaaatcagttagcggattctgtatgtcttcatgtttctgttactctaaccgtaatgagaccatttgaggtacaaaggatgactgcattggtgtacttaagactacaacacatcagtggggaccttaggatggctatcaggagtgtaataccaagaaactggaatgcatcccttaatatgagtctccacaaaccaaactgattggaatcaaacaactcaagttcagacgataaaaatagttcaacagcgtgcaagctctgctgctcatagcctgttcagggtataatggcaattaaggacatagttcactatgaagtaccttaattgtaaagtgtttgattttttagttagcttttggtaacacaagtcatggtgattgggatacccactaaaagaaacatgaagattagaaaaccttgaacagctaagcttgctgtctaccattcaggatgcctgcaaaccaaccactagctgctcctgcaaacacattatgtgttccttttccctgagaaatatccttgatgtgtttggtggcagtatctacagaagcggcagccaccaccgccttttgaagctctccatagtagtagaatcaggaaagataagcacagcgttcagttttgttcagcaccatacacaagctcctagctgggcaaaggaaatctaaagctgcatgaagttccattacgtgtttttgttgaacacaggtggcctcatccatccatccatccatccatccatccatccctccatccgtccacccgtccacccgtccacccatccacccacccacccatccatccacccacccacccacccatccacccatccatccatccatccactcatccacccatccacccatccatccatccatccatccatccttccatccatccacccatccacccatccatccatccacccatccatccatccatccatccatccatccatccatccatccatccatcatccacccatccatccatccatccatccatctgtggcttctacctgtgcgaatctctgtgctacaaaattcttttcaatttagcattaactttaatttccatacagttggcacctcactgccgccaaaagtgagtccgcaggaactccactggaatatttgctcaggggaaactaactaatcatctgtttcaaggttggtattcattttagtctttgacctctgattatggggactttcagggaaagctgtttgcaaggtgagcatgaatcaggtgaaacagcaagatctgaagtcaggacagagtaagcaaattatccacagacctaatatgtaccctctgaagctggaaagtgggggccacctggtagcatttgagcaggggtcacttatgttcccccataagtctgcacagctcctaaacaaggtccagtgggcaacttatttttatgtggtccctttatagcatgctgtaagggtgcataaccacagccagtgagaaggaaccctactggatttaacccagtgacattatataagcaatcgcttggagccacataggtagttcccaggtcctgaatatgtggtgcctgaaagcataggtgtaggcagtgttccttgcataggcattacctggacaggtttttttccatattggcacttattaattgaaaaggtcagggtaccacttccaatgagtgtagggaagcaagcagtagtggtgtttagaatatcaaggttagctgctggatgcggtggctcacgcctgtaatcccagcactctgggaggctgaggtggacggatcacgaggtcaggagatcgagacaatcctggctaacacagtgaaaccctgtctctactataaaatacaaaaaatcagctgggtgtgacggcatgcgcctgtagtcccacctactagggaggctgaggcatgagaatcacttaaacttgggaggcagaggttgcagtgagctgagatcacgtcactgcactctagcctgggagacagagcgagactccgtctcaaaaaaaaaaaaaaaaaaaggttagcattccactcttcctttggggtttcagggtgacttattgggaaaatggagagatactggcattaatggaatcgtttcctgatttgagcgttaagtcacaaacccaacaggaactccagtttcttgctagagcattagcctttgctaaagccggccccagattatggtcccacggattttcccataaagaaagggaaaggatttgcggacagaaaataggaaagagagggagaaagataagatttttgcgattgcagtgaagtcttcatccacatctagggaaagctgttcatgtctaggacgtgatctgcttctggggaaaaacttccctggttagctttaccttaaagtctccaacaggtgtgtagttccaggagtctggagaggtccttttgagttgtgagatgtggacccaaggttcgaagccctgaagttttaccacagtgtgggtaatagaagaacttggtattgtctctttctgtgaggtttaagggcactttttctctgataccatctccagaagacctagtctcaggttacagattgtgaaggctttgatggtcctctgtgggtcacagaaagtttattttattttgtcaaaatacagtgtgacataatgcattacagctttgtagtatttagtggcatcagcatttaggagagtaggaactacgtgaagttctgttaggagcacaggctttctagtaactatttcataggggtcaatctgtgtctgtcgtaggaatggatctgatctgctgaccaaaggcaatggttggctttcttcttcagagatcagaaaaaaatgaaattcaaagccaatggtggtatctttggccaagataatccaatcgattcagttaattttgccaattttagttttaaaatatttgtccttttgacctttccagaagactgagggtgaaagggacaatggtagtaccactgtgtttctaacactttatttagctgcttcatagtttgtccaataaaatgagttcctctgtcactggagatttttccagagatgccccataaaggaaacacatgttcttataactccttagctactgccatagcatcagctctcctacacaggaaagcttctatccaaccagaaaacatgccaactattacaagaacatactgatacttaattgagggtggcagttgaatgaagtccatctgtaagcgttcaaatggtccatcaggtgttggtggaaatacaccacttggagtttttattatcttccctggattatgggtttgacaaaccagatattggttataacccatttcagcattttacagtggtcacactatcagtattttttataatctggatcatcttgctcatttgtgaggtgcagaggttgttttttgtttttttgttttgagacaggatctcactctgtcacccaggctggaatgcagtggtgcaatcatggctcactacaacctccacctccagagatcaagcagtcctcccacctcagtctcctgagtagctgggactaccagtgtgcgccaccatccccagctaattttttgtaatttttatagagagggttttatcctcttgcccaggctggtcttgaactcctgggctcaagctgtcagtccagctcagcttcccaaagtgctggggttatagggaagagccaccgtgcctggccaagtgcaaagcttttaacaatagaagtttcaagggctcaggaaggaccagggggccatctaggctctccatgagttcacgcttaacattatgtttacgtctgtcagataacaattttggttttccacatcaggtgcattgcactgttagatgggtcatcataaaggtcatcaatctagtggcattcattcaatttgcacatcctaactgtttcagcactatctgatttagcatgaaaatctgccagggcagtcccttgatattcaggttcagctttccatgtatgggcttcaatcttataagaatttgttatttatttttcacctttactcaagatagcttggaacttataccaatttgtgatggcaacaggatagtagcaagttcatccacttgagtctgtttttaataggggctccactagaagtgagaaaccctctttgtttccataacatgccaaaattgtggactgcaaaggcatgtatatatacatagcatgtctgctatgtatatagcattttctgatttccctttagctatatgataagctcaagtgagagcaaaagttctgcagtttgagctgactgaaactgggaagagtccgctttttattaactcattttgggttttaatgacatattttgccaaagaataatttcaaatgggggccgggcgctgtggctcacgccgggcgtggtggcaggcacctgtagtcccagctacttgggaggctgaggcaggagaatggcgtgaacccaggaggcagagcttgcagtgagccgagatcgcgccactgcactccagcctgggcaacagagcgagactctgtctcaaaaaaaaaaaaaaaaaaaatttcaaatgatgttggtctacttgctgaaaaatgctgggtttgactggaatttaatagactttccacagcacgtggaacttgcaaaaaaaaaagttcactccctaaaaccagatcagatgaaccctttaccaatctgggggttgctgccactgcctttaaacaattgggatatgccttagctatggggtctaattgcaggccatgatatgtgatgggcctgtgctttcccaactatgttcttttttatgtatgtatgtatgtatttattttttgagatggagttttgctcttcttgcccaagctggagtgcagtggtgtaatctcagctcgctgcaatctccgcctcccaggttcaagtgattctcctgcataagcctcccgagtagctgggattacaggtgcccgccaccacgcccagcttattttttgtatttagtagagatggggtttcaccgtgttcgtcagggctggtctcgatctcctgacctcaggtgatccacccgcctcggcctcccaaagtgctgggtcaactatgttcttgagtaagaactcctgatgcctgattgttatgtttatgaacaaacaaggtgaagggttcagtataagttggaaatcctagagcaaccatatctgttactttccatcctggttatatttcttaattagactgcgaagttctgaatgaagtcctttttaaatagagcagttaatgccatttctgtctctgcaggtttcacaagtagtgtttctaaatgagctctataatctgaaaccggttcatctttcttttgcccacaagattatgtgattgaccaatcaattttttgtggaaaagccctagggattgaatttaaaagatcttcagcaattcttccagttcctttttgcctcctcttggggttttggagtggtctttagtatcctcaggctgttgccattctgctcctgctgtcaattttcaagcttcaccagtatcatgtgaataaattggtaaagattagagagtcctgaatcataagctcttatgaggattctcaattttccagtacgtttttgagtattttctcttggattagttaagtctttatgatggctctaagctcagctttagaccatggagtaaaagtggttacagcaggcaggctggttgactagagagtctcactttgtaaggcatttgtccaacttcccctttttcattagcctcaaggagaaaaggtaactgagcaaaagggttactgtactcaaagcatcgaggcaaagaagagacagagaaggagcaatccaggttcatgtgctgcatgagcctttcatttgcgttttgtaaagaatcttttaggcaattttagatttgtataatcctttagatgcctctgcataccgatttaaaatgcatcccgttgtttttgtggcgttttcgatcctttcttttctaatgtgtcccataaataaacagttttatttaaagtttcctcatcgtggccattttaattctaagttgttcctagtaaggttaacctgtttttctaaaaacaagttctgggtccataattttggtttttttttttttttttttttgagacagagtcttactctgtcaccacccaggctgtagcgcaatggcacgatctcagctcactgcaacctccgcctcccaggttcaagcaattctcctgcctcagcctctcagcctcccgagtagctgcgatcgatcacaggtgtgcaccaccgcccagctaatttttgtatttttagtagggaggggtttcgccacattggccaggcaggtgaggtgatttgcccgcctcggcctcccaaagtgttgggattacaggtgtgagccatcacacccggacttgttttgttttttgagatagagtgttgttttgtcgcccaggctggagtgcagtggcgtgatctcggcttactgcaacctctgcctccagggcacaagagattttgccacctcagcctcctgagtagctgggactacaggcatacaccaccacacgcccaactaacttctgtattttttgtagagatggggttttgccatgttgcccaggctggtctcaaacttgtgagctcaagagatcttcctgcctcagcctcccaaagtgctgggattacaggcatcagccaccacacccagccccataattcttacatataaaattagatggagtcccagactccttggattgaaacaaacccgttatcaaaaggataacctacccaatgcctctaactggatccatccagtttattatgggatgcagtccaatccaggacccagtccagtaaaaattgctcagataaacttggagagctcaaaacacaaatttatggagctcagaatcctaggaagaactcactatgacctccagttgctgtgaggggtcagtgggcacaatgggccctggcagataccttttttgcatggtcactcagtgctcctggaggttgctgaagttatactttggatcctacttctgacaccagtttgttaaaagaaaaattttatagacaagttaactttaacagagcagaaaagggttcatgaaccaggtagtgctcaggaccaaaagcgatggttcagaatgtgtgcaggctatatttataagcaaagaaacggaattggcatacagagatagcctgactggctgcagtctggcgtctgccttctttggacatgttttggcagccttcagcctatggttggctgagatctgactacttgttacaagagtagactcttacatcaggttgcagggtgtttacacattaagttaggttataattcactatgtacagaggcagctttaggccaaacttaacaaaggtcacctttggaaccagcactaattgttgagggggtccctggggtccctttttacctaatgaagatctgtctgagtctaatgaatatattgtacaatttttaaagtccccagttgtgggaggtgaacttgaagaataaagtttcattatgttta

SEQ ID NO: 105752 - DNA, 258 bp, Homo sapiens
  Payload ID: 730
  Gene Symbol: ARL10
  Gene Name: ADP-ribosylation factor-like 10
  ENST ID: ENST00000514533
  CDS Start-End: 1-145
gagcgaggtggatgtgctggtgtttgtggtggactcggctgaccgactgcggctgccctgggcccgacaggagctgcacaagctgctggacaaggaccctgacctgcctgtcgtcgtggtggccaacaagcagatgttaaaatgaaaacagcgacactgaacaatttcccgagggtgctgaggccccagcctcctgttcgtccttgatttctccttccttcccatcccccgtgcaagtcatcagcagggcctgtcatc

SEQ ID NO: 105753 - DNA, 380 bp, Homo sapiens
  Payload ID: 730
  Gene Symbol: ARL10
  Gene Name: ADP-ribosylation factor-like 10
  ENST ID: ENST00000503175
  CDS Start-End: 1-240
cctgacctgcctgtcgtcgtggtggccaacaagcaggttctgccgtaccgatttagcgtggtcccaggcatgtcggatgtgggagctaccggcaaagagagacatcgcggatccgtcatctcgcggaccgtcccggccgaggcccacggccacccggaaccccagccccctcaccattcgatccgcggcgctgccttccgtcgagcattccggttcagacgctttcggttgacactgtaaccaaacttctgcctccgggttttgcccttggccttgggcatcgcgctgaccaccgcaccagcagctcaaacacgctgcctctgtctctcagacctcgtgtaacaaactccttccggaaggcgtgcacaaggctttgcggg

SEQ ID NO: 105754 - DNA, 3760 bp, Homo sapiens
  Payload ID: 731
  Gene Symbol: ARL11
  Gene Name: ADP-ribosylation factor-like 11
  Uniprot ID: Q969Q4
  ENST ID: ENST00000282026
  CDS Start-End: 336-926
cacccaagtctgagttgctaaaaaatggagctgtcactgggccttgctctgccaggacctgcagagccggggacctctctgtggcaagcccagcaagatgactgctctgaggcgccctagggctgagggaggggccgtgacaccagccccgccccccagccacctgggaaaaggaagcacaaaaaggagaagcagcaacggctgctctgcttccttcccatctcgctcttgggtcatgcctggccagcagaaagcagctccataggggaggagagccacgcaggatctcacagctgcagtctaatagtaacacagaggattcagcagtggccaccatgggttctgtgaattccagaggtcacaaggcggaagcccaggtggtgatgatgggcctggactcggcgggcaagaccacgctcctttacaagctgaagggccaccagctggtggagaccctgcccactgttggtttcaacgtggagcctctgaaagctcctgggcacgtgtcactgactctctgggacgttggggggcaggccccgctcagagccagctggaaggactatctggaaggcacagatatcctcgtgtacgtgctggacagcacagatgaagcccgcttacccgagtcggcggctgagctcacagaagtcctgaacgaccccaacatggctggcgtccccttcttggtgctggccaacaagcaggaggcacctgatgcacttccgctgcttaagatcagaaacaggctgagtctagagagattccaggaccactgctgggagctccggggctgcagtgccctcactggggaggggctgcccgaggccctgcagagcctgtggagcctcctgaaatctcgcagctgcatgtgtctgcaggcgagagcccatggggctgagcgcggagacagcaagagatcttgatccagacagagcagcatatctttgctcatacaaactagaagaaccagctgatccttgagaaatttacgcttagtctatcaaacaagaaatgctggcttggcccggtggctcatgcctgtaatcccagcactgtgggagaccacggtgggggaatcccttgagcccaggagttggagagcaacatcacaacaccccatttctactaataatcaaaaaattggccgggcatggtggcatgtgcctgtagtcccagctacttgggaggctgaggcaggagaatcgcttgagcccaagaggtagaggttgcagtgagccaagatcgcgccactgcactccagtctgggcaacagagtgagaccctgtctcaataataataataataataatgatgatactctaagaaaaaaatctcaacatacttcatttaatagctcgttaccaagtgtgaatgaagcaatatgtcataatagagtagccactggttgcataataatagagacctaaattctcaaatagggaaagaggttttaaaatcaaatttgaggccaggtgcagtggctcatgggcggaggagggcagattacttgaggctaggagttcaagaccagcctggccaacatggtgaaaccccatctctactgaaaatacaaaaattaggcatagtggtgcacgcctgcagtcccagctactcaggaggttgaggcagaagaatcgcttgaacccaggaagtggaggttgcagtgagccgagattgtgctgctgcactccagcctgggtgaaaaagacaggctgtgtctccaaaaagaaaaaaaaaagtcaaattcaaatatcatctggacatgtcacaatggatcgcggatccttatgagtgattttccccagtggcccctggggatgtgccactgtcactcagaagggcaagctaggcagggcccatacaacagcaggggtctgcaggttagacgttccctgccctgggacgctcacccctgggcaagaggctggaagttcacaccatccaaaatttatccttgttttttttctgatgctaattagcctctcccgattttatgacatcttgtgttgatctttttcaaaaactcattttcttttttttccttctcttttctccttcttgtagcacatatctttcgttaaagatcagatcaataaaatattttatttattcattaatttaacaaaaaaaacagagcatttagtttgtggcaaaaacactgagctttcgaatatgaatcatgtgctttaggtgggaattgtgaattctgaagatacagatgacagtgacgaatgccttctgtctcatgattgacagggaaaaggaaggttgaccatagcatcctagaaggctcatcaggtgatcattacctagcatccatgaagcacctgaaattatttgcaaaatgttacgctttggaccatttttccggggaaggagatccagaactttttaccagattttcaaagacatctgtgactcccaaaagttaacaatcactgatgtggttgttgtatccctcatccaaccccagaacactttctgtaatctgagttttttaatggcaagtggcctatatttagcacctgttctcatgttaaacagctctgaatgttagatattctttcttatcctggactggttctctctatctctggagtaatgcagtataaattggccatcagtaccctcctaaaatctgagatctgccaggcccctcttctaacaccaggttaggcatgcttggttatttccagtacttgtcagtcaacatgtttcaagacgctgtgttagacactagggatgcaaagatgaatgagataaggcctcaggcctcatggaaggtgagacagtaaagacattactcccataaaaatgtgaggagagagactcagttcagcaactgtttattctgtttattgagcacttacttggaccaagcactgtggtcttggtgttttacatagactgtctctaattctcacaactctgcaaaatatatatattcccattttataaaactacaaactgaggctcagagaaggtgtgacctcttgttgcttgaggcacagagttataaagtaacatatctggaatttgaaatcagatctgtttagggctaatgctgcatttttctacaacatcatgcctctagaaggtttaagctaggtaggctttcagccagcagacatgatggggagagccttctaataagagggaagagactgcttggaagcatgaagggaggtgtaagaaagataagtaagtcagtgtacttgcaacagaggcttgggatgaagggtgggtgaagttgacatcacgatagaaaacaaaactggaatgggagtttaggtccaatttgggcaaggttgtttgaatttcaataatcaggggtttgggtcaaggaagaaaaatcatgggacttgccatttaggaggataattttgtggtagtgtggaggtgaaataaagagaaaagggaaccttggagctgggaaggcaggaaaccggctagatgaccatcacacagcaaaggagggagtggaagagagatgagaaaattgagagctattattaagaaaaacagttgagagaggaagaatttgaagagggctcaagattttgagtccacatgacagaaggactggaatgccatgaactggagaaggtgagcgctgaagaaccaggatgggacggggctggaacagctgggttcagcttttgcagggtgggtacgtgtttggttatagctgctttcagattgttccattatctgtactcccaacaaccctgccggatatatttgttggctttcactc

SEQ ID NO: 105755 - DNA, 489 bp, Homo sapiens
  Payload ID: 732
  Gene Symbol: ARL13A
  Gene Name: ADP-ribosylation factor-like 13A
  ENST ID: ENST00000372953
  CDS Start-End: 1-489
tttagcaaacaaacaagacaagaagaaagccctcatgccttgtgatattattgactatctacttctaaagaagctagtgaaagagaataagtgcccatgccgagtagagccatgttcagccatcagaaaccttgaaagaagaaaccatcagcccatagttgaaggactgcgctggctattagctgtcattgatacttgccaactaccacctacctcgagcatctcaatctccaagaataacacaggctctggagaaagatgctcatcacacagcttctccaccagaacaggaatgtcaaaggagaaaagacagcatctagaacaatgctcaatcgaagctaagcctctaaagtcaatcctacagaaagaagccatcaaatcaatcctatactcactgagaggctcaagaagagtgagatggcatccattgagaatgaagaccaccttggtaaaaaagaacagagactttacatctttgtaccgagatgc

SEQ ID NO: 105756 - DNA, 1102 bp, Homo sapiens
  Payload ID: 732
  Gene Symbol: ARL13A
  Gene Name: ADP-ribosylation factor-like 13A
  Uniprot ID: Q5H913
  ENST ID: ENST00000450049
  CDS Start-End: 114-884
aagaaggctagaaagctcaatgcgtcttcctattactctgcatatcttatgtcttccatccaaaaagaatcaacttatcagataaataaccacctcatgaactaagatgaatcatgttccggcttttgtcctcctgctgctcttgcctaaggacaacagaagagacacgaaggaatgtgaccatccctatcattggcttgaacaactctggcaaaactgttcttgtggaggcattccaaaaattacttcccagtaagacagaccattgcatgaaatcggaactgactacacttttgttagatgagtatgaactttccatctatgacctgaatggagacctgaagggccgggaagcatggccaaactactatgcacaggcccatgggcttgttttcgtcctggattccagtgacataagacgcatgcaggaagtgaagatcatcttaacacatctgctgtccgataaaagagtggcagggaaacccatcttaattttagcaaacaaacaagacaagaagaaagccctcatgccttgtgatattattgactatctacttctaaagaagctagtgaaagagaataagtgcccatgccgagtagagccatgttcagccatcagaaaccttgaaagaagaaaccatcagcccatagttgaaggactgcgctggctattagctgtcattgatacttgccaactaccacctacctcgagcatctcaatctccaagaataacacaggctctggagaaagatgctcatcacacagcttctccaccagaacaggaatgtcaaaggagaaaagacagcatctagaacaatgctcaatcgaagctaagcctctaaagtcaatcctacagccatcaaatcaatcctatactcactgagaggctcaagaagagtgagatggcatccattgagaatgaagaccaccttggtaaaaaagaacagagactttacatctttgtaccgagatgctgctgacaaagcttgtggacaataagtcatgggtgatcaaccaaaactgagccttagaaatacagggttcatttagaaataagtatttttttctttaaggttcttaggcagaaaaggattggcaaaa

SEQ ID NO: 105757 - DNA, 1535 bp, Homo sapiens
  Payload ID: 732
  Gene Symbol: ARL13A
  Gene Name: ADP-ribosylation factor-like 13A
  Uniprot ID: Q5H913
  ENST ID: ENST00000450457
  CDS Start-End: 117-989
gacaagaaggctagaaagctcaatgcgtcttcctattactctgcatatcttatgtcttccatccaaaaagaatcaacttatcagataaataaccacctcatgaactaagatgaatcatgttccggcttttgtcctcctgctgctcttgcctaaggacaacagaagagacacgaaggaatgtgaccatccctatcattggcttgaacaactctggcaaaactgttcttgtggaggcattccaaaaattacttcccagtaagacagaccattgcatgaaatcggaactgactacacttttgttagatgagtatgaactttccatctatgacctgaatggagacctgaagggccgggaagcatggccaaactactatgcacaggcccatgggcttgttttcgtcctggattccagtgacataagacgcatgcaggaagtgaagatcatcttaacacatctgctgtccgataaaagagtggcagggaaacccatcttaattttagcaaacaaacaagacaagaagaaagccctcatgccttgtgatattattgactatctacttctaaagaagctagtgaaagagaataagtgcccatgccgagtagagccatgttcagccatcagaaaccttgaaagaagaaaccatcagcccatagttgaaggactgcgctggctattagctgtcattgatacttgccaactaccacctacctcgagcatctcaatctccaagaataacacaggctctggagaaagatgctcatcacacagcttctccaccagaacaggaatgtcaaaggagaaaagacagcatctagaacaatgctcaatcgaagctaagcctctaaagtcaatcctacagaaagaaggtacgagattatggtctaaaaagaatatgtcagtaacatttgctttagatgaacccatgaaagaaggtgaatgttctaggagaatgagagctcagaatactacgaagctttgctacaattgaaggagtggcttatagactccagctccatatgctgatgacaatatttttgaagagaaagtaaaagaaagtaacagagaaagtaaagagaaaaacagagggaaaccaaaagaaacagttgatatccctcccttagcaaacaggttcatctccagaactatcaggactacccggtttttaaatttccatttgataatatttctacactccccatacaactccacctactctaatatcacatccctgagaacccctgttgttcctgtatatctatattctagccatcaaatcaatcctatactcactgagaggctcaagaagagtgagatggcatccattgagaatgaagaccaccttggtaaaaaagaacagagactttacatctttgtaccgagatgctgctgacaaagcttgtggacaataagtcatgggtgatcaaccaaaactgagccttagaaatacagggttcatttagaaataagtatttttttctttaaggttcttaggcagaaaaggattggcaaaaataaatagaacttctttgctgag

SEQ ID NO: 105758 - DNA, 693 bp, Homo sapiens
  Payload ID: 732
  Gene Symbol: ARL13A
  Gene Name: ADP-ribosylation factor-like 13A
  ENST ID: ENST00000494863
  CDS Start-End: 1-373
catcagaaaccttgaaagaagaaaccatcagcccatagttgaaggactgcgctggctattagctgtcattgatacttgccaactaccacctacctcgagcatctcaatctccaagaataacacaggctctggagaaagatgctcatcacacagcttctccaccagaacaggaatgtcaaaggagaaaagacagcatctagaacaatgctcaatcgaagctaagcctctaaagtcaatcctacagaaagaaggtacgagattatggtctaaaaagaatatgtcagtaacatttgctttagatgaacccatgaaagaaggtgaatgttctaggagaatgagagctcagaatactacgaagctttgctacaattgaaggagtggcttatagactccagctccatatgctgatgacaatatttttgaagccatcaaatcaatcctatactcactgagaggctcaagaagagtgagatggcatccattgagaatgaagaccaccttggtaaaaaagaacagagactttacatctttgtaccgagatgctgctgacaaagcttgtggacaataagtcatgggtgatcaaccaaaactgagccttagaaatacagggttcatttagaaataagtatttttttctttaaggttcttaggcagaaaaggattggcaaaaataaatagaacttctttgctgag

SEQ ID NO: 105759 - DNA, 3264 bp, Homo sapiens
  Payload ID: 733
  Gene Symbol: ARL13B
  Gene Name: ADP-ribosylation factor-like 13B
  Uniprot ID: Q3SXY8
  ENST ID: ENST00000303097
  CDS Start-End: 283-1248
acgtcgacgcggggcttttctttagccgggtcccgctaactcggctacggtgtatctgcgtctttggtcaggttgttccttggctaagagggcagtcgtcgcggacccacgcggttagcaaggcttagtgctcgggccggccgccttcacttccctcccggcttttcctcccgacttatccactttaggggcgtctcggagtgccggaggcccccggggaagagcggggtgccggtgtccgctccgggctcggatgggaagtggtgggaggagcgacccgggatgttcagtctgatggccagttgctgcggctggttcaagcggtggcgggagcctgtcaggttggcaaataaacaagataaagaaggagctttaggagaagctgatgtcattgaatgtctatctctggaaaaattggtcaatgagcacaagtgcctgtgtcagatagaaccatgttcagcaatctcggggtatggaaagaaaattgacaagtccattaaaaaaggcctttattggctgctacatgttattgcaagagactttgatgccttaaatgaacgcatccaaaaagagacaacagagcagcgtgctcttgaggaacaagagaaacaagaaagagctgaacgagtgcgaaaattacgagaagaaagaaaacaaaatgaacaggagcaggctgaactcgatggaaccagtggtctggctgagttggacccagaaccaacgaatcctttccagccaatagcatctgtaatcattgagaatgaaggaaaacttgaaagagagaaaaaaaaccaaaaaatggagaaagacagtgatggctgccacctgaaacataaaatggagcatgagcaaatagagacacaaggccaggttaatcacaatggccaaaaaaataatgaatttggactagtagaaaattataaggaggcattaacacagcagttaaagaatgaagatgagacagaccggccatcattggaatcagctaatggtaaaaagaaaactaagaaactaagaatgaaaaggaaccaccgggtagaaccacttaatatagatgactgtgctcctgagagtccaacgccacccccaccccctcctcctgttggctggggaacccctaaagtcactagacttccaaaacttgagcctcttggtgaaacacatcataatgatttctataggaagccactgcctcccctggctgtgccacagcgacctaacagtgatgctcatgatgtgatctcataaacaagacgtatggaggagttctcttaatatcagcaaggtgaactgggacattcttctttctcagaagaagaaacatcttgtaaattgatgactggggcaagataaccataataattttagtgagaagattaatactcaaggacctgacttgataattacttatttgtgtttttcatggttaaaaaaataaaagaagcacaatgaccagtacatgaaatcagcatttggaccaaattagcaagatttactgttgactctggtttatacatccccactcatgagcatacttctgaaggaaaactttacaaaaagagccaatggactcagcactttctttactatttgttcaatagcctatatttctagatattaaatattttttgtaagatatatgcacatagaagggggacttctaggaatttataaccaaaattttaaaactatttttatatttttttaaatctttaaaaattttaattactgtgatattgattatacaccttttttatagatgatttgtttaaattatatctggaaaatagagttgatttactttcagacatgaactatacaaacaggatatatttatatggcttgaggtatgttttgtaatagcgttgttctttaagtgtacatcgtaatttgacctaatttaaaaataatatattttcgaagtagtagattctcagatctttattctaacaattacatgatttgaaaacagtactcaatgagactggaaataccttttgtacctaaatgttttttaaattaatcaaaatacattctgtgagatactattaaaagtctcagtaaagtcctattttaaaggttagacactttcagagatcaaggtgctccctatactcccttgttccatcagaagctgcagtgactcttttaggtgattctaattctttcatgccttgaaattaaactatgaaattaaaggcagaaaaactggaaaacctactgcaggtccagagacttctgttttacaactgggaaacagcttgtgtactaaagtaatgagaataaaaatgttggcccaaaattacttttataaataaataattccaaaataatttcttaatttaaaatgatagcacttctcttgcacttaagaatggcatccataagattctgtatttggcatttagactaacttctagatgtatatttttaataatagattcataatgttacatttaattgaaaacaaacctttatatccaatgaaaatagtataaacagaatgatttttataccaccttgttaagattggtgcttttggtaacttgtactgacacaacagacatgtgctagtatctgataacattaagtacattttatgtcgtttaatataattatttactttaaaaattgtacttcagaacatcagattttattcacattttttaactcactgaactttaataatcaggtcacctgtactctagtcagcactgtatatattcttggagtttgtacatgggacttagcaaccacactgagtgaggtaaaagcatttgatttcagatctaaaattcgtaacaacctaaatttgagaggtggctgaaatgtgatgaaaagcaatacgaaaagacaatgtaaactttgaaaaggattttagagggaaaattgcatagctttttgtaacatttacttaattttaaaactaaactcatacttttgctatctttttaatatttatctcgtttgggagtatacgtgtttttaaaatttgtgttttctatctgtttactatagtgtagctactggcttcatttaataaaaataaatgattttgaaattaaatataatatagaattcacattttatatagctctctcaaaaattaatttttattccttaagcattttaaaaacattttaaaaaatgttttgtaaatccaggtgtattttaacaattaaatgcctattttgttatatgttatacttttattcttaattctgaattttgacattttcacacaataaaaataatttatatcaa

SEQ ID NO: 105760 - DNA, 3659 bp, Homo sapiens
  Payload ID: 733
  Gene Symbol: ARL13B
  Gene Name: ADP-ribosylation factor-like 13B
  ENST ID: ENST00000335438
  CDS Start-End: 235-504
ggtgtatctgcgtctttggtcaggttgttccttggctaagagggcagtcgtcgcggacccacgcggttagcaaggcttagtgctcgggccggccgccttcacttccctcccggcttttcctcccgacttatccactttaggggcgtctcggagtgccggaggcccccggggaagagcggggtgccggtgtccgctccgggctcggatgggaagtggtgggaggagcgacccgggatgttcagtctgatggccagttgctgcggctggttcaagcggtggcgggagcctgtcagaaaggtgactcttttgatggtgggacttgataatgctggtaaaaccgcaacagcaaagggaatccaaggagagatggggtctccctatgttgcccaagctggtctggaatgcctagcctcaagctattcttctgccttggcctccaagagtgctgggattacaggcatgagccaccacgcccagcccggccagaataccctgaagatgtagctcctactgttggattttcaaaaattaaccttagacaaggaaagtttgaagtcaccatctttgacttgggaggtggaataagaattcggggaatctggaagaattactatgctgaatcctatggggtaatatttgttgtggattccagtgatgaagagagaatggaagagacaaaagaggctatgtcagaaatgctaagacatcctaggatatcgggaaagcctatattggtgttggcaaataaacaagataaagaaggagctttaggagaagctgatgtcattgaatgtctatctctggaaaaattggtcaatgagcacaagtgcctgtgtcagatagaaccatgttcagcaatctcggggtatggaaagaaaattgacaagtccattaaaaaaggcctttattggctgctacatgttattgcaagagactttgatgccttaaatgaacgcatccaaaaagagacaacagagcagcgtgctcttgaggaacaagagaaacaagaaagagctgaacgagtgcgaaaattacgagaagaaagaaaacaaaatgaacaggagcaggctgaactcgatggaaccagtggtctggctgagttggacccagaaccaacgaatcctttccagccaatagcatctgtaatcattgagaatgaaggaaaacttgaaagagagaaaaaaaaccaaaaaatggagaaagacagtgatggctgccacctgaaacataaaatggagcatgagcaaatagagacacaaggccaggttaatcacaatggccaaaaaaataatgaatttggactagtagaaaattataaggaggcattaacacagcagttaaagaatgaagatgagacagaccggccatcattggaatcagctaatggtaaaaagaaaactaagaaactaagaatgaaaaggaaccaccgggtagaaccacttaatatagatgactgtgctcctgagagtccaacgccacccccaccccctcctcctgttggctggggaacccctaaagtcactagacttccaaaacttgagcctcttggtgaaacacatcataatgatttctataggaagccactgcctcccctggctgtgccacagcgacctaacagtgatgctcatgatgtgatctcataaacaagacgtatggaggagttctcttaatatcagcaaggtgaactgggacattcttctttctcagaagaagaaacatcttgtaaattgatgactggggcaagataaccataataattttagtgagaagattaatactcaaggacctgacttgataattacttatttgtgtttttcatggttaaaaaaataaaagaagcacaatgaccagtacatgaaatcagcatttggaccaaattagcaagatttactgttgactctggtttatacatccccactcatgagcatacttctgaaggaaaactttacaaaaagagccaatggactcagcactttctttactatttgttcaatagcctatatttctagatattaaatattttttgtaagatatatgcacatagaagggggacttctaggaatttataaccaaaattttaaaactatttttatatttttttaaatctttaaaaattttaattactgtgatattgattatacaccttttttatagatgatttgtttaaattatatctggaaaatagagttgatttactttcagacatgaactatacaaacaggatatatttatatggcttgaggtatgttttgtaatagcgttgttctttaagtgtacatcgtaatttgacctaatttaaaaataatatattttcgaagtagtagattctcagatctttattctaacaattacatgatttgaaaacagtactcaatgagactggaaataccttttgtacctaaatgttttttaaattaatcaaaatacattctgtgagatactattaaaagtctcagtaaagtcctattttaaaggttagacactttcagagatcaaggtgctccctatactcccttgttccatcagaagctgcagtgactcttttaggtgattctaattctttcatgccttgaaattaaactatgaaattaaaggcagaaaaactggaaaacctactgcaggtccagagacttctgttttacaactgggaaacagcttgtgtactaaagtaatgagaataaaaatgttggcccaaaattacttttataaataaataattccaaaataatttcttaatttaaaatgatagcacttctcttgcacttaagaatggcatccataagattctgtatttggcatttagactaacttctagatgtatatttttaataatagattcataatgttacatttaattgaaaacaaacctttatatccaatgaaaatagtataaacagaatgatttttataccaccttgttaagattggtgcttttggtaacttgtactgacacaacagacatgtgctagtatctgataacattaagtacattttatgtcgtttaatataattatttactttaaaaattgtacttcagaacatcagattttattcacattttttaactcactgaactttaataatcaggtcacctgtactctagtcagcactgtatatattcttggagtttgtacatgggacttagcaaccacactgagtgaggtaaaagcatttgatttcagatctaaaattcgtaacaacctaaatttgagaggtggctgaaatgtgatgaaaagcaatacgaaaagacaatgtaaactttgaaaaggattttagagggaaaattgcatagctttttgtaacatttacttaattttaaaactaaactcatacttttgctatctttttaatatttatctcgtttgggagtatacgtgtttttaaaatttgtgttttctatctgtttactatagtgtagctactggcttcatttaataaaaataaatgattttgaaattaaatataatatagaattcacattttatatagctctctcaaaaattaatttttattccttaagcattttaaaaacattttaaaaaatgttttgtaaatccaggtgtattttaacaattaaatgcctattttgttatatgttatacttttattcttaattctgaattttgacattttcacacaataaaaataatttatatcaa

SEQ ID NO: 105761 - DNA, 2453 bp, Homo sapiens
  Payload ID: 733
  Gene Symbol: ARL13B
  Gene Name: ADP-ribosylation factor-like 13B
  Uniprot ID: Q3SXY8
  ENST ID: ENST00000394222
  CDS Start-End: 276-1562
cgcggggcttttctttagccgggtcccgctaactcggctacggtgtatctgcgtctttggtcaggttgttccttggctaagagggcagtcgtcgcggacccacgcggttagcaaggcttagtgctcgggccggccgccttcacttccctcccggcttttcctcccgacttatccactttaggggcgtctcggagtgccggaggcccccggggaagagcggggtgccggtgtccgctccgggctcggatgggaagtggtgggaggagcgacccgggatgttcagtctgatggccagttgctgcggctggttcaagcggtggcgggagcctgtcagaaaggtgactcttttgatggtgggacttgataatgctggtaaaaccgcaacagcaaagggaatccaaggagaataccctgaagatgtagctcctactgttggattttcaaaaattaaccttagacaaggaaagtttgaagtcaccatctttgacttgggaggtggaataagaattcggggaatctggaagaattactatgctgaatcctatggggtaatatttgttgtggattccagtgatgaagagagaatggaagagacaaaagaggctatgtcagaaatgctaagacatcctaggatatcgggaaagcctatattggtgttggcaaataaacaagataaagaaggagctttaggagaagctgatgtcattgaatgtctatctctggaaaaattggtcaatgagcacaagtgcctgtgtcagatagaaccatgttcagcaatctcggggtatggaaagaaaattgacaagtccattaaaaaaggcctttattggctgctacatgttattgcaagagactttgatgccttaaatgaacgcatccaaaaagagacaacagagcagcgtgctcttgaggaacaagagaaacaagaaagagctgaacgagtgcgaaaattacgagaagaaagaaaacaaaatgaacaggagcaggctgaactcgatggaaccagtggtctggctgagttggacccagaaccaacgaatcctttccagccaatagcatctgtaatcattgagaatgaaggaaaacttgaaagagagaaaaaaaaccaaaaaatggagaaagacagtgatggctgccacctgaaacataaaatggagcatgagcaaatagagacacaaggccaggttaatcacaatggccaaaaaaataatgaatttggactagtagaaaattataaggaggcattaacacagcagttaaagaatgaagatgagacagaccggccatcattggaatcagctaatggtaaaaagaaaactaagaaactaagaatgaaaaggaaccaccgggtagaaccacttaatatagatgactgtgctcctgagagtccaacgccacccccaccccctcctcctgttggctggggaacccctaaagtcactagacttccaaaacttgagcctcttggtgaaacacatcataatgatttctataggaagccactgcctcccctggctgtgccacagcgacctaacagtgatgctcatgatgtgatctcataaacaagacgtatggaggagttctcttaatatcagcaaggtgaactgggacattcttctttctcagaagaagaaacatcttgtaaattgatgactggggcaagataaccataataattttagtgagaagattaatactcaaggacctgacttgataattacttatttgtgtttttcatggttaaaaaaataaaagaagcacaatgaccagtacatgaaatcagcatttggaccaaattagcaagatttactgttgactctggtttatacatccccactcatgagcatacttctgaaggaaaactttacaaaaagagccaatggactcagcactttctttactatttgttcaatagcctatatttctagatattaaatattttttgtaagatatatgcacatagaagggggacttctaggaatttataaccaaaattttaaaactatttttatatttttttaaatctttaaaaattttaattactgtgatattgattatacaccttttttatagatgatttgtttaaattatatctggaaaatagagttgatttactttcagacatgaactatacaaacaggatatatttatatggcttgaggtatgttttgtaatagcgttgttctttaagtgtacatcgtaatttgacctaatttaaaaataatatattttcgaagtagtagattctcagatctttattctaacaattacatgatttgaaaacagtactcaatgagactggaaataccttttgtacctaaatgttttttaaattaatcaaaatacattctgtgagatactattaaaagtctcagtaaagtcctattttaaaggttagacactttcagagatcaaggtgctccctatactcccttgttccatcagaagctgca

SEQ ID NO: 105762 - DNA, 3203 bp, Homo sapiens
  Payload ID: 733
  Gene Symbol: ARL13B
  Gene Name: ADP-ribosylation factor-like 13B
  ENST ID: ENST00000460371
  CDS Start-End: 255-425
ggtcccgctaactcggctacggtgtatctgcgtctttggtcaggttgttccttggctaagagggcagtcgtcgcggacccacgcggttagcaaggcttagtgctcgggccggccgccttcacttccctcccggcttttcctcccgacttatccactttaggggcgtctcggagtgccggaggcccccggggaagagcggggtgccggtgtccgctccgggctcggatgggaagtggtgggaggagcgacccgggatgttcagtctgatggccagttgctgcggctggttcaagcggtggcgggagcctgtcagaaaggtgactcttttgatggtgggacttgataatgctggtaaaaccgcaacagcaaagggaatccaaggaggaaccatgttcagcaatctcggggtatggaaagaaaattgacaagtccattaaaaaaggcctttattggctgctacatgttattgcaagagactttgatgccttaaatgaacgcatccaaaaagagacaacagagcagcgtgctcttgaggaacaagagaaacaagaaagagctgaacgagtgcgaaaattacgagaagaaagaaaacaaaatgaacaggagcaggctgaactcgatggaaccagtggtctggctgagttggacccagaaccaacgaatcctttccagccaatagcatctgtaatcattgagaatgaaggaaaacttgaaagagagaaaaaaaaccaaaaaatggagaaagacagtgatggctgccacctgaaacataaaatggagcatgagcaaatagagacacaaggccaggttaatcacaatggccaaaaaaataatgaatttggactagtagaaaattataaggaggcattaacacagcagttaaagaatgaagatgagacagaccggccatcattggaatcagctaatggtaaaaagaaaactaagaaactaagaatgaaaaggaaccaccgggtagaaccacttaatatagatgactgtgctcctgagagtccaacgccacccccaccccctcctcctgttggctggggaacccctaaagtcactagacttccaaaacttgagcctcttggtgaaacacatcataatgatttctataggaagccactgcctcccctggctgtgccacagcgacctaacagtgatgctcatgatgtgatctcataaacaagacgtatggaggagttctcttaatatcagcaaggtgaactgggacattcttctttctcagaagaagaaacatcttgtaaattgatgactggggcaagataaccataataattttagtgagaagattaatactcaaggacctgacttgataattacttatttgtgtttttcatggttaaaaaaataaaagaagcacaatgaccagtacatgaaatcagcatttggaccaaattagcaagatttactgttgactctggtttatacatccccactcatgagcatacttctgaaggaaaactttacaaaaagagccaatggactcagcactttctttactatttgttcaatagcctatatttctagatattaaatattttttgtaagatatatgcacatagaagggggacttctaggaatttataaccaaaattttaaaactatttttatatttttttaaatctttaaaaattttaattactgtgatattgattatacaccttttttatagatgatttgtttaaattatatctggaaaatagagttgatttactttcagacatgaactatacaaacaggatatatttatatggcttgaggtatgttttgtaatagcgttgttctttaagtgtacatcgtaatttgacctaatttaaaaataatatattttcgaagtagtagattctcagatctttattctaacaattacatgatttgaaaacagtactcaatgagactggaaataccttttgtacctaaatgttttttaaattaatcaaaatacattctgtgagatactattaaaagtctcagtaaagtcctattttaaaggttagacactttcagagatcaaggtgctccctatactcccttgttccatcagaagctgcagtgactcttttaggtgattctaattctttcatgccttgaaattaaactatgaaattaaaggcagaaaaactggaaaacctactgcaggtccagagacttctgttttacaactgggaaacagcttgtgtactaaagtaatgagaataaaaatgttggcccaaaattacttttataaataaataattccaaaataatttcttaatttaaaatgatagcacttctcttgcacttaagaatggcatccataagattctgtatttggcatttagactaacttctagatgtatatttttaataatagattcataatgttacatttaattgaaaacaaacctttatatccaatgaaaatagtataaacagaatgatttttataccaccttgttaagattggtgcttttggtaacttgtactgacacaacagacatgtgctagtatctgataacattaagtacattttatgtcgtttaatataattatttactttaaaaattgtacttcagaacatcagattttattcacattttttaactcactgaactttaataatcaggtcacctgtactctagtcagcactgtatatattcttggagtttgtacatgggacttagcaaccacactgagtgaggtaaaagcatttgatttcagatctaaaattcgtaacaacctaaatttgagaggtggctgaaatgtgatgaaaagcaatacgaaaagacaatgtaaactttgaaaaggattttagagggaaaattgcatagctttttgtaacatttacttaattttaaaactaaactcatacttttgctatctttttaatatttatctcgtttgggagtatacgtgtttttaaaatttgtgttttctatctgtttactatagtgtagctactggcttcatttaataaaaataaatgattttgaaattaaatataatatagaattcacattttatatagctctctcaaaaattaatttttattccttaagcattttaaaaacattttaaaaaatgttttgtaaatccaggtgtattttaacaattaaatgcctattttgttatatgttatacttttattcttaattctgaattttgacattttcacacaataaaaataatttatatcaata

SEQ ID NO: 105763 - DNA, 2206 bp, Homo sapiens
  Payload ID: 733
  Gene Symbol: ARL13B
  Gene Name: ADP-ribosylation factor-like 13B
  Uniprot ID: Q3SXY8
  ENST ID: ENST00000471138
  CDS Start-End: 270-1556
gcttttctttagccgggtcccgctaactcggctacggtgtatctgcgtctttggtcaggttgttccttggctaagagggcagtcgtcgcggacccacgcggttagcaaggcttagtgctcgggccggccgccttcacttccctcccggcttttcctcccgacttatccactttaggggcgtctcggagtgccggaggcccccggggaagagcggggtgccggtgtccgctccgggctcggatgggaagtggtgggaggagcgacccgggatgttcagtctgatggccagttgctgcggctggttcaagcggtggcgggagcctgtcagaaaggtgactcttttgatggtgggacttgataatgctggtaaaaccgcaacagcaaagggaatccaaggagaataccctgaagatgtagctcctactgttggattttcaaaaattaaccttagacaaggaaagtttgaagtcaccatctttgacttgggaggtggaataagaattcggggaatctggaagaattactatgctgaatcctatggggtaatatttgttgtggattccagtgatgaagagagaatggaagagacaaaagaggctatgtcagaaatgctaagacatcctaggatatcgggaaagcctatattggtgttggcaaataaacaagataaagaaggagctttaggagaagctgatgtcattgaatgtctatctctggaaaaattggtcaatgagcacaagtgcctgtgtcagatagaaccatgttcagcaatctcggggtatggaaagaaaattgacaagtccattaaaaaaggcctttattggctgctacatgttattgcaagagactttgatgccttaaatgaacgcatccaaaaagagacaacagagcagcgtgctcttgaggaacaagagaaacaagaaagagctgaacgagtgcgaaaattacgagaagaaagaaaacaaaatgaacaggagcaggctgaactcgatggaaccagtggtctggctgagttggacccagaaccaacgaatcctttccagccaatagcatctgtaatcattgagaatgaaggaaaacttgaaagagagaaaaaaaaccaaaaaatggagaaagacagtgatggctgccacctgaaacataaaatggagcatgagcaaatagagacacaaggccaggttaatcacaatggccaaaaaaataatgaatttggactagtagaaaattataaggaggcattaacacagcagttaaagaatgaagatgagacagaccggccatcattggaatcagctaatggtaaaaagaaaactaagaaactaagaatgaaaaggaaccaccgggtagaaccacttaatatagatgactgtgctcctgagagtccaacgccacccccaccccctcctcctgttggctggggaacccctaaagtcactagacttccaaaacttgagcctcttggtgaaacacatcataatgatttctataggaagccactgcctcccctggctgtgccacagcgacctaacagtgatgctcatgatgtgatctcataaacaagacgtatggaggagttctcttaatatcagcaagaagcacaatgaccagtacatgaaatcagcatttggaccaaattagcaagatttactgttgactctggtttatacatccccactcatgagcatacttctgaaggaaaactttacaaaaagagccaatggactcagcactttctttactatttgttcaatagcctatatttctagatattaaatattttttgtaagatatatgcacatagaagggggacttctaggaatttataaccaaaattttaaaactatttttatatttttttaaatctttaaaaattttaattactgtgatattgattatacaccttttttatagatgatttgtttaaattatatctggaaaatagagttgatttactttcagacatgaactatacaaacaggatatatttatatggcttgaggtatgttttgtaatagcgttgttctttaagtgtacatcgtaatttgacctaatttaaaaataatatattttcgaagtagtagattctcagatctttattctaacaattacatgatttgaaaacagtactcaatgagactggaaataccttttgtacctaaatgttttttaaattaatcaaaatacattctgtgagatactattaaaa

SEQ ID NO: 105764 - DNA, 3906 bp, Homo sapiens
  Payload ID: 733
  Gene Symbol: ARL13B
  Gene Name: ADP-ribosylation factor-like 13B
  Uniprot ID: Q3SXY8
  ENST ID: ENST00000535334
  CDS Start-End: 524-1501
agcacgtcgacgcggggcttttctttagccgggtcccgctaactcggctacggtgtatctgcgtctttggtcaggttgttccttggctaagagggcagtcgtcgcggacccacgcggttagcaaggcttagtgctcgggccggccgccttcacttccctcccggcttttcctcccgacttatccactttaggggcgtctcggagtgccggaggcccccggggaagagcggggtgccggtgtccgctccgggctcggatgggaagtggtgggaggagcgacccgggatgttcagtctgatggccagttgctgcggctggttcaagcggtggcgggagcctgtcagaataccctgaagatgtagctcctactgttggattttcaaaaattaaccttagacaaggaaagtttgaagtcaccatctttgacttgggaggtggaataagaattcggggaatctggaagaattactatgctgaatcctatggggtaatatttgttgtggattccagtgatgaagagagaatggaagagacaaaagaggctatgtcagaaatgctaagacatcctaggatatcgggaaagcctatattggtgttggcaaataaacaagataaagaaggagctttaggagaagctgatgtcattgaatgtctatctctggaaaaattggtcaatgagcacaagtgcctgtgtcagatagaaccatgttcagcaatctcggggtatggaaagaaaattgacaagtccattaaaaaaggcctttattggctgctacatgttattgcaagagactttgatgccttaaatgaacgcatccaaaaagagacaacagagcagcgtgctcttgaggaacaagagaaacaagaaagagctgaacgagtgcgaaaattacgagaagaaagaaaacaaaatgaacaggagcaggctgaactcgatggaaccagtggtctggctgagttggacccagaaccaacgaatcctttccagccaatagcatctgtaatcattgagaatgaaggaaaacttgaaagagagaaaaaaaaccaaaaaatggagaaagacagtgatggctgccacctgaaacataaaatggagcatgagcaaatagagacacaaggccaggttaatcacaatggccaaaaaaataatgaatttggactagtagaaaattataaggaggcattaacacagcagttaaagaatgaagatgagacagaccggccatcattggaatcagctaatggtaaaaagaaaactaagaaactaagaatgaaaaggaaccaccgggtagaaccacttaatatagatgactgtgctcctgagagtccaacgccacccccaccccctcctcctgttggctggggaacccctaaagtcactagacttccaaaacttgagcctcttggtgaaacacatcataatgatttctataggaagccactgcctcccctggctgtgccacagcgacctaacagtgatgctcatgatgtgatctcataaacaagacgtatggaggagttctcttaatatcagcaaggtgaactgggacattcttctttctcagaagaagaaacatcttgtaaattgatgactggggcaagataaccataataattttagtgagaagattaatactcaaggacctgacttgataattacttatttgtgtttttcatggttaaaaaaataaaagaagcacaatgaccagtacatgaaatcagcatttggaccaaattagcaagatttactgttgactctggtttatacatccccactcatgagcatacttctgaaggaaaactttacaaaaagagccaatggactcagcactttctttactatttgttcaatagcctatatttctagatattaaatattttttgtaagatatatgcacatagaagggggacttctaggaatttataaccaaaattttaaaactatttttatatttttttaaatctttaaaaattttaattactgtgatattgattatacaccttttttatagatgatttgtttaaattatatctggaaaatagagttgatttactttcagacatgaactatacaaacaggatatatttatatggcttgaggtatgttttgtaatagcgttgttctttaagtgtacatcgtaatttgacctaatttaaaaataatatattttcgaagtagtagattctcagatctttattctaacaattacatgatttgaaaacagtactcaatgagactggaaataccttttgtacctaaatgttttttaaattaatcaaaatacattctgtgagatactattaaaagtctcagtaaagtcctattttaaaggttagacactttcagagatcaaggtgctccctatactcccttgttccatcagaagctgcagtgactcttttaggtgattctaattctttcatgccttgaaattaaactatgaaattaaaggcagaaaaactggaaaacctactgcaggtccagagacttctgttttacaactgggaaacagcttgtgtactaaagtaatgagaataaaaatgttggcccaaaattacttttataaataaataattccaaaataatttcttaatttaaaatgatagcacttctcttgcacttaagaatggcatccataagattctgtatttggcatttagactaacttctagatgtatatttttaataatagattcataatgttacatttaattgaaaacaaacctttatatccaatgaaaatagtataaacagaatgatttttataccaccttgttaagattggtgcttttggtaacttgtactgacacaacagacatgtgctagtatctgataacattaagtacattttatgtcgtttaatataattatttactttaaaaattgtacttcagaacatcagattttattcacattttttaactcactgaactttaataatcaggtcacctgtactctagtcagcactgtatatattcttggagtttgtacatgggacttagcaaccacactgagtgaggtaaaagcatttgatttcagatctaaaattcgtaacaacctaaatttgagaggtggctgaaatgtgatgaaaagcaatacgaaaagacaatgtaaactttgaaaaggattttagagggaaaattgcatagctttttgtaacatttacttaattttaaaactaaactcatacttttgctatctttttaatatttatctcgtttgggagtatacgtgtttttaaaatttgtgttttctatctgtttactatagtgtagctactggcttcatttaataaaaataaatgattttgaaattaaatataatatagaattcacattttatatagctctctcaaaaattaatttttattccttaagcattttaaaaacattttaaaaaatgttttgtaaatccaggtgtattttaacaattaaatgcctattttgttatatgttatacttttattcttaattctgaattttgacattttcacacaataaaaataatttatatcaatattctgtttctcttttcaattggtagatttaaatgatttcctttgggtaataaaataggtaaagattttaaaatatgattattgaaaaacagtttaaatcagtagattaaaataatgcatttttttgatactttacacacaaaacttttttctctctgcaagtttttatgtatgtgggaaagaatttgtgattttaaatgcagctacaaatagcatttcaccatatgatgttagaggatttgatgtctgtcttgcgttaaagctgttggtcaacagatatgtttttatgtatttaaaagaggctcttgtgtgcctttatgtgtaaaatgcatattacgtagtatacatgatattgtatgtaactgacttcaaatataaaactatgcat

SEQ ID NO: 105765 - DNA, 1294 bp, Homo sapiens
  Payload ID: 734
  Gene Symbol: ARL14
  Gene Name: ADP-ribosylation factor-like 14
  Uniprot ID: Q8N4G2
  ENST ID: ENST00000320767
  CDS Start-End: 189-767
tgataagctacaacataaacacatctaggttcttgttcttagaatacagcatgaagaatttgctttcttctttcttcctaacattttcatgtgagatccagaaaggacacattgtctctggccattcgaagaaagaaagaaagaaaaaaaaaaaaggtatttagagacagagagagaaaaaggctgaaatgggttcgctgggttctaaaaatccgcaaaccaaacaagcccaagttcttcttttgggacttgactcagctgggaagtctactctcctttataaattaaagcttgctaaggatattaccaccatccctacaataggtttcaatgtggaaatgatcgagttggaaaggaatctttcactcacagtctgggatgttggaggacaggaaaaaatgagaactgtttggggctgttactgtgagaacaccgatgggctggtgtatgttgtggacagtacagacaaacagcgactggaagagtctcagagacagtttgagcacattttgaagaatgaacacattaaaaatgtgcctgttgttctattagccaacaaacaagacatgcctggagctctgactgctgaggacatcaccagaatgttcaaagtgaagaagctttgcagtgaccggaactggtatgtgcaaccctgctgtgccctcacaggggaggggctggcccaggggttcaggaaattaactggatttgtgaagagccacatgaaatcaagaggagacactttggcgttcttcaagcagaactgaggctgcgaaaaatccaagtctctacagagacactgatgaagttgaaagggtaattgtttttccatgccaaatgaggaaatcaaattaatgagttgacaaacttttcctgagatgttatttcatctacatttagttaaacaacttagaatgatatctagaaaatatttattttcagccaggaactttagcaaactgtggcaatgatcactgggaatgaaaacgtataatgttctacaatttttgttatcacattggatgactttgaatatagtagtgacacttgggaccaaataaattattttatatgactactagaacaaagttttagtaagctgtctgctaatagagtcagaattcttccagattgtttccagctgtaacaggtattgaatttccaccgtgctcctatgtaacagctgggtggtgtaaaaaatgaacttcaaattatggagtggaaaaagcgtaatgttaatatcttgtaaattcgtattccctattaaataaagctttcttattccctaaataaa

SEQ ID NO: 105766 - DNA, 2430 bp, Homo sapiens
  Payload ID: 735
  Gene Symbol: ARL14EP
  Gene Name: ADP-ribosylation factor-like 14 effector protein
  Uniprot ID: Q8N8R7
  ENST ID: ENST00000282032
  CDS Start-End: 216-998
acgtctctttgtggtggcgttgagctcctctagcccgcgcttgccgtcctctcagtggtagcgcggggactggctgggaagcggtcggtcgagtgtggcctgtgtggactcgcatcttgcccgaagccgggcggaggagagctcaagctaagggtgatcagcccatgacctaaacctccagacaaaataaaacggaaaatttgctagaatcaagaatgatggatccatgttcagttggagtccagcttcgtactacaaatgagtgccataaaacctactatactcgtcacacaggttttaagactttgcaagaattgtcatcaaatgatatgcttttacttcaacttagaactggaatgacactttctgggaacaatacaatttgctttcatcatgtaaaaatttacattgacagatttgaggatttacagaagtcatgttgtgacccatttaacatacacaagaaattagccaaaaaaaatttgcatgtaattgacttagatgatgccacttttctgagtgctaaatttggaagacagcttgtacctggttggaagctttgtccaaaatgcacacagataatcaatggaagtgtggatgttgatactgaagaccgccagaaaaggaaacctgagtcagatggaagaactgctaaagctttgaggtcattacaatttacgaatccaggaaggcaaactgaatttgctccagaaactggtaaaagagaaaaaagaaggcttacaaaaaatgcaaccgctggttcagacagacaagtgataccagcaaagagtaaggtctatgatagccagggtctcctgatttttagtgggatggacctctgtgactgcctggatgaagactgcttaggatgtttctatgcttgtcctgcctgtggttctaccaagtgtggagctgaatgccgctgtgaccgcaagtggctgtatgagcaaattgaaattgaaggaggagaaataattcataataaacatgctggataatctgcggtaccaaactatggagcctttaaaggtctttatttctaaaaatctgttactctaagatacattttaagcttgattatcatatgacaaagattttaaaaccatctcagtgtgccctaatttttcatcttgggtgctttaagattcactatttgatataaattcagataggctatttttcagtagtcagcgttaagcctgtctggatcaatataaacaagtagggtgtaggcagtcctctatttgcatgtttcccatgggcacaaatttcagtgacctagatttagtttaaataccagtttccttaccaggaaggaaagaaaactggtaaggaaactgttgttgttaaaatctaggttaaaattttagttagcacattgtaactgagtaattacatgaagtacaaacctctctgctagctcttcagtctacaaatcgctatgtaaataacagatatgcttcatgattgtgaccagtcatgttatttctttcaaattcttccagtggtttgtccctgtgcatctgttaattcagttcacgtacagcagagcatgtagttatgctgtctctctgtcatctacttgacattctatagaagtgaacactcgaaagaactggtcaacaaagatgaaagtgcagcaaagcaatgaaaaatgataacactggaagtgaaattttaatcaaacataaatgaatttgtagaagaagtcactgaccatgggaatgttgttcttgctgctgtgtattcataggagcttagtgaaggcaaacttaccaacacaaataagcaaagtggttgcaataaagacagatacgtcccagaggaagtgatggttaaaaaaaaaaaactttacattaaaagatatttaatgtgaatatagaaatatttcacaacattgaaagcacaagcaataaaagggtggaagctgacccaaacttagaaggagtatggcagtttgccgtgaacataaaagatgcttactcagtatggtaagttacttgccagaaaaaaaggcaagccctattcaaactactttgtttttacaatgaaataaaacactttaattctatttctaatgttttaaattacagtgtactaaatatttttaaacatttttgcatttttttctacatttataactggtcttaagagtttttaatatttgagcagaaccttaaaggtcatggaacaatcatcattttccctattgattattaagattgcaggaccatttttatggtcccacagtaccatgtgaaatgaggatcgcttgtagctgggaacagtgcttacttcagggaaaactgattttgatagaaccgactagttgagtattaaactgttttggaaataatttatatatctaagtgctgaaatatatttctcttctccccacttattcaaataaaaaagttttaatactataaa

SEQ ID NO: 105767 - DNA, 3417 bp, Homo sapiens
  Payload ID: 735
  Gene Symbol: ARL14EP
  Gene Name: ADP-ribosylation factor-like 14 effector protein
  ENST ID: ENST00000530909
  CDS Start-End: 2914-3417
atacattgccacatagttcgttgccttgtaactttacctctgatttcctttttctcctccttaatttatcttaatccaattatctgtttgaagaaaaaaaaaattttttttatttttttattttttgagatgagagtctcgctttgtcgcccgggctggagtccagtgacacgatctcggctcaccgcaacttccgcctcctgggttcaagcgattctcatgcctcaacctcccatatagctgcactaccacacctgactaatatttttgtatttttagtagacacgagatttcactatgttagccagtctagtctagaactcctggcatcaagtgatcaacccacattggcctcccaaagtgctgggattacaggcaggagccacaatgcctggctagaagaaacttttctaattattactgtgatagaagccattttatctgatttgattgggacctgtattagttcattttaaaaactgactaaaacacagtaaatgaatataaatatactctgtttttaccagctttaaaacttttttcagttaaaatgttcagtaacatattttaacactttaaagtgtattttattttttaactttgtaaatacagtattttgacctaaaacacagacatttattcgccattttttgttacctgaggccagagtcttctttttatatgattttgctgattattgtttttctctgcagaaaccatatcaaaatgtgtttaagatttctctccagtttttgttttttttttaattttgcaaagcttaaaaacacttgtaaaattgctgaatcctagacttcacagtccctccctaccactcagatttcagtggttcacattttttctcaacagcagattttttcctaatgagttgcattggttgcatattttcttgagaatccaacttttttttttaatttgctttgaaaattatttatgaaaaatttcaaatagaaagtatggacagtagtgaagcacttatgtacatgtcaccaaaccttattttctgtaaatctttttggggaaaataatgttttttcccctcagaagtatccacaaatgtgatatatgttactcttatgtatattttagtatatattcatgtttcatctgtaaatcttatgtactatcttatctttttaaattttacctttaatgatgatactatataacctttacaacttttttcacttaagattgtctttgagatttattcatgttgattcacgtaattcatgtagtttattcattttaactgttatgtgggagtcccttgtatgagtaacgatttcacatcctttacaattaggttatttgtcatctttcactgccaaaggcagtgaatgctgaaagttttcgtatataacttgtgctcttattggagatatttttctccatctgacacccagaactgaaaagagctgagtcccaaggtgtatgcttcctcagttttacaagaaattgcagaaaatgttctaaagcagttgcagcaatttacattcctaccaaagttattataaggagcatgtgagagttggacacatcttaaccagatatcagatttttaaattgatttcaagcaaatgtttaataaatgatatttaatttgcattttcctaggaactatgggggaaacagtttgtatgcatgtattggcttttgttctctttctctgtgaattgcctgactatatttgtttagttttccagtggactctgtcattttctaattgatttttggaagtgaggagttactcgaatatttatgataataatcctaacacctttcaagtgtctttttttttctcctttagttatacagaaatgtgtaaattttacatataatcaaatatatccatctttttatttatttatttttttggtatctgcttgcttgtttgaaaaattcttccatacttccatgtcagaaaaccttctttattttctcataaacatgtttagtttttcttttcatgtttaaatctttaatccacttgttattgatttttgtttgtgcagaagagatctaattgtttttccatatggttaaagtcccttcttcattagtgtgtgatacccatcgattaatagtaccacatgtcatatactgagccctcatctactcatggatctgtttgtttatactataccaataccatagttttaattagaataggtttaaagtaaatcaatatgttactgtattttccttcaggattaccttggctttcttagacctttgctctttcatatagaccagcttgctaaattccaagggggtggcagtagaatatctgatggaactttgattgtaacagaactgaatttacagatgtattcccagataattgacatattttttataatgagccactccatgatatatagctgcatttatttagggtaccgtttttgtcttgcagtttgataattttctccatgaaggtcttgttgtatgtcttttgtaagagtcacatattttgtaagatacagtgttttttggtttctagcatccctggtgaattctcttattagttctaatagtttgttaaacctcttgtatttctcatgtatcttaggataatatttcttatttcctcctttttaattcttatgtggtcttaaatataatctgtaattgcagatgttttcgtgaagttctgactttacagggaacgcttctgtttgattattaaatgtctattataagacttcgataaataccttttttattccttattttcttttagataggtgttgaattttatcaaatgctttttcagtttcctagataaacttgcagcacaaatttgattctctttaatattttctctagggtgatcagcccatgacctaaacctccagacaaaataaaacggaaaatttgctagaatcaagaatgatggatccatgttcagttggagtccagcttcgtactacaaatgagtgccataaaacctactatactcgtcacacaggttttaagactttgcaagaattgtcatcaaatgatatgcttttacttcaacttagaactggaatgacactttctgggaacaatacaatttgctttcatcatgtaaaaatttacattgacagatttgaggatttacagaagtcatgttgtgacccatttaacatacacaagaaattagccaaaaaaaatttgcatgtaattgacttagatgatgccacttttctgagtgctaaatttggaagacagcttgtacctggttggaagctttgtccaaaatgcacacagataatcaatggaagtgtggatgttgatactgaagaccgccagaaaaggaaacctgagtcagatggaagaactgctaaagctttgaggtcattacaatttacgaatccaggaaggcaaactgaatttgctccagaaactggt

SEQ ID NO: 105768 - DNA, 1914 bp, Homo sapiens
  Payload ID: 736
  Gene Symbol: ARL14EPL
  Gene Name: ADP-ribosylation factor-like 14 effector protein-like
  Uniprot ID: P0DKL9
  ENST ID: ENST00000601302
  CDS Start-End: 285-743
catccagtgggccgaagcaggagggcaagagatttcatcgcaccactcagaacagtgcacagtttgaaacttaagagttgtttatttctggaattttccatctacgtcacaatacctgtgttattgccctcacttcatcccatcacgtagccatttgaccattttacatcatcataagaagcagtgtgtgtaaagaaggaagaatggagttctaaaaactcagagtcttcttaatcctgcttaagagaggtttatgatgctaaggactgtcaaagtgatcagagatgaatgaacaatcagagaaaaacaattccattcaagagagacacacagatcatagttttcctgagaagaactgtcaaattggacagaaacaactgcaacaaatagagcggcagttaaaatgcttggcatttcgaaaccctggaccacaggtagcagactttaatcctgaaacaaggcagcagaaaaagaaagcccggatgtcaaagatgaatgaatatttttctaccaaatacaaaataatgaggaagtatgacaaaagtggcaggctcatctgtaatgacgctgatctgtgtgattgtctagagaagaactgcctgggctgcttctacccatgcccgaagtgtaactccaacaagtgtgggcccgagtgccgctgcaaccgacggtgggtttacgatgccatcgtcactgagtcaggagaggtcatcagcacgctgccgtttaatgttcctgactaggtgctcttgtatatggactgatttgtttcttcttcttacacatttaagttgacctctttcttttgggtgaattttagggcttgggggaaatatcgaaaaaacatactgaagactcatgttctgtcaagccccagaacaatgtagaatgggcaataattctgtaaccttcttaactgtgtcaacaattttcaagtcccttaacttgcaaccaaagaatgtaacaatggagggatcagcatttctcatcagcaccctcatctctactctgccttcaaattaaaactctcttccctctttgctgatatctgagaaaatgtagctttaagattttcaaaactctgtagttgagagcttttcttacatagaacatagaatcttaaatttataatatctagttgtccttagaatcttatacatcactagctgtaaatcagaattgccatttggattttgaagaaaaactgtgactttgcactgtatacccatagcctcatttttttattgttcatgttttaataacattaaaatgaaatttagtaatacttggtagtatttttaatcattaaaatttgtattgtacttgtaaaattgaaaagttaggaatttattatcctaaaagccaggagtttacatatttttgatttcagaagcagtatttcaggatttgtttttcatagagagaaaacaagttatacaaaaatgattttctgtatgtttgctaattgagtgtgttgataagcaattgactagataaatgatgtagtcttttcaactttgatacatcatcagagctataaaatattgaattcagctttctttgaattcatttttttatgacagtcttttttttaaccctaagtcaatggttctcattcatgagaattgcctagagaacttgtcaaaacatagatttttgcagccccacattcagaatctgggacagggctcaaccatctgttccacgttcccaggtgatgttgatgctgctgatgtggggaccacactttgagaaccacttctctaaattattttagatacataatgtaaggaagtatttaaacctcattgactatgatactgccactgcacaaagctggaagtatttaaataaagtaacgtaataaaaatttaaaagtaaataaaagcatttaagttttaaaataaatttgaa

SEQ ID NO: 105769 - DNA, 642 bp, Homo sapiens
  Payload ID: 736
  Gene Symbol: ARL14EPL
  Gene Name: ADP-ribosylation factor-like 14 effector protein-like
  ENST ID: ENST00000634632
  CDS Start-End: 1-459
atgaatgaacaatcagagaaaaacaattccattcaagagagacacacagatcatagttttcctgagaagaactgtcaaattggacagaaacaactgcaacaaatagagcggcagttaaaatgcttggcatttcgaaaccctggaccacaggtagcagactttaatcctgaaacaaggcagcagaaaaagaaagcccggatgtcaaagatgaatgaatatttttctaccaaatacaaaataatgaggaagtatgacaaaagtggcaggctcatctgtaatgacgctgatctgtgtgattgtctagagaagaactgcctgggctgcttctacccatgcccgaagtgtaactccaacaagtgtgggcccgagtgccgctgcaaccgacggtgggtttacgatgccatcgtcactgagtcaggagaggtcatcagcacgctgccgtttaatgttcctgactaggtgctcttgtatatggactgatttgtttcttcttcttacacatttaagttgacctctttcttttgggtgaattttagggcttgggggaaatatcgaaaaaacatactgaagactcatgttctgtcaagccccagaacaatgtagaatgggcaataattctgtaaccttcttaactgtgtcaac

SEQ ID NO: 105770 - DNA, 578 bp, Homo sapiens
  Payload ID: 737
  Gene Symbol: ARL15
  Gene Name: ADP-ribosylation factor-like 15
  ENST ID: ENST00000507646
  CDS Start-End: 98-574
gctgttgctggctttttcaggagctgctcgctcgcagccagagacgctgctttttttttccgggttcggagccgttccggatgctttaggctgccggatgtctgatctccgaataactgaggcgtttctgtacatggattatctgtgttttagagcactttgctgcaagggaccaccacctgcacgaccagaatatgacctggtttgcataggcctcacaggttctggcaaaaccagtctgttgtccaaactctgcagtgaaagccccgataacgtcgtgtcgaccacaggttttagtattaaagcagtgccattccagaatgccatcttgaatgtaaaagaacttggaggggctgataacatccggaaatactggagccgctactaccaaggatctcaaggggtaatatttgtattagacagtgcctcttcagaggatgatttagaagctgctagaaatgagctgcactcagctcttcagcatccacagttatgcactttaccctttttaatattggccaatcatcaagacaagccagcagctcgctcagtacaagagaaaattcaggactgaaaaa

SEQ ID NO: 105771 - DNA, 2486 bp, Homo sapiens
  Payload ID: 737
  Gene Symbol: ARL15
  Gene Name: ADP-ribosylation factor-like 15
  Uniprot ID: Q9NXU5
  ENST ID: ENST00000504924
  CDS Start-End: 95-709
gttgctggctttttcaggagctgctcgctcgcagccagagacgctgctttttttttccgggttcggagccgttccggatgctttaggctgccggatgtctgatctccgaataactgaggcgtttctgtacatggattatctgtgttttagagcactttgctgcaagggaccaccacctgcacgaccagaatatgacctggtttgcataggcctcacaggttctggcaaaaccagtctgttgtccaaactctgcagtgaaagccccgataacgtcgtgtcgaccacaggttttagtattaaagcagtgccattccagaatgccatcttgaatgtaaaagaacttggaggggctgataacatccggaaatactggagccgctactaccaaggatctcaaggggtaatatttgtattagacagtgcctcttcagaggatgatttagaagctgctagaaatgagctgcactcagctcttcagcatccacagttatgcactttaccctttttaatattggccaatcatcaagacaagccagcagctcgctcagtacaagagatcaaaaaatattttgaacttgaaccacttgcacgtggaaaacgctggattctacagccctgctcactggatgacatggatgcactgaaagacagcttctctcagctgattaatttgttagaagaaaaagaccatgaagctgtaagaatgtgaaatctggcaaagaaaacaggctcccaaaaggccttgaacctatcatgttagtttctcattttaattttattttggtatcaagactatattggcttcagtatctattttcctctggtcatttcagactctcatctctctattaaagtgaatattctgtagatcagatgaattatcatcggcattaacgtcaagtacacactactgagagagaatttattctctgtttaccactaattatcttccccgcatgtctcttccttctgttgttctaagcatctcttctatactctgtgctgaaacggatggaattcatggcttatggaaatcaaatcccttttgaaggactcagaaagactcacaagaccttgatcattttctctgggtttgggagtggagtattatgtgactgggactccacaaaatatttatattattttcaagacctattgggggttttgttttattttatctaatttttttttttttttggtatactgagcttatagactatgagagaaaagtgagcaccaaaaacttcattaatcaccttatcaggaaggaatatcctgccatagtaaaattggctctgaagagcttagaggcaagttacacaatgttttcttgattacatctgaagtctcttctcttttaagagcaaagacattgtttcagtttctgagagtggttagaggaaatttaggtacaatgcatgcatcacagactgtatttgattgattcgagtcttcaaatattgtttaatggaatgatgagcctgcataaagtgaagctgcaatgtaacataggtatctttttctaaaaacttcaagtgtttgattaaaatagagaaaataatttttaaaataatagataaaaattttaaaaacagccagaaaaagtataatttatactggttagggtttaagatggcatggatttgacaaagataacaaagacagaatcatctatatattcattcattacgtgttactgtagtttattggaatctgttaatgccttcctctagtagttaaaggtttatcagtatttctattataaacctctattttcaggggtttcaatgtgcccttaaaattgtgctggggctgcagcaaataaataatattgggactcatattcagtctttggaactagttttttttccatttaatttaaatgacaaaattgcatagggataaatgtacagttttactaaggtttagcacctttgatcttttctaaatcaggaaaaaaatctatgcatattgaggttcacagatgaaatattctttggcatactttgtagactttgaccacttaaaatactaagtggccaaatgataaaaaaaactgctccctgcacatgagtgtaaaaacatgtttgtaattttaagtaaaatggactgatacccaaataccacagactcacactatattacagaatgatgtaatacctggtaattctccagaagatagacttcagacccttaatgccatttaaatgtagtttttgtggtttaatcttatgagtagattgtaatgaaatcattacctttgaaacatcaaacacttctttaagctttttttttttaatgtcatgaatcaggaaggatacatagtgattcgtatacaattttgtctgcagcattcttgaatatttttaacactgtgtaatccctgagcagcacaaaacttttattccgatgaccagttacacaattcctgtttttattttgtcctgttgtgctcatcttctatgaaaaataaatgattattaggc

SEQ ID NO: 105772 - DNA, 3248 bp, Homo sapiens
  Payload ID: 737
  Gene Symbol: ARL15
  Gene Name: ADP-ribosylation factor-like 15
  ENST ID: ENST00000502271
  CDS Start-End: 555-632
attttcgctgttgctggctttttcaggagctgctcgctcgcagccagagacgctgctttttttttccgggttcggagccgttccggatgctttaggctgccggatgtctgatctccgaataactgaggcgtttctgtacatggattatctgggaaaaaaaatgctcctttcattccaagtttgactccagattttgctgaatggattagagttttagtattaaagcagtgccattccagaatgccatcttgaatgtaaaagaacttggaggggctgataacatccggaaatactggagccgctactaccaaggatctcaaggggtaatatttgtattagacagtgcctcttcagaggatgatttagaagctgctagaaatgagctgcactcagctcttcagcatccacagttatgcactttaccctttttaatattggccaatcatcaagacaagccagcagctcgctcagtacaagagatcaaaaaatattttgaacttgaaccacttgcacgtggaaaacgctggattctacagccctgctcactggatgacatggatgcactgaaagacagcttctctcagctgattaatttgttagaagaaaaagaccatgaagctgtaagaatgtgaaatctggcaaagaaaacaggctcccaaaaggccttgaacctatcatgttagtttctcattttaattttattttggtatcaagactatattggcttcagtatctattttcctctggtcatttcagactctcatctctctattaaagtgaatattctgtagatcagatgaattatcatcggcattaacgtcaagtacacactactgagagagaatttattctctgtttaccactaattatcttccccgcatgtctcttccttctgttgttctaagcatctcttctatactctgtgctgaaacggatggaattcatggcttatggaaatcaaatcccttttgaaggactcagaaagactcacaagaccttgatcattttctctgggtttgggagtggagtattatgtgactgggactccacaaaatatttatattattttcaagacctattgggggttttgttttattttatctaatttttttttttttttggtatactgagcttatagactatgagagaaaagtgagcaccaaaaacttcattaatcaccttatcaggaaggaatatcctgccatagtaaaattggctctgaagagcttagaggcaagttacacaatgttttcttgattacatctgaagtctcttctcttttaagagcaaagacattgtttcagtttctgagagtggttagaggaaatttaggtacaatgcatgcatcacagactgtatttgattgattcgagtcttcaaatattgtttaatggaatgatgagcctgcataaagtgaagctgcaatgtaacataggtatctttttctaaaaacttcaagtgtttgattaaaatagagaaaataatttttaaaataatagataaaaattttaaaaacagccagaaaaagtataatttatactggttagggtttaagatggcatggatttgacaaagataacaaagacagaatcatctatatattcattcattacgtgttactgtagtttattggaatctgttaatgccttcctctagtagttaaaggtttatcagtatttctattataaacctctattttcaggggtttcaatgtgcccttaaaattgtgctggggctgcagcaaataaataatattgggactcatattcagtctttggaactagttttttttccatttaatttaaatgacaaaattgcatagggataaatgtacagttttactaaggtttagcacctttgatcttttctaaatcaggaaaaaaatctatgcatattgaggttcacagatgaaatattctttggcatactttgtagactttgaccacttaaaatactaagtggccaaatgataaaaaaaactgctccctgcacatgagtgtaaaaacatgtttgtaattttaagtaaaatggactgatacccaaataccacagactcacactatattacagaatgatgtaatacctggtaattctccagaagatagacttcagacccttaatgccatttaaatgtagtttttgtggtttaatcttatgagtagattgtaatgaaatcattacctttgaaacatcaaacacttctttaagctttttttttttaatgtcatgaatcaggaaggatacatagtgattcgtatacaattttgtctgcagcattcttgaatatttttaacactgtgtaatccctgagcagcacaaaacttttattccgatgaccagttacacaattcctgtttttattttgtcctgttgtgctcatcttctatgaaaaataaatgattattaggccttgctttccctgcaagttcattaaatgtagaatgttgtctttttaagacaccgtggctgagtgctcctaagccatctgttaaatgacttcccgtggtctgcgtgtgtgtgttcatgtgtgcgccagtgatgggcctctcctcaaacccacgactgtctgcagcgtctcagccgtcagaatgaaaacattatcaatcagtacccaacaacagctgtttttgacaagtttctgtctgacgcctaatgctttacaactgtcaataaggctccctctttgtctagcaggtcggagctcgctgtcttgctgcttccgcgcggcatcctgtccttgtaaccctagaatttgccatgttttggaaatccacgtgggggcggggtggggcctgaacgggtggggatgggtgggtgggtggtggggtgggtgggatggctgggggtgggagtgtaagtcccttttcctactttcatgtaaagtgccacaggtgtcttggtttgcatattcaaatattatataggaaaaacagtctgttatgtatttcttcacctagcttcttgtaatatttatggacgtttccagtttttgtaccttcttagctaaagcagttgcctttttgtaatggcaattaatttatatgataaaactttgtatccactgtagttgacagtattggttgctaattaactgccatattgccctgtctttctattaaaaaaatactgtacctgtacttagaggctaacagattcatgtggacatttaccaggcaagaccaacttgtattgtccatgatttctacgatttccactatcttcaaatgaaaaataaacgctgagtagaa

SEQ ID NO: 105773 - DNA, 2486 bp, Homo sapiens
  Payload ID: 737
  Gene Symbol: ARL15
  Gene Name: ADP-ribosylation factor-like 15
  ENST ID: ENST00000620747
  CDS Start-End: 95-709
gttgctggctttttcaggagctgctcgctcgcagccagagacgctgctttttttttccgggttcggagccgttccggatgctttaggctgccggatgtctgatctccgaataactgaggcgtttctgtacatggattatctgtgttttagagcactttgctgcaagggaccaccacctgcacgaccagaatatgacctggtttgcataggcctcacaggttctggcaaaaccagtctgttgtccaaactctgcagtgaaagccccgataacgtcgtgtcgaccacaggttttagtattaaagcagtgccattccagaatgccatcttgaatgtaaaagaacttggaggggctgataacatccggaaatactggagccgctactaccaaggatctcaaggggtaatatttgtattagacagtgcctcttcagaggatgatttagaagctgctagaaatgagctgcactcagctcttcagcatccacagttatgcactttaccctttttaatattggccaatcatcaagacaagccagcagctcgctcagtacaagagctcaaaaaatattttgaacttgaaccacttgcacgtggaaaacgctggattctacagccctgctcactggatgacatggatgcactgaaagacagcttctctcagctgattaatttgttagaagaaaaagaccatgaagctgtaagaatgtgaaatctggcaaagaaaacaggctcccaaaaggccttgaacctatcatgttagtttctcattttaattttattttggtatcaagactatattggcttcagtatctattttcctctggtcatttcagactctcatctctctattaaagtgaatattctgtagatcagatgaattatcatcggcattaacgtcaagtacacactactgagagagaatttattctctgtttaccactaattatcttccccgcatgtctcttccttctgttgttctaagcatctcttctatactctgtgctgaaacggatggaattcatggcttatggaaatcaaatcccttttgaaggactcagaaagactcacaagaccttgatcattttctctgggtttgggagtggagtattatgtgactgggactccacaaaatatttatattattttcaagacctattgggggttttgttttattttatctaatttttttttttttttggtatactgagcttatagactatgagagaaaagtgagcaccaaaaacttcattaatcaccttatcaggaaggaatatcctgccatagtaaaattggctctgaagagcttagaggcaagttacacaatgttttcttgattacatctgaagtctcttctcttttaagagcaaagacattgtttcagtttctgagagtggttagaggaaatttaggtacaatgcatgcatcacagactgtatttgattgattcgagtcttcaaatattgtttaatggaatgatgagcctgcataaagtgaagctgcaatgtaacataggtatctttttctaaaaacttcaagtgtttgattaaaatagagaaaataatttttaaaataatagataaaaattttaaaaacagccagaaaaagtataatttatactggttagggtttaagatggcatggatttgacaaagataacaaagacagaatcatctatatattcattcattacgtgttactgtagtttattggaatctgttaatgccttcctctagtagttaaaggtttatcagtatttctattataaacctctattttcaggggtttcaatgtgcccttaaaattgtgctggggctgcagcaaataaataatattgggactcatattcagtctttggaactagttttttttccatttaatttaaatgacaaaattgcatagggataaatgtacagttttactaaggtttagcacctttgatcttttctaaatcaggaaaaaaatctatgcatattgaggttcacagatgaaatattctttggcatactttgtagactttgaccacttaaaatactaagtggccaaatgataaaaaaaactgctccctgcacatgagtgtaaaaacatgtttgtaattttaagtaaaatggactgatacccaaataccacagactcacactatattacagaatgatgtaatacctggtaattctccagaagatagacttcagacccttaatgccatttaaatgtagtttttgtggtttaatcttatgagtagattgtaatgaaatcattacctttgaaacatcaaacacttctttaagctttttttttttaatgtcatgaatcaggaaggatacatagtgattcgtatacaattttgtctgcagcattcttgaatatttttaacactgtgtaatccctgagcagcacaaaacttttattccgatgaccagttacacaattcctgtttttattttgtcctgttgtgctcatcttctatgaaaaataaatgattattaggc

SEQ ID NO: 105774 - DNA, 1227 bp, Homo sapiens
  Payload ID: 738
  Gene Symbol: ARL16
  Gene Name: ADP-ribosylation factor-like 16
  Uniprot ID: Q0P5N6
  ENST ID: ENST00000397498
  CDS Start-End: 100-693
gtcttccgctctcccgctaacgctgcgcgctaattggacgcgcccttggaacaatgagccctaagaaccaatgagaagtccgaaggtgagaactatccaatgagagtggccggtgggcgggccttgagccgcggcgccgagctacgggtgccgggtggagcgaagcacggaatgtgtctcctgctgggggccacgggcgtcgggaagacgctgctggtgaaacggctgcaggaggtgagctcccgggatgggaaaggcgacctgggggagccgcccccgacacggcccacggtgggcaccaatcttactgacatcgtggcacagagaaagatcaccatccgggagcttggggggtgcatgggccccatctggtccagttactatggaaactgccgttctctcctgtttgtgatggacgcctctgaccccacccagctctctgcatcctgtgtgcagctcttaggtctcctttctgcagaacaacttgcagaagcatcggtgctgatactcttcaataaaatcgacctaccctgttacatgtccacggaggagatgaagtcattaatcaggcttccagacatcattgcttgtgccaagcagaacatcaccacggcagaaatcagcgcccgtgaaggcactggcttagcaggggtgctggcctggctccaggccacccacagagccaacgattgactgcacggcagaggcgcagctggcctgagctggggagaggtggcagagggcagtatggctttgctgccaatagtttcttctcacaggggcagaataacccaaagtaaccctacatgatggggctctgtgctgagatgcaatgatgtgtaaactgaggcatgtggagatggaagttgacatctggcctctgaaaaaagtgtccccaggggctaggcatggtggctcacacctgtaatcccagcactttgagaggccgaggcgggtgtatcacctgaggtcgggagttcgagactagcctgaccaacatggagaaaccctgtctctactaaaaatacaaaattagctgggtgtgctggtgcatgcctgtaatctcagctacttgggaggctgagacaggagaatcccttgaacctgggaggtggaggttgcagtgagtcgagatcatgccattgcactgcacctgggcaacaagagtgaaactccgtcttaaaaaatataagaaataaaaaaataaaaacctgtccccagactgga

SEQ ID NO: 105775 - DNA, 869 bp, Homo sapiens
  Payload ID: 738
  Gene Symbol: ARL16
  Gene Name: ADP-ribosylation factor-like 16
  ENST ID: ENST00000573392
  CDS Start-End: 81-362
ggggcgcggggggcacccggagtggggcggggactcaccctttagctgctcgggtccttgaccgcttcgcacagtttgtgatggacgcctctgaccccacccagctctctgcatcctgtgtgcagctcttaggtctcctttctgcagaacaacttgcagaagcatcggtgctgatactcttcaataaaatcgacctaccctgttacatgtccacggaggagatgaagtcattaatcaggcttccagacatcattgcttgtgccaagcagaacatcaccacggcagaaatcagcgcccgtgaaggcactggcttagcaggggtgctggcctggctccaggccacccacagagccaacgattgactgcacggcagaggcgcagctggcctgagctggggagaggtggcagagggcagtatggctttgctgccaatagtttcttctcacaggggcagaataacccaaagtaaccctacatgatggggctctgtgctgagatgcaatgatgtgtaaactgaggcatgtggagatggaagttgacatctggcctctgaaaaaagtgtccccaggggctaggcatggtggctcacacctgtaatcccagcactttgagaggccgaggcgggtgtatcacctgaggtcgggagttcgagactagcctgaccaacatggagaaaccctgtctctactaaaaatacaaaattagctgggtgtgctggtgcatgcctgtaatctcagctacttgggaggctgagacaggagaatcccttgaacctgggaggtggaggttgcagtgagtcgagatcatgccattgcactgcacctgggcaacaagagtgaaactccgtcttaaaaaatataagaaataaa

SEQ ID NO: 105776 - DNA, 763 bp, Homo sapiens
  Payload ID: 738
  Gene Symbol: ARL16
  Gene Name: ADP-ribosylation factor-like 16
  ENST ID: ENST00000573715
  CDS Start-End: 382-663
ccggggcgcggggggcacccggagtggggcggggactcaccctttagctgctcgggtccttgaccgcttcgcacaggtgggcaccaatcttactgacatcgtggcacagagaaagatcaccatccgggagcttggggggtgcatgggccccatctggtccagttactatggaaactgccgttctctcctggcctgtgccgcggataccagtatggagaactgatggccacatgaggacagagacgagtgacaccaggtcgtcttcataaaactcgattccctctgcttctgcttgttcccaaagctttgtttaaagctactttgggccgggcgcggtggcttactcctgtaatcccagcactttgggaagctgagtttgtgatggacgcctctgaccccacccagctctctgcatcctgtgtgcagctcttaggtctcctttctgcagaacaacttgcagaagcatcggtgctgatactcttcaataaaatcgacctaccctgttacatgtccacggaggagatgaagtcattaatcaggcttccagacatcattgcttgtgccaagcagaacatcaccacggcagaaatcagcgcccgtgaaggcactggcttagcaggggtgctggcctggctccaggccacccacagagccaacgattgactgcacggcagaggcgcagctggcctgagctggggagaggtggcagagggcagtatggctttgctgccaatagtttcttctcacaggggcagaataaccc

SEQ ID NO: 105777 - DNA, 768 bp, Homo sapiens
  Payload ID: 738
  Gene Symbol: ARL16
  Gene Name: ADP-ribosylation factor-like 16
  ENST ID: ENST00000570561
  CDS Start-End: 191-526
ggggggcacccggagtggggcggggactcaccctttagctgctcgggtccttgaccgcttcgcacaggtgagctcccgggatgggaaaggcgacctgggggagccgcccccgacacggcccacggtgggcaccaatcttactgacatcgtggcacagagaaagatcaccatccgggagcttggggggtgcatgggccccatctggtccagttactatggaaactgccgttctctcctgtttgtgatggacgcctctgaccccacccagctctctgcatcctgtgtgcagctcttaggtctcctttctgcagaacaacttgcagaagcatcggtgctgatactcttcaataaaatcgacctaccctgttacatgtccacggaggagatgaagtcattaatcaggcttccagacatcattgcttgtgccaagcagaacatcaccacggcagaaatcagcgcccgtgaaggcactggcttagcaggggtgctggcctggctccaggccacccacagagccaacgattgactgcacggcagaggcgcagctggcctgagctggggagaggtggcagagggcagtatggctttgctgccaatagtttcttctcacaggggcagaataacccaaagtaaccctacatgatggggctctgtgctgagatgcaatgatgtgtaaactgaggcatgtggagatggaagttgacatctggcctctgaaaaaagtgtccccaggggctaggcatggtggctcacacctgtaatcccagc

SEQ ID NO: 105778 - DNA, 751 bp, Homo sapiens
  Payload ID: 738
  Gene Symbol: ARL16
  Gene Name: ADP-ribosylation factor-like 16
  ENST ID: ENST00000574938
  CDS Start-End: 131-412
ggggggcacccggagtggggcggggactcaccctttagctgctcgggtccttgaccgcttcgcacaggtgagctcccgggatgggaaaggcgacctgggggagccgcccccgacacggcccacgtttgtgatggacgcctctgaccccacccagctctctgcatcctgtgtgcagctcttaggtctcctttctgcagaacaacttgcagaagcatcggtgctgatactcttcaataaaatcgacctaccctgttacatgtccacggaggagatgaagtcattaatcaggcttccagacatcattgcttgtgccaagcagaacatcaccacggcagaaatcagcgcccgtgaaggcactggcttagcaggggtgctggcctggctccaggccacccacagagccaacgattgactgcacggcagaggcgcagctggcctgagctggggagaggtggcagagggcagtatggctttgctgccaatagtttcttctcacaggggcagaataacccaaagtaaccctacatgatggggctctgtgctgagatgcaatgatgtgtaaactgaggcatgtggagatggaagttgacatctggcctctgaaaaaagtgtccccaggggctaggcatggtggctcacacctgtaatcccagcactttgagaggccgaggcgggtgtatcacctgaggtcgggagttcgagactagcctgaccaacatggagaaaccctgtctctactaaaaatacaaaa

SEQ ID NO: 105779 - DNA, 548 bp, Homo sapiens
  Payload ID: 738
  Gene Symbol: ARL16
  Gene Name: ADP-ribosylation factor-like 16
  ENST ID: ENST00000576914
  CDS Start-End: 1-147
gtgggcaccaatcttactgacatcgtggcacagagaaagatcaccatccgggagcttggggggtgcatgggccccatctggtccagttactatggaaactgccgttctctcctggcctgtgccgcggataccagtatggagaactgatggccacatgaggacagagacgagtgacaccaggtcgtcttcataaaactcgattccctctgcttctgcttgttcccaaagctttgtttaaagctactttgggccgggcgcggtggcttactcctgtaatcccagcactttgggaagctgaggtgggcgaatcacgaggtcaggagatggagaccatcctgactaacatgtttgtgatggacgcctctgaccccacccagctctctgcatcctgtgtgcagctcttaggtctcctttctgcagaacaacttgcagaagcatcggtgctgatactcttcaataaaatcgacctaccctgttacatgtccacggaggagatgaagtcattaatcaggcttccagacatcattgcttgtgccaagcagaacatc

SEQ ID NO: 105780 - DNA, 694 bp, Homo sapiens
  Payload ID: 738
  Gene Symbol: ARL16
  Gene Name: ADP-ribosylation factor-like 16
  ENST ID: ENST00000576135
  CDS Start-End: 143-478
ccggggcgcggggggcacccggagtggggcggggactcaccctttagctgctcgggtccttgaccgcttcgcacaggtgggcaccaatcttactgacatcgtggcacagagaaagatcaccatccgggagcttggggggtgcatgggccccatctggtccagttactatggaaactgccgttctctcctgtttgtgatggacgcctctgaccccacccagctctctgcatcctgtgtgcagctcttaggtctcctttctgcagaacaacttgcagaagcatcggtgctgatactcttcaataaaatcgacctaccctgttacatgtccacggaggagatgaagtcattaatcaggcttccagacatcattgcttgtgccaagcagaacatcaccacggcagaaatcagcgcccgtgaaggcactggcttagcaggggtgctggcctggctccaggccacccacagagccaacgattgactgcacggcagaggcgcagctggcctgagctggggagaggtggcagagggcagtatggctttgctgccaatagtttcttctcacaggggcagaataacccaaagtaaccctacatgatggggctctgtgctgagatgcaatgatgtgtaaactgaggcatgtggagatggaagttgacatctggcctctgaaaaaagtgtccccaggggctaggca

SEQ ID NO: 105781 - DNA, 1181 bp, Homo sapiens
  Payload ID: 738
  Gene Symbol: ARL16
  Gene Name: ADP-ribosylation factor-like 16
  Uniprot ID: Q0P5N6
  ENST ID: ENST00000621051
  CDS Start-End: 100-693
gtcttccgctctcccgctaacgctgcgcgctaattggacgcgcccttggaacaatgagccctaagaaccaatgagaagtccgaaggtgagaactatccaatgagagtggccggtgggcgggccttgagccgcggcgccgagctacgggtgccgggtggagcgaagcacggaatgtgtctcctgctgggggccacgggcgtcgggaagacgctgctggtgaaacggctgcaggaggtgagctcccgggatgggaaaggcgacctgggggagccgcccccgacacggcccacggtgggcaccaatcttactgacatcgtggcacagagaaagatcaccatccgggagcttggggggtgcatgggccccatctggtccagttactatggaaactgccgttctctcctgtttgtgatggacgcctctgaccccacccagctctctgcatcctgtgtgcagctcttaggtctcctttctgcagaacaacttgcagaagcatcggtgctgatactcttcaataaaatcgacctaccctgttacatgtccacggaggagatgaagtcattaatcaggcttccagacatcattgcttgtgccaagcagaacatcaccacggcagaaatcagcgcccgtgaaggcactggcttagcaggggtgctggcctggctccaggccacccacagagccaacgattgactgcacggcagaggcgcagctggcctgagctggggagaggtggcagagggcagtatggctttgctgccaatagtttcttctcacaggggcagaataacccaaagtaaccctacatgatggggctctgtgctgagatgcaatgatgtgtaaactgaggcatgtggagatggaagttgacatctggcctctgaaaaaagtgtccccaggggctaggcatggtggctcacacctgtaatcccagcactttgagaggccgaggcgggtgtatcacctgaggtcgggagttcgagactagcctgaccaacatggagaaaccctgtctctactaaaaatacaaaattagctgggtgtgctggtgcatgcctgtaatctcagctacttgggaggctgagacaggagaatcccttgaacctgggaggtggaggttgcagtgagtcgagatcatgccattgcactgcacctgggcaacaagagtgaaactccgtctt

SEQ ID NO: 105782 - DNA, 1053 bp, Homo sapiens
  Payload ID: 738
  Gene Symbol: ARL16
  Gene Name: ADP-ribosylation factor-like 16
  ENST ID: ENST00000622299
  CDS Start-End: 11-532
gaagcacggaatgtgtctcctgctgggggccacgggcgtcgggaagacgctgctggtgaaacggctgcaggaggtgagctcccgggatgggaaaggcgacctgggggagccgcccccgacacggcccacggtgggcaccaatcttactgacatcgtggcacagagaaagatcaccatccgggagcttggggggtgcatgggccccatctggtccagttactatggaaactgccgttctctcctgtttgtgatggacgcctctgaccccacccagctctctgcatcctgtgtgcagctcttaggtctcctttctgcagaacaacttgcagaagcatcggtgctgatactcttcaataaaatcgacctaccctgttacatgtccacggaggagatgaagtcattaatcaggcttccagacatcattgcttgtgccaagcagaacatcaccacggcagaaatcagcgcccgtgaaggcactggcttagcaggggtgctggcctggctccaggccacccacagagccaacgattgactgcacggcagaggcgcagctggcctgagctggggagaggtggcagagggcagtatggctttgctgccaatagtttcttctcacaggggcagaataacccaaagtaaccctacatgatggggctctgtgctgagatgcaatgatgtgtaaactgaggcatgtggagatggaagttgacatctggcctctgaaaaaagtgtccccaggggctaggcatggtggctcacacctgtaatcccagcactttgagaggccgaggcgggtgtatcacctgaggtcgggagttcgagactagcctgaccaacatggagaaaccctgtctctactaaaaatacaaaattagctgggtgtgctggtgcatgcctgtaatctcagctacttgggaggctgagacaggagaatcccttgaacctgggaggtggaggttgcagtgagtcgagatcatgccattgcactgcacctgggcaacaagagtgaaactccgtcttaaaaaatataagaaataaaaaaataaaaacctg

SEQ ID NO: 105783 - DNA, 565 bp, Homo sapiens
  Payload ID: 739
  Gene Symbol: ARL17A
  Gene Name: ADP-ribosylation factor-like 17A
  ENST ID: ENST00000329240
  CDS Start-End: 140-565
gggtgattggttggttgctgttcctgcccccacgcctgtcgtggtttagctgaactgagctgaaatcctaaaggccgcggagtcggcggtgttgtaggtagcggtaccttgagtggcaacagaattcgattaaattacaatgggaaacatttttgaaaagctctttaaaagtctacttgggaaaaaaaagatgcggattcttatattgagtttggatacagctggaaaaaccaccatcttgtataaattgaagctgggggagactgtgcctgccgtccctacagtaggtttctgtgtggagacagtagaatataaaaataacaccttcgctgtctgggatgttggcagccacttcaaaatcagacctctgtggcagcattttttccagaacacaaaagggtcttgctccattgaccaggctggagtgcagtggcgtgatcttggctcactgcaacgtcctcttcccaagctcaggttcgtgagccacacatctccccacaccaagctcctccatacaagacctcggactgcatcacgtaaatgctttttcaggggcaaaatctag

SEQ ID NO: 105784 - DNA, 3945 bp, Homo sapiens
  Payload ID: 739
  Gene Symbol: ARL17A
  Gene Name: ADP-ribosylation factor-like 17A
  Uniprot ID: Q8IVW1
  ENST ID: ENST00000336125
  CDS Start-End: 100-633
gtggtttagctgaactgagctgaaatcctaaaggccgcggagtcggcggtgttgtaggtagcggtaccttgagtggcaacagaattcgattaaattacaatgggaaacatttttgaaaagctctttaaaagtctacttgggaaaaaaaagatgcggattcttatattgagtttggatacagctggaaaaaccaccatcttgtataaattgaagctgggggagactgtgcctgccgtccctacagtaggtttctgtgtggagacagtagaatataaaaataacaccttcgctgtctgggatgttggcagccacttcaaaatcagacctctgtggcagcattttttccagaacacaaaaggtgccagaagcccaggaagcacacatcaaggctcacttgccagcggggtgctgccaataaaatgtagtcacgtggaatttggaatgtggaaaggaggtagaagtcatcctttcctcccccatagcagcaggtgtgcaggctctggtggtcagctggactccatactcccccaccagtcaccagcctggggaccgtggggctgcaaggacctcagcagcggtttcccaagtttcctgacttcttccatcctctggaaatcagctgtggtaaagtagcctgaaagccagtggtgcaaccccatccccacaaccttcaccacctctagcacctccagtgataagcactaattgcctatatacaacccttttttgtttgaaatatctagagtaatttctgttttcctatctggggtagtgtaacataagaagaaatatatatttggtctctgcccccagttcctaacacaaagctcctaaaacccttggaaattcctgaatgatggcggtgctaagagcattgtcctttgttaatttatcatttttcttttctcctaggtgttttttcctttttaaacttttcttttaggttagggggtacatatgcacgttcgttatatagctaaacttgtgtcatgggggtttgttgtacagattatttcatcacccaggtaccaagcctagtacccaatagttttttctgctcctctccctcctcccaccctccaccctcaggtagggcccagtgtctgttgtttatgagttctcatcattttgctcccacttaaaagaacatacagtatttggttttctgttcctgtcttagtttgctgaggataatggcctctagctccatctgtgttcctgcaaaagacatgatctcgctgttttttatggttgcacatcttttgttctaacatttggtccttaaacctggttcctgacacagagctcctaaatcccttggaattttctgggtgatagaagcgtcctttgttctcatgaggtgactcttggtgggctccttatttggggactggtcaccaaaaagacctatggttggaagcgttgtgctgtcagccccattccccatcctctggcgtggggagtagagctggagctcaatcatgcctacgtgataaagcctccagaaaactccttaaaagacaggacttggagagcttccgggttggcgaacacatccatgttccaggagagtggtgcaccccaactccacaaggacccttccaaacctcaccctgtgtatctcttcaactggcttcatcatttgtgtcctttaaaatatcctttgtaataaatcagcactagtaagaaaactgttttcctgggttccatgagctgttctagcaaatgttcaaacctgaggagggagttgtggggacctccaatttacagccagttggtcagatgcataggtgatgcttggccttgcacctggggtctgacatgcggatggtcctgtgtgactgagcccttaacctgtggagtctggtgctcactctgcttagggcttctcttgcctttttagtgtccttctaggcggcctttccttcctcttgtcagctcagaaaacttttcttccacttcccttcttctaaaccatcccttacatctactcctttccagccgaccaagagcagaaccacggctggttccactgccaccatgctgtcccacactgtctcctcaggatgtattcagatgtccagccctccccccagtctaggagccccccctttgaggaaagggatgctggcctagtcaactctttcccagcaccaggtacagcatctggcacgttccatctttttcatggactctccccaggcggcctgaccttccctcctctgaaccggtgcatttcttgtctgcatcatgtttgccctaatcagatatcaccttatttcctcttttaaaaaatgctttgtttctctggcaggcttcatcggaatcacaattttcattcatttagtaactgttgttgtttattctatgtatttttgcaggaggcctgaggtgggctgtgttctcctcctatggcagggcttcactctcctcctcctccgttggggcttcgctgtccctgggataagaataacaatgccaaggttttcattcttgaaaggagcaattaagcttctcaccccctcctcattttagatgggaactgtgagggccccatcatttacccagggtccctgttgaggatcttgtcctcattagatgacttcttgtgcagcttccatgcatgattatttattcttgtggcactgagaggtttgtacatatctttaaaccagagcggctgtccaaatgaggaaagtccatcctagaagatagaaagggaaatattaattttgcatgtcctctgctttccctggccacagcaatgaatcctccaatgtacctgactctcccttcgcgaagagcatcccctccatggcagaaatctgaaaatgcccctggggagacacatgcacaagacagtgagtgatgcagccgtttcccacgtatctcacaatgtacttctctggtcttattaggactaaatgagtatctcagtccataatcacagggagaaccaccaccacagaccacatacccggggtcttgaaaataattccatgcatgtgggactttcagaagctctccatgtctgcccagaagggccccacaatatactggggggactttgtatgtggctcagcatggagcaggggcaggattttcagtcccactcactcccttggccaagtgcccttgtgcagtgaacaaactgcacaaccatgctgggcagaagcattttatatcagtccccttcggacttagtctcacaggcatcatttgatgggggatgggagatgaagtggttcttcgttttctagatactttattctataagttggatcacctcaagcaaatgcgtgagtgcagctagccaagttctctatctcacagtcttcatatggctggctgtcgctgatgagtgagtgagctacgaaatcagcttaaagcacaacatgttatttttgaatttgaataaaataggaaaaggcagagtgcattgtgtgaccatggggtaagtaagacactctccctttctccttctcagttttcctgtcataaaaggacaaactactatctaaggtctccgtagttaaaattcttttttgttgttttttttttatttgagacagtttggctcattccccaggctggagtgcaatggtgctatcttggctccctgcaacctgcgcctcctgggctcaagcagttctcctgcctcagcctcccaagtagctgggattacacgcctgcgccaccacacccagctaatttagtatttttagtagagatggggtttcaccatgttggtcaggctggtcacgagctcctaacctcaagtgatcccaaagtgctgtgattacaggcgtgagccatcctgcctggcctttctggttaaaattctgtgaggtttgcataaaaggaatagagtaggggcccaaaaaccagtaagatgagaaaatagtgtttcctcagttctaggatccaggggaaaaaaaaaagaaa

SEQ ID NO: 105785 - DNA, 798 bp, Homo sapiens
  Payload ID: 739
  Gene Symbol: ARL17A
  Gene Name: ADP-ribosylation factor-like 17A
  Uniprot ID: Q8IVW1
  ENST ID: ENST00000445552
  CDS Start-End: 88-465
aactgagctgaaatcctaaaggccgcggagtcggcggtgttgtaggtagcggtaccttgagtggcaacagaattcgattaaattacaatgggaaacatttttgaaaagctctttaaaagtctacttgggaaaaaaaagatgcggattcttatattgagtttggatacagctggaaaaaccaccatcttgtataaattgaagctgggggagactgtgcctgccgtccctacagtaggtttctgtgtggagacagtagaatataaaaataacaccttcgctgtctgggatgttggcagccacttcaaaatcagacctctgtggcagcattttttccagaacacaaaagagctatcagcttcccagtttgcacaattcatcaagaaattatgcggggtcaccggcacaaatgatgaggcatctcctggaagcttaacttcttatccatcccatctcttggacagatgatgccagttaattactttgaataaatatgggcaaaagcttatcattatcaacaaatgagaagaaagaaaccctatgccaggtaacaccaaagctttggcccagtgccctctgttgaaacatcctaggctttttctttccactcctattacaactgatctgatttggccccttcacacctcactcctagattttgctagacctttctattttgtctccctgaattaagcttttccttttggacactttacatatggattctaaaacaatcctctgcatgtctacacttgcacataatgcaaaaaacaaaataaaataatcttcctgttttgatca

SEQ ID NO: 105786 - DNA, 491 bp, Homo sapiens
  Payload ID: 739
  Gene Symbol: ARL17A
  Gene Name: ADP-ribosylation factor-like 17A
  ENST ID: ENST00000570550
  CDS Start-End: 75-338
tcctaaaggccgcggagtcggcggtgttgtaggtagcggtaccttgagtggcaacagaattcgattaaattacaatgggaaacatttttgaaaagctctttaaaagtctacttgggaaaaaaaagatgcggattcttatattgagtttggatacagctggaaaaaccaccatcttgtataaattgaagctgggggagactgtgcctgccgtccctacagtaggtttctgtgtggagacagtagaatataaaaataacaccttcgctgtctgggatgttggcagccacttcaaaatcagacctctgtggcagcattttttccagaacacaaaagcctgatctagttgaatctgaagatgtggacctgctgatgaagagggctgactgtatctaacttagggtcttgcatgcagctggcacttaatacattttattgactgttttagataacattcaacagataattcctaataaaaactcttaaaagtagga

SEQ ID NO: 105787 - DNA, 581 bp, Homo sapiens
  Payload ID: 739
  Gene Symbol: ARL17A
  Gene Name: ADP-ribosylation factor-like 17A
  ENST ID: ENST00000573185
  CDS Start-End: 69-356
aggccgcggagtcggcggtgttgtaggtagcggtaccttgagtggcaacagaattcgattaaattacaatgggaaacatttttgaaaagctctttaaaagtctacttgggaaaaaaaagatgcggattcttatattgagtttggatacagctggaaaaaccaccatcttgtataaattgaagctgggggagactgtgcctgccgtccctacagtaggtttctgtgtggagacagtagaatataaaaataacaccttcgctgtctgggatgttggcagccacttcaaaatcagacctctgtggcagcattttttccagaacacaaaagctgctcactcccaaagcctgacaagttgatgccactgctgtctgagggctcctctggctcaacaatcagctcagtgcttgtgtagttcttccgggcttgtaacaccttcatgaacgctccttctggattccctaccgatgcttcttcagctgtcaaaaaagaagagactgctttgatcatgaaagatgatgggatgggatgcatcagtccatagctgtacaccccagtcacacagagtaggagtcagcaaacat

SEQ ID NO: 105788 - DNA, 2167 bp, Homo sapiens
  Payload ID: 739
  Gene Symbol: ARL17A
  Gene Name: ADP-ribosylation factor-like 17A
  ENST ID: ENST00000622488
  CDS Start-End: 140-406
gggtgattggttggttgctgttcctgcccccacgcctgtcgtggtttagctgaactgagctgaaatcctaaaggccgcggagtcggcggtgttgtaggtagcggtaccttgagtggcaacagaattcgattaaattacaatgggaaacatttttgaaaagctctttaaaagtctacttgggaaaaaaaagatgcggattcttatattgagtttggatacagctggaaaaaccaccatcttgtataaattgaagctgggggagactgtgcctgccgtccctacagtaggtttctgtgtggagacagtagaatataaaaataacaccttcgctgtctgggatgttggcagccacttcaaaatcagacctctgtggcagcattttttccagaacacaaaaggttcgtgagccacacatctccccacaccaagctcctccatacaagacctcggactgcatcacgtaaatgctttttcaggggcaaaatctagagaatctgaaatggtgagcctttttcctttttttttttttttttgagatgaagtctcactctgttgcccaggctggagtgcagtgcagtggtgtgatcttggctcactgcaaactccacctcctggagtcaagtgattctcctgcctcagccttcagagtagctgggatcatagatgcccgtccccatgcctggttaatttttgtatttttagtagagacagggtttcaccatgttggccaggctggtctcgaacttctgagctcaagtgatccacccaccttggcctcccaaagtgctgagattacagcatgagacaccatgcccagctgtgagcctgtatcttaatcaaagtcctgagaataaccttgaagaagactcccttgcaatgagcaacaacagaagaagcaagggacctggaatctggcagacctgggtttgaattctggctctgtcactttctggtgaagtgacttgagtaatgaacatgagcctttctgggtagcgtttacagcacaaagcaatttgaggaataaatgaaagagcacgtgtctagtgcctagcaatgcgctggacacagtgccggtgctcagccatcatgtcacaccagcactgaccggtgagcataaaccctggggatgcccagagctggtacagccaggagctccagaagcgtgggattctcagagggaagtggagctcactgctctacaggtcctgttcaagttagaaagtaagatacaatgcacacaaagccaaattgtcatcattcagctcctattacaggggaactaagagctgcattgaaaattatttgcaaagcttgtaagtggttctgccacttattagccgtgtgaaccttagcaaattacctagcgtctctgagtttcaacttcctcatctacaaaatagaaatgataataataaccgcatcgcaagagttgttggaaaaatgaaaatgaggtatcataggaggtaacatgtatggagcatttaccataggccaagcactgttctaagaacttcggacatgttatctcacttgtataagtacttaggtgcctacaacataaacagcacctggtaaattaagtattgaaaaaatgctatggggcagaggaagaaatgctaagcttctgtgagaagagaagacagcttgttacacaggtgaaaagaacaagctgcagctgagagaagaaaagtataagagttgctaggtgtgacaatctcaagacttttcaaccactacaaatttaaacagccaccctaaatcaccccaaaggacagactcgagttgttctttttgtctttaatgtttgcgcctctccgaatcagagaagaagctgccaggattccagtacataccaaaacatgatgacaataccctcaactgtgcaaacttttgtgcatctaccgctatgtaaaggaagctgatgtcagtagactggggggaacagtaaggcatgtttgtgaccgaagctcaatttgccatcacagtgtggccacacctacctcactagtattctaatagtgggataaataattcaatagggataaagcctggattttcctcttattctctcttagtgcttacattcttggcatgatatcgatgtgccatagacaagccaatatgtgagtgtactctatctgaataaagtatagcctttctacattgc

SEQ ID NO: 105789 - DNA, 798 bp, Homo sapiens
  Payload ID: 740
  Gene Symbol: ARL17B
  Gene Name: ADP-ribosylation factor-like 17B
  Uniprot ID: Q8IVW1
  ENST ID: ENST00000434041
  CDS Start-End: 88-465
aactgagctgaaatcctaaaggccgcggagtcggcggtgttgtaggtagcggtaccttgagtggcaacagaattcgattaaattacaatgggaaacatttttgaaaagctctttaaaagtctacttgggaaaaaaaagatgcggattcttatattgagtttggatacagctggaaaaaccaccatcttgtataaattgaagctgggggagactgtgcctgccgtccctacagtaggtttctgtgtggagacagtagaatataaaaataacaccttcgctgtctgggatgttggcagccacttcaaaatcagacctctgtggcagcattttttccagaacacaaaagagctatcagcttcccagtttgcacaattcatcaagaaattatgcggggtcactggcacaaatgatgaggcatctcctggaagcttaacttcttatccatcccatctcttggacagatgatgccagttaattactttgaataaatatgggcaaaagcttatcattatcaacaaatgagaagaaagaaaccctatgccaggtaacaccaaagctttggcccagtgccctctgttgaaacatcctaggctttttctttccactcctattacaactgatctgatttggccccttcacacttcactcctagattttgctagacctttctattttgtctccctgaattaagcttttccttttggacactttacatatggattctaaaacaatcctctgcatgtctacacttgcacataatgcaaaaaacaaaataaaataatcttcctgttttgatca

SEQ ID NO: 105790 - DNA, 743 bp, Homo sapiens
  Payload ID: 740
  Gene Symbol: ARL17B
  Gene Name: ADP-ribosylation factor-like 17B
  Uniprot ID: Q8IVW1
  ENST ID: ENST00000450673
  CDS Start-End: 107-640
gcctgtcgtggtttagctgaactgagctgaaatcctaaaggccgcggagtcggcggtgttgtaggtagcggtaccttgagtggcaacagaattcgattaaattacaatgggaaacatttttgaaaagctctttaaaagtctacttgggaaaaaaaagatgcggattcttatattgagtttggatacagctggaaaaaccaccatcttgtataaattgaagctgggggagactgtgcctgccgtccctacagtaggtttctgtgtggagacagtagaatataaaaataacaccttcgctgtctgggatgttggcagccacttcaaaatcagacctctgtggcagcattttttccagaacacaaaaggtgccagaagcccaggaagcacacatcaaggctcacttgccagcggggtgctgccaataaaatgtagtcacgtggaatttggaatgtggaaaggaggtagaagtcatcctttcctcccccatagcagcaggtgtgcaggctctggtggtcagctggactccatactcccccaccagtcaccagcctggggaccgtggggctgcaaggacctcagcagcggtttcccaagtttcctgacttcttccatcctctggaaatcagctgtggtaaagtagcctgaaagccagtggtgcaaccccatccccacaaccttcaccacctctagcacctccagtgataagcactaattgcctatatacaacccttttttgtttgaaa

SEQ ID NO: 105791 - DNA, 2197 bp, Homo sapiens
  Payload ID: 740
  Gene Symbol: ARL17B
  Gene Name: ADP-ribosylation factor-like 17B
  ENST ID: ENST00000572991
  CDS Start-End: 1-335
gggatgttggcagccacttcaaaatcagacctctgtggcagcattttttccagaacacaaaaggtgccagaagcccaggaagcacacatcaaggctcacttgccagcggggtgctgccaataaaatgtagtcacgtggaatttggaatgtggaaaggaggtagaagtcatcctttcctcccccatagcagcaggtgtgcaggctctggtggtcagctggactccatactcccccaccagtcaccagcctggggaccgtggggctgcaaggacctcagcagcggtttcccaagtttcctgacttcttccatcctctggaaatcagctgtgcaatgaatcctccaatgtacctgactctcccttcgcgaagagcatcccctccatggcagaaatctgaaaatgcccctggggagacacatgcacaagacagttcgtgagccacacatctccccacaccaagctcctccatacaagacctcggactgcatcacgtaaatgctttttcaggggcaaaatctagagaatctgaaatggtgagcctttttcctttttttttttttttttttttgagatgaagtctcactctgttgcccaggctggagtgcagtgcagtggtgtgatcttggctcactgcaaactccacctcctggagtcaagtgattctcctgcctcagccttcagagtagctgggatcatagatgcccgtccccatgcctggttaatttttgtatttttagtagagacagggtttcaccatgttggccaggctggtctcgaacttctgagctcaagtgatccacccaccttggcctcccaaagtgctgagattacagcatgagacaccatgcccagctgtgagcctgtatcttaatcaaagtcctgagaataaccttgaagaagactcccttgcaatgagcaacaacagaagaagcaagggacctggaatctggcagacctgggtttgaattctggctctgtcactttctggtgaagtgacttgagtaatgaacatgagcctttctgggtagcgtttacagcacaaagcaatttgaggaataaatgaaagagcacgtgtctagtgcctagcaatgcgctggacacagtgccggtgctcagccatcatgtcacaccagcactgaccggtgagcataaaccctggggatgcccagagctggtacagccaggagctccagaagcgtgggattctcagagggaagtggagctcactgctctacaggtcctattcaagttagaaagtaagacacaatgcgcacaaagccaaattgtcatcattcagctcctattacaggggaactaagagctgcattgaaaattatttgcaaagcttgtaagtggttctgccacttattagccatgtgaaccttagcaaattacctagcgtctctgagtttcaacttcctcatctacaaaatagaaatgataataataaccgcatcgcaagagttgttggaaaaatgaaaatgaggtatcataggaggtaacatgtatggagcatttaccataggccaagcactgttctaagaacttcggacatgttatctcacttgtataagtacttaggtgcctacaacataaacagcacctggtaaattaagtattgaaaaaatgctatggggcagaggatgaaatgctaagcttctgtgagaagagaagacagcttgttacacaggtgaaaagaacaagctgcagctgagagaagaaaagtataagagttgctaggtgtgacaatctcaagacttttcaaccactacaaatttaaacagccaccctaaatcaccccaaaggacagactcgagttgttctttttgtctttaatgtttgcgcctctccgaatcagagaagaagctgccaggattccagtacataccaaaacatgatgacaataccctcaactgtgcaaacttttgtgcatctaccgctatgtaaaggaagctgatgtcagtagactggggggaacagtaaggcatgtttgtgaccgaagctcaatttgccatcacagtgtggccacacctacctcactaatattctaatagtgggataaataattcaatagggataaagcctggattttcctcttattctctcttagtgcttacattcttggcatgatatcgatgtgccatagacaagccaatatgtgagtgtactctatctgaataaagtatagcctttctaca

SEQ ID NO: 105792 - DNA, 581 bp, Homo sapiens; identical to SEQ ID NO: 105787
  Payload ID: 740
  Gene Symbol: ARL17B
  Gene Name: ADP-ribosylation factor-like 17B
  ENST ID: ENST00000575698
  CDS Start-End: 69-356

SEQ ID NO: 105793 - DNA, 1140 bp, Homo sapiens
  Payload ID: 740
  Gene Symbol: ARL17B
  Gene Name: ADP-ribosylation factor-like 17B
  Uniprot ID: Q8IVW1
  ENST ID: ENST00000570618
  CDS Start-End: 107-484
gcctgtcgtggtttagctgaactgagctgaaatcctaaaggccgcggagtcggcggtgttgtaggtagcggtaccttgagtggcaacagaattcgattaaattacaatgggaaacatttttgaaaagctctttaaaagtctacttgggaaaaaaaagatgcggattcttatattgagtttggatacagctggaaaaaccaccatcttgtataaattgaagctgggggagactgtgcctgccgtccctacagtaggtttctgtgtggagacagtagaatataaaaataacaccttcgctgtctgggatgttggcagccacttcaaaatcagacctctgtggcagcattttttccagaacacaaaagagctatcagcttcccagtttgcacaattcatcaagaaattatgcggggtcactggcacaaatgatgaggcatctcctggaagcttaacttcttatccatcccatctcttggacagatgatgccagttaattactttgaatgtctcacaacaacaaactgcagtctacagcttcctaaagttcagcatgttaacctaacataaaacacagcaagaatcttgttgcctgaactattttaaattaaggagccagatctttttagtgaggctatcctgacaagacttgacctaaactttgtttttattggtcataacagtccaattatattattggccaattttgtccaatggacaagaaaaaagcaaagttgccaggtgcggtggctcacgcctgtaatcccagcactttgggaggccaaggcgggcggatcatctgaggtcgggagttcgagaccagcctgaccaatatggagaaaccccgtctctaccaaaaatacaaaattagctgtgcatggtggcctatgcctgtaatcccagctacttgggaggctgaggcaggagaatcgctggaacccgggaggcagaggttgtattgagccgagattgagccattgcactccagcctgggtgacaagaacaaaactccgtttcaaaaacaaaaaaaggaagaaaagaaaaagaaaaaagaaaagtcaacgacaccattatcttgtcaagatcaaatggttttattattgtggcagaagcgagaaaattttgtttattaaaaaaaaaaaa

SEQ ID NO: 105794 - DNA, 491 bp, Homo sapiens; identical to SEQ ID NO: 105786
  Payload ID: 740
  Gene Symbol: ARL17B
  Gene Name: ADP-ribosylation factor-like 17B
  ENST ID: ENST00000571246
  CDS Start-End: 75-338

SEQ ID NO: 105795 - DNA, 731 bp, Homo sapiens
  Payload ID: 740
  Gene Symbol: ARL17B
  Gene Name: ADP-ribosylation factor-like 17B
  ENST ID: ENST00000575960
  CDS Start-End: 61-606
gagtcggcggtgttgtaggtagcggtaccttgagtggcaacagaattcgattaaattacaatgggaaacatttttgaaaagctctttaaaagtctacttgggaaaaaaaagatgcggattcttatattgagtttggatacagctggaaaaaccaccatcttgtataaattgaagctgggggagactgtgcctgccgtccctacagtaggtttctgtgtggagacagtagaatataaaaataacaccttcgctgtctgggatgttggcagccacttcaaaatcagacctctgtggcagcattttttccagaacacaaaaggtgccagaagcccaggaagcacacatcaaggctcacttgccagcggggtgctgccaataaaatgtagtcacgtggaatttggaatgtggaaaggaggtagaagtcatcctttcctcccccatagcagcaggtgtgcaggctctggtggtcagctggactccatactcccccaccagtcaccagcctggggaccgtggggctgcaaggacctcagcagcggtttcccaagtttcctgacttcttccatcctctggaaatcagctgtgctgctcactcccaaagcctgacaagttgatgccactgctgtctgagggctcctctggctcaacaatcagctcagtgcttgtgtagttcttccgggcttgtaacaccttcatgaacgctccttctggattccctaccgatgcttctt

SEQ ID NO: 105796 - DNA, 2167 bp, Homo sapiens
  Payload ID: 740
  Gene Symbol: ARL17B
  Gene Name: ADP-ribosylation factor-like 17B
  ENST ID: ENST00000612181
  CDS Start-End: 140-406
gggtgattggttggttgctgttcctgcccccacgcctgtcgtggtttagctgaactgagctgaattcctaaaggccgcggagtcggcggtgttgtaggtagcggtaccttgagtggcaacagaattcgattaaattacaatgggaaacatttttgaaaagctctttaaaagtctacttgggaaaaaaaagatgcggattcttatattgagtttggatacagctggaaaaaccaccatcttgtataaattgaagctgggggagactgtgcctgccgtccctacagtaggtttctgtgtggagacagtagaatataaaaataacaccttcgctgtctgggatgttggcagccacttcaaaatcagacctctgtggcagcattttttccagaacacaaaaggttcgtgagccacacatctccccacaccaagctcctccatacaagacctcggactgcatcacgtaaatgctttttcaggggcaaaatctagagaatctgaaatggtgagcctttttcctttttttttttttttttgagatgaagtctcactctgttgcccaggctggagtgcagtgcagtggtgtgatcttggctcactgcaaactccacctcctggagtcaagtgattctcctgcctcagccttcagagtagctgggatcatagatgcccgtccccatgcctggttaatttttgtatttttagtagagacagggtttcaccatgttggccaggctggtctcgaacttctgagctcaagtgatccacccaccttggcctcccaaagtgctgagattacagcatgagacaccatgcccagctgtgagcctgtatcttaatcaaagtcctgagaataaccttgaagaagactcccttgcaatgagcaacaacagaagaagcaagggacctggaatctggcagacctgggtttgaattctggctctgtcactttctggtgaagtgacttgagtaatgaacatgagcctttctgggtagcgtttacagcacaaagcaatttgaggaataaatgaaagagcacgtgtctagtgcctagcaatgcgctggacacagtgccggtgctcagccatcatgtcacaccagcactgaccggtgagcataaaccctggggatgcccagagctggtacagccaggagctccagaagcgtgggattctcagagggaagtggagctcactgctctacaggtcctcttcaagttagaaagtaagatacaatgcacacaaagccaaattgtcatcattcagctcctattacaggggaactaagagctgcattgaaaattatttgcaaagcttgtaagtggttctgccacttattagccatgtgaaccttagcaaattacctagcatctctgagtttcaacttcctcatctacaaaatagaaatgataataataaccgcatcgcaagagttgttggaaaaatgaaaatgaggtatcataggaggtaacatgtatggagcatttaccataggccaagcactgttctaagaacttcggacatgttatctcacttgtataagtacttaggtgcctacaacataaacagcacctggtaaattaagtattgaaaaaatgctatggggcagaggaagaaatgctaagcttctgtgagaagagaagacagcttgttacacaggtgaaaagaacaagctgcagctgagagaagaaaagtataagagttgctaggtgtgacaatctcaagacttttcaaccactacaaatttaaacagccaccctaaatcaccccaaaggacagactcgagttgttctttttgtctttaatgtttgcgcctctccgaatcagagaagaagctgccaggattccagtacataccaaaacatgatgacaataccctcaactgtgcaaacttttgtgcatctaccgctatgtaaaggaagctgatgtcagtagactggggggaacagtaaggcatgtttgtgaccgaagctcaatttgccatcacagtgtggccacacctacctcactaatattctaatagtgggataaataattcaatagggataaagcctggattttcctcttattctctcttagtgcttacattcttggcatgatatcgatgtgccatagacaagccaatatgtgagtgtactctatctgaataaagtatagcctttctacattgc

SEQ ID NO: 105797 - DNA, 741 bp, Homo sapiens
  Payload ID: 740
  Gene Symbol: ARL17B
  Gene Name: ADP-ribosylation factor-like 17B
  Uniprot ID: Q8IVW1
  ENST ID: ENST00000617818
  CDS Start-End: 140-517
gggtgattggttggttgctgttcctgcccccacgcctgtcgtggtttagctgaactgagctgaattcctaaaggccgcggagtcggcggtgttgtaggtagcggtaccttgagtggcaacagaattcgattaaattacaatgggaaacatttttgaaaagctctttaaaagtctacttgggaaaaaaaagatgcggattcttatattgagtttggatacagctggaaaaaccaccatcttgtataaattgaagctgggggagactgtgcctgccgtccctacagtaggtttctgtgtggagacagtagaatataaaaataacaccttcgctgtctgggatgttggcagccacttcaaaatcagacctctgtggcagcattttttccagaacacaaaagagctatcagcttcccagtttgcacaattcatcaagaaattatgcggggtcactggcacaaatgatgaggcatctcctggaagcttaacttcttatccatcccatctcttggacagatgatgccagttaattactttgaatgctggtctcgaactcctggcttgaagtgatccttctgtcttggcctcccgaaatgctgagatttcaagcgtgagtcatcatgtctggtctcacagctcagtttttaacatatgtatgaaatatcaactgtgtttggttcaaaggactttatgatcttacagataggaactaaggaataataacataagaaataaaaaatgtgg

SEQ ID NO: 105798 - DNA, 565 bp, Homo sapiens; identical to SEQ ID NO: 105783
  Payload ID: 740
  Gene Symbol: ARL17B
  Gene Name: ADP-ribosylation factor-like 17B
  ENST ID: ENST00000622877
  CDS Start-End: 140-565

SEQ ID NO: 105799 - DNA, 565 bp, Homo sapiens; identical to SEQ ID NO: 105783
  Payload ID: 740
  Gene Symbol: ARL17B
  Gene Name: ADP-ribosylation factor-like 17B
  ENST ID: ENST00000616412
  CDS Start-End: 140-565

SEQ ID NO: 105800 - DNA, 747 bp, Homo sapiens
  Payload ID: 740
  Gene Symbol: ARL17B
  Gene Name: ADP-ribosylation factor-like 17B
  Uniprot ID: Q8IVW1
  ENST ID: ENST00000622165
  CDS Start-End: 111-644
ccacgcctgtcgtggtttagctgaactgagctgaaatcctaaaggccgcggagtcggcggtgttgtaggtagcggtaccttgagtggcaacagaattcgattaaattacaatgggaaacatttttgaaaagctctttaaaagtctacttgggaaaaaaaagatgcggattcttatattgagtttggatacagctggaaaaaccaccatcttgtataaattgaagctgggggagactgtgcctgccgtccctacagtaggtttctgtgtggagacagtagaatataaaaataacaccttcgctgtctgggatgttggcagccacttcaaaatcagacctctgtggcagcattttttccagaacacaaaaggtgccagaagcccaggaagcacacatcaaggctcacttgccagcggggtgctgccaataaaatgtagtcacgtggaatttggaatgtggaaaggaggtagaagtcatcctttccttccccatagcagcaggtgtgcaggctctggtggtcagctggactccatactcccccaccagtcaccagcctggggaccgtggggctgcaaggacctcagcagcggtttcccaagtttcctgacttcttccatcctctggaaatcagctgtggtaaagtagcctgaaagccagtggtgcaaccccatccccacaaccttcaccacctctagcacctccagtgataagcactaattgcctatatacaacccttttttgtttgaaa

SEQ ID NO: 105801 - DNA, 798 bp, Homo sapiens
  Payload ID: 740
  Gene Symbol: ARL17B
  Gene Name: ADP-ribosylation factor-like 17B
  Uniprot ID: Q8IVW1
  ENST ID: ENST00000613440
  CDS Start-End: 88-465
aactgagctgaaatcctaaaggccgcggagtcggcggtgttgtaggtagcggtaccttgagtggcaacagaattcgattaaattacaatgggaaacatttttgaaaagctctttaaaagtctacttgggaaaaaaaagatgcggattcttatattgagtttggatacagctggaaaaaccaccatcttgtataaattgaagctgggggagactgtgcctgccgtccctacagtaggtttctgtgtggagacagtagaatataaaaataacaccttcgctgtctgggatgttggcagccacttcaaaatcagacctctgtggcagcattttttccagaacacaaaagagctatcagcttcccagtttgcacaattcatcaagaaattatgcggggtcactggcacaaatgatgaggcatctcctggaagcttaacttcttatccatcccatctcttggacagatgatgccagttaattactttgaataaatatgggcaaaagcttatcattatcaacaaatgagaagaaagaaaccctatgccaggtaacaccaaagctttggcccagtgccctctgttgaaacatcctaggctttttctttccactcctattacaactgatctgatttggccccttcacacctcactcctagattttgctagacctttctattttgtctccctgaattaagcttttccttttggacactttacatatggattctaaaacaatcctctgcatgtctacacttgcacataatgcaaaaaacaaaataaaataatcttcctgttttgatca

SEQ ID NO: 105802 - DNA, 798 bp, Homo sapiens
  Payload ID: 740
  Gene Symbol: ARL17B
  Gene Name: ADP-ribosylation factor-like 17B
  Uniprot ID: Q8IVW1
  ENST ID: ENST00000615623
  CDS Start-End: 88-465
aactgagctgaattcctaaaggccgcggagtcggcggtgttgtaggtagcggtaccttgagtggcaacagaattcgattaaattacaatgggaaacatttttgaaaagctctttaaaagtctacttgggaaaaaaaagatgcggattcttatattgagtttggatacagctggaaaaaccaccatcttgtataaattgaagctgggggagactgtgcctgccgtccctacagtaggtttctgtgtggagacagtagaatataaaaataacaccttcgctgtctgggatgttggcagccacttcaaaatcagacctctgtggcagcattttttccagaacacaaaagagctatcagcttcccagtttgcacaattcatcaagaaattatgcggggtcactggcacaaatgatgaggcatctcctggaagcttaacttcttatccatcccatctcttggacagatgatgccagttaattactttgaataaatatgggcaaaagcttatcattatcaacaaatgagaagaaagaaaccctatgccaggtaacaccaaagctttggcccagtgccctctgttgaaacatcctaggctttttctttccactcctattacaactgatctgatttggccccttcacacctcactcctagattttgctagacctttctattttgtctccctgaattaagcttttccttttggacactttacatatggattctaaaacaatcctctgcatgtctacacttgcacataatgcaaaaaacaaaataaaataatcttcctgttttgatca

SEQ ID NO: 105803 - DNA, 743 bp, Homo sapiens
  Payload ID: 740
  Gene Symbol: ARL17B
  Gene Name: ADP-ribosylation factor-like 17B
  Uniprot ID: Q8IVW1
  ENST ID: ENST00000618729
  CDS Start-End: 107-637
gcctgtcgtggtttagctgaactgagctgaattcctaaaggccgcggagtcggcggtgttgtaggtagcggtaccttgagtggcaacagaattcgattaaattacaatgggaaacatttttgaaaagctctttaaaagtctacttgggaaaaaaaagatgcggattcttatattgagtttggatacagctggaaaaaccaccatcttgtataaattgaagctgggggagactgtgcctgccgtccctacagtaggtttctgtgtggagacagtagaatataaaaataacaccttcgctgtctgggatgttggcagccacttcaaaatcagacctctgtggcagcattttttccagaacacaaaaggtgccagaagcccaggaagcacacatcaaggctcacttgccagcggggtgctgccaataaaatgtagtcacgtggaatttggaatgtggaaaggaggtagaagtcatcctttcctcccccatagcagcaggtgtgcaggctctggtggtcagctggactccatactcccccaccagtcaccagcctggggaccgtggggctgcaaggacctcagcagcggtttcccaagtttcctgacttcttccatcctctggaaatcagctgtggtaaagtagcctgaaagccagtggtgcaaccccatccccacaaccttcaccacctctagcccctccagtgataagcactaattgcctatatacaacccttttttgtttgaaa

SEQ ID NO: 105804 - DNA, 565 bp, Homo sapiens
  Payload ID: 740
  Gene Symbol: ARL17B
  Gene Name: ADP-ribosylation factor-like 17B
  ENST ID: ENST00000620856
  CDS Start-End: 140-565
gggtgattggttggttgctgttcctgcccccacgcctgtcgtggtttagctgaactgagctgaattcctaaaggccgcggagtcggcggtgttgtaggtagcggtaccttgagtggcaacagaattcgattaaattacaatgggaaacatttttgaaaagctctttaaaagtctacttgggaaaaaaaagatgcggattcttatattgagtttggatacagctggaaaaaccaccatcttgtataaattgaagctgggggagactgtgcctgccgtccctacagtaggtttctgtgtggagacagtagaatataaaaataacaccttcgctgtctgggatgttggcagccacttcaaaatcagacctctgtggcagcattttttccagaacacaaaagggtcttgctccattgaccaggctggagtgcagtggcgtgatcttggctcactgcaacgtcctcttcccaagctcaggttcgtgagccacacatctccccacaccaagctcctccatacaagacctcggactgcatcacgtaaatgctttttcaggggcaaaatctag

SEQ ID NO: 105805 - DNA, 731 bp, Homo sapiens
  Payload ID: 740
  Gene Symbol: ARL17B
  Gene Name: ADP-ribosylation factor-like 17B
  ENST ID: ENST00000626686
  CDS Start-End: 61-606
gagtcggcggtgttgtaggtagcggtaccttgagtggcaacagaattcgattaaattacaatgggaaacatttttgaaaagctctttaaaagtctacttgggaaaaaaaagatgcggattcttatattgagtttggatacagctggaaaaaccaccatcttgtataaattgaagctgggggagactgtgcctgccgtccctacagtaggtttctgtgtggagacagtagaatataaaaataacaccttcgctgtctgggatgttggcagccacttcaaaatcagacctctgtggcagcattttttccagaacacaaaaggtgccagaagcccaggaagcacacatcaaggctcacttgccagcggggtgctgccaataaaatgtagtcacgtggaatttggaatgtggaaaggaggtagaagtcatcctttccttccccatagcagcaggtgtgcaggctctggtggtcagctggactccatactcccccaccagtcaccagcctggggaccgtggggctgcaaggacctcagcagcggtttcccaagtttcctgacttcttccatcctctggaaatcagctgtgctgctcactcccaaagcctgacaagttgatgccactgctgtctgagggctcctctggctcaacaatcagctcagtgcttgtgtagttcttccgggcttgtaacaccttcatgaacgctccttctggattccctaccgatgcttctt

SEQ ID NO: 105806 - DNA, 581 bp, Homo sapiens; identical to SEQ ID NO: 105787
  Payload ID: 740
  Gene Symbol: ARL17B
  Gene Name: ADP-ribosylation factor-like 17B
  ENST ID: ENST00000630826
  CDS Start-End: 69-356

SEQ ID NO: 105807 - DNA, 491 bp, Homo sapiens
  Payload ID: 740
  Gene Symbol: ARL17B
  Gene Name: ADP-ribosylation factor-like 17B
  ENST ID: ENST00000626738
  CDS Start-End: 75-338
tcctaaaggccgcggagtcggcggtgttgtaggtagcggtaccttgagtggcaacagaattcgattaaattacaatgggaaacatttttgaaaagctctttaaaagtctacttgggaaaaaaaagatgcggattcttatattgagtttggatacagctggaaaaaccaccatcttgtataaattgaagctgggggagactgtgcctgccgtccctacagtaggtttctgtgtggagacagtagaatataaaaataacaccttcgctgtctgggatgttggcagccacttcaaaatcagacctctgtggcagcattttttccagaacacaaaagcctgatctagttgaatctgaagatgtggacctgctgatgaagagggctgactgtatctaacttagggtcttgcatgcagctggcacttaatacattttattgactgttttagataacattcaacagacaattcctaataaaaactcttaaaagtagga

SEQ ID NO: 105808 - DNA, 2194 bp, Homo sapiens
  Payload ID: 740
  Gene Symbol: ARL17B
  Gene Name: ADP-ribosylation factor-like 17B
  ENST ID: ENST00000628199
  CDS Start-End: 1-335
gggatgttggcagccacttcaaaatcagacctctgtggcagcattttttccagaacacaaaaggtgccagaagcccaggaagcacacatcaaggctcacttgccagcggggtgctgccaataaaatgtagtcacgtggaatttggaatgtggaaaggaggtagaagtcatcctttccttccccatagcagcaggtgtgcaggctctggtggtcagctggactccatactcccccaccagtcaccagcctggggaccgtggggctgcaaggacctcagcagcggtttcccaagtttcctgacttcttccatcctctggaaatcagctgtgcaatgaatcctccaatgtacctgactctcccttcgcgaagagcatcccctccgtggcagaaatctgaaaatgcccctggggagacacatgcacaagacagttcgtgagccacacatctccccacaccaagctcctccatacaagacctcggactgcatcacgtaaatgctttttcaggggcaaaatctagagaatctgaaatggtgagcctttttccttttttttttttttttttgagatgaagtctcactctgttgcccaggctggagtgcagtgcagtggtgtgatcttggctcactgcaaactccacctcctggagtcaagtgattctcctgcctcagccttcagagtagctgggatcatagatgcccgtccccatgcctggttaatttttgtatttttagtagagacagggtttcaccatgttggccaggctggtctcgaacttctgagctcaagtgatccacccaccttggcctcccaaagtgctgagattacagcatgagacaccatgcccagctgtgagcctgtatcttaatcaaagtcctgagaataaccttgaagaagactcccttgcaatgagcaacaacagaagaagcaagggacctggaatctggcagacctgggtttgaattctggctctgtcactttctggtgaagtgacttgagtaatgaacatgagcctttctgggtagcgtttacagcacaaagcaatttgaggaataaatgaaagagcacgtgtctagtgcctagcaatgcgctggacacagtgccggtgctcagccatcatgtcacaccagcactgaccggtgagcataaaccctggggatgcccagagctggtacagccaggagctccagaagcgtgggattctcagagggaagtggagctcactgctctacaggtcctgttcaagttagaaagtaagatacaatgcacacaaagccaaattgtcatcattcagctcctattacaggggaactaagagctgcattgaaaattatttgcaaagcttgtaagtggttctgccacttattagccgtgtgaaccttagcaaattacctagcgtctctgagtttcaacttcctcatctacaaaatagaaatgataataataaccgcatcgcaagagttgttggaaaaatgaaaatgaggtatcataggaggtaacatgtatggagcatttaccataggccaagcactgttctaagaacttcggacatgttatctcacttgtataagtacttaggtgcctacaacataaacagcacctggtaaattaagtattgaaaaaatgctatggggcagaggaagaaatgctaagcttctgtgagaagagaagacagcttgttacacaggtgaaaagaacaagctgcagctgagagaagaaaagtataagagttgctaggtgtgacaatctcaagacttttcaaccactacaaatttaaacagccaccctaaatcaccccaaaggacagactcgagttgttctttttgtctttaatgtttgcgcctctccgaatcagagaagaagctgccaggattccagtacataccaaaacatgatgacaataccctcaactgtgcaaacttttgtgcatctaccgctatgtaaaggaagctgatgtcagtagactggggggaacagtaaggcatgtttgtgaccgaagctcaatttgccatcacagtgtggccacacctacctcactaatattctaatagtgggataaataattcaatagggataaagcctggattttcctcttattctctcttagtgcttacattcttggcatgatatcgatgtgccacagacaagccaatatgtgagtgtactctatctgaataaagtatagcctttctaca

SEQ ID NO: 105809 - DNA, 712 bp, Homo sapiens
  Payload ID: 740
  Gene Symbol: ARL17B
  Gene Name: ADP-ribosylation factor-like 17B
  Uniprot ID: Q8IVW1
  ENST ID: ENST00000626328
  CDS Start-End: 95-472
ttagctgaactgagctgaaatcctaaaggccgcggagtcggcggtgttgtaggtagcggtaccttgagtggcaacagaattcgattaaattacaatgggaaacatttttgaaaagctctttaaaagtctacttgggaaaaaaaagatgcggattcttatattgagtttggatacagctggaaaaaccaccatcttgtataaattgaagctgggggagactgtgcctgccgtccctacagtaggtttctgtgtggagacagtagaatataaaaataacaccttcgctgtctgggatgttggcagccacttcaaaatcagacctctgtggcagcattttttccagaacacaaaagagctatcagcttcccagtttgcacaattcatcaagaaattatgcggggtcactggcacaaatgatgaggcatctcctggaagcttaacttcttatccatcccatctcttggacagatgatgccagttaattactttgaatgtctcacaacaacaaactgcagtctacagcttcctaaagttcagcatgttaacctaacataaaacacagcaagaatcttgttgcctgaactattttaaattaaggagccagatctttttagtgaggctatcctgacaagacttgatctaactttgtttttatcggtcataacagtccaattatattattggccaattttgtccaatggacaagaaaaaa

SEQ ID NO: 105810 - DNA, 1140 bp, Homo sapiens
  Payload ID: 740
  Gene Symbol: ARL17B
  Gene Name: ADP-ribosylation factor-like 17B
  Uniprot ID: Q8IVW1
  ENST ID: ENST00000634170
  CDS Start-End: 107-484
gcctgtcgtggtttagctgaactgagctgaattcctaaaggccgcggagtcggcggtgttgtaggtagcggtaccttgagtggcaacagaattcgattaaattacaatgggaaacatttttgaaaagctctttaaaagtctacttgggaaaaaaaagatgcggattcttatattgagtttggatacagctggaaaaaccaccatcttgtataaattgaagctgggggagactgtgcctgccgtccctacagtaggtttctgtgtggagacagtagaatataaaaataacaccttcgctgtctgggatgttggcagccacttcaaaatcagacctctgtggcagcattttttccagaacacaaaagagctatcagcttcccagtttgcacaattcatcaagaaattatgcggggtcactggcacaaatgatgaggcatctcctggaagcttaacttcttatccatcccatctcttggacagatgatgccagttaattactttgaatgtctcacaacaacaaactgcagtctacagcttcctaaagttcagcatgttaacctaacataaaacacagcaagaatcttgttgcctgaactattttaaattaaggagccagatctttttagtgaggctatcctgacaagacttgacctaaactttgtttttattggtcataacagtccaattatattattggccaattttgtccaatggacaagaaaaaagcaaagttgccaggtgcggtggctcacgcctgtaatcccagcactttgggaggccaaggcgggcggatcatctgaggtcgggagttcgagaccagcctgaccaatatggagaaaccccgtctctaccaaaaatacaaaattagctgtgcatggtggcctatgcctgtaatcccagctacttgggaggctgaggcaggagaatcgctggaacccgggaggcagaggttgtattgagccgagattgagccattgcactccagcctgggtgacaagaacaaaactccgtttcaaaaacaaaaaaaggaagaaaagaaaaagaaaaaagaaaagtcaacgacaccattatcttgtcaagatcaaatggttttattattgtggcagaagcgagaaaattttgtttattaaaaaaaaaaaa

SEQ ID NO: 105811 - DNA, 731 bp, Homo sapiens; identical to SEQ ID NO: 105795
  Payload ID: 740
  Gene Symbol: ARL17B
  Gene Name: ADP-ribosylation factor-like 17B
  ENST ID: ENST00000633026
  CDS Start-End: 61-606

SEQ ID NO: 105812 - DNA, 581 bp, Homo sapiens; identical to SEQ ID NO: 105787
  Payload ID: 740
  Gene Symbol: ARL17B
  Gene Name: ADP-ribosylation factor-like 17B
  ENST ID: ENST00000632650
  CDS Start-End: 69-356

SEQ ID NO: 105813 - DNA, 2193 bp, Homo sapiens
  Payload ID: 740
  Gene Symbol: ARL17B
  Gene Name: ADP-ribosylation factor-like 17B
  ENST ID: ENST00000632007
  CDS Start-End: 1-335
gggatgttggcagccacttcaaaatcagacctctgtggcagcattttttccagaacacaaaaggtgccagaagcccaggaagcacacatcaaggctcacttgccagcggggtgctgccaataaaatgtagtcacgtggaatttggaatgtggaaaggaggtagaagtcatcctttcctcccccatagcagcaggtgtgcaggctctggtggtcagctggactccatactcccccaccagtcaccagcctggggaccgtggggctgcaaggacctcagcagcggtttcccaagtttcctgacttcttccatcctctggaaatcagctgtgcaatgaatcctccaatgtacctgactctcccttcgcgaagagcatcccctccgtggcagaaatctgaaaatgcccctggggagacacatgcacaagacagttcgtgagccacacatctccccacaccaagctcctccatacaagacctcggactgcatcacgtaaatgctttttcaggggcaaaatctagagaatctgaaatggtgagcctttttcctttttttttttttttttgagatgaagtctcactctgttgcccaggctggagtgcagtgcagtggtgtgatcttggctcactgcaaactccacctcctggagtcaagtgattctcctgcctcagccttcagagtagctgggatcatagatgcccgtccccatgcctggttaatttttgtatttttagtagagacagggtttcaccatgttggccaggctggtctcgaacttctgagctcaagtgatccacccaccttggcctcccaaagtgctgagattacagcatgagacaccatgcccagctgtgagcctgtatcttaatcaaagtcctgagaataaccttgaagaagactcccttgcaatgagcaacaacagaagaagcaagggacctggaatctggcagacctgggtttgaattctggctctgtcactttctggtgaagtgacttgagtaatgaacatgagcctttctgggtagcgtttacagcacaaagcaatttgaggaataaatgaaagagcacgtgtctagtgcctagcaatgcgctggacacagtgccggtgctcagccatcatgtcacaccagcactgaccggtgagcataaaccctggggatgcccagagctggtacagccaggagctccagaagcgtgggattctcagagggaagtggagctcactgctctacaggtcctcttcaagttagaaagtaagatacaatgcacacaaagccaaattgtcatcattcagctcctattacaggggaactaagagctgcattgaaaattatttgcaaagcttgtaagtggttctgccacttattagccatgtgaaccttagcaaattacctagcatctctgagtttcaacttcctcatctacaaaatagaaatgataataataaccgcatcgcaagagttgttggaaaaatgaaaatgaggtatcataggaggtaacatgtatggagcatttaccataggccaagcactgttctaagaacttcggacatgttatctcacttgtataagtacttaggtgcctacaacataaacagcacctggtaaattaagtattgaaaaaatgctatggggcagaggaagaaatgctaagcttctgtgagaagagaagacagcttgttacacaggtgaaaagaacaagctgcagctgagagaagaaaagtataagagttgctaggtgtgacaatctcaagacttttcaaccactacaaatttaaacagccaccctaaatcaccccaaaggacagactcgagttgttctttttgtctttaatgtttgcgcctctccgaatcagagaagaagctgccaggattccagtacataccaaaacatgatgacaataccctcaactgtgcaaacttttgtgcatctaccgctatgtaaaggaagctgatgtcagtagactggggggaacagtaaggcatgtttgtgaccgaagctcaatttgccatcacagtgtggccacacctacctcactaatattctaatagtgggataaataattcaatagggataaagcctggattttcctcttattctctcttagtgcttacattcttggcatgatatcgatgtgccatagacaagccaatatgtgagtgtactctatctgaataaagtatagcctttctaca

SEQ ID NO: 105814 - DNA, 491 bp, Homo sapiens; identical to SEQ ID NO: 105786
  Payload ID: 740
  Gene Symbol: ARL17B
  Gene Name: ADP-ribosylation factor-like 17B
  ENST ID: ENST00000633542
  CDS Start-End: 75-338

SEQ ID NO: 105815 - DNA, 979 bp, Homo sapiens
  Payload ID: 741
  Gene Symbol: ARL2
  Gene Name: ADP-ribosylation factor-like 2
  Uniprot ID: P36404
  ENST ID: ENST00000246747
  CDS Start-End: 96-650
gactatgccgtcggcgagcgtgatagccaacaggaaccgggagcggggtcccgggactgggaagaaacggcggccgggagggggctccggggaccatggggctcctgaccattctgaagaagatgaagcagaaagagcgggagctgcgactgctcatgcttggcctggacaatgctggaaagacaaccatcctgaagaagttcaatggggaggacatcgacaccatctccccaacgctgggcttcaacatcaagaccctggagcaccgaggattcaagctgaacatctgggatgtgggtggccagaagtccctgcggtcctactggcggaactactttgagagcaccgatggcctcatctgggtagtggacagcgcagaccgccagcgcatgcaggactgccagcgggagctccagagcctgctggtggaggagcgcctggccggagcaaccctcctcatctttgctaataagcaggacctgcctggagcactgtcctctaacgccatccgcgaggtcctggagctggactccatccgcagccaccactggtgcatccagggctgcagcgccgtcaccggggagaacctgctgccgggcatcgactggctcctggatgacatttccagccgcattttcacagctgactgaaccactccagatgccccccacctagcagtccaggtccctcaaccttcaccaaacactacccatggggggttgggagtcagccggccaaactaacactccccctcctccaccccagcctgctgctgctactgctgcccgctgctgctctgtggccacccggctcccatggcgggagggctgtgccctggctgtctctctggctcctgacctggcctttggctaccataccaagaagagagggctgggcggggaggagctgctactgctgctaccgaggctgtgggcctcatccttcactcagttgtgaaataaaccgctccttgccccga

SEQ ID NO: 105816 - DNA, 795 bp, Homo sapiens
  Payload ID: 741
  Gene Symbol: ARL2
  Gene Name: ADP-ribosylation factor-like 2
  Uniprot ID: P36404
  ENST ID: ENST00000533729
  CDS Start-End: 17-490
gggggctccggggaccatggggctcctgaccattctgaagaagatgaagcagaaagagcgggagctgcgactgctcatgcttggcctggacaatgctggaaagacaaccatcctgaagaagttcaatggggaggacatcgacaccatctccccaacgctgggcttcaacatcaagaccctggagcaccgaggattcaagctgaacatctgggatgtgggtggccagaagtccctgcggtcctactggcggaactactttgagagcaccgatggcctcatctgggtagtggacagcgcagaccgccagcgcatgcaggactgccagcgggagctccagagcctgctggtggaggaggtcctggagctggactccatccgcagccaccactggtgcatccagggctgcagcgccgtcaccggggagaacctgctgccgggcatcgactggctcctggatgacatttccagccgcattttcacagctgactgaaccactccagatgccccccacctagcagtccaggtccctcaaccttcaccaaacactacccatggggggttgggagtcagccggccaaactaacactccccctcctccaccccagcctgctgctgctactgctgcccgctgctgctctgtggccacccggctcccatggcgggagggctgtgccctggctgtctctctggctcctgacctggcctttggctaccataccaagaagagagggctgggcggggaggagctgctactgctgctaccgaggctgtgggcctcatccttcactcagttgt

SEQ ID NO: 105817 - DNA, 830 bp, Homo sapiens
  Payload ID: 741
  Gene Symbol: ARL2
  Gene Name: ADP-ribosylation factor-like 2
  Uniprot ID: P36404
  ENST ID: ENST00000529384
  CDS Start-End: 29-583
cggcggccgggagggggctccggggaccatggggctcctgaccattctgaagaagatgaagcagaaagagcgggagctgcgactgctcatgcttggcctggacaatgctggaaagacaaccatcctgaagaagttcaatggggaggacatcgacaccatctccccaacgctgggcttcaacatcaagaccctggagcaccgaggattcaagctgaacatctgggatgtgggtggccagaagtccctgcggtcctactggcggaactactttgagagcaccgatggcctcatctgggtagtggacagcgcagaccgccagcgcatgcaggactgccagcgggagctccagagcctgctggtggaggagcgcctggccggagcaaccctcctcatctttgctaataagcaggacctgcctggagcactgtcctctaacgccatccgcgaggtcctggagctggactccatccgcagccaccactggtgcatccagggctgcagcgccgtcaccggggagaacctgctgccgggcatcgactggctcctggatgacatttccagccgcattttcacagctgactgaaccactccagatgccccccacctagcagtccagcctgctgctgctactgctgcccgctgctgctctgtggccacccggctcccatggcgggagggctgtgccctggctgtctctctggctcctgacctggcctttggctaccataccaagaagagagggctgggcggggaggagctgctactgctgctaccgaggctgtgggcctcatccttcactcagttgtgaaataaaccgctccttgccccga

SEQ ID NO: 105818 - DNA, 2130 bp, Homo sapiens
  Payload ID: 742
  Gene Symbol: ARL2BP
  Gene Name: ADP-ribosylation factor-like 2 binding protein
  Uniprot ID: Q9Y2Y0
  ENST ID: ENST00000219204
  CDS Start-End: 271-762
aggaggcggggcgccgcgcccctccggcagtcaccgaggcccggacctgcggcgtcggcggcgcgcgcagagggccaggcgggcgtagaggccggaccgacgcgtggcggcagagggtatccaaggccggacctggcgcgcaggcgctgacccgacctggcagtgagctggccgcggccttggctgagaggccttaaccccgccgggcggccgcgccctgcatgcgagttgggccgcgggcggggttggagcctactcggggcgactgcgatggacgccttagaaggagagagctttgcgctgtctttctcctccgcctctgatgcagaatttgatgctgtggttggatatttagaggacattatcatggatgacgagttccagttattacagagaaatttcatggacaagtactacctggagtttgaagacacagaagagaataaactcatctacacacctatttttaatgaatacatttctttggtagaaaaatacattgaagaacagctgctgcagcggattcctgagttcaacatggcagccttcaccacaacattacagcaccataaggatgaagtggctggtgacatattcgacatgctgctcaccttcacagattttctggcttttaaagaaatgtttttggactacagagcagaaaaagaaggccgaggactggacttaagcagtggcttagtggtgacttcattgtgcaaatcatcttctctgccagcttcccagaacaatctgcggcactaggtcctacctccagccaatgaatgggatcattctggatgtcaccagcccaataggctcagctcatgatgacagaacacatcttggaaagactgactctgttatgtaactcttcatttatgttaagtattaataggtcaaaaccaaaatgacctaaccctcctggacctatttatcctgaaacaccttcttgtattcattaaccatagtactcctccccacctcaagtagacacctctctcaggagcttctgagtcagacgcctctggagcgagccctatgtcaggcactccacctggggggcccttccccagcatacctgctggtgtgtaagtgtggactaacccgccgccaccaccctctgttccagcaggctctgcatgaatctttgtgcacttgcacctctttttcacatgggccacagtttcagtacttcagcctcagtggggttcctgatgtttatctagggtgttactcaagcccagtttgagattttggagtctcctgtgatcacatcttgtctcggctgtaggaatcaacagaaggagacgtcctctacataaaagctccatgtgaaaagctactcctagtcttaacatttgcagtccttgtgtcactgtcttctggtcctgatgtagtcccactgtttctagaagtctcttttaagcattatttttgaaaaaaaaaatatttttatagatgaatactcaggctaacctagtggatgtgatcttggaacttccatgattatccacttaaagatcaaagtattatatgctgtgtgctttttaggtgtttgttagtactgtgaaggcaaaaatgctttctacattgacattcattcctattttactgggcacctatgaatgtatgctgtgtgctagaaatagactaaaacatattcctatagcatgttagtgtgtttgcatgtttgctgaaaatcctttgtgtataaaccagtttgtaaggttctctgggttaggtagggactctgcagtttcttcctgtcaaaatctctcctaccaagatggtgttccactgtccagcccagcatgagtagcaggtagagcacagctttactggctgtttgtatgctttggtttagtgcaatgtgtggtagattacttatcagaaaacatatatgtcatctctagaacgaagaaaaagcatagtagttcaattcccagtgtgtccctttgattttttttttttaatagtaaaaataagaatctgtactgacttttcacttggccattctggttttaaaggacaagctacaagctctgtgtttctgtactgatgtgtcacttattaaatacttttgtaccatgagtaaaacttcaggtgtttcgcaagaaccaccattctcaa

SEQ ID NO: 105819 - DNA, 1416 bp, Homo sapiens
  Payload ID: 742
  Gene Symbol: ARL2BP
  Gene Name: ADP-ribosylation factor-like 2 binding protein
  ENST ID: ENST00000563234
  CDS Start-End: 1-514
cttagaaggagagagctttgcgctgtctttctcctccgcctctgatgcagaatttgatgctgtggttggatatttagaggacattatcatggatgacgagttccagttattacagagaaatttcatggacaagtactacctggagtttgaagacacagaagagaataaactcatctacacacctatttttaatgaatacatttctttggtagaaaaatacattgaagaacagctgctgcagcggattcctgagttcaacatggcagccttcaccacaacattacagcaccataaggatgaagtggctggtgacatattcgacatgctgctcaccttcacagattttctggcttttaaagaaatgtttttggactacagagcacttcccagaacaatctgcggcactaggtcctacctccagccaatgaatgggatcattctggatgtcaccagcccaataggctcagctcatgatgacagaacacatcttggaaagactgactctgttatgtaactcttcatttatgttaagtattaataggtcaaaaccaaaatgacctaaccctcctggacctatttatcctgaaacaccttcttgtattcattaaccatagtactcctccccacctcaagtagacacctctctcaggagcttctgagtcagacgcctctggagcgagccctatgtcaggcactccacctggggggcccttccccagcatacctgctggtgtgtaagtgtggactaacccgccgccaccaccctctgttccagcaggctctgcatgaatctttgtgcacttgcacctctttttcacatgggccacagtttcagtacttcagcctcagtggggttcctgatgtttatctagggtgttactcaagcccagtttgagattttggagtctcctgtgatcacatcttgtctcggctgtaggaatcaacagaaggagacgtcctctacataaaagctccatgtgaaaagctactcctagtcttaacatttgcagtccttgtgtcactgtcttctggtcctgatgtagtcccactgtttctagaagtctcttttaagcattatttttgaaaaaaaaaatatttttatagatgaatactcaggctaacctagtggatgtgatcttggaacttccatgattatccacttaaagatcaaagtattatatgctgtgtgctttttaggtgtttgttagtactgtgaaggcaaaaatgctttctacattgacattcattcctattttactgggcacctatgaatgtatgctgtgtgctagaaatagactaaaacatattcctatagcatgttagtgtgtttgcatgtttgctgaaaatcctttgtgtataaaccagtttgtaaggttctctgggttaggtagggactctgcagtttcttcctgtcaa

SEQ ID NO: 105820 - DNA, 547 bp, Homo sapiens
  Payload ID: 742
  Gene Symbol: ARL2BP
  Gene Name: ADP-ribosylation factor-like 2 binding protein
  ENST ID: ENST00000562023
  CDS Start-End: 19-390
ctactcggggcgactgcgatggacgccttagaaggagagagctttgcgctgtctttctcctccgcctctgatgcagaatttgatgctgtggttggatatttagaggacattatcatggaaaaatacattgaagaacagctgctgcagcggattcctgagttcaacatggcagccttcaccacaacattacagcaccataaggatgaagtggctggtgacatattcgacatgctgctcaccttcacagattttctggcttttaaagaaatgtttttggactacagagcagaaaaagaaggccgaggactggacttaagcagtggcttagtggtgacttcattgtgcaaatcatcttctctgccagcttcccagaacaatctgcggcactaggtcctacctccagccaatgaatgggatcattctggatgtcaccagcccaataggctcagctcatgatgacagaacacatcttggaaagactgactctgttatgtaactcttcatttatgttaagtattaataggtcaaaaccaaaatgacctaaccc

SEQ ID NO: 105821 - DNA, 3844 bp, Homo sapiens
  Payload ID: 743
  Gene Symbol: ARL3
  Gene Name: ADP-ribosylation factor-like 3
  Uniprot ID: P36405
  ENST ID: ENST00000260746
  CDS Start-End: 133-681
accccgccccgtattgctgctcagctcctcagctgtgcgtgcgagggacgtcgggggcggcgccgcagcagttgcccctggtaacgggggaggcagcaggaggaggaggaggaggagggactcggcgggaggatgggcttgctctcaattttgcgcaagttgaaaagtgcaccagaccaggaggtgagaatacttctcctgggcttggataatgctggcaagaccactcttctgaagcagcttgcatctgaagacatcagccacatcacacctacacagggtttcaacatcaaaagtgtacaatcacaaggttttaaactgaatgtatgggacattggtggacagaggaaaatcagaccatactggaagaattattttgaaaataccgatattcttatatatgtaatcgacagtgcagacagaaaaagatttgaagagacgggtcaggaactagcggaattactggaggaagaaaaactaagttgtgtgccagtgctcatctttgctaataagcaggatttgctcacagcagcccctgcctctgaaattgcagaaggactgaacctgcataccatccgcgaccgagtctggcagatccagtcttgctcagctctcacaggagagggcgttcaggatggcatgaactgggtctgcaaaaatgtcaatgcaaagaagaaataaaatctagacgaatggagatgcaggagctgcgggagccgaattcggtcctgaaaaacactaatttgctgctttctgaccaaatgtttttccatctgtgtacagctccagctgtttgaagagagggaacaacacggtttagaaagaatccccattccagcagtagatttaactgatctctgaggttcagtatcatttttcaaataaaggaattatattatttcctctgcataattgaaatagtattaaatgtctcaaagcacatgattagaaaatgagatcttttaaatgagcaagagattgcattgcagtttagacaattccagtgggcttttttttcctctcaaaaaaaaaaaaagaaaaagaaaaagaggaagaagcagctttgctgagttcatttatttactgacccgtcccttgcattccctccatggttttgaaaccacagacagtgtttgctggtgctgtcagtgatttttaccgtcactagcccagccaggcttcagtctgtccgacaggaagctgctgggtgggggtggggggagaaaaggcagataattaaaccatctcatcgtcttgcaggtcggagactacgtatgtaatcctcactctttggacagaaaaaaaaaaaaaagtctttcttgcagacaagtcactacagaaacataccccatcccacccacccctgcctctgccccagccagccacacagagaagcaaattcttatgacttttgactgtaatgacatctggaatgtaaggagaggtgggaggtttaattccagaaaaattacaaggtccttaaaaagctctcacatcgagggctcaggctagcgtaaacaggctttctccagctcagtggagcagtgagcagccgactctgagattagctggcttctccacggccgtcctatagacaggatttctaaagctcaaagaattctgtgtttaaacgatcacaataggccgctgctatcagattttagaaataaatgcagctttaccatgaacctgctccactgagaaaagccaggcagatcgatttttagatcaatttttacagtgctggcaacttggtggtgtgggatgctcctggatggagagggtttgctgctggggaggacatgggtgtgtgtgtgactgcaggggtcgtgtccaaggaatcaagagtcaccccagctgctgggctcctctgcctctctgcagcagaatgtccgtcctctgttgattgattggagaggaatagcagaacatttctcctgcccctcgttgcaaaacgagcttgtttccctgaacctcagaaatcctcagcttcaaacatggggaaacaggccagagcattgcccggctcctgaattaaactctgttctggtgcctgagctcaggggttttcagagaatgaataagagactgtccagtgactggtgggtccctgggggccagctgccttctcatcctgggaggtggcccttcccaagcccatcagggcgtgtgagcagactgaaggggccgctgcagcccctggccctcaatacccagctgcttctggctaagagtgcagcagagactgaggcatagccagcttcaaaagcgatctgacatgaaagtcattaacaaagccagccgtgaaaaggtgccccagagttgctgtggacagacctgtaaggacttgcaaaacaaaagaaagtgaggggtttttttaacctcagagctagctgctctctgcagcctcctccactggcttctctggctcacccaagctctcccttacagaggcaacacagaattataaggaatcagaaatcccccttctaccaggctgcaaatgtggctctagcacttgcaaattgttttttcttccgaatagttcagcagggacaagttatctgaggggcaaaatgcctgcttggaggtctgcaattttggaacactgcagtatggaactttggcattggagggtctgtaaaatatttttgttcttttaccaccaacttaggggactgttttaaagagccatcccaaggcctctcctagcaggcagaagccactcctctgataacggcctctgtaaatgttctgatttgctctcagctgcagagacacagagacactgcagatgtcacacgctttcatcttccctttgagcccttttgaaccctcctggggctctggggtagatgagagaagcctgaaaaaggcagagtttgaaagctcccatttaaaaacaaaatactttttaaagccctcttgcctcttccctgcccactcctgccccctgaccagaagacagaatttgaagctggaaagggaagaccccttttcccctcctcctgtccccagtgagtcttagcgagacttttgccctgcgcacaattgcatctgaatgtgcgggggagagggctgggggccggagggcaggcaaggcctggggggtgctcgtgatatgtgctcaagccagttgtgggaaaaactcgagtcctcccctcctcccgacctaccccgtgtggctgcttttggctggattccctgcacccagtgcaacacaccctttccccttcactctcccttggttactatggaaacaagggtgtcattgatgtgggctgagctggggaacatgtcggtgcacagctgaaagtcagcgattatgccggcggttagaaatgtgccagggttaaaggagtccgcagctcccacggctgctgggaggacatggtcctgcccccttccttcctccctccctccgtctccacttctctctccttgcttttgacaaatttctttattcccctctggactaaagtagtggctatttttgtgccactctgcgccccaccctcactgttggccgctccttatccggcctggcctggagggtgacaccatgtcaccctcaccaggactcgtctctccattcccgtcagagtttgctttgatttccctttcctttccttctcggggaccagttcttacttccttttatttttagctctgcactccatgtggtttcagggttcagtctgatccatcaaaaggttctttttttataatcccttttgaaaatgataatcaaaggaagagatgtggtgtttggtcatgtggaaaactcaatgtataatttagacgtctgtcaaaaatccgacaaataaaatttagctggaacgaa

SEQ ID NO: 105822 - DNA, 1147 bp, Homo sapiens
  Payload ID: 744
  Gene Symbol: ARL4A
  Gene Name: ADP-ribosylation factor-like 4A
  Uniprot ID: P40617
  ENST ID: ENST00000356797
  CDS Start-End: 226-828
ggcgcgcggcgcccgccaggcgcccagtcctctgccatcgcccacgcctccctggtgccagggaacaggtatcagcgcgcctccccagcggctgggagagacgctgaatgaagaagagggaaggacggttagtcagcagtcttatagctggatcagctaccaagagaagttgtaaaccaagaagagaaaagcatttcaatttgggacatttatttgcacctggaaatggggaatgggctgtcagaccagacttctatcctgtccaacctgccttcatttcagtctttccacattgttattctgggtttggactgtgctggaaagacaactgtcttatacaggctgcagttcaatgaatttgtaaataccgtacctaccaaaggatttaacactgagaaaattaaggtaaccttgggaaattctaaaacagtcacttttcacttctgggatgtaggtggtcaggagaaattaaggccactgtggaagtcatataccagatgcacagatggcattgtatttgttgtggactctgttgatgtcgaaaggatggaagaagccaaaactgaacttcacaaaataactaggatatcagaaaatcagggagtccctgtacttatagttgctaacaaacaagatttgaggaactcattgtcactttcagaaattgagaaattgttagcaatgggtgaactgagctcatcaactccttggcatttgcagcctacctgtgcaatcataggagatggcctaaaggaaggacttgagaaactacatgatatgatcattaaaagaagaaaaatgttgcggcaacagaaaaagaaaagatgaatatcaatacctattatatctgtgtggagtaggttttctctggtctgattttgacaaatagaagagtgtctacagcgtggtttgcctgtctgccctcctggatgctattaaagctttgttttgttgaacaatcagatgcccaactctgttgccttgtggaagatgagtaaatgcagtgcttcttaaagtggtctcttctccctaccccacaaatcttttggtactaccatttggggaagccaagcaaggatagtaaattgaccagaacacagttgtgggaatttggtctgaagttagtgaaataaaactttaaagagtg

SEQ ID NO: 105823 - DNA, 1296 bp, Homo sapiens
  Payload ID: 744
  Gene Symbol: ARL4A
  Gene Name: ADP-ribosylation factor-like 4A
  Uniprot ID: P40617
  ENST ID: ENST00000396662
  CDS Start-End: 372-974
ggggcggggactgtcgcgtggagctgccgggcgagcaccgttagggcagcctggcgcgcggcgcccgccaggcgcccagtcctctgccatcgcccacgcctccctggtgccagggaacaggtatcagcgcgcctccccagcggctgggagagacgctgaatgaagaagagggaaggacggttagtcagagctgcttggagagctaagctggaagggtgcttatccctgcgtagaaacgcctgccaatgctttctcatttggacccagactccagatcgggagcagtcttatagctggatcagctaccaagagaagttgtaaaccaagaagagaaaagcatttcaatttgggacatttatttgcacctggaaatggggaatgggctgtcagaccagacttctatcctgtccaacctgccttcatttcagtctttccacattgttattctgggtttggactgtgctggaaagacaactgtcttatacaggctgcagttcaatgaatttgtaaataccgtacctaccaaaggatttaacactgagaaaattaaggtaaccttgggaaattctaaaacagtcacttttcacttctgggatgtaggtggtcaggagaaattaaggccactgtggaagtcatataccagatgcacagatggcattgtatttgttgtggactctgttgatgtcgaaaggatggaagaagccaaaactgaacttcacaaaataactaggatatcagaaaatcagggagtccctgtacttatagttgctaacaaacaagatttgaggaactcattgtcactttcagaaattgagaaattgttagcaatgggtgaactgagctcatcaactccttggcatttgcagcctacctgtgcaatcataggagatggcctaaaggaaggacttgagaaactacatgatatgatcattaaaagaagaaaaatgttgcggcaacagaaaaagaaaagatgaatatcaatacctattatatctgtgtggagtaggttttctctggtctgattttgacaaatagaagagtgtctacagcgtggtttgcctgtctgccctcctggatgctattaaagctttgttttgttgaacaatcagatgcccaactctgttgccttgtggaagatgagtaaatgcagtgcttcttaaagtggtctcttctccctaccccacaaatcttttggtactaccatttggggaagccaagcaaggatagtaaattgaccagaacacagttgtgggaatttggtctgaagttagtgaaataaaactttaaagagtgtct

SEQ ID NO: 105824 - DNA, 3212 bp, Homo sapiens
  Payload ID: 744
  Gene Symbol: ARL4A
  Gene Name: ADP-ribosylation factor-like 4A
  Uniprot ID: P40617
  ENST ID: ENST00000396663
  CDS Start-End: 533-1135
tggcttgacgccctggctgcgctgcaggtgcgccgggccgaacggagccggcagcctggcggcgacctgaccgcccgaggctccccttcacctgcagcggctgctcggctccctctgggaacgccgccttttctaacttaagggcaacaggtggtgccggtggaccgagagagagctcagctccgccgcgctgggagcggcagttaccctcaccaattagggagcgggggcgggagttgcatggcttccctgatgcgggtgaccaatgggatttgggatcatgagtggaccgggaggagtgggcgtggtcggagtctgagtccaaggtttctcgtgcggcaactgccagagctgcttggagagctaagctggaagggtgcttatccctgcgtagaaacgcctgccaatgctttctcatttggacccagactccagatcgggagcagtcttatagctggatcagctaccaagagaagttgtaaaccaagaagagaaaagcatttcaatttgggacatttatttgcacctggaaatggggaatgggctgtcagaccagacttctatcctgtccaacctgccttcatttcagtctttccacattgttattctgggtttggactgtgctggaaagacaactgtcttatacaggctgcagttcaatgaatttgtaaataccgtacctaccaaaggatttaacactgagaaaattaaggtaaccttgggaaattctaaaacagtcacttttcacttctgggatgtaggtggtcaggagaaattaaggccactgtggaagtcatataccagatgcacagatggcattgtatttgttgtggactctgttgatgtcgaaaggatggaagaagccaaaactgaacttcacaaaataactaggatatcagaaaatcagggagtccctgtacttatagttgctaacaaacaagatttgaggaactcattgtcactttcagaaattgagaaattgttagcaatgggtgaactgagctcatcaactccttggcatttgcagcctacctgtgcaatcataggagatggcctaaaggaaggacttgagaaactacatgatatgatcattaaaagaagaaaaatgttgcggcaacagaaaaagaaaagatgaatatcaatacctattatatctgtgtggagtaggttttctctggtctgattttgacaaatagaagagtgtctacagcgtggtttgcctgtctgccctcctggatgctattaaagctttgttttgttgaacaatcagatgcccaactctgttgccttgtggaagatgagtaaatgcagtgcttcttaaagtggtctcttctccctaccccacaaatcttttggtactaccatttggggaagccaagcaaggatagtaaattgaccagaacacagttgtgggaatttggtctgaagttagtgaaataaaactttaaagagtgtctgcctagtgttttgtgcttacatctttcggggggaagcctttgcaagaaaattgcatacaaggctttgtaacgatcaagtgctaatcgatggaaatgttaaggtagattaacatatatgcagttatattgatcacattggtccaaccagtccttttttgaagtaagggacaaggagtaagtattttcttttttaagtttctgccaaatgatttttgacgctttctggaatcaagtaatttaatagtatagcttaattctagacaatgtttaagttggtctacctttattaaaaataagatatttggggtatattcaagtgcatggattagttttcctgacaaagcatgttttggtgtgtagtcttactttttagaaatagctatgcatcgttctacacaggtttaaaacaacttttttggggatttagggctattataggaatagtttgttgtcagaagcactttcacttgaagaacctaaaatgattgactcattcatagtaaatatgggcatgtaaactaataaatatgcactggatacatatatggatttatgaagaaggcgatttagtcaagaggatgtaattaaaatatgtggtctctaaaatattccagttacaagatatttgttttattaatatttgctggctaaaaacaaatgtggtttttatatatttttgtagtgtgttgagaagagcaaaagctttataaatatacctgatgcgctgtagaatgaaaatgtaaaagataacctgtatgtgttccgagctttaattttttgtttacaaattgaacagtgttacatgggctgtccagtcctgattatagagaggaagaaatggtaacagtatggcagataagaattacaattatagaaaatgaggggaaaataacaaacctgttttatgaaaattcactggtgctgtttacattggaataaaaagctctataaggaggaaaggcctttatctaattcttatctacagacacttacttccagtgaccatattttactaaatcagcttattttttatgtctaaagcaacagctgttctgaaaaatcaccaaaagaaatgcactttgctagcaggatttgttttggctttgggttttgtttttttgttttttttttttttcagtggcataacagtttttggaaccttgattcttgtgtcacacaaaatgaatgaagtagcttgatgtggagccttcatatgttaaatattcctgcactagtgatggtcacttagaatgtttatagaaatgtggataataactaccaataaactacttgaggcactaggagaacagtatttgactttgaattttaatgtatttccacttttgctgaagcttttaatcagatgtgtaaaaacaattgaccagctaggctatttagtcccatagtagttcagatctgcttagatgtgacaggcattgaaggctgtttttttttttttctcccttcactgatactgaaatcatggtatctgctgcaaacatgagtagatccatgatggattaataaagcttgctgaaaaaaaaaatctgtgtatcaattagatttaccagtttgcctgtactttctgtctacctactatgtaaaatagtgctgtttttaagtatttcaaaagcttgtgtgttgaccctttgtagcctaagtacgtaaacaaattaatgttatctaagtttttcatatttcatggacaacaaaagagaaaatggtatgaacactgtacaaactttgatttataaa

SEQ ID NO: 105825 - DNA, 1144 bp, Homo sapiens
  Payload ID: 744
  Gene Symbol: ARL4A
  Gene Name: ADP-ribosylation factor-like 4A
  Uniprot ID: P40617
  ENST ID: ENST00000396664
  CDS Start-End: 223-825
ggcgcgcggcgcccgccaggcgcccagtcctctgccatcgcccacgcctccctggtgccagggaacaggtatcagcgcgcctccccagcggctgggagagacgctgaatgaagaagagggaaggacggttagtcagtcttatagctggatcagctaccaagagaagttgtaaaccaagaagagaaaagcatttcaatttgggacatttatttgcacctggaaatggggaatgggctgtcagaccagacttctatcctgtccaacctgccttcatttcagtctttccacattgttattctgggtttggactgtgctggaaagacaactgtcttatacaggctgcagttcaatgaatttgtaaataccgtacctaccaaaggatttaacactgagaaaattaaggtaaccttgggaaattctaaaacagtcacttttcacttctgggatgtaggtggtcaggagaaattaaggccactgtggaagtcatataccagatgcacagatggcattgtatttgttgtggactctgttgatgtcgaaaggatggaagaagccaaaactgaacttcacaaaataactaggatatcagaaaatcagggagtccctgtacttatagttgctaacaaacaagatttgaggaactcattgtcactttcagaaattgagaaattgttagcaatgggtgaactgagctcatcaactccttggcatttgcagcctacctgtgcaatcataggagatggcctaaaggaaggacttgagaaactacatgatatgatcattaaaagaagaaaaatgttgcggcaacagaaaaagaaaagatgaatatcaatacctattatatctgtgtggagtaggttttctctggtctgattttgacaaatagaagagtgtctacagcgtggtttgcctgtctgccctcctggatgctattaaagctttgttttgttgaacaatcagatgcccaactctgttgccttgtggaagatgagtaaatgcagtgcttcttaaagtggtctcttctccctaccccacaaatcttttggtactaccatttggggaagccaagcaaggatagtaaattgaccagaacacagttgtgggaatttggtctgaagttagtgaaataaaactttaaagagtg

SEQ ID NO: 105826 - DNA, 840 bp, Homo sapiens
  Payload ID: 744
  Gene Symbol: ARL4A
  Gene Name: ADP-ribosylation factor-like 4A
  Uniprot ID: P40617
  ENST ID: ENST00000404894
  CDS Start-End: 181-783
agctgcttggagagctaagctggaagggtgcttatccctgcgtagaaacgcctgccaatgctttctcatttggacccagactccagatcgggagtcttatagctggatcagctaccaagagaagttgtaaaccaagaagagaaaagcatttcaatttgggacatttatttgcacctggaaatggggaatgggctgtcagaccagacttctatcctgtccaacctgccttcatttcagtctttccacattgttattctgggtttggactgtgctggaaagacaactgtcttatacaggctgcagttcaatgaatttgtaaataccgtacctaccaaaggatttaacactgagaaaattaaggtaaccttgggaaattctaaaacagtcacttttcacttctgggatgtaggtggtcaggagaaattaaggccactgtggaagtcatataccagatgcacagatggcattgtatttgttgtggactctgttgatgtcgaaaggatggaagaagccaaaactgaacttcacaaaataactaggatatcagaaaatcagggagtccctgtacttatagttgctaacaaacaagatttgaggaactcattgtcactttcagaaattgagaaattgttagcaatgggtgaactgagctcatcaactccttggcatttgcagcctacctgtgcaatcataggagatggcctaaaggaaggacttgagaaactacatgatatgatcattaaaagaagaaaaatgttgcggcaacagaaaaagaaaagatgaatatcaatacctattatatctgtgtggagtaggttttctctggtctgattttgacaa

SEQ ID NO: 105827 - DNA, 845 bp, Homo sapiens
  Payload ID: 744
  Gene Symbol: ARL4A
  Gene Name: ADP-ribosylation factor-like 4A
  ENST ID: ENST00000439721
  CDS Start-End: 694-845
gaagggatcccacttcggggaggatgggcttatcccggcgggcgcgccaggtgggatctctagcgcctcaggggcccgcgcggcaacagccggcaccctcgggcccgcggacaaagggttaacgcgttggcagtgactgcgggccccggatgtgagagccttggcttgacgccctggctgcgctgcaggtgcgccgggccgaacggagccggcagcctggcggcgacctgaccgcccgaggctccccttcacctgcagcggctgctcggctccctctgggaacgccgccttttctaacttaagggcaacaggtggtgccggtggaccgagagagagctcagctccgccgcgctgggagcggcagttaccctcaccaattagggagcgggggcgggagttgcatggcttccctgatgcgggtgaccaatgggatttgggatcatgagtggaccgggaggagtgggcgtggtcggagtctgagtccaaggtttctcgtgcggcaactgccagagctgcttggagagctaagctggaagggtgcttatccctgcgtagaaacgcctgccaatgctttctcatttggacccagactccagatcgggagcagtcttatagctggatcagctaccaagagaagttgtaaaccaagaagagaaaagcatttcaatttgggacatttatttgcacctggaaatggggaatgggctgtcagaccagacttctatcctgtccaacctgccttcatttcagtctttccacattgttattctgggtttggactgtgctggaaagacaactgtcttatacaggctgcagttcaatgaatttgtaaataccgtacctac

SEQ ID NO: 105828 - DNA, 3385 bp, Homo sapiens
  Payload ID: 745
  Gene Symbol: ARL4C
  Gene Name: ADP-ribosylation factor-like 4C
  Uniprot ID: P56559
  ENST ID: ENST00000339728
  CDS Start-End: 15-620
cgcagccaggagccatgggcaacatctcctctaacatctcggccttccagtccctgcatatcgtcatgttgggcttggactcggccggcaagaccacggtgctctaccggctcaagttcaacgagttcgtgaacacggtgcccaccatcggcttcaacaccgagaagatcaagctgagcaacggcacggccaagggcatcagctgccacttctgggacgtgggcggccaggagaagctgcggccgctgtggaagtcctacagccgctgcacggacggcatcatctacgtggtggactcggtggacgtggaccggctggaggaggccaagacggagctgcacaaggtgaccaagttcgccgagaaccagggcacgccgctgctggtcatcgccaacaagcaggacctgcccaagtcgctgccggtggcagagattgagaagcagctggcgctgcacgagcttatcccggccaccacctatcacgtccagccggcgtgcgccatcatcggcgagggcctcaccgagggcatggacaagctctatgagatgatcctgaaacgcaggaagtccctcaagcagaagaagaagcggactggtgacttaaggagctgcgaagtctgatttaccggcctactctcgacctgccccccacccccagctcaggggaccttttgtctgaacgccagagctactgaccaggtcggggggccgcggtggggagtggaagagccggtcctgctgtccgccctcccagccccaggtggaaggctcagttgtcggaaagacaaaagcgatttcttcccactcctgcagggccagaagttcaggctgccccgcctccactgggggatcgcacctgtgaattacctgaggtatgcatttcccagaaccgtgggcgtacccaccttggggggcatgttggttctggggggaccacctctccttgcattcaggggctgtgaagctgagtaattttcggtcacagggcaggcccctgttgaaatttcatttgtcctgctctgggcccaaaggtggtggtggtttgggtcatcagaggactgcctgggacggttcagcgggcacggagcgctgtgctggcctggctggggatggccgcggaggtgcccttttcctggtgctttgtggtggctgcagaagaccagttttgttgagaactgcttttcagcctggaatcagacatcttccagatggtttggaccctgtccatgtgtaggtcattatcacacaaagagaccaataaaaataaaaaaaataaaaaaaaaaaaagacgaactattggaggtggtggccaatgatgcatttactgtttgcaggatagttaaaggtgtttaaagggtaaggcttttggtgtaaatgctggatggggtgtgtgtgtgtgtggatatagggacctccctctgtactgtgtactgtgtaatcggcattaatacctagactcatatgtatggaattttaaattctcttagcctactgattggtttggatgagcacaccagctgcaggtgtgtgctgaattgcaagatggtatttttttttttaaccaagggatgtctcttgtaatactaaccgcgtgataatgggttttcagacatgatgaaaaaaaaaaacttttacaaatgaatacttaccttagaaatattcaccttaggaaaaaagactttgctctgcccttttatattcctttatgctgcaagtggtgacatgttcagatttctaatttggttcattgtggcctatctggtttaagtctttcattaaaaatgtctcgttagagtatttgatgtcatgcaccaaaaaaataaaaccccaccttgttgcaaaagctgacctcgttgcatggaattaaaagagaaggaaaaacacaaggatgaagtctttccgaattcattcttgtgggaactggccttcggagccagccagcactttgggcaaatgcaaacaacaatgagtgcttgagataaaagaaagtgtgacgtcatggtcactggtactcaggcacttcacagtttacttgaaagaggctttggaaaatagataaagtgaaagaagaataaatacatatttttaataatgtaattttaaaaatcctttataatcaggactgagtcttggtttgcagaagctgtcacttaccctgaaacacagtatcaaaagggaaacttaaaacatactgtttgatttttttatttcctcttacaatccatgttttcaggtagaattatgactttccccccattgttacacatttctttacaaaggaggcctgtagaaattggacacgatcatgcttgagcatgtgagttagtcaaattatgagtccctgcctattgtccattacacaccgaatgttaatttaagaaccagaggcagaagttctggcttcctgcttgaaacccaattcttatatgaaattttttaaaagcagaaacctagcagcccatctgctttttctcttttgtcggtgtatttggtacccctccaatgctggtctttttgtagaaactcagtagagaaagtctagctaagcagtgttgaaaagcctgcaagatttcagtttacatatcgacagcatatccactgatttctaaatgggctggtcccatcatctgaagattctgtatagaattattaaaaaaaaaatccatctttctttattttcttcacatgcgacaatttcttaagcactttgacattttggtagttccacactattgagagaataatatatttattttgtgacattgcagatgccaaatactgtaaccttctcatgataacaatacttaggttcaagatcactgttcaaaccctgtcatgctttaaaactgatgcgagatgattttgttttttgcataatcaatacttaagggtgcaatcaactgttagtaattgtgcagtaaagtaaagccctgtggtgtatcaactactagttaagagtctcagttgatttctgtaatgtttgacctaataatagcccgtttcgtctctgacccaacagaggaagcacagatcaaatcaccttggagtggtcaccagggggacagggagccccccaccaatgtatcaatgggtgatttatgatgccttctgccctttggcgagtgaatgggtttcccataggggaagttggcctccctccgtgagctttggaaatgttttctaatagacacagggaggccagttctgtttcagagcaattatcttcccaaattctctgttctggtgttggaactgtgtgccctggtttctgttttcctttctactgctgtaattctctgtctcatcatccttctcttttgtttccatagccttttataatgcatatatgatgctgtgaacagaaataaattatttatacaatcaaa

SEQ ID NO: 105829 - DNA, 4013 bp, Homo sapiens
  Payload ID: 745
  Gene Symbol: ARL4C
  Gene Name: ADP-ribosylation factor-like 4C
  Uniprot ID: P56559
  ENST ID: ENST00000390645
  CDS Start-End: 468-1046
gactgtgaggctgccgagcggacagcgactcccggggaagcccgcgctccgggagcgggagcgggagcaggagcaggagcagcgccgtcccaggccagaggcgagcgccgggcgccgggagagcggagagcccgggcagctgccggagcgcgggggcgcggcccgaggaaaccacagagcgagcccaggcctggggagggcgccgaacatctgaggcggcttcgcgggagacaaagccgcgcgtagagacgcgatgcccgccgatcgcgagcccggccggcgagggcgcggggactgcggcgtctgagcgcgccaagccgtgcgcccgcggggacgccgagccccggggccggtgcgggcggcggcgggcggggcccaggtgcgcccggccgcgtcgggcccgtgactgctcggggggcggcgccctcccgccgcagccgcagtggctggcgccgcagccaggagccatgggcaacatctcctctaacatctcggccttccagtccctgcatatcgtcatgttgggcttggactcggccggcaagaccacggtgctctaccggctcaagttcaacgagttcgtgaacacggtgcccaccatcggcttcaacaccgagaagatcaagctgagcaacggcacggccaagggcatcagctgccacttctgggacgtgggcggccaggagaagctgcggccgctgtggaagtcctacagccgctgcacggacggcatcatctacgtggtggactcggtggacgtggaccggctggaggaggccaagacggagctgcacaaggtgaccaagttcgccgagaaccagggcacgccgctgctggtcatcgccaacaagcaggacctgcccaagtcgctgccggtggcagagattgagaagcagctggcgctgcacgagcttatcccggccaccacctatcacgtccagccggcgtgcgccatcatcggcgagggcctcaccgagggcatggacaagctctatgagatgatcctgaaacgcaggaagtccctcaagcagaagaagaagcggtaatgcgcccggagcgaccggggagcgagcgagtgcgtcaagaaagaatgaatggatggatggatggttggatggatggatggatggatgagcgagaacccgcgcccgcgaacaaagagcgaaccaaagcgatgcttcgaatttttaaaacggaatctctgcacccaaatgcaggactggtgacttaaggagctgcgaagtctgatttaccggcctactctcgacctgccccccacccccagctcaggggaccttttgtctgaacgccagagctactgaccaggtcggggggccgcggtggggagtggaagagccggtcctgctgtccgccctcccagccccaggtggaaggctcagttgtcggaaagacaaaagcgatttcttcccactcctgcagggccagaagttcaggctgccccgcctccactgggggatcgcacctgtgaattacctgaggtatgcatttcccagaaccgtgggcgtacccaccttggggggcatgttggttctggggggaccacctctccttgcattcaggggctgtgaagctgagtaattttcggtcacagggcaggcccctgttgaaatttcatttgtcctgctctgggcccaaaggtggtggtggtttgggtcatcagaggactgcctgggacggttcagcgggcacggagcgctgtgctggcctggctggggatggccgcggaggtgcccttttcctggtgctttgtggtggctgcagaagaccagttttgttgagaactgcttttcagcctggaatcagacatcttccagatggtttggaccctgtccatgtgtaggtcattatcacacaaagagaccaataaaaataaaaaaaataaaaaaaaaaaaagacgaactattggaggtggtggccaatgatgcatttactgtttgcaggatagttaaaggtgtttaaagggtaaggcttttggtgtaaatgctggatggggtgtgtgtgtgtgtggatatagggacctccctctgtactgtgtactgtgtaatcggcattaatacctagactcatatgtatggaattttaaattctcttagcctactgattggtttggatgagcacaccagctgcaggtgtgtgctgaattgcaagatggtatttttttttttaaccaagggatgtctcttgtaatactaaccgcgtgataatgggttttcagacatgatgaaaaaaaaaaacttttacaaatgaatacttaccttagaaatattcaccttaggaaaaaagactttgctctgcccttttatattcctttatgctgcaagtggtgacatgttcagatttctaatttggttcattgtggcctatctggtttaagtctttcattaaaaatgtctcgttagagtatttgatgtcatgcaccaaaaaaataaaaccccaccttgttgcaaaagctgacctcgttgcatggaattaaaagagaaggaaaaacacaaggatgaagtctttccgaattcattcttgtgggaactggccttcggagccagccagcactttgggcaaatgcaaacaacaatgagtgcttgagataaaagaaagtgtgacgtcatggtcactggtactcaggcacttcacagtttacttgaaagaggctttggaaaatagataaagtgaaagaagaataaatacatatttttaataatgtaattttaaaaatcctttataatcaggactgagtcttggtttgcagaagctgtcacttaccctgaaacacagtatcaaaagggaaacttaaaacatactgtttgatttttttatttcctcttacaatccatgttttcaggtagaattatgactttccccccattgttacacatttctttacaaaggaggcctgtagaaattggacacgatcatgcttgagcatgtgagttagtcaaattatgagtccctgcctattgtccattacacaccgaatgttaatttaagaaccagaggcagaagttctggcttcctgcttgaaacccaattcttatatgaaattttttaaaagcagaaacctagcagcccatctgctttttctcttttgtcggtgtatttggtacccctccaatgctggtctttttgtagaaactcagtagagaaagtctagctaagcagtgttgaaaagcctgcaagatttcagtttacatatcgacagcatatccactgatttctaaatgggctggtcccatcatctgaagattctgtatagaattattaaaaaaaaaatccatctttctttattttcttcacatgcgacaatttcttaagcactttgacattttggtagttccacactattgagagaataatatatttattttgtgacattgcagatgccaaatactgtaaccttctcatgataacaatacttaggttcaagatcactgttcaaaccctgtcatgctttaaaactgatgcgagatgattttgttttttgcataatcaatacttaagggtgcaatcaactgttagtaattgtgcagtaaagtaaagccctgtggtgtatcaactactagttaagagtctcagttgatttctgtaatgtttgacctaataatagcccgtttcgtctctgacccaacagaggaagcacagatcaaatcaccttggagtggtcaccagggggacagggagccccccaccaatgtatcaatgggtgatttatgatgccttctgccctttggcgagtgaatgggtttcccataggggaagttggcctccctccgtgagctttggaaatgttttctaatagacacagggaggccagttctgtttcagagcaattatcttcccaaattctctgttctggtgttggaactgtgtgccctggtttctgttttcctttctactgctgtaattctctgtctcatcatccttctcttttgtttccatagccttttataatgcatatatgatgctgtgaacagaaataaattatttatacaatcaaa

SEQ ID NO: 105830 - DNA, 1612 bp, Homo sapiens
  Payload ID: 746
  Gene Symbol: ARL4D
  Gene Name: ADP-ribosylation factor-like 4D
  Uniprot ID: P49703
  ENST ID: ENST00000320033
  CDS Start-End: 208-813
gggtttttaaggccgaaccctaggcaggctctgcagaggcagcggttggaggcgcggtgggtgtctgcgggggtctcgcggggcggctgcggtgtttcaccgggaaaggctcgaggagagcgcggctcacgagagataacccagctgtgctccctggaaccttcaatttcaaggcctccctgcctctactaggcgccttagctcactatggggaaccacttgactgagatggcgcccactgcctcctccttcttgccccacttccaagccctgcatgtcgtggtcattgggctggactctgctggaaagacctccctcctttaccgcctcaagttcaaggagtttgtccagagtgtccccaccaaaggcttcaacaccgagaagatccgggtgcccctcgggggatcgcgtggcatcaccttccaagtgtgggacgtcggggggcaggagaagctgcgaccactgtggcgctcttatacccgccggacagacggtctagtgtttgtggtggacgctgcggaggctgagcggctggaggaagccaaggtggagttgcaccgaatcagccgggcctcggacaaccagggcgtgccagtgctggtgctggccaacaagcaggaccagcccggggcactgagcgctgctgaggtggagaagaggctggcagtccgagagctagcagccgccactctcactcatgtgcaaggctgcagcgctgtggacggtctgggcctgcagcagggccttgagcgcctctatgagatgatcctcaagaggaagaaggcagctcggggtggcaagaagagacggtgacccaagccccccctccctttcctcccacctagtaggggtctgcacacttggacagcagggtgggaccagcctgtgacctctcagtcagactggggtgcaggacctgtccacctcaatgaaggagagaggagcatggggtgtcccgttttggtgccacactggggtggggatgggagatgggatgtctttgcatatctctctcatcctctctggagaagtgggcgctgcaggactgtggagacgtaaatgtaaactgtgactctacctcgaccctgtttcttatttttcttctctggctaaaaatttttaattggatgtgtttgggggcggggggatggaagtgacttggagaatgtgtttgggatgaaataactatctccccttcctctgtcccccaactggggagtctccccaggctgcttttctaggaataccagtcacatagtttttatttttgtgtctgtgaaagtgccaagaacccctccccacatttgtagatccatgaccctttttataagctgtgtgtgtcctctgtattattgttattaactattttttagcatttgcctgtaagttattaaagactgataactgtagctcttaccttggtctggggcattttcctctccttatcttgccccagagacaattcaagatttctatatggggttgtggcgcagggggagggagatttatcttgaagctgaatttgcaaagcaagcacttataaaaattagattgtgtgttacgggatggcttgtgaaaattataggggggagtggaaaacccctcaagctat

SEQ ID NO: 105831 - DNA, 5326 bp, Homo sapiens
  Payload ID: 747
  Gene Symbol: ARL5A
  Gene Name: ADP-ribosylation factor-like 5A
  Uniprot ID: Q9Y689
  ENST ID: ENST00000295087
  CDS Start-End: 313-852
gcgtggtcgtcgccaccgcagccgcccgagaggagctgggggaggacggtggcccgcgaggctcgtcgcagacaacgcggcggcgatgtccgcgagccaggcgagtgccgcggcggcagcggcggggccttgcgcgcggcagggcggcctgggcttcggcctccctccggttccctggaagcgggcccgcgaccagcgcgggagcagcagcagaggcggaggctccagcgcgtctctctcctccccctcagcctgagccgggggaagccaggcggcccgggtgtctggagggggggggtccgctgcccgagaatgggaattctcttcactagaatatggagactgttcaatcaccaggagcacaaagttatcattgttgggctggataatgcagggaaaactaccattctttaccaattttctatgaatgaagttgtacatacatctcctacaataggaagtaatgtagaagagatagtgattaataatacacgtttcctaatgtgggatattggtggccaagaatctcttcgttcttcctggaacacttactatactaacacagagtttgtaatagttgttgtggacagtacagacagagagaggatttctgtaactagagaagaactctataaaatgttagcgcatgaggacctaagaaaagctggattgctgatttttgctaataaacaagatgttaaagaatgcatgactgtagcagaaatctcccagtttttgaagctaacttctattaaagatcaccagtggcatatccaggcatgctgtgctctaactggcgagggattgtgccaaggacttgaatggatgatgtcacgacttaagattagatgatctctactgacctcttctcatagattttgtataaatgaagtgctggactttacctgaaagctgcaaaaattaatggtttagatatatttataataaactgatttaaactttttctataagaagaaaaattaagaccacttatttgaaaacaaagatgaagtctcaccttccagtttgctttctcattagttttttccaaagtaagttattgaagctgtgattgacatttttctcataatgaatcctctcaggacattgtgtagcctatggtaagtacaaagggagaggaagacattttgaattttaagagctttattatcagtttaaccctccctagttgaatgttattttcttcttgttccattaagtcagaatacaaatcagcacagatattcgaatgtttccaatattttaaaatgtaatgttacttatgaaaagtattttgcttaaggttgtgtgtgtattgtgtatatacctcaagttcaagttaatggcattgatttatgttccagacaaaaataacacaaataataatatccttcgttataaccacaatgagataagtattggcattagtgttcagtgccattttatactttctctctgtgttctctgtattgtactaaccaacctcccaaatcgctgagctgcttgtttaaaaaaaaaaaaaaggaaaaggaaaaagcatgacattgtgtatcgattttttgttgttgaccaaaatcacacacatggaaacatgtaattcaacagagtgggaaagctagcagattcttggcttagtattactaataggcaggattgtacaatgagcaactatcagattattcctttcagtggttcttatggcatctaaattactgaataaattattaatccattaatcagtgaatcaaattatgattacaattatcaaatgaatgctcagcattaattgaaaactgttttgtgaaacatgtctacccagaaaagtagcattctataaatactattaaacaacttagctatattatttttaagtattaaattatatgtcaagcagttaaagtgaatttcagagtaaaagtaaggcatgtttctgagcaacattgataatttcttaatttgcaaatttcttcttattttggtacttggaatatagtgtgagattttttatttctaaattttgttgtatcttctattacataaatgcattgacaattataaaatgcaagtgttttttgaatgattttaagaatttggcttaaaaattgattgatacaacgtattatttgtactaagaagtaacttgacccaaaacaccttttatgtttgcttagggtatattttttcagtgtctgaaagtcaaaggtattcctgtcacaactgtaaacaaacttatcctaaatgtgttaaaacatattcttgggtactctatttatgtatctttcatgccttgaaaatctgaaggttaatccaaactcacatgttttagcatatttgagaaaaaaaaactaccttcaatatcagccttttaaatttcatgaagattttggtgaggaataatagtatatagtttaagtattgacaaaactttgaaagtttctttctttaaaatgggaaatactcaatatctaaatccaggtcaggcatgggatatcagtatttaacattggatgttttatgttttatatttataatgttcaaaatgcaagcataacatttaatatttgtccacatggttttacaaaagtaaatcttaaattactaagcttttcccatatgttctcgtactttctcaaatccctataaagaattacttgttatctattaaaaatctcctttacccaaatctgtattatggtttcgccagacaaatattatgtgatgtagcccagaaaatccacaccttttgtcctttttatgttttaatttgaataatcatgtgcttagtcccttggattactgccacatcagtttaacacgatatcagcacattcccttgtcatcatcaaggtgttggctcagatttattcttaattggatgtttaaagcatgtactaccttgttacagttggtttagtgtagtggattattgacatgacatcatgagaagatgtgtaattttataccacatttataaaacatgattttgttttctacccttcaaggtaaacattaaaaataaggtggtacttgtgtacttgtacataaaaccaaaattatagttgggaaaaaaataaatttatatatgaaaatgtcaaaatcattttaaaagtattattttcaaataaaatggagaagctggtgaaaagtcatattggcaatttttatgtagtttaagtggaattaagcagagggagatgcttttgggtttttaatatgccacttctgagtgaaaacatctcgtggagtcattgtgttcagctctgagaagaacaaagattcatagttctgtacatgtggctggatttaaatatcctgtttttgatactaattttgaaagtcatgtaacttcttttgatatctgggcaaaagtaaccatatgctataagcatttgaatatgtttaattttatcataatagcatctgtaaaagtacatcttacacattatatagagggttcttgtttgaaattttcagttctctttatcttcccagtacctcttggtcctcataatgggcaaaggatacaacgaaggcaggttgtataggggttatagtggggaagtggataggggattcattttcttatgtgacattttgccttaagaatataaaagtgctttagcactgatggctggcatttttaatataggcagtgaaagtgactttagaagcatgggatgaaatagagggaagaagagtttttattttctggcctttaaaaagtgcctagtaggtcatttgagacccagagaaatgcacagagcttgagcaaaggcatgaagtccctgacattgttttcctttttgtctcagcatatagtattaagatgcctagaaataggactctattgttccctcttgtataggcactttacatttcttgtcactacagcaaccacatacagtacagacaacctccaaacctgtttatattagtgtaaatagaaaatctatagacaactttctagttttctctggaggcatttttgggaatgtacgtgtaataggctctgctttgtatacaggagataataccacatcatcggttatctccaaactccagtcttctctcaactgcccagttgtatgttgtcatcaatcactttttcaaggctgggtagagacaagtttctcctcgtaactttgacctctcccactctccaaatgtaatctggacctcattgctttcaaggtcagcttccccatagctcaggtatcctttgctctcctgtatcttcatttactattagtgaagagatctctgtcctggaggttattctaaactttctttgtaactattgttatagacaatggtttccaaaccagtggtttctatgtagcttttctagttccttgctatcttctcaccactggcttgaggtagtgatttggactttgctcattagagagcattatcagagatgtggagtccatcagaagaccagcttgcagtgtgtatagcatatagatgccaatattagaattctttaaattatatttaacattttcatgcttcttaatttaacttcacatgttgggaagtagattcagaaagataggagaaatacccagactctaccacttccgtgagctactagttaggcatgggcaggattaagttttatgtgtattatcttcccactaccaagaatggttatgtttcacagaataccagttcagtttgatttggaaaaagatgccaaaccaaatttatatgtagtctataatctaagggcattcttgaaactattgcccacatcccattttttttttcatgtttacttacaaaacagagataaacattagatgtctaaaggagttagtaatgaaaagcctatccttaaaaaataaacctgttgaaatgggctttaaagacatcgaaataatcacttgtcatgcattgactgtaaatgcagatagagaaatatgtctttgaagctccacttacacaaaaataaaacttgtatatcatgctccctcaaagaatgtgcgatagattattttaagaccatgataatagagtaaaaaggaaagaaagccagaaattacaattttggatgctaaaaagtaactttctagttaaccctaaagtcctgtcagattgtgaagaaatgttccaggatacacttggattagttatgcagtatttcttatcaatgtctagcccttgtgtattgttctgaaaactaaagtttaaatctttatgctgttgcttgctagatatcctgttctttggtagaaaattcccatagtctgtactcaagaagtgcctaaaaatggatttgtgttgattttaagcccatctaataaattatatgtattttcta

SEQ ID NO: 105832 - DNA, 1076 bp, Homo sapiens
  Payload ID: 747
  Gene Symbol: ARL5A
  Gene Name: ADP-ribosylation factor-like 5A
  ENST ID: ENST00000458140
  CDS Start-End: 170-403
gcccgcgtggtcgtcgccaccgcagccgcccgagaggagctgggggaggacggtggcccgcgaggctcgtcgcagacaacgcggcggcgatgtccgcgagccagagcacaaagttatcattgttgggctggataatgcagggaaaactaccattctttaccaattttctatgaatgaagttgtacatacatctcctacaataggaagtaatgtagaagagatagtgattaataatacacgtttcctaatgtgggatattggtggccaagaatctcttcgttcttcctggaacacttactatactaacacagagtttgtaatagttgttgtggacagtacagacagagagaggatttctgtaactagagaagaactctataaaatgttagcgcatgagaagtaaaaagaagacctaagtagggcctagttggaaagtgaaaggagactgaatgaggagatgaccagagaagaaaggaattacagatgaagttgggagtttgagcaaggtactcagtagggtcaagaagagccaaacaggcaaaattctgcagagagacaaatggatcaaagagtgagaatgtgacctaagaaaagctggattgctgatttttgctaataaacaagatgttaaagaatgcatgactgtagcagaaatctcccagtttttgaagctaacttctattaaagatcaccagtggcatatccaggcatgctgtgctctaactggcgagggattgtgccaaggacttgaatggatgatgtcacgacttaagattagatgatctctactgacctcttctcatagattttgtataaatgaagtgctggactttacctgaaagctgcaaaaattaatggtttagatatatttataataaactgatttaaactttttctataagaagaaaaattaagaccacttatttgaaaacaaagatgaagtctcaccttccagtttgctttctcattagttttttccaaagtaagttattgaagctgtgattgacatttttctcataatgaatcctctcaggacattgtgtagcctatggtaagtacaaagggagaggaagaca

SEQ ID NO: 105833 - DNA, 1268 bp, Homo sapiens
  Payload ID: 747
  Gene Symbol: ARL5A
  Gene Name: ADP-ribosylation factor-like 5A
  Uniprot ID: Q9Y689
  ENST ID: ENST00000446896
  CDS Start-End: 119-547
ggtggcccgcgaggctcgtcgcagacaacgcggcggcgatgtccgcgagccagagcacaaagttatcattgttgggctggataatgcagggaaaactaccattctttaccaattttctatgaatgaagttgtacatacatctcctacaataggaagtaatgtagaagagatagtgattaataatacacgtttcctaatgtgggatattggtggccaagaatctcttcgttcttcctggaacacttactatactaacacagagtttgtaatagttgttgtggacagtacagacagagagaggatttctgtaactagagaagaactctataaaatgttagcgcatgaggacctaagaaaagctggattgctgatttttgctaataaacaagatgttaaagaatgcatgactgtagcagaaatctcccagtttttgaagctaacttctattaaagatcaccagtggcatatccaggcatgctgtgctctaactggcgagggattgtgccaaggacttgaatggatgatgtcacgacttaagattagatgatctctactgacctcttctcatagattttgtataaatgaagtgctggactttacctgaaagctgcaaaaattaatggtttagatatatttataataaactgatttaaactttttctataagaagaaaaattaagaccacttatttgaaaacaaagatgaagtctcaccttccagtttgctttctcattagttttttccaaagtaagttattgaagctgtgattgacatttttctcataatgaatcctctcaggacattgtgtagcctatgatattctatattgagcgcattataccaataatcagaaaacattgctgaatcattttgtctttaaagaatcatctaatagggatgggaaggaatacaaaagttgtattaagtaaatgggatgaagctctcagttcagagatcaagatgattgggggataagaagaagaaaaacattcctgcaggactggtctgggcagaagaggagttgtggtaactagatatgaggagaaagagaggaaggaggcacagagcagttggagcttgctgcctggaagaatgacgttttagagacaaggtctgactgtgttgcccaggctggacttcaactcctcagtacaagtgatcctcctgcctgagcctcctgaatagctgggactacaggcctgcaccaccataccctgctctagttacacaaatcttaaaatgatgctgttatgttaattcaattaaga

SEQ ID NO: 105834 - DNA, 747 bp, Homo sapiens
  Payload ID: 747
  Gene Symbol: ARL5A
  Gene Name: ADP-ribosylation factor-like 5A
  Uniprot ID: Q9Y689
  ENST ID: ENST00000428992
  CDS Start-End: 146-574
gccgcccgagaggagctgggggaggacggtggcccgcgaggctcgtcgcagacaacgcggcggcgatgtccgcgagccagagcacaaagttatcattgttgggctggataatgcagggaaaactaccattctttaccaattttctatgaatgaagttgtacatacatctcctacaataggaagtaatgtagaagagatagtgattaataatacacgtttcctaatgtgggatattggtggccaagaatctcttcgttcttcctggaacacttactatactaacacagagtttgtaatagttgttgtggacagtacagacagagagaggatttctgtaactagagaagaactctataaaatgttagcgcatgaggacctaagaaaagctggattgctgatttttgctaataaacaagatgttaaagaatgcatgactgtagcagaaatctcccagtttttgaagctaacttctattaaagatcaccagtggcatatccaggcatgctgtgctctaactggcgagggattgtgccaaggacttgaatggatgatgtcacgacttaagattagatgatctctactgacctcttctcatagattttgtataaatgaagtgctggactttacctgaaagctgcaaaaattaatggtttagatatatttataataaactgatttaaactttttctataagaagaaaaattaagaccacttatttgaaaacaaagatgaagtctcaccttccag

SEQ ID NO: 105835 - DNA, 7196 bp, Homo sapiens
  Payload ID: 748
  Gene Symbol: ARL5B
  Gene Name: ADP-ribosylation factor-like 5B
  Uniprot ID: Q96KC2
  ENST ID: ENST00000377275
  CDS Start-End: 234-773
ggggactacgggtcggcgttgggctcagtgggctcgaaacaaagggctgtccggtggggattcgtcgcggcgccttctgagtggtcgggtcgaggcttctcggcctagcagtgccctcgctgcgcgatctcaggcgggttctcctcggctccgcgcagcccgcgccgcggtgggggacccggcgcagcggcacctgctgccgagggaccccgcggcccgccccggtgctcgtgatggggctgatcttcgccaaactgtggagcctcttctgtaaccaagaacacaaagtaattatagtgggactggataatgcagggaaaaccaccattctttaccaattcttaatgaatgaagtggttcatacttctccaaccataggaagcaatgttgaagaaatagttgtgaagaacactcattttcttatgtgggatattggtggtcaggagtctctgcgatcatcctggaacacatattactcaaatacagagttcatcattcttgttgttgatagcattgacagggaacgactagctattacaaaagaagaattatacagaatgttggctcatgaggatttacggaaggctgcagtccttatctttgcaaataaacaggatatgaaagggtgtatgacagcagctgaaatctcgaaatacctcacccttagttcaattaaggatcatccatggcacattcaatcctgctgtgctctcacaggagaagggttatgccaaggtctagagtggatgacctcccggattggtgtgagataacttttttgcttgaaagagactgctctatttattctgtgacatgaacattttttcctagtacctttggctgctaaggcagcagcatgtttaatttataacaacacaaacctctgagagcaacacttgaatcaagtgcagctgaactggaacataaaagattttttcttaactttttttttttaacacactaatcttcagttggatgaatgtaatgtataactatgttttcagcaacaattcttctgtttattctaattaatcagtgactgccttgtaagaaatgtttgtcatatgcgtgatgtcttctgaaatattcttataaccttaatgaccaattgctttcaattcttgaccagcactccctcccaaccagagaattactggtttgatagagtagtcttggaaaccatcaggtactgcctgcagacttctccagcactaaatatatttgttccctctataaaccattcatctttcggacagaacttactgtaaagaaagaaatctgcctagaggatatatgtaaggaagattccacatcatgagtacttgccttttaactttcccccacattactgttgagtcatggaataatgtttaagttgttatttgcatggaaattaagtaggctgtttatttatctaaaggaatcaagtccactcttctgcctgcaacatttgttcaaaaactaaccaaggtaaaatatttatttgaaagcccaactttgatgttaaatattcttgaataaatctgttattttaagaatatcacattattcaatgcatataaaactatcagaagttagtaaatcataccagcactaaaaataagacaattggaatatattttagcatcagtttacaaacaactttattatcaacagaaattttagctcttttctttgcaagatatatcacagctgctttgggcagtagctgaagccgaagtatgaacagtccattttgtttcttaaaatttgaagtcgtgtctgtcatagcatttttactaccagcagtatgttacttaaaaaactacatggctttccttgaatttatttgacggtattatgtaatagacttgaaacaattgccatctttgtagttatgccttgggttctaaaatgttataggaaactgctgaattgaatcctagcttttagaatattaataggagactcaaagttaatattcttaacaacttaaaattaaaaaaagtcataatctatcaaaagtttatttattggatggcattaaaacatttttgaggcagttgtctaatatgaacaataatctaaacaatatattccttaaattaagaggaaagacaagtgtcgtatttcgatcctgtttattcaaatgtgtgattttgctgaaatgaaagggataaaatgaatacttagagaataatacttcatttttgcagtactttttaattttgataaaaaagatacaaagttcataatatcaaaatatgtgttcaaaattggtattttaattttaatatttttgtaagttgatttaaattttgctcttttttcaggtgtgcttggtttattatatttagtcaagttaatttagtcgaatgtggtaacatttttctgatttatctttagttggagcacacccttgaactgaacagtggccaaaggaaagctttctgggctttggaaagtagttgtttaactttgttttaagccgttttcttagtgattctgtatcaagtagaggataagtgtagtttaacttagtttttaatataacccataatcaagaacatgagcgaaaagcagacataaatcgatatggatggtttgtggtgtgtgtgggatgtgggggaattaagaaaatgccatttacctaagcacagtttgcctgaatttctgcttggttgtgttgtttaccgtaagtactgagggtagtttccctaagtctgtcctgagaaaaagcatacttagtactcctgtatttgttcttatgaaatgactatctgccttcttgtatctagtaagattggctggctcaattttcttctgtcaaattatatggttattttttatattaccacatcagcattatattaaaagtgtttttaatagttgattgtattttgccaactactagtatagactcaaatttgctatttaatttttaaaatacaatttattttgtaaatcctttaaaaaatatttggttagttttggattagaaatgatttatgttagccatgtgttgaagatgaaattggcatcagtgtagacggtgctgattgggaaaagttcatgattaggaaattcatgtaagactttttaagagtattttttaggttttcactcaatctttcctgtcacagtaacgtgaaaactgattattctttactccaagagaatgttttaacccaagcaagtatctaatactagagcattggttctgacattcattgtaaatcagtgaactgtaagatactgtctaaaaaatgtacatttgtaattagtgcctttattcatattttgaaataagttcttagttttatattatacctgttctttagaagtcatgttagcagctaattatttcagtgatgaaataatttgtgttttatatcccccttcacctccatgtattggttagcacagtttatagtaagtgaaaagcaagggacccacctacattaccttcaggagactgttctaccttttaatttgaaaacaaggaaattaaattttaacagaaatcttttaagtatgttataaccaaagtgttcaattatccttgcaagttcaaatacagcatttttcttaattttgagcgtgtcatgtccttcatctttaaacccatcattcttattgaagcccatttgagaactcttagaattaatagaaccttttataagggaatatatggaatattttttattgttaatgtaacttaattccttaaaacctggaatattaatatatataatctattaaaagctgaagattaaatatgtaatttttgcttttagtttcttgtgttagtatgcttaaaggtatcaatacttttattctatattcattagaagaaaggtaataaatttaagtttcattgctgaaaaattttaaatgagtgccaccccatagccatagtcattttgattaagcataatttaactttcattatagcataaagagaaaataattattttagtatggaaacagtgataggcagtgctgtaaacaatattctctgaaaagttgtgggggtcacaaagaaaattttaaagaatatagaagcttttttaaaaaatctttttagtgtagtttcttagaacaaattataaacataatcattctgaataatcaatttttatttagtccttaactatgtaaaaccgtatcagtagaaaaatgtgctggtgtcgtgtctaaagatggataaatttctttggaatttatctttggagaccaactttatgaggcagactttttgtctacagctttggaaccaaaaaaacttcactctaattcagtcctaaaggctattttacattttgccggggtaaagtgacttcaagatacagcatggtgtcttgtatctagtagaatattgtgctagccatctaaaaaagtggatttgagccttaatttggccgtttctcaattgtctagttgaccttagacaattagtgtccatggctttccttttgtttttcccatactgaggaacttaaactacagctctaaaatgtcttttggttttaaaattctgaatgcttatatactactattaaaaattaaaaatccctcaaatagtagggcaatacaggtaatatgaaattaaatgtatttttatccattatttgattcccacctgttattttatttagaatacgaatacaaccaagtagggaaaaacgtatcagtaactgctattcaacttaaattcagcgaattaatagctgaatagaaatagctaatgacaatgcaaaagagaaaacaagccatattgctaagaaaaggatagtaagctgcttagaaagaaccagcctgtgttggaaataattctcttctagataatttaccttattttcttggcttgtactaattgaatggaagtggttaatttgttcagagtttattgccgtttgatgccaccccagtctatagttctgtgtgactttccatattgaaagagtagggttagtagccaggttgtcagtcttttacaaatgtctacataaatgtctacataaatctgaaagtggtttatattcaaggttagtttttcagtagcgtctcctccttattcattcacttttactgtgaagactgaaatccaaaagccaggttccccaaaaaagtatttttaaaaaattttaggggaccaaaataaatagaggaagaccaatataaaaaaatatgttcaactattccattttaaatttaaagcagaaaaaaaaattgtgcccctcagacctaaaggcagctttaaatgtatatagtttggtgaaacatttgggaaatattaatttggaggtttagaagcatacgaaaaacaaattcaaagcacttgaaagtaaagacaatatcatgaggtcgaaaaaacttcaaaaggatattaggtaagagaaaatgtgaatgaaagcagtgaatttctgcctctcctcgtatttagggtacttaaaattactaaaaaatactgtctttttaccatacagctagatggcctgtattattcttaatgtggccaaaggagtgaagactgattagggttttagaatttggaactgtagtcacataaaggcatcttttgcatttcttaaaccagtaatctacattttctcctggaaatggagaaatatgaaatgtgctgtgcatagcttttggaatagaaaacaaagttttaaaagaatggatatgttttcttgcacaacttgtaaaattttaattaaaaaattacctcatttttcaatccataaggtgctttgctcaagtttgtgggatgtttgtaccatcccataaaaacccccttcacccaaactgtatttgaaatatgcaaaattcataactaagggatagcattccttggagactttgttttgttttactcttgtttaccagctgggccaacatggtagatatatgagattcacatatggtttcattaaagcacataggaaagtgctcagtcaatatttaattagtttaattagataagggaaaggagaaatcctaaatttgatggattcttttatactgtgaatatatttccatcagtgttggtaagatatcaaatgactatcagttgatcccagtcatcagtgacttatttgcatatttaagccctattcacaagagaccataatcattttaatcttatattttccctcaggaaatttagggactctgaagcccctattttattctcttggagtaaactgttgagtgtagttacaaaaacttttatttatgacttaaaaaaagtttagctgctatttcagtgaaagtgtaaaataaaacggtcatgatttttttcaattacagaatagttacaaattttaccatgttcatctattccacagagcatgttaaaaacaacaacaacaaaaacctaacagcaattacaaccttggtgttgcgtttattctaatcagagtgaatgattataatcacactttgctattttaacataaattggtgctttagagcattaaagaggaagcagcaggccctgtactcagtatttattatttcttgcctcagaatgcaaaacaactttaaagtgtctatattcatatatatgtgcatttcttaagatttaaatacaaactgttgttactccttaagcttcaggctttctgcgaaagctctaagaatatcttcattactatgcttggtcaactggaagatggtattaataaggtcagaattaggaattggattgctctgtgggtcctccggtattgtgcagaggaaagaaaaatgtctttcacaccacaaactgtgtgtctgaaccccagccaaacaaatgtgttccattggtccaatatataagcattaacaacaacaacaaaaaatttaaaacaagtaaattaatgcattcacatgatcacttcttgaaaatggttcaaagcatgttttcctgatggtgggattgtttaaatgacatgttttaaagtttttaatactttattagttatgaagtgcttcttttatatgttaagtttaggttgccagtactcataatttttatttctgcaattatgttataatgagttgtttgcatgcctacttaacccaagtaaaacgatgctgtttgctctggaatgttcatcttttagacaggttttggctcatttccaatcatggtgcaatatagtgtaacattcatttgttttcattcaacagttttatttttgtcataataaataattacttttccaata

SEQ ID NO: 105836 - DNA, 540 bp, Homo sapiens
  Payload ID: 749
  Gene Symbol: ARL5C
  Gene Name: ADP-ribosylation factor-like 5C
  Uniprot ID: A6NH57
  ENST ID: ENST00000269586
  CDS Start-End: 1-540
atgggacagctgatcgccaagttaatgagcatcttcgggaaccaggagcacacggtcatcatcgtgggactggacaatgaaggaaagaccaccattctctaccggttcttgaccaatgaggtggtccatatgtgtcccaccattggcagcaacgtggaggagatcattctgccgaagacccacttcttcatgtgggacatagtgagacctgaggctctgagctttatctggaacacatactactccaacactgagtttatcatccttgtgattgacagcacggaccgggatcggctgctgaccactcgggaggagctatataaaatgctggcccatgaggctctacaggatgcttcagtcctgatatttgccaataagcaggacgtgaaggactccatgaggatggtggagatctcccatttccttactctcagcaccatcaaagaccactcgtggcatatacaaggctgctgtgccctcaccagggaagggctgcctgccagacttcagtggatggaatctcaggccgctgctaactga

SEQ ID NO: 105837 - DNA, 524 bp, Homo sapiens
  Payload ID: 749
  Gene Symbol: ARL5C
  Gene Name: ADP-ribosylation factor-like 5C
  ENST ID: ENST00000578912
  CDS Start-End: 1-300
aacacatactactccaacactgagtttatcatccttgtgattgacagcacggaccgggatcggctgctgaccactcgggaggagctatataaaatgctggcccatgaggctctacaggatgcttcagtcctgatatttgccaataagcaggacgtgaaggactccatgaggatggtggagatctcccatttccttactctcagcaccatcaaagaccactcgtggcatatacaaggctgctgtgccctcaccagggaagggttagtggctgccctacctggatctctagggcctggctgaaccaatggatgactgaccatcagaacccttctcctgcctctctcctgtgagaatctggttcacagttggctcctgggccaagccaatttggcatctccccacagagttttgctctttgttgcccaggctggagtgcaatggcatgacctcagctcactgtaacctccgcctcccaggttcaagcaattctcctgcctcagcctccggagtagctgggattacag

SEQ ID NO: 105838 - DNA, 1630 bp, Homo sapiens
  Payload ID: 750
  Gene Symbol: ARL6
  Gene Name: ADP-ribosylation factor-like 6
  Uniprot ID: Q9H0F7
  ENST ID: ENST00000335979
  CDS Start-End: 584-1144
aactcccatgatgctacgccgggaactgcccggctcctcgcaggaaataggcagctcaccctgccacctgtgcacacatttttcttcaatgtatagttcctcggcgcgcctctgaccttttcccggagctcttcaatcccagaagctatagcacaacggctgaatcgccaggacccccggggaggcgtggcttcaggaccggaagaagctcctgttgccaagggaacggtgcctgccaaggcgcctgctcagcgactgatgcacagactgctgcagaggctgccggttttcccaacttctagagacggctttgctcattaccaggcatccttcccatgtaggcatcgagaagaaggctgagggaccctcgcaccagatttccatcccggagaccgatacgagtgcgtccattcctgttgccagctcctgcgccctccggactaacctcaaaaaccagaaaaactgcctgctcttctaaattgtgtgtcccaaaatatttcattaacaagtatcaagtgataatccatggaaaagtgatggaaagtcacaatacaagctggtttgtaaatatttgaatcacattatgggattgctagacagactttcagtcttgcttggcctgaagaagaaggaggttcatgttttgtgccttgggctagataatagtggcaaaacgacgatcattaacaaacttaaaccttcaaatgctcaatctcaaaatatccttccaacaataggattcagcatagagaaattcaaatcatccagtttgtcatttacagtgtttgacatgtcaggtcaaggaagatacagaaatctctgggaacactattataaagaaggccaagctattatttttgtcattgatagtagtgatagattaagaatggttgtggccaaagaagaactcgatactcttctgaatcatccagatattaaacaccgtcgaattccaatcttattctttgcaaataaaatggatcttagagatgcagtgacatctgtaaaagtgtctcagttgctgtgtttagagaacatcaaagataaaccctggcatatttgtgctagtgatgccataaaaggagaaggcttgcaagaaggtgtagactggcttcaagatcagatccagactgtgaagacatgaaaagataatagttggaaacctcagcaattttcaattcaaggaatctatctaagacaaatagaatacattttgtaaaagatgtttatgcatcaaaaaatataattttctgcttgcatttatggactctgacctttttaagaacataggacttcaggtatgctaatttggccattaattatttaaaaactaaatattccctcaaaagggctccctagaattatcaagttcttagtgaaggtctacatttgattgtacgtagaatgtttaaaagtcagttataagccatctcatcccatcataatttatgatatgtttaatatattttattttttaattgtctttttaaaaaatttagtttatgactttgcagtatgaattgtgcttgtgaaaaagaactttaaatatttataagggaccatgggtaattaatatatattcaatttttactatgtgtcactgtcaataaaatgtaaaatataatgtgcc

SEQ ID NO: 105839 - DNA, 1590 bp, Homo sapiens
  Payload ID: 750
  Gene Symbol: ARL6
  Gene Name: ADP-ribosylation factor-like 6
  Uniprot ID: Q9H0F7
  ENST ID: ENST00000394206
  CDS Start-End: 544-1104
aactcccatgatgctacgccgggaactgcccggctcctcgcaggaaataggcagctcaccctgccacctgtgcacacatttttcttcaatgtatagttcctcggcgcgcctctgaccttttcccggagctcttcaatcccagaagctatagcacaacggctgaatcgccaggacccccggggaggcgtggcttcaggaccggaagaagctcctgttgccaagggaacggtgcctgccaaggcgcctgctcagcgactgatgcacagactgctgcagaggctgccggttttcccaacttctagagacggctttgctcattaccaggcatccttcccatgtaggcatcgagaagaaggctgagggaccctcgcaccagatttccatcccggagaccgatacgagtgcgtccattcctgttgccagctcctgcgccctccggactaacctcaaaaaccagatacagttgtcttggaagcctgttattgataaagttgctgcagcctcacatccttcaagctggtttgtaaatatttgaatcacattatgggattgctagacagactttcagtcttgcttggcctgaagaagaaggaggttcatgttttgtgccttgggctagataatagtggcaaaacgacgatcattaacaaacttaaaccttcaaatgctcaatctcaaaatatccttccaacaataggattcagcatagagaaattcaaatcatccagtttgtcatttacagtgtttgacatgtcaggtcaaggaagatacagaaatctctgggaacactattataaagaaggccaagctattatttttgtcattgatagtagtgatagattaagaatggttgtggccaaagaagaactcgatactcttctgaatcatccagatattaaacaccgtcgaattccaatcttattctttgcaaataaaatggatcttagagatgcagtgacatctgtaaaagtgtctcagttgctgtgtttagagaacatcaaagataaaccctggcatatttgtgctagtgatgccataaaaggagaaggcttgcaagaaggtgtagactggcttcaagatcagatccagactgtgaagacatgaaaagataatagttggaaacctcagcaattttcaattcaaggaatctatctaagacaaatagaatacattttgtaaaagatgtttatgcatcaaaaaatataattttctgcttgcatttatggactctgacctttttaagaacataggacttcaggtatgctaatttggccattaattatttaaaaactaaatattccctcaaaagggctccctagaattatcaagttcttagtgaaggtctacatttgattgtacgtagaatgtttaaaagtcagttataagccatctcatcccatcataatttatgatatgtttaatatattttattttttaattgtctttttaaaaaatttagtttatgactttgcagtatgaattgtgcttgtgaaaaagaactttaaatatttataagggaccatgggtaattaatatatattcaatttttactatgtgtcactgtcaataaaatgtaaaatataatgtgcc

SEQ ID NO: 105840 - DNA, 1705 bp, Homo sapiens
  Payload ID: 750
  Gene Symbol: ARL6
  Gene Name: ADP-ribosylation factor-like 6
  Uniprot ID: Q9H0F7
  ENST ID: ENST00000493990
  CDS Start-End: 584-1144
aactcccatgatgctacgccgggaactgcccggctcctcgcaggaaataggcagctcaccctgccacctgtgcacacatttttcttcaatgtatagttcctcggcgcgcctctgaccttttcccggagctcttcaatcccagaagctatagcacaacggctgaatcgccaggacccccggggaggcgtggcttcaggaccggaagaagctcctgttgccaagggaacggtgcctgccaaggcgcctgctcagcgactgatgcacagactgctgcagaggctgccggttttcccaacttctagagacggctttgctcattaccaggcatccttcccatgtaggcatcgagaagaaggctgagggaccctcgcaccagatttccatcccggagaccgatacgagtgcgtccattcctgttgccagctcctgcgccctccggactaacctcaaaaaccagaaaaactgcctgctcttctaaattgtgtgtcccaaaatatttcattaacaagtatcaagtgataatccatggaaaagtgatggaaagtcacaatacaagctggtttgtaaatatttgaatcacattatgggattgctagacagactttcagtcttgcttggcctgaagaagaaggaggttcatgttttgtgccttgggctagataatagtggcaaaacgacgatcattaacaaacttaaaccttcaaatgctcaatctcaaaatatccttccaacaataggattcagcatagagaaattcaaatcatccagtttgtcatttacagtgtttgacatgtcaggtcaaggaagatacagaaatctctgggaacactattataaagaaggccaagctattatttttgtcattgatagtagtgatagattaagaatggttgtggccaaagaagaactcgatactcttctgaatcatccagatattaaacaccgtcgaattccaatcttattctttgcaaataaaatggatcttagagatgcagtgacatctgtaaaagtgtctcagttgctgtgtttagagaacatcaaagataaaccctggcatatttgtgctagtgatgccataaaaggagaaggcttgcaagaaggtgtagactggcttcaagatcagatccagactgtgaagacatgaaaagataatagttggaaacctcagcaattttcaattcaaggaatctatctaagacaaatagaatacattttgtaaaagatgtttatgcatcaaaaaatataattttctgcttgcatttatggactctgacctttttaagaacataggacttcaggttgctataacaaagtaccatagactgggtggcttataaacgacagaaatttatttcttacagctctggagctggaagtctgagatcagattaccagcatggttgggttctggtgagagccgtcttggttgcagactgccatcttcttgtatcctcacatggccaaaagaggacaagagaactctctggagtctgtttgataagagcatgaatcccattacatcttcacatggctcctcccaaagaccccacctcctaatatcatcacatgtcatcacatagggggttagaatttcaacatagaaattttgggagaacacaaacattcagtcagttgcaatacttaaggcaaattcatcttgcttataactctggtgcatgtgcattaaaatactattgcattgtaa

SEQ ID NO: 105841 - DNA, 894 bp, Homo sapiens
  Payload ID: 750
  Gene Symbol: ARL6
  Gene Name: ADP-ribosylation factor-like 6
  ENST ID: ENST00000462412
  CDS Start-End: 532-894
gctacgccgggaactgcccggctcctcgcaggaaataggcagctcaccctgccacctgtgcacacatttttcttcaatgtatagttcctcggcgcgcctctgaccttttcccggagctcttcaatcccagaagctatagcacaacggctgaatcgccaggacccccggggaggcgtggcttcaggaccggaagaagctcctgttgccaagggaacggtgcctgccaaggcgcctgctcagcgactgatgcacagactgctgcagaggctgccggttttcccaacttctagagacggctttgctcattaccaggcatccttcccatgtaggcatcgagaagaaggctgagggaccctcgcaccagatttccatcccggagaccgatacgagtgcgtccattcctgttgccagctcctgcgccctccggactaacctcaaaaaccagatacagttgtcttggaagcctgttattgataaagttgctgcagcctcacatccttcaagctggtttgtaaatatttgaatcacattatgggattgctagacagactttcagtcttgcttggcctgaagaagaaggaggttcatgttttgtgccttgggctagataatagtggcaaaacgacgatcattaacaaacttaaaccttcaaatgctcaatctcaaaatatccttccaacaataggattcagcatagagaaattcaaatcatccagtttgtcatttacagtgtttgacatgtcaggtcaaggaagatacagaaatctctgggaacactattataaagaaggccaagctattatttttgtcattgatagtagtgatagattaagaatggttgtggccaaagaagaactcgatactcttctgaatcatccagatattaaacaccgt

SEQ ID NO: 105842 - DNA, 4231 bp, Homo sapiens
  Payload ID: 750
  Gene Symbol: ARL6
  Gene Name: ADP-ribosylation factor-like 6
  Uniprot ID: Q9H0F7
  ENST ID: ENST00000463745
  CDS Start-End: 478-1038
atgatgctacgccgggaactgcccggctcctcgcaggaaataggcagctcaccctgccacctgtgcacacatttttcttcaatgtatagttcctcggcgcgcctctgaccttttcccggagctcttcaatcccagaagctatagcacaacggctgaatcgccaggacccccggggaggcgtggcttcaggaccggaagaagctcctgttgccaagggaacggtgcctgccaaggcgcctgctcagcgactgatgcacagactgctgcagaggctgccggttttcccaacttctagagacggctttgctcattaccaggcatccttcccatgtaggcatcgagaagaaggctgagggaccctcgcaccagatttccatcccggagaccgatacgagtgcgtccattcctgttgccagctcctgcgccctccggactaacctcaaaaaccagctggtttgtaaatatttgaatcacattatgggattgctagacagactttcagtcttgcttggcctgaagaagaaggaggttcatgttttgtgccttgggctagataatagtggcaaaacgacgatcattaacaaacttaaaccttcaaatgctcaatctcaaaatatccttccaacaataggattcagcatagagaaattcaaatcatccagtttgtcatttacagtgtttgacatgtcaggtcaaggaagatacagaaatctctgggaacactattataaagaaggccaagctattatttttgtcattgatagtagtgatagattaagaatggttgtggccaaagaagaactcgatactcttctgaatcatccagatattaaacaccgtcgaattccaatcttattctttgcaaataaaatggatcttagagatgcagtgacatctgtaaaagtgtctcagttgctgtgtttagagaacatcaaagataaaccctggcatatttgtgctagtgatgccataaaaggagaaggcttgcaagaaggtgtagactggcttcaagatcagatccagactgtgaagacatgaaaagataatagttggaaacctcagcaattttcaattcaaggaatctatctaagacaaatagaatacattttgtaaaagatgtttatgcatcaaaaaatataattttctgcttgcatttatggactctgacctttttaagaacataggacttcaggtatgctaatttggccattaattatttaaaaactaaatattccctcaaaagggctccctagaattatcaagttcttagtgaaggtctacatttgattgtacgtagaatgtttaaaagtcagttataagccatctcatcccatcataatttatgatatgtttaatatattttattttttaattgtctttttaaaaaatttagtttatgactttgcagtatgaattgtgcttgtgaaaaagaactttaaatatttataagggaccatgggtaattaatatatattcaatttttactatgtgtcactgtcaataaaatgtaaaatataatgtgccaactagtgcgctttgtttatgctgaaaagaataatgctctgttagtatggtatttcgtgtcatactgtcaagcatttgtaaaccatctgagactaagttaagctgaatttatttattcagtgtatgttgaacatctctacaccaactagtcagacatagtcctaggcaatgatgttacgaggtaaataagacatatccttatcttcagagaacttaaaatttaatgagggataatttgagaacctttccatggatagtatctaattttatttcattggctgaatgaaaatattgcatcttcagattaagaggtataaagtaaattaatatttgactgttcagtaatcattactgacatcttgtttttcacttttaaatgcctccaatttaccatagcactttgttaaaataaattgtgacttttaactttttcatgaacataactgctacataaatgttctttagaattttagacatatctcaggcacacaaattattagttctcacaaattagagaacacttataattgtgaactctaaatagaaaccttcattttaatcactgagcaacagtatatagagcaatattgttgatcctgataaacactgcatataaagaaaaactgtaatatacaatatataccatctcaagtatgcttagctttgaaaatgatgaaaatagaaggcaaaagtaagtgagtaataaagatgttatagtaactgcagtagtggtacatgtttcacaaagattttaataaaagcacataaagctacaataaaagttctatattccagtttcttatagtccagaaatagcagtgatttggcatttggcaaattgaaagttacccagaaaattccaatggctcagcatcttagctagtttaccatctctcttgtaaattgttttagaggatacaaaatgaaaatctcattaatctaaagttgctgcagatataggaaggacataaggatggaaacaatgaatgtaattttttaaaaaactgatatgctacaactattttaggatggagaaagaattgattgagaattcaaatcctcactcacttaccataaggtagtaataaaattaataatagttactactatatgatcattatattataagcaggtattacacatacagaattttcaacatttaatcctcccaataagcctatgtggcaggttttattatttccattttatagatcagtaaactgaggcgttaaaatgttatgtaatttgccaaagttcaaaaagctggtaagtctggtactaggattcagtaccaagcagtctgttttaagacagatgattcaagagtatgatagatattagaaatacagatatatctgccagaataacaattaaaatgatagaaaaggctcttacttgggacagcaaccaggacagggatggtagagggaaggtcagagactagagactactctttgctttttttgttttctttttttttcttttaaagctattaacactactcaaattttaaactctggatacaaatgactttgataaaagtccttaaaactattttgacattaaattatttggtattccacaaactacagtagctcatacctatgcaaatatttagaagaaggagaagtaccctttttctttgttttcatgatctccaaaatctagtttttagtctataaacatccatccctactccacattttcatgtaaagattatgtagaagttgggcaacagtgtagtcacaggatgtcatataagtgtgaataagctgagattattgcatttgtatttagcatattatacaattaaaatgtattttattaaacctgaagcaagttttctttcatgtctagacatcagtgtgttacagagtttaattcattaagctctgtatttgaatataacaccttgtaaaaatgtttgaaacttatcctcttgtatgttaaatatttaaatatttgtatatggccctattcagcctgtgctttataaatcacaaaagagctgggttttatatgtttgttttttatttctaagctctctgcgaaaaagttacaaattgtctccttaagatattttttctttgtaatttttttatatcatgttgtgatttccataaatatgtgcagttactcttgataatacttgtcttattcatttcaggttgctataacaaagtaccatagactgggtggcttataaacgacagaaatttatttcttacagctctggagctggaagtctgagatcagattaccagcatggttgggttctggtgagagccgtcttggttgcagactgccatcttcttgtatcctcacatggccaaaagaggacaagagaactctctggagtctgtttgataagagcatgaatcccattacatcttcacatggctcctcccaaagaccccacctcctaatatcatcacatgtcatcacatagggggttagaatttcaacatagaaattttgggagaacacaaacattcagtcagttgcaatacttaaggcaaattcatcttgcttataactctggtgcatgtgcattaaaatactattgcattgtaactgagtttgtacctattttctgctttctgattatttcctttgttcatgaaaataaatgactggtattacaaggtcacctaaataaataggtttgtgtacgtctgcgactagagagaaatactacagtgattaa

SEQ ID NO: 105843 - DNA, 675 bp, Homo sapiens
  Payload ID: 750
  Gene Symbol: ARL6
  Gene Name: ADP-ribosylation factor-like 6
  ENST ID: ENST00000476753
  CDS Start-End: 1-164
aagaagaactcgatactcttctgaatcatccagatattaaacaccgtcgaattccaatcttattctttgcaaataaaatggatcttagagatgcagtgacatctgtaaaagtgtctcagttgctgtgtttagagaacatcaaagataaaccctggcatatttgatcagatccagactgtgaagacatgaaaagataatagttggaaacctcagcaattttcaattcaaggaatctatctaagacaaatagaatacattttgtaaaagatgtttatgcatcaaaaaatataattttctgcttgcatttatggactctgacctttttaagaacataggacttcaggtatgctaatttggccattaattatttaaaaactaaatattccctcaaaagggctccctagaattatcaagttcttagtgaaggtctacatttgattgtacgtagaatgtttaaaagtcagttataagccatctcatcccatcataatttatgatatgtttaatatattttattttttaattgtctttttaaaaaatttagtttatgactttgcagtatgaattgtgcttgtgaaaaagaactttaaatatttataagggaccatgggtaattaatatatattcaatttttactatgtgtcactgtcaataaaatgtaaaatataatgtgcc

SEQ ID NO: 105844 - DNA, 557 bp, Homo sapiens
  Payload ID: 750
  Gene Symbol: ARL6
  Gene Name: ADP-ribosylation factor-like 6
  ENST ID: ENST00000631834
  CDS Start-End: 1-444
atccttccaacaataggattcagcatagagaaattcaaatcatccagtttgtcatttacagtgtttgacatgtcaggtcaaggaagatacagaaatctctgggaacactattataaagaaggccaagctattatttttgtcattgatagtagtgatagattaagaatggttgtggccaaagaagaactcgatactcttctgaatcatccagatattaaacaccgtcgaattccaatcttattctttgcaaataaaatggatcttagagatgcagtgacatctgtaaaagtgtctcagttgctgtgtttagagaacatcaaagataaaccctggcatatttgtgctagtgatgccataaaaggagaaggcttgcaagaaggtgtagactggcttcaagaaaaaacaatacaatcagatccagactgtgaagacatgaaaagataatagttggaaacctcagcaattttcaattcaaggaatctatctaagacaaatagaatacattttgtaaaagatgtttatgcatcaaaaaatataattttctgcttgcatttatg

SEQ ID NO: 105845 - DNA, 2409 bp, Homo sapiens
  Payload ID: 751
  Gene Symbol: ARL6IP1
  Gene Name: ADP-ribosylation factor-like 6 interacting protein 1
  Uniprot ID: Q15041
  ENST ID: ENST00000304414
  CDS Start-End: 213-824
atgcgctgagcttcggttggcccggcttccttgaggcgtaagctcggtctgtccaatgaggagcgagcgtcgcgggggccgtcgggaagggcggccgacccatataagcagcctgcggggcgttccctcgggttgtggttggtgtgcgggtttcggttggaggactcgttggggaggtggcctgcgcttgtagagactgcatccccgagacgatggcggagggagataatcgcagcaccaacctgctggctgcagagactgcaagtctggaagaacagctgcaaggatggggagaagtgatgctgatggctgataaagtcctccgatgggaaagagcctggtttccacctgccatcatgggtgtggtttctttggtgtttctgattatctactatctagatccatctgttctgtccggcgtttcctgttttgttatgtttttgtgcttggctgactaccttgttcccattctagcgcctagaatttttggctccaataaatggaccactgaacaacagcaaagattccatgaaatttgcagcaatctagtaaaaactcgacgcagagctgtgggttggtggaaacgcctcttcacactaaaggaagaaaaacctaagatgtacttcatgaccatgatcgtttcccttgctgcggttgcttgggtgggacaacaagtccacaacctgcttctcacctacctgatagtgacttccttactattgcttcctggactaaaccaacatggaatcattttgaagtacattggaatggccaagagggagataaacaaacttctcaaacaaaaagaaaagaaaaacgaatgattcatctgctttaatcagtgtgattaatgcagcacccattgccccgggaaccgtttctgctgtactatctggatactaaaatgttacggaagtagctctttgttctccctcactctgcccttagttaatagaaattcagactcgccaagtaaggcttcgtgcatagtgtcttcatgtcgcgtatagttgagcgcgttcttagcagttggcttcatggacaactcattagtgttttgacttttcttacccagcgttaattgaattcttgcttttagacaacttcctttttgtagtggtgaaccttgccctttagtacagttcaagtgaatctggataattgttcatctttgctttagcttagataccatgtagtggtctgtggctacaggaagctggttctgtctgcttccacagtctgcttaaaaaactgtctgacttcgtgaatatagagaccaagtttaccacttctgatgaagagaccaattaagattcattcctcattctgtttctttccagtgggagaagagtccccatgaaataagatgaaactgattccatgcactagtacatgtaggcttctcccttgtgcaaagcttagcaatttgtaggaaactttgatctttttgtccaagaaaaggaatgtctgacaggcttaagctttcgtccccttgcacttagactcgaagttagtaaatccttaaaggctttttaatagcagacttccaaaagattgcatttaggatttctagcatgcttttaatttcagattttcagctgacattagctatagtatacagtaggttaagactcatgtctatgactttcactctaagactggcaaaaggacagcagtcttctatgtttagtcaatattcatttcagtagaagataatcttatctaatttttgagaccagaataagccttttaaggtaaacctcaaaattatcattttatggtaatactgaccattttagtcccctaggtttgacatgggagatagtgactacactggtgtctgacttttttcctagagatttctccctgaaaaatacaagggctgttggtgagagcagacttgaggtgatgatagttggcctctggtctacaaagatttcataactccttggaaagcttcttataatcattcttaacttcttggtagctagaaatttagagtagttgaaatctttaggaatgaacttctgagggccaaaaaatgtgactgacgggaacaattcttaaactgattaactagctgtaatatagttttgtgaatttattgcactgatgttgtaccttgtggtatatctgtccctattaaataagtgttgttttctcctctttaatattgctgtgaacagtggtgcccattgtagcatatgtttgatttttttttattatttcataagaaaactacgttaattttaccttactttcattgtaaataagcctgtcttcctatctggattttttgtgtgcatacatattctactgattaactacttttgcagttttaatcctgtattatttcttctactttgttttgtgtaaaaggggaaaaaataaaaaaagctggaatcttca

SEQ ID NO: 105846 - DNA, 1107 bp, Homo sapiens
  Payload ID: 751
  Gene Symbol: ARL6IP1
  Gene Name: ADP-ribosylation factor-like 6 interacting protein 1
  Uniprot ID: Q15041
  ENST ID: ENST00000546206
  CDS Start-End: 278-802
cctggctgcctgtcccccgggagccgagcgaggcctccagacgtccgtgggctcaaacaccgcggcctcgtccctgtcacccgccgcgggcccggcccttctctccctgggcaggcgacgatgcctggccctcgggcttcttgggtgactcctgggtgtcgaacccttacctttcctggggacggtgcgcgacggggcgaggagggcgcgtgattcatcaccgcgagctgcagagactgcaagtctggaagaacagctgcaaggatggggagaagtgatgctgatggctgataaagtcctccgatgggaaagagcctggtttccacctgccatcatgggtgtggtttctttggtgtttctgattatctactatctagatccatctgttctgtccggcgtttcctgttttgttatgtttttgtgcttggctgactaccttgttcccattctagcgcctagaatttttggctccaataaatggaccactgaacaacagcaaagattccatgaaatttgcagcaatctagtaaaaactcgacgcagagctgtgggttggtggaaacgcctcttcacactaaaggaagaaaaacctaagatgtacttcatgaccatgatcgtttcccttgctgcggttgcttgggtgggacaacaagtccacaacctgcttctcacctacctgatagtgacttccttactattgcttcctggactaaaccaacatggaatcattttgaagtacattggaatggccaagagggagataaacaaacttctcaaacaaaaagaaaagaaaaacgaatgattcatctgctttaatcagtgtgattaatgcagcacccattgccccgggaaccgtttctgctgtactatctggatactaaaatgttacggaagtagctctttgttctccctcactctgcccttagttaatagaaattcagactcgccaagtaaggcttcgtgcatagtgtcttcatgtcgcgtatagttgagcgcgttcttagcagttggcttcatggacaactcattagtgttttgacttttcttacccagcgttaattgaattcttgcttttagacaacttcctttttgtagtggtgaaccttg

SEQ ID NO: 105847 - DNA, 391 bp, Homo sapiens
  Payload ID: 751
  Gene Symbol: ARL6IP1
  Gene Name: ADP-ribosylation factor-like 6 interacting protein 1
  ENST ID: ENST00000562234
  CDS Start-End: 88-391
cctcgggttgtggttggtgtgcgggtttcggttggaggactcgttggggaggtggcctgcgcttgtagagactgcatccccgagacgatggcggagggagataatcgcagcaccaacctgctggctgcagagactgcaagtctggaagaacagctgcaaggatggggagaagtgatgctgatggctgataaagtcctccgatgggaaagagcctggtttccacctgccatcatggcgcctagaatttttggctccaataaatggaccactgaacaacagcaaagattccatgaaatttgcagcaatctagtaaaaactcgacgcagagctgtgggttggtggaaacgcctcttcacactaaaggaagaaaaacctaagatgtacttcatga

SEQ ID NO: 105848 - DNA, 948 bp, Homo sapiens
  Payload ID: 751
  Gene Symbol: ARL6IP1
  Gene Name: ADP-ribosylation factor-like 6 interacting protein 1
  ENST ID: ENST00000563861
  CDS Start-End: 82-381
gttgtggttggtgtgcgggtttcggttggaggactcgttggggaggtggcctgcgcttgtagagactgcatccccgagacgatggcggagggagataatcgcagcaccaacctgctggctgcagagactgcaagtctggaagaacagctgcaaggatggggagaagtgatgctgatggctgataaagtcctccgatgggaaagagcctggtttccacctgccatcatgggtgtggtttctttggtgtttctgattatctactatctagatccatctgttctgtccggcgtttcctgttttgttatgtttttgtgcttggctgactaccttgttcccattctagcgcctagaatttttggctccaataaatgtacttcatgaccatgatcgtttcccttgctgcggttgcttgggtgggacaacaagtccacaacctgcttctcacctacctgatagtgacttccttactattgcttcctggactaaaccaacatggaatcattttgaagtacattggaatggccaagagggagataaacaaacttctcaaacaaaaagaaaagaaaaacgaatgattcatctgctttaatcagtgtgattaatgcagcacccattgccccgggaaccgtttctgctgtactatctggatactaaaatgttacggaagtagctctttgttctccctcactctgcccttagttaatagaaattcagactcgccaagtaaggcttcgtgcatagtgtcttcatgtcgcgtatagttgagcgcgttcttagcagttggcttcatggacaactcattagtgttttgacttttcttacccagcgttaattgaattcttgcttttagacaacttcctttttgtagtggtgaaccttgccctttagtacagttcaagtgaatctggataattgttcatctttgctttagcttagataccatgtagt

SEQ ID NO: 105849 - DNA, 578 bp, Homo sapiens
  Payload ID: 751
  Gene Symbol: ARL6IP1
  Gene Name: ADP-ribosylation factor-like 6 interacting protein 1
  ENST ID: ENST00000562819
  CDS Start-End: 82-348
gttgtggttggtgtgcgggtttcggttggaggactcgttggggaggtggcctgcgcttgtagagactgcatccccgagacgatggcggagggagataatcgcagcaccaacctgctggctgcagagactgcaagtctggaagaacagctgcaaggatggggagaagtgatgctgatggctgataaagtcctccgatgggaaagagcctggtttccacctgccatcatggtgacttccttactattgcttcctggactaaaccaacatggaatcattttgaagtacattggaatggccaagagggagataaacaaacttctcaaacaaaaagaaaagaaaaacgaatgattcatctgctttaatcagtgtgattaatgcagcacccattgccccgggaaccgtttctgctgtactatctggatactaaaatgttacggaagtagctctttgttctccctcactctgcccttagttaatagaaattcagactcgccaagtaaggcttcgtgcatagtgtcttcatgtcgcgtatagttgagcgcgttcttagcagttggcttcatggacaactcattagt

SEQ ID NO: 105850 - DNA, 1644 bp, Homo sapiens
  Payload ID: 752
  Gene Symbol: ARL6IP4
  Gene Name: ADP-ribosylation factor-like 6 interacting protein 4
  Uniprot ID: Q66PJ3
  ENST ID: ENST00000315580
  CDS Start-End: 146-1411
ctgtcattgtggaagagttgcaacttgggggcccgagattggatgaagcgcacagccacgctttgggttacacatttgaaactcagggggcttccatattgcagtcttgagtttggtctccctgggaaggtggggcaccagccccatgccacgttgcacgtatcagctggagcagaatcctggcttccttccggatgggcctggggtccatgcccgcgctcactgccaagatctttctggcccctacggacacgagtttgcgacctctgagtcactgggtgggcgcgtcggaaagaccagggcgcctcagtctggagctcgcagtcgtatggagagggcaggaccagccggggaggagggcggcgcgcgcgagggtcgccttcttcccagggcaccgggggcgtgggtgctgcgggcgtgcgccgagagggcagccttggaagtgggcgcagcttcggcagacacaggcgtgaggggctgcggagctcgagggccggcgcccctgcttgcctctgcgggaggtgggcgcgcccgggacggaacctggggcgtcagaacgaaaggcagcggcgccgcgcttcccagccggccagcctcccgcgcagcgccccggccggaagcctcctcgccgccgcttcctctcgagaaggcgcggggcgggctgtccggcccgcagggcggtcgagcccgcggcgccatggctcacgtcggctcccgcaagcgctcgaggagtcgcagccggtcccggggacgggggtcggaaaagagaaagaagaagagcaggaaagacacctcgaggaactgctcggcctccacatcccaaggtcgcaaggccagcacggcccctggggcggaggcctcaccttctccctgcatcacagagagaagcaagcagaaggcccggaggagaacaagatccagctcctcctcctcttcttccagttcttctagctcctcttcttcctcctcgtcctcctcctcttcctccagtgatggccggaagaagcgggggaagtacaaggacaagaggaggaagaagaagaagaagaggaagaagctgaagaagaagggcaaggagaaggcggaagcacagcaggtggaggctctgccgggcccctcgctggaccagtggcaccgatcagctggggaggaagaggatggcccagtcctgacggatgagcagaagtcccgaatccaggccatgaagcccatgaccaaggaggagtgggatgcccggcagagcatcatccgcaaggtggtggaccctgagacggggcgcaccaggcttattaagggagatggcgaggtcctagaggaaatcgtaaccaaagaacgacacagagagatcaacaagcaagccacccgaggggactgcctggccttccagatgcgagctgggttgcttccctgagggcccccgctggccaaggcctgtggacgacgctggcggcccagcctgggcaggtttcagggtgccagtgggaagcctgatgggtgctggtggcctttcccccgtggattggtctctggcccagcccagtctcttctcaggggcagggggtggaggttggggtcaccggcctgcttggcacccccatctgaaagagcagcacttctcagctattaaaggccccctggatagac

SEQ ID NO: 105851 - DNA, 546 bp, Homo sapiens
  Payload ID: 752
  Gene Symbol: ARL6IP4
  Gene Name: ADP-ribosylation factor-like 6 interacting protein 4
  ENST ID: ENST00000357866
  CDS Start-End: 1-546
atggctcacgtcggctcccgcaagcgctcgaggagtcgcagccggtcccggggacgggggtcggaaaagagaaagaagaagagcaggaaagacacctcgaggaactgctcggcctccacatcccaaggtcgcaaggccagcacggcccctggggcggaggagagaagcaagcagaaggcccggaggagaacaagatccagctcctcctcctcttcttccagttcttctagctcctcttcttcctcctcgtcctcctcctcttcctccagtgatggccggaagaagcgggggaagtacaaggacaagaggaggaagaagaagaagaagaggaagaagctgaagaagaagggcaaggagaaggcggaagcacagcagagcatcatccgcaaggtggtggaccctgagacggggcgcaccaggcttattaagggagatggcgaggtcctagaggaaatcgtaaccaaagaacgacacagagagatcaacaagcaagccacccgaggggactgcctggccttccagatgcgagctgggttgcttccctga

SEQ ID NO: 105852 - DNA, 1339 bp, Homo sapiens
  Payload ID: 752
  Gene Symbol: ARL6IP4
  Gene Name: ADP-ribosylation factor-like 6 interacting protein 4
  Uniprot ID: Q66PJ3
  ENST ID: ENST00000392435
  CDS Start-End: 15-1214
ggggcaccagccccatgccacgttgcacgtatcagctggagcagaatcctggcttccttccggatgggcctggggtccatgcccgcgctcactgccaagatctttctggcccctacggacacgagtttgcgacctctgagtcactgggtgggcgcgtcggaaagaccagggcgcctcagtctggagctcgcagtcgtatggagagggcaggaccagccggggaggagggcggcgcgcgcgagggtcgccttcttcccagggcaccgggggcgtgggtgctgcgggcgtgcgccgagagggcagccttggaagtgggcgcagcttcggcagacacaggcgtgaggggctgcggagctcgagggccggcgcccctgcttgcctctgcgggaggtgggcgcgcccgggacggaacctggggcgtcagaacgaaaggcagcggcgccgcgcttcccagccggccagcctcccgcgcagcgccccggccggaagcctcctcgccgccgcttcctctcgagaaggcgcggggcgggctgtccggcccgcagggcggtcgagcccgcggcgccatggctcacgtcggctcccgcaagcgctcgaggagtcgcagccggtcccggggacgggggtcggaaaagagaaagaagaagagcaggaaagacacctcgaggaactgctcggcctccacatcccaagagagaagcaagcagaaggcccggaggagaacaagatccagctcctcctcctcttcttccagttcttctagctcctcttcttcctcctcgtcctcctcctcttcctccagtgatggccggaagaagcgggggaagtacaaggacaagaggaggaagaagaagaagaagaggaagaagctgaagaagaagggcaaggagaaggcggaagcacagcaggtggaggctctgccgggcccctcgctggaccagtggcaccgatcagctggggaggaagaggatggcccagtcctgacggatgagcagaagtcccgaatccaggccatgaagcccatgaccaaggaggagtgggatgcccggcagagcatcatccgcaaggtggtggaccctgagacggggcgcaccaggcttattaagggagatggcgaggtcctagaggaaatcgtaaccaaagaacgacacagagagatcaacaaggtgggtgtggcccctctgcctgccatccgcccccagctctgtttgtgatgtacccctcctcctgtgtgctttcttccccagcaagccacccgaggggactgcctggccttccagatgcgagctgggttgcttccctgagggcccccgctggccaaggcctgtggacgacgctg

SEQ ID NO: 105853 - DNA, 796 bp, Homo sapiens
  Payload ID: 752
  Gene Symbol: ARL6IP4
  Gene Name: ADP-ribosylation factor-like 6 interacting protein 4
  ENST ID: ENST00000456762
  CDS Start-End: 1-651
gccatggctcacgtcggctcccgcaagcgctcgaggagtcgcagccggtcccggggacgggggtcggaaaagagaaagaagaagagcaggaaagacacctcgaggaactgctcggcctccacatcccaagagagaagcaagcagaaggcccggaggagaacaagatccagctcctcctcctcttcttccagttcttctagctcctcttcttcctcctcgtcctcctcctcttcctccagtgatggccggaagaagcgggggaagtacaaggacaagaggaggaagaagaagaagaagaggaagaagctgaagaagaagggcaaggagaaggcggaagcacagcaggtggaggctctgccgggcccctcgctggaccagtggcaccgatcagctggggaggaagaggatggcccagtcctgacggatgagcagaagtcccgaatccaggccatgaagcccatgaccaaggaggagtgggatgcccggcagagcatcatccgcaaggtggtggaccctgagacggggcgcaccaggcttattaagggagatggcgaggtcctagaggaaatcgtaaccaaagaacgacacagagagatcaacaaggtgggtgtggcccctctgcctgccatccgcccccagctctgtttgtgatgtacccctcctcctgtgtgctttcttccccagcaagccacccgaggggactgcctggccttccagatgcgagctgggttgcttccctgagggcccccgctggccaaggcctgtggacgacgctggcggcccagcctgggcaggt

SEQ ID NO: 105854 - DNA, 796 bp, Homo sapiens
  Payload ID: 752
  Gene Symbol: ARL6IP4
  Gene Name: ADP-ribosylation factor-like 6 interacting protein 4
  ENST ID: ENST00000439686
  CDS Start-End: 77-766
gggaacggagcagccccgggggcccccttgaggcggcgaggccgcgaagggcgcggggctggaggcccgcggcgccatggctcacgtcggctcccgcaagcgctcgaggagtcgcagccggtcccggggacgggggtcggaaaagagaaagaagaagagcaggaaagacacctcgaggaactgctcggcctccacatcccaaggtcgcaaggccagcacggcccctggggcggaggagagaagcaagcagaaggcccggaggagaacaagatccagctcctcctcctcttcttccagttcttctagctcctcttcttcctcctcgtcctcctcctcttcctccagtgatggccggaagaagcgggggaagtacaaggacaagaggaggaagaagaagaagaagaggaagaagctgaagaagaagggcaaggagaaggcggaagcacagcaggtggaggctctgccgggcccctcgctggaccagtggcaccgatcagctggggaggaagaggatggcccagtcctgacggatgagcagaagtcccgaatccaggccatgaagcccatgaccaaggaggagtgggatgcccggcagagcatcatccgcaaggtggtggaccctgagacggggcgcaccaggcttattaagggagatggcgaggtcctagaggaaatcgtaaccaaagaacgacacagagagatcaacaagcaagccacccgaggggactgcctggccttccagatgcgagctgggttgcttccctgagggcccccgctggccaaggcctgtggacga

SEQ ID NO: 105855 - DNA, 1318 bp, Homo sapiens
  Payload ID: 752
  Gene Symbol: ARL6IP4
  Gene Name: ADP-ribosylation factor-like 6 interacting protein 4
  Uniprot ID: Q66PJ3
  ENST ID: ENST00000454885
  CDS Start-End: 405-1085
cttggaagtgggcgcagcttcggcagacacaggcgtgaggggctgcggagctcgagggccggcgcccctgcttgcctctgcgggaggtgggcgcgcccgggacggaacctggggcgtcagaacgaaaggcagcggcgccgcgcttcccagccggccagcctcccgcgcagcgccccggccggaagcctcctcgccgccgcttcctctcgagaaggcgcggggcgggctgtccggcccgcagggcggtcgaggtgggaacggagcagccccgggggcccccttgaggcggcgaggccgcgaagggcgcggggctggagggtaggagagcgcgggaaagcgccccagacgccactcgcggcggacggcggccagttcccaggggtttggagccggcccgcggcgccatggctcacgtcggctcccgcaagcgctcgaggagtcgcagccggtcccggggacgggggtcggaaaagagaaagaagaagagcaggaaagacacctcgaggaactgctcggcctccacatcccaagcctcaccttctccctgcatcacagagagaagcaagcagaaggcccggaggagaacaagatccagctcctcctcctcttcttccagttcttctagctcctcttcttcctcctcgtcctcctcctcttcctccagtgatggccggaagaagcgggggaagtacaaggacaagaggaggaagaagaagaagaagaggaagaagctgaagaagaagggcaaggagaaggcggaagcacagcaggtggaggctctgccgggcccctcgctggaccagtggcaccgatcagctggggaggaagaggatggcccagtcctgacggatgagcagaagtcccgaatccaggccatgaagcccatgaccaaggaggagtgggatgcccggcagagcatcatccgcaaggtggtggaccctgagacggggcgcaccaggcttattaagggagatggcgaggtcctagaggaaatcgtaaccaaagaacgacacagagagatcaacaagcaagccacccgaggggactgcctggccttccagatgcgagctgggttgcttccctgagggcccccgctggccaaggcctgtggacgacgctggcggcccagcctgggcaggtttcagggtgccagtgggaagcctgatgggtgctggtggcctttcccccgtggattggtctctggcccagcccagtctcttctcaggggcagggggtggaggttggggtcaccggcctgcttggcacccccatctgaaagagcagcacttctcagctattaaaggccccctggatagac

SEQ ID NO: 105856 - DNA, 910 bp, Homo sapiens
  Payload ID: 752
  Gene Symbol: ARL6IP4
  Gene Name: ADP-ribosylation factor-like 6 interacting protein 4
  ENST ID: ENST00000426960
  CDS Start-End: 135-791
gggtccatgcccgcgctcactgccaagatctttctggcccctacggacacgagtttgcgacctctgagtcactgggtgggcgcgtcggaaagaccagggcgcctcagtctggagctcgcagtccccgcggcgccatggctcacgtcggctcccgcaagcgctcgaggagtcgcagccggtcccggggacgggggtcggaaaagagaaagaagaagagcaggaaagacacctcgaggaactgctcggcctccacatcccaagagagaagcaagcagaaggcccggaggagaacaagatccagctcctcctcctcttcttccagttcttctagctcctcttcttcctcctcgtcctcctcctcttcctccagtgatggccggaagaagcgggggaagtacaaggacaagaggaggaagaagaagaagaagaggaagaagctgaagaagaagggcaaggagaaggcggaagcacagcaggtggaggctctgccgggcccctcgctggaccagtggcaccgatcagctggggaggaagaggatggcccagtcctgacggatgagcagaagtcccgaatccaggccatgaagcccatgaccaaggaggagtgggatgcccggcagagcatcatccgcaaggtggtggaccctgagacggggcgcaccaggcttattaagggagatggcgaggtcctagaggaaatcgtaaccaaagaacgacacagagagatcaacaagcaagccacccgaggggactgcctggccttccagatgcgagctgggttgcttccctgagggcccccgctggccaaggcctgtggacgacgctggcggcccagcctgggcaggtttcagggtgccagtgggaagcctgatgggtgctggtggcctttcccccgtggattggtctctgg

SEQ ID NO: 105857 - DNA, 818 bp, Homo sapiens
  Payload ID: 752
  Gene Symbol: ARL6IP4
  Gene Name: ADP-ribosylation factor-like 6 interacting protein 4
  ENST ID: ENST00000412505
  CDS Start-End: 122-634
gagaaggcgcggggcgggctgtccggcccgcagggcggtcgaggtgggaacggagcagccccgggggcccccttgaggcggcgaggccgcgaagggcgcggggctggaggcccgcggcgccatggctcacgtcggctcccgcaagcgctcgaggagtcgcagccggtcccggggacgggggtcggaaaagagaaagaagaagagcaggaaagacacctcgaggaactgctcggcctccacatcccaagagagaagcaagcagaaggcccggaggagaacaagatccagctcctcctcctcttcttccagttcttctagctcctcttcttcctcctcgtcctcctcctcttcctccagtgatggccggaagaagcgggggaagtacaaggacaagaggaggaagaagaagaagaagaggaagaagctgaagaagaagggcaaggagaaggcggaagcacagcagagcatcatccgcaaggtggtggaccctgagacggggcgcaccaggcttattaagggagatggcgaggtcctagaggaaatcgtaaccaaagaacgacacagagagatcaacaagcaagccacccgaggggactgcctggccttccagatgcgagctgggttgcttccctgagggcccccgctggccaaggcctgtggacgacgctggcggcccagcctgggcaggtttcagggtgccagtgggaagcctgatgggtgctggtggcctttcccccgtggattggtctctggcccagcccagtctcttctcaggggcagggggtggaggttggggtcaccggcctgcttggcacccc

SEQ ID NO: 105858 - DNA, 1491 bp, Homo sapiens
  Payload ID: 752
  Gene Symbol: ARL6IP4
  Gene Name: ADP-ribosylation factor-like 6 interacting protein 4
  Uniprot ID: Q66PJ3
  ENST ID: ENST00000453766
  CDS Start-End: 17-1258
gtggggcaccagccccatgccacgttgcacgtatcagctggagcagaatcctggcttccttccggatgggcctggggtccatgcccgcgctcactgccaagatctttctggcccctacggacacgagtttgcgacctctgagtcactgggtgggcgcgtcggaaagaccagggcgcctcagtctggagctcgcagtcgtatggagagggcaggaccagccggggaggagggcggcgcgcgcgagggtcgccttcttcccagggcaccgggggcgtgggtgctgcgggcgtgcgccgagagggcagccttggaagtgggcgcagcttcggcagacacaggcgtgaggggctgcggagctcgagggccggcgcccctgcttgcctctgcgggaggtgggcgcgcccgggacggaacctggggcgtcagaacgaaaggcagcggcgccgcgcttcccagccggccagcctcccgcgcagcgccccggccggaagcctcctcgccgccgcttcctctcgagaaggcgcggggcgggctgtccggcccgcagggcggtcgagcccgcggcgccatggctcacgtcggctcccgcaagcgctcgaggagtcgcagccggtcccggggacgggggtcggaaaagagaaagaagaagagcaggaaagacacctcgaggaactgctcggcctccacatcccaaggtcgcaaggccagcacggcccctggggcggaggagagaagcaagcagaaggcccggaggagaacaagatccagctcctcctcctcttcttccagttcttctagctcctcttcttcctcctcgtcctcctcctcttcctccagtgatggccggaagaagcgggggaagtacaaggacaagaggaggaagaagaagaagaagaggaagaagctgaagaagaagggcaaggagaaggcggaagcacagcaggtggaggctctgccgggcccctcgctggaccagtggcaccgatcagctggggaggaagaggatggcccagtcctgacggatgagcagaagtcccgaatccaggccatgaagcccatgaccaaggaggagtgggatgcccggcagagcatcatccgcaaggtggtggaccctgagacggggcgcaccaggcttattaagggagatggcgaggtcctagaggaaatcgtaaccaaagaacgacacagagagatcaacaagcaagccacccgaggggactgcctggccttccagatgcgagctgggttgcttccctgagggcccccgctggccaaggcctgtggacgacgctggcggcccagcctgggcaggtttcagggtgccagtgggaagcctgatgggtgctggtggcctttcccccgtggattggtctctggcccagcccagtctcttctcaggggcagggggtggaggttggggtcaccggcctgcttggcacccccatctgaaagagcagcacttctcagctattaaaggccccctggatagac

SEQ ID NO: 105859 - DNA, 1295 bp, Homo sapiens
  Payload ID: 752
  Gene Symbol: ARL6IP4
  Gene Name: ADP-ribosylation factor-like 6 interacting protein 4
  ENST ID: ENST00000539770
  CDS Start-End: 210-857
ccctgggaaggtggggcaccagccccatgccacgttgcacgtatcagctggagcagaatcctggcttccttccggatgggcctggggtccatgcccgcgctcactgccaagatctttctggcccctacggacacgagtttgcgacctctgagtcactgggtgggcgcgtcggaaagaccagggcgcctcagtctggagctcgcagtcgtatggagagggcaggaccagccggggaggagggcggcgcgcgcgagggtcgccttcttcccagggcaccgggggcgtgggtgctgcgggcgtgcgccgagagggcagccttggaagtgggcgcagcttcggcagacacaggcgtgaggggctgcggagctcgagggccggcgcccctgcttgcctctgcgggaggtgggcgcgcccgggacggaacctggggcgtcagaacgaaaggcagcggcgccgcgcttcccagccggccagcctcccgcgcagcgccccggccggaagcctcctcgccgccgcttcctctcgagaaggcgcggggcgggctgtccggcccgcagggcggtcgagcccgcggcgccatggctcacgtcggctcccgcaagcgctcgaggagtcgcagccggtcccggggacgggggtcggaaaagagaaagaagaagagcaggaaagacacctcgaggaactgctcggcctccacatcccaaggtcgcaaggccagcacggcccctggggcggaggttcttctagctcctcttcttcctcctcgtcctcctcctcttcctccagtgatggccggaagaagcgggggaagtacaaggacaagaggaggaagaagaagaagaagaggaagaagctgaagaagaagggcaaggagaaggcggaagcacagcagagcatcatccgcaaggtggtggaccctgagacggggcgcaccaggcttattaagggagatggcgaggtcctagaggaaatcgtaaccaaagaacgacacagagagatcaacaagcaagccacccgaggggactgcctggccttccagatgcgagctgggttgcttccctgagggcccccgctggccaaggcctgtggacgacgctggcggcccagcctgggcaggtttcagggtgccagtgggaagcctgatgggtgctggtggcctttcccccgtggattggtctctggcccagcccagtctcttctcaggggcagggggtggaggttggggtcaccggcctgcttggcacccccatctgaaagagcagcacttctcagctattaaaggccccctggataga

SEQ ID NO: 105860 - DNA, 799 bp, Homo sapiens
  Payload ID: 752
  Gene Symbol: ARL6IP4
  Gene Name: ADP-ribosylation factor-like 6 interacting protein 4
  ENST ID: ENST00000413381
  CDS Start-End: 167-799
gcagaatcctggcttccttccggatgggcctggggtccatgcccgcgctcactgccaagatctttctggcccctacggacacgagtttgcgacctctgagtcactgggtgggcgcgtcggaaagaccagggcgcctcagtctggagctcgcagtccccgcggcgccatggctcacgtcggctcccgcaagcgctcgaggagtcgcagccggtcccggggacgggggtcggaaaagagaaagaagaagagcaggaaagacacctcgaggaactgctcggcctccacatcccaaggtcgcaaggccagcacggcccctggggcggaggagagaagcaagcagaaggcccggaggagaacaagatccagctcctcctcctcttcttccagttcttctagctcctcttcttcctcctcgtcctcctcctcttcctccagtgatggccggaagaagcgggggaagtacaaggacaagaggaggaagaagaagaagaagaggaagaagctgaagaagaagggcaaggagaaggcggaagcacagcaggtggaggctctgccgggcccctcgctggaccagtggcaccgatcagctggggaggaagaggatggcccagtcctgacggatgagcagaagtcccgaatccaggccatgaagcccatgaccaaggaggagtgggatgcccggcagagcatcatccgcaaggtggtggaccctgagacggggcgcaccaggcttattaagggagatggcgaggtcctagaggaaatcgtaaccaaagaacgacacagagagatcaacaag

SEQ ID NO: 105861 - DNA, 1119 bp, Homo sapiens
  Payload ID: 752
  Gene Symbol: ARL6IP4
  Gene Name: ADP-ribosylation factor-like 6 interacting protein 4
  ENST ID: ENST00000542099
  CDS Start-End: 198-1119
ggggcaccagccccatgccacgttgcacgtatcagctggagcagaatcctggcttccttccggatgggcctggggtccatgcccgcgctcactgccaagatctttctggcccctacggacacgagtttgcgacctctgagtcactgggtgggcgcgtcggaaagaccagggcgcctcagtctggagctcgcagtcgtatggagagggcaggaccagccggggaggagggcggcgcgcgcgagggtcgccttcttcccagggcaccgggggcgtgggtgctgcgggcgtgcgccgagagggcagccttggaagtgggcgcagcttcggcagacacaggcgtgaggggctgcggagctcgagggccggcgcccctgcttgcctctgcgggaggtgggcgcgcccgggacggaacctggggcgtcagaacgaaaggcagcggcgccgcgcttcccagccggccagcctcccgcgcagcgccccggccggaagcctcctcgccgccgcttcctctcgagaaggcgcggggcgggctgtccggcccgcagggcggtcgagcccgcggcgccatggctcacgtcggctcccgcaagcgctcgaggagtcgcagccggtcccggggacgggggtcggaaaagagaaagaagaagagcaggaaagacacctcgaggaactgctcggcctccacatcccaagcctcaccttctccctgcatcacagagagaagcaagcagaaggcccggaggagaacaagatccagctcctcctcctcttcttccagttcttctagctcctcttcttcctcctcgtcctcctcctcttcctccagtgatggccggaagaagcgggggaagtacaaggacaagaggaggaagaagaagaagaagaggaagaagctgaagaagaagggcaaggagaaggcggaagcacagcaggtggaggctctgccgggcccctcgctggaccagtggcaccgatcagctggggaggaagaggatggcccagtcctgacggatgagcagaagtcccgaatccaggccatgaagcccatgaccaaggaggagtgggatgcccggcagagcatcatccgcaaggtggtggaccctgagacggggcgcacca

SEQ ID NO: 105862 - DNA, 1591 bp, Homo sapiens
  Payload ID: 752
  Gene Symbol: ARL6IP4
  Gene Name: ADP-ribosylation factor-like 6 interacting protein 4
  Uniprot ID: Q66PJ3
  ENST ID: ENST00000543566
  CDS Start-End: 146-1354
ctgtcattgtggaagagttgcaacttgggggcccgagattggatgaagcgcacagccacgctttgggttacacatttgaaactcagggggcttccatattgcagtcttgagtttggtctccctgggaaggtggggcaccagccccatgccacgttgcacgtatcagctggagcagaatcctggcttccttccggatgggcctggggtccatgcccgcgctcactgccaagatctttctggcccctacggacacgagtttgcgacctctgagtcactgggtgggcgcgtcggaaagaccagggcgcctcagtctggagctcgcagtcgtatggagagggcaggaccagccggggaggagggcggcgcgcgcgagggtcgccttcttcccagggcaccgggggcgtgggtgctgcgggcgtgcgccgagagggcagccttggaagtgggcgcagcttcggcagacacaggcgtgaggggctgcggagctcgagggccggcgcccctgcttgcctctgcgggaggtgggcgcgcccgggacggaacctggggcgtcagaacgaaaggcagcggcgccgcgcttcccagccggccagcctcccgcgcagcgccccggccggaagcctcctcgccgccgcttcctctcgagaaggcgcggggcgggctgtccggcccgcagggcggtcgagcccgcggcgccatggctcacgtcggctcccgcaagcgctcgaggagtcgcagccggtcccggggacgggggtcggaaaagagaaagaagaagagcaggaaagacacctcgaggaactgctcggcctccacatcccaagagagaagcaagcagaaggcccggaggagaacaagatccagctcctcctcctcttcttccagttcttctagctcctcttcttcctcctcgtcctcctcctcttcctccagtgatggccggaagaagcgggggaagtacaaggacaagaggaggaagaagaagaagaagaggaagaagctgaagaagaagggcaaggagaaggcggaagcacagcaggtggaggctctgccgggcccctcgctggaccagtggcaccgatcagctggggaggaagaggatggcccagtcctgacggatgagcagaagtcccgaatccaggccatgaagcccatgaccaaggaggagtgggatgcccggcagagcatcatccgcaaggtggtggaccctgagacggggcgcaccaggcttattaagggagatggcgaggtcctagaggaaatcgtaaccaaagaacgacacagagagatcaacaagcaagccacccgaggggactgcctggccttccagatgcgagctgggttgcttccctgagggcccccgctggccaaggcctgtggacgacgctggcggcccagcctgggcaggtttcagggtgccagtgggaagcctgatgggtgctggtggcctttcccccgtggattggtctctggcccagcccagtctcttctcaggggcagggggtggaggttggggtcaccggcctgcttggcacccccatctgaaagagcagcacttctcagctattaaaggccccctggatagactttc

SEQ ID NO: 105863 - DNA, 2101 bp, Homo sapiens
  Payload ID: 753
  Gene Symbol: ARL6IP5
  Gene Name: ADP-ribosylation factor-like 6 interacting protein 5
  Uniprot ID: O75915
  ENST ID: ENST00000273258
  CDS Start-End: 105-671
cgaccgagacggagccgctgtcaactctccaactcagctcagctgatcggttgccgccgccgccgccgccagattctggaggcgaagaacgcaaagctgagaacatggacgttaatatcgccccactccgcgcctgggacgatttcttcccgggttccgatcgctttgcccggccggacttcagggacatttccaaatggaacaaccgcgtagtgagcaacctgctctattaccagaccaactacctggtggtggctgccatgatgatttccattgtggggtttctgagtcccttcaacatgatcctgggaggaatcgtggtggtgctggtgttcacagggtttgtgtgggcagcccacaataaagacgtccttcgccggatgaagaagcgctaccccacgacgttcgttatggtggtcatgttggcgagctatttccttatctccatgtttggaggagtcatggtctttgtgtttggcattacttttcctttgctgttgatgtttatccatgcatcgttgagacttcggaacctcaagaacaaactggagaataaaatggaaggaataggtttgaagaggacaccgatgggcattgtcctggatgccctagaacagcaggaagaaggcatcaacagactcactgactatatcagcaaagtgaaggaataaacataacttacctgagctagggttgcagcagaaattgagttgcagcttgcccttgtccagacctatgttctgcttgcgtttttgaaacaggaggtgcacgtaccacccaattatctatggcagcatgcatgtataggccgaactattatcagctctgatgtttcagagagaagacctcagaaaccgaaagaaaaccaccaccctcctattgtgtctgaagtttcacgtgtgtttatgaaatctaatgggaaatggatcacacgatttctttaagggaattaaaaaaaataaaagaattacggcttttacagcaacaatacgattatcttataggaaaaaaaaaatcattgtaaagtatcaagacaatacgagtaaatgaaaaggctgttaaagtagatgacatcatgtgttagcctgttcctaatcccctagaattgtaatgtgtgggatataaattagtttttattattctcttaaaaatcaaagatgatctctatcactttgccacctgtttgatgtgcagtggaaactggttaagccagttgttcatacttcctttacaaatataaagatagctgtttaggatattttgttacatttttgtaaatttttgaaatgctagtaatgtgttttcaccagcaagtatttgttgcaaacttaatgtcattttccttaagatggttacagctatgtaacctgtattattctggacggacttattaaaatacaaacagacaaaaaataaaacaaaacttgagttctatttaccttgcacattttttgttgttacagtgaaaaaaatggtccaagaaaatgtttgccatttttgcattgtttcgtttttaactggaacatttagaaagaaggaaatgaatgtgcattttattaattccttaggggcacaaggaggacaataatagctgatcttttgaaatttgaaaaacgtctttagatgaccaagcaaaaagactttaaaaaatggtaatgaaaatggaatgcagctactgcagctaataaaaaattttagatagcaattgttacaaccatatgcctttatagctagacattagaattatgatagcatgagtttatacattctattatttttcctccctttctcatgtttttataaataggtaataaaaaatgttttgcctgccaattgaatgatttcgtagctgaagtagaaacatttaggtttctgtagcattaaattgtgaagacaactggagtggtacttactgaagaaactctctgtatgtcctagaataagaagcaatgatgtgctgcttctgatttttcttgcattttaaattctcagccaacctacagccatgatctttagcacagtgatatcaccatgacttcacagacatggtctagaatctgtacccttacccacatatgaagaataaaattgattaaaggtt

SEQ ID NO: 105864 - DNA, 387 bp, Homo sapiens
  Payload ID: 753
  Gene Symbol: ARL6IP5
  Gene Name: ADP-ribosylation factor-like 6 interacting protein 5
  ENST ID: ENST00000485444
  CDS Start-End: 7-186
gagaacatggacgttaatatcgccccactccgcgcctgggacgatttcttcccgggttccgatcgctttgcccggccggacttcagggacatttccaaatggaacaaccgcgtagtgagcaacctgctctattaccagaccaactacctggtggtggctgccatgatgatttccattgtgggatagaaccatgtagctgctgaaggaatgagcccatgatttctcagctgaagtaactcctcaccatgtggcctgatcatttggcctatggagatgttgcaggagggtggaattgacagctgccactttatgctttcagttactcaagatggtttctgagtcccttcaacatgatcctgggaggaatcgtggtggtgctggtgttca

SEQ ID NO: 105865 - DNA, 551 bp, Homo sapiens
  Payload ID: 753
  Gene Symbol: ARL6IP5
  Gene Name: ADP-ribosylation factor-like 6 interacting protein 5
  ENST ID: ENST00000484921
  CDS Start-End: 34-315
gattctggaggcgaagaacgcaaagctgagaacatggacgttaatatcgccccactccgcgcctgggacgatttcttcccgggttccgatcgctttgcccggccggacttcagggacatttccaaatggaacaaccgcgtagtgagcaacctgctctattaccagaccaactacctggtggtggctgccatgatgatttccattgtggggctggagtgcaatggcgtgatctcagctcactgcaacctccaccttctgagttcaagtgattctcctgcctcagcctcccaagtagctgggattacaggtttctgagtcccttcaacatgatcctgggaggaatcgtggtggtgctggtgttcacagggtttgtgtgggcagcccacaataaagacgtccttcgccggatgaagaagcgctaccccacgacgttcgttatggtggtcatgttggcgagctatttccttatctccatgtttggaggagtcatggtctttgtgtttggcattacttttcctttgctgttgatgtttatccatgcatcgttgaga

SEQ ID NO: 105866 - DNA, 1449 bp, Homo sapiens
  Payload ID: 753
  Gene Symbol: ARL6IP5
  Gene Name: ADP-ribosylation factor-like 6 interacting protein 5
  ENST ID: ENST00000478935
  CDS Start-End: 28-294
ggaggcgaagaacgcaaagctgagaacatggacgttaatatcgccccactccgcgcctgggacgatttcttcccgggttccgatcgctttgcccggccggacttcagggacatttccaaatggaacaaccgcgtagtgagcaacctgctctattaccagaccaactacctggtggtggctgccatgatgatttccattgtggggtttctgagtcccttcaaccctcctattgtgtctgaagtttcacgtgtgtttatgaaatctaatgggaaatggatcacacgatttctttaagggaattaaaaaaaataaaagaattacggcttttacagcaacaatacgattatcttataggaaaaaaaaaatcattgtaaagtatcaagacaatacgagtaaatgaaaaggctgttaaagtagatgacatcatgtgttagcctgttcctaatcccctagaattgtaatgtgtgggatataaattagtttttattattctcttaaaaatcaaagatgatctctatcactttgccacctgtttgatgtgcagtggaaactggttaagccagttgttcatacttcctttacaaatataaagatagctgtttaggatattttgttacatttttgtaaatttttgaaatgctagtaatgtgttttcaccagcaagtatttgttgcaaacttaatgtcattttccttaagatggttacagctatgtaacctgtattattctggacggacttattaaaatacaaacagacaaaaaataaaacaaaacttgagttctatttaccttgcacattttttgttgttacagtgaaaaaaatggtccaagaaaatgtttgccatttttgcattgtttcgtttttaactggaacatttagaaagaaggaaatgaatgtgcattttattaattccttaggggcacaaggaggacaataatagctgatcttttgaaatttgaaaaacgtctttagatgaccaagcaaaaagactttaaaaaatggtaatgaaaatggaatgcagctactgcagctaataaaaaattttagatagcaattgttacaaccatatgcctttatagctagacattagaattatgatagcatgagtttatacattctattatttttcctccctttctcatgtttttataaataggtaataaaaaatgttttgcctgccaattgaatgatttcgtagctgaagtagaaacatttaggtttctgtagcattaaattgtgaagacaactggagtggtacttactgaagaaactctctgtatgtcctagaataagaagcaatgatgtgctgcttctgatttttcttgcattttaaattctcagccaacctacagccatgatctttagcacagtgatatcaccatgacttcacagacatggtctagaatctgtacccttacccacatatgaagaataaaattgattaaagg

SEQ ID NO: 105867 - DNA, 2805 bp, Homo sapiens
  Payload ID: 754
  Gene Symbol: ARL6IP6
  Gene Name: ADP-ribosylation factor-like 6 interacting protein 6
  Uniprot ID: Q8N6S5
  ENST ID: ENST00000326446
  CDS Start-End: 712-1392
cggtgctcgaggcggaggggaggaggcggggaaggcgaaaggaggggttcggaggagagggttcgatctccgtacgcaccaggtggagagcgcgcgcctggggaaggaggcgtgtcgagtagcgggagggaagttgtagtacgggtggggagaaccacactaaagggagatgggggtgagcagttaaggaaccgcgagagcgccaggtagagaggtgcccttaatgggggaacctggagaagagtgtgagcgtagtggggaagaagggagaagacaaataggttcgggaatgtgtctccgagggcgcgagcgggcgctaggacccggcgtcgaaaagatgaggctttggggctgtcggggcgcgcgctcccgttggtgacgcgggggtggcggaggtctccggccgggacgaagccccgcagggagtggatactcgacagccttcggcctccgctcgcttctccctgcgcgctttcctgctcccctttccggctacagccctggggtcgagctctggtcgaagcgcattccgcctctcctttggccctgcggcttcctttgcaacccgccgcccacccttgctctccgtggtttacccctgggctctgaggcctggtggtagcggccactgccgcggattggctgttgcggacccggggcggggcaggtgggagaggctcgttctccgcgggtttcgttgtgtttcgcgccatgtcgtttgctgagagcgggtggcggtcggctctgcggcgccgcggtcccggcaccccgggccctgtggctcggccatcgtattcctcctttactcagggggacagctggggtgaaggcgaagtcgacgaggaggagggatgcgaccaagtggcccgcgacctgcgggcggagttctcggctggggcgtggtcagagcccagaaagcgctcggtgctcccgccggacgggaacgggtcgcccgttctgcccgataagcgcaatggtatctttcccgcggccgcgggcagcagagcccagcctcggcggtggccggtccaggtcctctctattctctgctcgctgctcttcgccattcttctcgccttcctcctcgccatcgcctacttgatcgttaaagagttgcatgctgagaatttgaaaaatgaagatgatgtagacactggactattaggattctggactctacttataatatccctaactgctggattctcctgttgcagcttttcttggacagtgacttactttgattcttttgaaccaggaatgtttcctcctactcctctttcacctgccaggttcaagaaactgactggacattctttccacatgggctatagcatggcgattttgaatggcatcgtagctgctcttactgtagcatggtgcctcatgtaaacccacactggagcgatattgttggcaaaacttaatcatgattgttttgtaataacaagaaggagcatcactgtctactcagaagactgagaaacctgctgttcattatgtagttcagatatttatcacaatcatcctcattatggaagaccttttaaagcattgttttagaatgtctgagtattaagatacagattaattgggaatatctgagtattaagtactttcttcagagtataagatgtttacctcatctttttacttttgtgtgtgtagttctttcaagttgtaggaaacattttaatggaatttaaactcaaaaacttgaatacaggacaatgcttgccttttcatgtatgtactacattttttgctaagaaatactgatatttctgtttagttgagctagaaatacttcttatttatacatttaggaaagcaaataatgcctactactccgacttttatagaagctacttttaaatcagaatatttaatttttgatattcatataattaatagaagttgcatttatattttttatggggcatagttccttatgtgtttttttaatgtattttcatactacatactgaatttgtatgtttttaaaattgttacatctagacaactgtaaacattatttttttagctagtgcaaacctagtacctgccatttttactaatttttgtctttaaaaaaagcaaaaaagcacattgacctaagttgaaaattaagtaagtttatttttaacaaaaaatgcctgaaaaaagctaaattatttaagtcattaagatattgagaaaaaatttgaaatttttactatttctgtttccacaattccaaatatttatcttggtgtatatattgttactttaacagaacttgcattattttgtttttaataaatataaacatgaaatttttgtatgtgagaatgattgaactagtttgttcttaatctcaaaaatttagttaccaaagtagaaaaggtattttgatactagatattaaaaactacatatagttaatataattttataatttttgtaattaaatgtgctcctgtaattgtgatattttgttttctaagtaattaagccttaatttttcccctatgttactaaagacttttaatgtttagaaagttacctcagttttagaaagatggactacttacaaagctgttttccctggccataggaaaacttacaataagaaaccattaagtagtcaaactgcttattcaggctaagtgggaaatgaatttgtgcagtgtgttcccttaattatctactgaatgttgttaccgactaaacaaggtttctaaaagtctcgcatttcttttactattcaaaactctttggttggaaatgactaatactgctccaatttaaattatctgaaatgtg

SEQ ID NO: 105868 - DNA, 465 bp, Homo sapiens
  Payload ID: 754
  Gene Symbol: ARL6IP6
  Gene Name: ADP-ribosylation factor-like 6 interacting protein 6
  ENST ID: ENST00000425034
  CDS Start-End: 1-116
tctgctcgctgctcttcgccattcttctcgccttcctcctcgccatcgcctacttgatcgttaaagcgtttagtgggctacagatggcatggcatctaaaaccttacaatgcttgattttcatacagaagacactttggccagttgatgtgggttttacctcttcataaaatgagttgcatgctgagaatttgaaaaatgaagatgatgtagacactggactattaggattctggactctacttataatatccctaactgctggattctcctgttgcagcttttcttggacagtgacttactttgattcttttgaaccaggaatgtttcctcctactcctctttcacctgccaggttcaagaaactgactggacattctttccacatgggctatagcatggcgattttgaatggcatcgtagctgctcttactgtagcatggtgcctcatgtaaacccacactgg

SEQ ID NO: 105869 - DNA, 479 bp, Homo sapiens
  Payload ID: 754
  Gene Symbol: ARL6IP6
  Gene Name: ADP-ribosylation factor-like 6 interacting protein 6
  ENST ID: ENST00000455875
  CDS Start-End: 1-201
gcccagcctcggcggtggccggtccaggtcctctctattctctgctcgctgctcttcgccattcttctcgccttcctcctcgccatcgcctacttgatcgttaaagagttgcatgctgagaatttgaaaaatgaagatgatgtagacactggactattaggaattatctgtattagcaggaaattttcccttatgctgtaagttgcaaaggattctggactctacttataatatccctaactgctggattctcctgttgcagcttttcttggacagtgacttactttgattcttttgaaccaggaatgtttcctcctactcctctttcacctgccaggttcaagaaactgactggacattctttccacatgggctatagcatggcgattttgaatggcatcgtagctgctcttactgtagcatggtgcctcatgtaaacccacactggagcgatattgttggcaaaacttaatcatgat

SEQ ID NO: 105870 - DNA, 1793 bp, Homo sapiens
  Payload ID: 755
  Gene Symbol: ARL8A
  Gene Name: ADP-ribosylation factor-like 8A
  Uniprot ID: Q96BM9
  ENST ID: ENST00000272217
  CDS Start-End: 170-730
cggcgagccgattccggggcagcgagtcgtcggcagccgcgctcgagcctccgcccgcaccgagccgcgggacccgggccgtaccggggaggggccgctccgggccgcagcgcgagggcagcgaggggcggcggggacctggcaccgggcggggccggcggcagcgaccatgatcgctttgttcaacaagctgctggactggttcaaggccctattctggaaggaggagatggagctcacgctggtcgggcttcagtactcgggcaagaccaccttcgtcaacgtgatcgcgtcaggacagttcaacgaggacatgatccccaccgtgggtttcaacatgcgcaaaatcaccaaagggaatgtgactatcaagctctgggacattgggggacagccgcgtttccgcagcatgtgggagcgctactgccgaggagtgagcgccatcgtgtacatggtggatgctgctgaccaggagaagattgaggcctctaagaacgagctccacaacctactggacaaacctcagctgcagggcatcccggtcttagtcctgggtaacaagcgagaccttccgggagcattggatgagaaggagctgattgagaaaatgaatctgtctgccatccaggaccgagagatctgctgctactccatctcttgcaaagaaaaggacaacattgacatcaccctacagtggcttattcaacactcgaagtcacggagaagctgagactccagcccttctccctcagaccagggaccgtcatcatctaaacctgaagccgagctccccgcccacccctgtcgtccccctaagcccacccctcctcacccagtgtgaggagggccctctggggaccccagagtcctgttctgctgaggtttgaactcctgtttttattgtaaaataaattgccccccattctggtcccctaacttctcacccttccccgctgcctttgtcccatcacccagccctgcctccctcccagcagccctgggccacagcccccgcccctggcttttccccggcccgctcttgtacctcccttttcaacactctctgttattgtcctgtgtgtacagtatatatatgtatatatattttaattttttaatttaagcaaagactaaaatcaaccatttgatgctgcaggggcctttcaggatctgggagggggcagtctggagagaaggagggagacgcaggtggacttggggcaagttcagatcagaagaggtgcaggctggcacctgcggcaggtaccagcctgggcactggtggccgcctccctgtcccgtgtgtttccaccgcccaatctggcttgtcctggcagtgcttgaatgccacaggctggcaggggcctctgggggcccctcccctcgacccccagcctgggtagagccaccaggtacgacgaccaggtaccagaaaccaccaggcacacggggcagaaagccagcgtccatgccccagcagccccctcctgcctgttcctggctcccagctcccgcccctccccagggcccccacctccacggcccacttcattttctgttctcattttgcagagttgcacaaggagagaactcagcatggggggttggttctttgggttctgtttgtttatttgtttaatttaatgatttgtaaagtgatgttcctcttccttttttacacttttcagctcatatttaacctctgtttggaaaatgattcttgtaactgtacatttttttgcttcctaataacaatgacaacaaaaaaaataaatgaccagttttgtgttggg

SEQ ID NO: 105871 - DNA, 1727 bp, Homo sapiens
  Payload ID: 755
  Gene Symbol: ARL8A
  Gene Name: ADP-ribosylation factor-like 8A
  ENST ID: ENST00000614750
  CDS Start-End: 172-615
atcggcgagccgattccggggcagcgagtcgtcggcagccgcgctcgagcctccgcccgcaccgagccgcgggacccgggccgtaccggggaggggccgctccgggccgcagcgcgagggcagcgaggggcggcggggacctggcaccgggcggggccggcggcagcgaccatgatcgctttgttcaacaagctgctggactggttcaaggccctattctggaaggaggagatggagctcacgctggtcgggcttcagtactcgggcaagaccaccttcgtcaacgtgatcgcgtcaggacagttcaacgaggacatgatccccaccgtgggtttcaacatgcgcaaaatcaccaaagggaatgtgactatcaagctctgggacattgggggacagccgcgtttccgcagcatgtgggagcgctactgccgaggagtgagcgccatcgtgtacatggtggatgctgctgaccaggagaagattgaggcctctaagaacgagctccacaacctactggacaaacctcagctgcagggcatcccggaatctgtctgccatccaggaccgagagatctgctgctactccatctcttgcaaagaaaaggacaacattgacatcaccctacagtggcttattcaacactcgaagtcacggagaagctgagactccagcccttctccctcagaccagggaccgtcatcatctaaacctgaagccgagctccccgcccacccctgtcgtccccctaagcccacccctcctcacccagtgtgaggagggccctctggggaccccagagtcctgttctgctgaggtttgaactcctgtttttattgtaaaataaattgccccccattctggtcccctaacttctcacccttccccgctgcctttgtcccatcacccagccctgcctccctcccagcagccctgggccacagcccccgcccctggcttttccccggcccgctcttgtacctcccttttcaacactctctgttattgtcctgtgtgtacagtatatatatgtatatatattttaattttttaatttaagcaaagactaaaatcaaccatttgatgctgcaggggcctttcaggatctgggagggggcagtctggagagaaggagggagacgcaggtggacttggggcaagttcagatcagaagaggtgcaggctggcacctgcggcaggtaccagcctgggcactggtggccgcctccctgtcccgtgtgtttccaccgcccaatctggcttgtcctggcagtgcttgaatgccacaggctggcaggggcctctgggggcccctcccctcgacccccagcctgggtagagccaccaggtacgacgaccaggtaccagaaaccaccaggcacacggggcagaaagccagcgtccatgccccagcagccccctcctgcctgttcctggctcccagctcccgcccctccccagggcccccacctccacggcccacttcattttctgttctcattttgcagagttgcacaaggagagaactcagcatggggggttggttctttgggttctgtttgtttatttgtttaatttaatgatttgtaaagtgatgttcctcttccttttttacacttttcagctcatatttaacctctgtttggaaaatgattcttgtaactgtacatttttttgcttcctaataacaatgacaacaaaaaaaataaatgaccagttttgtgttggg

SEQ ID NO: 105872 - DNA, 3005 bp, Homo sapiens
  Payload ID: 756
  Gene Symbol: ARL8B
  Gene Name: ADP-ribosylation factor-like 8B
  Uniprot ID: Q9NVJ2
  ENST ID: ENST00000256496
  CDS Start-End: 247-807
ggattggccgcgccgctcttgccgtgggtgccgacggcggcgccgggacgggcgtggggggtagggcgagtcatatgatccgctcggcttcctgggtctggctgctgccgcccgccggtgtccgcccgtgtcgcgccggggcaccaaggagccgttggagggtccgggcggaggcccgctcgtgtggaagtcgtcgacgccgccgctcgtccgtcctcccgtccgttctcgctcccggccgccatcatgctggcgctcatctcccgcctgctggactggttccgttcgctcttctggaaggaagagatggagctgacgctcgtggggctgcagtactcgggcaagaccaccttcgtcaatgtcatcgcgtcaggtcaattcagtgaagatatgatacccacagtgggcttcaacatgaggaaggtaactaaaggtaacgtcacaataaagatctgggacataggaggacaaccccgatttcgaagcatgtgggagcggtattgcagaggagtcaatgctattgtttacatgatagatgctgcagatcgtgaaaagatagaagcttcccgaaatgagctacataatcttctagataaaccacagttacaaggaattccagtgctagtgcttggaaacaagagagatcttcctaatgccttggatgagaaacagctaattgaaaaaatgaatctgtctgctattcaggatagagaaatttgctgctattcaatttcttgcaaagaaaaggataatatagatatcacacttcagtggcttattcagcattcaaaatctagaagaagctgaagcatctcctgaagtcttccagtccttcttggctataatcctagaattattgtccgttcctctgaagtaattcccagaatacggtccttcctaaaccccagaaattgcctttttcagagtttatttctcatgtgcactgctgaagatgaatatccctaatccttcataaagaatcagctagagttgtcatgataaagtcagcacacacaaaaaggcttcttacacatacctgtcttaaaccatgtgtagagctttaaaaacagaaaaaaaaccccatatacttatgaccatcttaaatcaagaaaattgcatatttccattctggtctttctgggccagatttttatattggttttcagtaaatgtctatctataatatttcattatagagtccagtagcttaatactgacactgacttgatacagcatgaagtttctagtgccacacacagtatttagaaaacctttaggcgtgaatgactcatgtgggatatatgtaaacataatgtttattttatctcacaaatgcatgtgaaatgtataattacatcttaggaatccaaaatggtctgcagagagtgagcggaggcaccagatcaatgttggttctttgcactggtgagattctgcctgatgaatattaaagatatcctgctttctgagaactctatcaccagatggcagttgggatatgggaggaactaaagcatcctgttttgtatctgtccagatcattatttctgtctcttgttttttcttcctggttcaggatacttttttaaggggttgagaattgaagattttccaaaagcgttcatgaatttagagcattccacccaatataataaaacctgttaagaatgtcagtctttgttcaaacatctgtttgttctatctccagtcattaaatcagtgctgctgcatgacactcttaactcctgactttttatatccagtcataaagttgactttcagcacaaaagatacttataaacaaataaaaaatttttatttttctctcttactgatgtaagctttggcactcttttgactggtgccattagacatcttgattattgtgacaactctagacctgcctgctttatctaatgtaatcatgctcaatgtctacaggttgtttaataatcagtcacacagagaactgaggaactgatgctgtttgtttgcttctatgatacagagatgtctaaaaacttcaaatggacatgttttgtagtttagcgacttccgtatacataaagggacatattaatactggttcatttgtaaattattattcatatagaccactgtagtagataaaactctatggtacacctgcttatgtgttgcctcacactgtgtgtgattttgtttcttttgttaagcagcacttatgtagactgcatttccaaatgtgttgagcactcagagtgtagtcaacagtaagttcttttaatgaatatcagttttaatttatagactgccatggccttaaaaatattctgtacaatatactgcactgtgttgcacagacactacttgcttttctccattcatatttttatgagtagaatctgggcttttaaatttctcttcttattctttgaagcatgttgcatactaccctggtgggatggatggttctgtaaatgaagggatatttaaacttgctactgttgttcaacaccattaatggtcagtgtgaaccattacaaagaatgtggcaacttgcttgtgcctaaaaggaggaattggaactagaatgtgtgactctgtggggactgcataggtttgttaattgacctatagctaaaccttaatgtgtttgtgtgtctatacattgctttccgcatttcaagacatccagacgctattaccaacattttcctgtgcattaacctctgcatgtgaaaacttttaacagttactgaactatgtaaatatgtgaatttttttatttaggtggatgcattttttgtctgtttactgctcttctcagctttattcaataaacttgcattttaagggttgtattggcaattttaacttaaaatgtgcatcatgatggaaggtgcagacttttttggaagtttccgagaggagggtctatagaccatttgtcagaaatcagatcagccctcaaagaatggggtctgtgggctagttaaaatagaaataaacttttaaaatatcca

SEQ ID NO: 105873 - DNA, 1641 bp, Homo sapiens
  Payload ID: 756
  Gene Symbol: ARL8B
  Gene Name: ADP-ribosylation factor-like 8B
  ENST ID: ENST00000455168
  CDS Start-End: 3-314
atatgatccgctcggcttcctgggtctggctgctgccgcccgccggtgtccgcccgtgtcgcgccggggcaccaaggagccgttggagggtccgggcggaggcccgctcgtgtggaagtcgtcgacgccgccgctcgtccgtcctcccgtccgttctcgctcccggccgccatcatgctggcgctcatctcccgcctgctggactggttccgttcgctcttctggaaggaagagatggagctgacgctcgtggggctgcagtactcgggcaagaccaccttcgtcaatgtcatcgcgtcaggtcaattcagtgaagatatgatacccacagtgggcttcaacatgaggaagatctgggacataggaggacaaccccgatttcgaagcatgtgggagcggtattgcagaggagtcaatgctattgtttacatgatagatgctgcagatcgtgaaaagatagaagcttcccgaaatgagctacataatcttctagataaaccacagttacaaggaattccagtgctagtgcttggaaacaagagagatcttcctaatgccttggatgagaaacagctaattgaaaaaatgaatctgtctgctattcaggatagagaaatttgctgctattcaatttcttgcaaagaaaaggataatatagatatcacacttcagtggcttattcagcattcaaaatctagaagaagctgaagcatctcctgaagtcttccagtccttcttggctataatcctagaattattgtccgttcctctgaagtaattcccagaatacggtccttcctaaaccccagaaattgcctttttcagagtttatttctcatgtgcactgctgaagatgaatatccctaatccttcataaagaatcagctagagttgtcatgataaagtcagcacacacaaaaaggcttcttacacatacctgtcttaaaccatgtgtagagctttaaaaacagaaaaaaaaccccatatacttatgaccatcttaaatcaagaaaattgcatatttccattctggtctttctgggccagatttttatattggttttcagtaaatgtctatctataatatttcattatagagtccagtagcttaatactgacactgacttgatacagcatgaagtttctagtgccacacacagtatttagaaaacctttaggcgtgaatgactcatgtgggatatatgtaaacataatgtttattttatctcacaaatgcatgtgaaatgtataattacatcttaggaatccaaaatggtctgcagagagtgagcggaggcaccagatcaatgttggttctttgcactggtgagattctgcctgatgaatattaaagatatcctgctttctgagaactctatcaccagatggcagttgggatatgggaggaactaaagcatcctgttttgtatctgtccagatcattatttctgtctcttgttttttcttcctggttcaggatacttttttaaggggttgagaattgaagattttccaaaagcgttcatgaatttagagcattccacccaatataataaaacctgttaagaatgtcagtctttgttcaaacatctgtttgttctatctccagtcattaaatcagtgctgctgcatgacactctt

SEQ ID NO: 105874 - DNA, 1684 bp, Homo sapiens
  Payload ID: 756
  Gene Symbol: ARL8B
  Gene Name: ADP-ribosylation factor-like 8B
  Uniprot ID: Q9NVJ2
  ENST ID: ENST00000419534
  CDS Start-End: 171-662
gatccgctcggcttcctgggtctggctgctgccgcccgccggtgtccgcccgtgtcgcgccggggcaccaaggagccgttggagggtccgggcggaggcccgctcgtgtggaagtcgtcgacgccgccgctcgtccgtcctcccgtccgttctcgctcccggccgccatcatgctggcgctcatctcccgcctgctggactggttccgttcgctcttctggaaggaagagatggagctgacgctcgtggggctgcagtactcgggcaagaccaccttcgtcaatgtcatcgcgtcaggtcaattcagtgaagatatgatacccacagtgggcttcaacatgaggaaggtaactaaaggtaacgtcacaataaagatctgggacataggaggacaaccccgatttcgaagcatgtgggagcggtattgcagaggagtcaatgctattgtttacatgatagatgctgcagatcgtgaaaagatagaagcttcccgaaatgagctacataatcttctagataaaccacagttacaaggaattccaatatcacacttcagtggcttattcagcattcaaaatctagaagaagctgaagcatctcctgaagtcttccagtccttcttggctataatcctagaattattgtccgttcctctgaagtaattcccagaatacggtccttcctaaaccccagaaattgcctttttcagagtttatttctcatgtgcactgctgaagatgaatatccctaatccttcataaagaatcagctagagttgtcatgataaagtcagcacacacaaaaaggcttcttacacatacctgtcttaaaccatgtgtagagctttaaaaacagaaaaaaaaccccatatacttatgaccatcttaaatcaagaaaattgcatatttccattctggtctttctgggccagatttttatattggttttcagtaaatgtctatctataatatttcattatagagtccagtagcttaatactgacactgacttgatacagcatgaagtttctagtgccacacacagtatttagaaaacctttaggcgtgaatgactcatgtgggatatatgtaaacataatgtttattttatctcacaaatgcatgtgaaatgtataattacatcttaggaatccaaaatggtctgcagagagtgagcggaggcaccagatcaatgttggttctttgcactggtgagattctgcctgatgaatattaaagatatcctgctttctgagaactctatcaccagatggcagttgggatatgggaggaactaaagcatcctgttttgtatctgtccagatcattatttctgtctcttgttttttcttcctggttcaggatacttttttaaggggttgagaattgaagattttccaaaagcgttcatgaatttagagcattccacccaatataataaaacctgttaagaatgtcagtctttgttcaaacatctgtttgttctatctccagtcattaaatcagtgctgctgcatgacactcttaactcctgactttttatatccagtcataaagttgactttcagcacaaaagatacttataaacaaataaaaaatttttatttttctctcttactgatgtaagctttggcactcttttgactggtgccattagacatcttgattattgtgacaactctaga

SEQ ID NO: 105875 - DNA, 709 bp, Homo sapiens
  Payload ID: 756
  Gene Symbol: ARL8B
  Gene Name: ADP-ribosylation factor-like 8B
  ENST ID: ENST00000429403
  CDS Start-End: 46-354
gccgacggcggcgccgggacgggcgtggggggtagggcgagtcatatgatccgctcggcttcctgggtctggctgctgccgcccgccggtgtccgcccgtgtcgcgccggggcaccaaggagccgttggagggtccgggcggaggcccgctcgtgtggaagtcgtcgacgccgccgctcgtccgtcctcccgtccgttctcgctcccggccgccatcatgctggcgctcatctcccgcctgctggactggttccgttcgctcttctggaaggaagagatggagctgacgctcgtggggctgcagtactcgggcaagaccaccttcgtcaatgtcatcgcgaccaagaatcttgaaagccaaatgttctcattaagaagctgttagagtgcaataatgcattctaaatgcctgtcttagaagatatttcacaagttaatggattttttaagtttttcaaagatatatcaggtcaattcagtgaagatatgatacccacagtgggcttcaacatgaggaaggtaactaaaggtaacgtcacaataaagatctgggacataggaggacaaccccgatttcgaagcatgtgggagcggtattgcagaggagtcaatgctattgtttacatgatagatgctgcagatcgtgaaaagatagaagcttcccgaaatgagctacataatcttctagataaaccacagttacaaggaa

SEQ ID NO: 105876 - DNA, 2981 bp, Homo sapiens
  Payload ID: 756
  Gene Symbol: ARL8B
  Gene Name: ADP-ribosylation factor-like 8B
  Uniprot ID: Q9NVJ2
  ENST ID: ENST00000611208
  CDS Start-End: 222-782
gggtgccgacggcggcgccgggacgggcgtggggggtagggcgagtcatatgatccgctcggcttcctgggtctggctgctgccgcccgccggtgtccgcccgtgtcgcgccggggcaccaaggagccgttggagggtccgggcggaggcccgctcgtgtggaagtcgtcgacgccgccgctcgtccgtcctcccgtccgttctcgctcccggccgccatcatgctggcgctcatctcccgcctgctggactggttccgttcgctcttctggaaggaagagatggagctgacgctcgtggggctgcagtactcgggcaagaccaccttcgtcaatgtcatcgcgtcaggtcaattcagtgaagatatgatacccacagtgggcttcaacatgaggaaggtaactaaaggtaacgtcacaataaagatctgggacataggaggacaaccccgatttcgaagcatgtgggagcggtattgcagaggagtcaatgctattgtttacatgatagatgctgcagatcgtgaaaagatagaagcttcccgaaatgagctacataatcttctagataaaccacagttacaaggaattccagtgctagtgcttggaaacaagagagatcttcctaatgccttggatgagaaacagctaattgaaaaaatgaatctgtctgctattcaggatagagaaatttgctgctattcaatttcttgcaaagaaaaggataatatagatatcacacttcagtggcttattcagcattcaaaatctagaagaagctgaagcatctcctgaagtcttccagtccttcttggctataatcctagaattattgtccgttcctctgaagtaattcccagaatacggtccttcctaaaccccagaaattgcctttttcagagtttatttctcatgtgcactgctgaagatgaatatccctaatccttcataaagaatcagctagagttgtcatgataaagtcagcacacacaaaaaggcttcttacacatacctgtcttaaaccatgtgtagagctttaaaaacagaaaaaaaaccccatatacttatgaccatcttaaatcaagaaaattgcatatttccattctggtctttctgggccagatttttatattggttttcagtaaatgtctatctataatatttcattatagagtccagtagcttaatactgacactgacttgatacagcatgaagtttctagtgccacacacagtatttagaaaacctttaggcgtgaatgactcatgtgggatatatgtaaacataatgtttattttatctcacaaatgcatgtgaaatgtataattacatcttaggaatccaaaatggtctgcagagagtgagcggaggcaccagatcaatgttggttctttgcactggtgagattctgcctgatgaatattaaagatatcctgctttctgagaactctatcaccagatggcagttgggatatgggaggaactaaagcatcctgttttgtatctgtccagatcattatttctgtctcttgttttttcttcctggttcaggatacttttttaaggggttgagaattgaagattttccaaaagcgttcatgaatttagagcattccacccaatataataaaacctgttaagaatgtcagtctttgttcaaacatctgtttgttctatctccagtcattaaatcagtgctgctgcatgacactcttaactcctgactttttatatccagtcataaagttgactttcagcacaaaagatacttataaacaaataaaaaatttttatttttctctcttactgatgtaagctttggcactcttttgactggtgccattagacatcttgattattgtgacaactctagacctgcctgctttatctaatgtaatcatgctcaatgtctacaggttgtttaataatcagtcacacagagaactgaggaactgatgctgtttgtttgcttctatgatacagagatgtctaaaaacttcaaatggacatgttttgtagtttagcgacttccgtatacataaagggacatattaatactggttcatttgtaaattattattcatatagaccactgtagtagataaaactctatggtacacctgcttatgtgttgcctcacactgtgtgtgattttgtttcttttgttaagcagcacttatgtagactgcatttccaaatgtgttgagcactcagagtgtagtcaacagtaagttcttttaatgaatatcagttttaatttatagactgccatggccttaaaaatattctgtacaatatactgcactgtgttgcacagacactacttgcttttctccattcatatttttatgagtagaatctgggcttttaaatttctcttcttattctttgaagcatgttgcatactaccctggtgggatggatggttctgtaaatgaagggatatttaaacttgctactgttgttcaacaccattaatggtcagtgtgaaccattacaaagaatgtggcaacttgcttgtgcctaaaaggaggaattggaactagaatgtgtgactctgtggggactgcataggtttgttaattgacctatagctaaaccttaatgtgtttgtgtgtctatacattgctttccgcatttcaagacatccagacgctattaccaacattttcctgtgcattaacctctgcatgtgaaaacttttaacagttactgaactatgtaaatatgtgaatttttttatttaggtggatgcattttttgtctgtttactgctcttctcagctttattcaataaacttgcattttaagggttgtattggcaattttaacttaaaatgtgcatcatgatggaaggtgcagacttttttggaagtttccgagaggagggtctatagaccatttgtcagaaatcagatcagccctcaaagaatggggtctgtgggctagttaaaatagaaataaacttttaaaatatccac

SEQ ID NO: 105877 - DNA, 1258 bp, Homo sapiens
  Payload ID: 757
  Gene Symbol: ARL9
  Gene Name: ADP-ribosylation factor-like 9
  Uniprot ID: Q6T311
  ENST ID: ENST00000360096
  CDS Start-End: 315-686
agctgagggaaggctgagaatcctcccggaacctctggattctgacgccccaggggttcttcacacaggctggccggtctcgggattgaagccggagacgtcagacgctaaggttgcttagactgcggcccacgtggaaggctcttagccaccctgcctggcccgaggagaaaaacaagcaaatcctagtgctgggcctggatggagcaggaaaaaccagtgtcctgcactctctagcttcaaacagagtccagcacagtgtggcacccacccaaggtttccatgcagtttgcatcaacactgaagacagccagatggagttcctggagattggtggcagtaaaccttttcggtcctactgggaaatgtacctatccaagggattgctgctgatctttgtggtggattcagcagatcacagccgattacctgaagccaagaaataccttcatcagctaattgcagcaaacccagtacttcctctggttgtgtttgcaaacaaacaggatcttgaagcagcctatcacattacagatatccatgaagctttggcattatctgaagtgggaaatgacaggaagatgttcttgtttggaacctacctgactaagaatggctcagagataccctccaccatgcaagatgccaaagacttgattgcacagctggctgcagatgtgcagtgaccaggactcagcccactgtgcggctcacgactgagatgtcatcagtgttgaatggcaggcttgaagccaaaggtttccacctcaaataaaaattaagccatttcctattttctcagtgcatgggatgtatatagttagccctccatatccatgggttccacatctggggattcaagaactgtggatccaaaacattcaaaaagtaaacccactgaagaataataacacaacaataaaaataatacacattttaaaatacaatataacaactatttacatagcattttcattgtattaggtattataagtaatctaaagatgatttaaaatacacgagtagaagtgtgtaggttatatgtaaatatgccattttccatcaggagcttgagcatccacatttgcctgtgaggatcttggaatcagtctccctgagaataccaacggacaactgtacaaagataatgctaacataataacagcatctctatttggattttgaatgttaaaaatatttgtaaaacagtgtattgggggtattgggatttttaatcaacaaaggtaaaatgaacatt

SEQ ID NO: 105878 - DNA, 1877 bp, Homo sapiens
  Payload ID: 758
  Gene Symbol: ADPRHL1
  Gene Name: ADP-ribosylhydrolase like 1
  Uniprot ID: Q8NDY3
  ENST ID: ENST00000356501
  CDS Start-End: 177-995
ggcacgagagcagactctgaaccaggaagtagccgtgtctagcgctctacaagacacataggagaggtggcatccatggccctgaaacgacaagcccatgttgccagcgcattatcaccaagtcacttggcaagcgtttagcagactactggtgcctggatgatctgtaccgggagatggtgagatgctatgtggaaatcgttgagaagcttccagaacgccggccagacccagctaccattgaaggctgtgctcagctaaagcccaataactaccttctcgcctggcacacaccgttcaatgaaaaaggctcagggtttggagcggccaccaaggccatgtgcatcggcctgcggtactggaagcctgagcggctggagaccctcatcgaggtcagcgtggagtgcggccggatgacccacaaccatcccacaggcttcctgggctccctgtgcacggccctgtttgtgtcgttcgccgcacaaggaaagcccctggtccagtgggggagagacatgctgcgggcggtgcctctggcagaagagtactgcaggaagaccatccggcacacggcagaataccaggagcactggttttactttgaagctaaatggcaattttatttggaggagaggaaaatcagtaaagactcagaaaataaagccatcttccccgacaattatgatgcagaagagagggaaaagacctacaggaagtggagctcggaaggtcgagggggaagacgaggccacgatgcccccatgatagcctatgacgccctccttgcagcaggaaacagctggactgagctgtgtcaccgggccatgtttcatggaggggagagcgcggccacgggcaccattgcaggctgcctgttcgggttgctgtacggcctggacctcgttcccaaaggcttgtaccaggacctggaggacaaggagaagctggaggacctgggcgcggctctctaccgcctgtccacagaggagaagtaaagccatttctgccactttccccctagagagccgattccaccccggggcccgtagggccctctcgcagcccctgggtgagggtgtctctgtgaggctccactgcggtctgtgcctgactggccacatctaactctctgtttccaatttcagaatcctaactgttgcataaaatacattgtttgtcctgcgagaatattttccgtcctccaccatcaacattgacactgcgtagatttgccgcacttggacctccatgcgtggcactcacccgcagtctcctggacaggcgctgtattttattctgtcgcagagctaatgctgtttactcactcacttcaacaacactaactgcggtggtggcctccagcaggcccccccgctgcagaccctctgtcctgcctctgcctccaggcatgcgtttccccgtgagggccaatgcacctccccccaccccccaccctcccatgtccacagtgggtcgtgtgttcctggacagagaaacagtccacactggggcctgcgggacacatatagcagcatattttgctcttaaccccacccacctttttaatcacactagattttaagatcaatccctttttgaaacaactcacggagaaaaccagaacataaatggcctcctgccagctccggcgtctctctgtggtctgccttagtgggccaagtccaaatgcagagaaggcctttcccttccgcgcctgccccatcgggctcgctgacgaggaagcgctgtccctgtgatgaggttctctctcagagagtcttggaaaagagaccacttgctcttgtttaaaataaatttggacgtgatttttccatgcagcatctggtgtgaataaaacagcagttgactgatgttta

SEQ ID NO: 105879 - DNA, 1341 bp, Homo sapiens
  Payload ID: 758
  Gene Symbol: ADPRHL1
  Gene Name: ADP-ribosylhydrolase like 1
  Uniprot ID: Q8NDY3
  ENST ID: ENST00000375418
  CDS Start-End: 88-1152
tgaccactataaaagtcaggcgggctgaggaggagacaaaggccaggacgctccgcagctgttggggaagaggagctgcctcctgggatggagaaatttaaggctgcgatgttgctggggagcgtcggcgatgctcttggctacagaaatgtctgcaaggagaacagcactgtaggcatgaagatccaggaggagctgcaacgttccgggggcctggaccacctcgtactctcgccaggagaatggcccgtgagtgacaacaccatcatgcacatcgcaaccgccgaggccctcaccacagactactggtgcctggatgatctgtaccgggagatggtgagatgctatgtggaaatcgttgagaagcttccagaacgccggccagacccagctaccattgaaggctgtgctcagctaaagcccaataactaccttctcgcctggcacacaccgttcaatgaaaaaggctcagggtttggagcggccaccaaggccatgtgcatcggcctgcggtactggaagcctgagcggctggagaccctcatcgaggtcagcgtggagtgcggccggatgacccacaaccatcccacaggcttcctgggctccctgtgcacggccctgtttgtgtcgttcgccgcacaaggaaagcccctggtccagtgggggagagacatgctgcgggcggtgcctctggcagaagagtactgcaggaagaccatccggcacacggcagaataccaggagcactggttttactttgaagctaaatggcaattttatttggaggagaggaaaatcagtaaagactcagaaaataaagccatcttccccgacaattatgatgcagaagagagggaaaagacctacaggaagtggagctcggaaggtcgagggggaagacgaggccacgatgcccccatgatagcctatgacgccctccttgcagcaggaaacagctggactgagctgtgtcaccgggccatgtttcatggaggggagagcgcggccacgggcaccattgcaggctgcctgttcgggttgctgtacggcctggacctcgttcccaaaggcttgtaccaggacctggaggacaaggagaagctggaggacctgggcgcggctctctaccgcctgtccacagaggagaagtaaagccatttctgccactttccccctagagagccgattccaccccggggcccgtagggccctctcgcagcccctgggtgagggtgtctctgtgaggctccactgcggtctgtgcctgactggccacatctaactctctgtttccaatttcagaatcctaactgttgcataaaatacattgtttgtcctgcg

SEQ ID NO: 105880 - DNA, 839 bp, Homo sapiens
  Payload ID: 758
  Gene Symbol: ADPRHL1
  Gene Name: ADP-ribosylhydrolase like 1
  ENST ID: ENST00000413169
  CDS Start-End: 312-839
ggtccctccttcccggtgagcctctctgactggggctgcctccttccgggtgagcctctctgactggggctgcctccttccgggtgagcctctctgactggggctgcctccttccgggtgagcctctctgaacagggcacgagagcagactctgaaccaggaagtagccgtgtctagcgctctacaagacacataggagaggtggcatccatggccctgaaacgacaagcccatgttgccagcgcattatcaccaagtcacttggcaagcgtttagcagactactggtgcctggatgatctgtaccgggagatggtgagatgctatgtggaaatcgttgagaagcttccagaacgccggccagacccagctaccattgaaggctgtgctcagctaaagcccaataactaccttctcgcctggcacacaccgttcaatgaaaaaggctcagggtttggagcggccaccaaggccatgtgcatcggcctgcggtactggaagcctgagcggctggagaccctcatcgaggtcagcgtggagtgcggccggatgacccacaaccatcccacaggcttcctgggctccctgtgcacggccctgtttgtgtcgttcgccgcacaaggaaagcccctggtccagtgggggagagacatgctgcgggcggtgcctctggcagaagagtactgcaggaagaccatccggcacacggcagaataccaggagcactggttttactttgaagctaaatggcaattttatttggaggagaggaaaatcagtaaagactcagaaaataaagccatcttccccgacaattatgatgcagaagagagggaaaag

SEQ ID NO: 105881 - DNA, 9759 bp, Homo sapiens
  Payload ID: 758
  Gene Symbol: ADPRHL1
  Gene Name: ADP-ribosylhydrolase like 1
  ENST ID: ENST00000612156
  CDS Start-End: 88-5991
tgaccactataaaagtcaggcgggctgaggaggagacaaaggccaggacgctccgcagctgttggggaagaggagctgcctcctgggatggagaaatttaaggctgcgatgttgctggggagcgtcggcgatgctcttggctacagaaatgtctgcaaggagaacagcactgtaggcatgaagatccaggaggagctgcaacgttccgggggcctggaccacctcgtactctcgccaggagaatggcccgtgagtgacaacaccatcatgcacatcgcaaccgccgaggccctcaccacagactactggtgcctggatgatctgtaccgggagatggtgagatgctatgtggaaatcgttgagaagcttccagaacgccggccagacccagctaccattgaaggctgtgctcagctaaagcccaataactaccttctcgcctggcacacaccgttcaatgaaaaaggctcagggtttggagcggccaccaaggccatgtgcatcggcctgcggtactggaagcctgagcggctggagaccctcatcgaggtcagcgtggagtgcggccggatgacccacaaccatcccacaggcttcctgggctccctgtgcacggccctgtttgtgtcgttcgccgcacaaggaaagcccctggtccagtgggggagagacatgctgcgggcggtgcctctggcagaagagtactgcaggaagaccatccggcacacggcagaataccaggagcactggttttactttgaagctaaatggcaattttatttggaggagaggaaaatcagtaaagactcagaaaataaagccatcttccccgacaattatgatgcagaagagagggaaaagacctacaggaagtggagctcggaaggtcgagggggaagacgaggccacgatgcccccatgatagcctatgacgccctccttgcagcaggaaacagctggactgagctgtgtcaccgggccatgtttcatggaggggagagcgcggccacgggcaccattgcaggctgcctgttcgggttgctgtacggcctggacctcgttcccaaaggcttgtaccaggacctggaggacaaggagaagctggaggacctgggcgcggctctctaccgcctgtccacagaggagaaccggaagagcagcaagacctgcagtgacgtcatgtctgtggacgcccaaaccctgaagaagaagatgggcaagctggcctgtgacccggccgcccactccatcctcagcagcctgctgctctacgtcacgggccgcgcagaccggcccccggggacagaggccggggggagcaggcccagccaccagccccagacccaggaggccacccagcggcccacgcgcttccagctcctgcaggccaagttcctgggcactggccgggagcgctacctcaagaggaccagggaggtgggccggctgatctccaaggacaagcaggggccgggtgggggcctcgtgggtgccaccatcaacaagctcctggagaagaccaaggagccggccccaaagccctgcctcagcgagaagccccgctggggccacccggccgggaagagcaccgtgaaaaacatcctgaagatattcttggccgccgaggagaaggaggcgaaggagaaagaagcacgcgagaagccccctgtggagcggcccaaagccgccaggggcctcttgccgaagatcatgggcaagagctcggtgctgtccaagctgcgggagaagttcgagcagaacagctgcctgtgctccgaggccagtgcgctgaggctgcacacgcaggagcggaagaagaggaacctgcagaggaagaggatgcaccggccggaggtgcgcgtgctgcacacggccaccatggccagcacctgcgtcaagatgccccctgcccgctttctggcctgcacggctgagcccctgccggccctcagcatcgccaccgtcgtctgtggccccaggagctggctgtcccactgcaccaaaatcagccactcggaggcaaggcgtccacccagaggagaagccagcgtgccccctagtgccagggagacggggcccagtgggaacaaagcagtgggaaaggggcccctggaggaggagccccaaagacagccaaggccctcgaagcccgtgacaccccaggtgatggctcagagggacggccacgctgtcccctcgctggccttctcttgtgctccctgcacaggtggagtccttcctggccttgtgcctgcatcatccccactgggaccggccagcccttggggcaccggatcagccggaggtgatgggactgcagaccccaccgcagagagcaccgcaggaggcgtccaggaggtgaggggagccaggctcacgtggcctcctgggcccccaggcgagtgtgcaggggagggccctgaaatcaccatgactgtttgcagttcagaggatgaaagggaaggagcaggcttcccagacccagggagagaccccctctttgccacccagaagtatttcccagaacagaaggtgccggagcacatcccacccctgaacgctccatcggtccaggctgctcggagaacacagcctgccacggagcctccacggataactgtccaaattccagttgtccatgaaatgccagcccctcccaccaggctgcaaaatatgtcaagtggtgaaaacaaaccttgtatttgtggaggagagaatgtggttgaaaatgcccacacagaatttcccaccgtgactgagaacagaaggggtcaccgagccccagtggaactgagcaagctttcagggatgcaggcgggactcagcgcctcttcgccgcaggggccacgggcagctccgcgtctggcagcagcaagaggggctgtgggcgccgaccacagtgtcccagagacacttctgacacagagactccagacagatcctgctggcgggaaggaaaacaaaggcagctttgagaattcacacggtcccaggaatcctgacgatatttcaggagagaggacctctgagctcagagatgtgaagcatccgttgccggaatctaatgaaatatcaatgcagaagaagggctccgcaacaaatgatcctgcagcctcacaaaaccttctgaggggaaacaccagccatgcctccagcagccagcaagtgccgtccccgactgggagaaacccaacaggagcccccacgtcactggcggcatcatccaaggggcgtacggggcctgagggtgtcaccccgatgggcatgacagtgcccggtgcgctggaggaatgcagaaggccgctgctaatagagtcttctcagcccctgaaggctgccgaggaaatcaccagccatgatgttcgcgagaacccactgtcctcattaaatgaaccacccaaaccaggtatgaaagcctgtggggcgatggcagctgcagggagcgttgcgagccgcgccacgcctgcaccagcgccaggcagcacccagagccctggagaccgcacagcgggagagccagagacgctgggccagtggggaagcagagccttgtccgaaagccaccccagaggagaggctctccctcgagaccctcacagccacggcctcctggcccctgggggatccttggagcccaagagtggagcagcagggaggagcctcctgagaggcgtggccctcgtccagcacccagaggacattgcgaccctcgcccgccacccggaggatgctgcggccctcgcccggcacccagaggcggcccgattatacatttcaaacacatcagcagccagcagacatacagcagctgtaggaggcagaaaggatgtggctgtggaaggaaaccttttgggtttcagcacagagtctggaattcctgcttctgatcatcctaggccacaggcaaggagcgtggcagagtcccccagctatggccctggcctcccgccgtcgcctcctgagaacccacaggcaaagggcagggagggcgtcaggtttccccgtggggcggagcctgaccatctgcttcccgcagtgcctcccgcggaggtggacatggggtgggtaggtggcacccaccagcggggccctccccatctacaggcacacctgccccctactgctggtgacacacaggcaaagctccgggccagtgtccccgagcctaggacgcaggcaggtgaatcccaggagcgtcccctgacacaggcggacctggggaggcaacagagtcaccaggcacaggaggagaccccccagcccggggatgcggggaagagggtggcgccgtcgggctcgaaggttgtgctgaacccagcaaaagagcctcagacatggtgggcacaggatctggccggggacaaagggatggccattggggttgggggcgcctgccagcgcagtgaccaaggtcagcagcatctgcagggaccctgggaggagcgggggcggagcacggcgtggggagagggcaccagggctgccaggaacccagctgtgcctccaggggagcccgaggggccgggaagcccggcagcccaaggacaggcccagaaacaggttcaggaatgggaccggggacaggttcagggacacgctcaagaacaggcccagtggcagacccagatagaggcccaggggcaggcacaggaacaggctcagggtgggacccagggacacagtcagggacaggcccagaaacagtttcagaattgggcccagggacaggctcagggacacgctcaagaacaggcccagtggcagacccagatagaggcccaggggcaggcacaggaaccagctcagggtggggcccagggacaggttcagggacaggcccagaaatgggctcaggggcagattcagggacaggcccagaaacaggttcaaggagaggttcagaaatgggcccaggaagaggctcagggacaggcccagtggcagacccagataaaggcccagaaatgggctcaggaacagacccagaaaggggctcaggaacgggttcagggtcaggcccagaaaggggctcaggaacgggcccaggaacaggctcaggagcagacccagatagaggctcagggtcaggcccagaagggggctcaggaacgggctcgggaacaggcccagaaaggggctcaggaacgggctcgggaacaggcccagaaaggggctcaggaacgggctcgggaacaggcccagaaaggggctcaggagcgggctcgggaacaggcccagaaaggggctcaggaacgggctcgggaacaggcccagaaaggggctcaggaacgggctcgggaacaggcccagaaaggggctcaggaacgggctcaggaacagggtcgggagcagacccacatagaggctcagggtcaggcccagaaaggggctcaggaatgggctcgggatcgggctcgggatcagggctgggagcagacccagatagagactcagaggcagacccagaaaggggctcaggaacgggcttgggaacagggtcgggaacaggccttgacaagtgggatggcgcctcgggcctgggagcagcccattagtggcatagctgagggagtggatgctgctggcaggagtggggggtccagaagcccagcccccagggatggtggacagtcagggggcagtggcctgggggagcccagcgccgggtacccacccccaggaagccgccccctcaggggcaagagcattgccacctctcccctggggctgggaaagagcccaactgagcccaagcctgaggctgggggctgcgggactccccaggccccggcccaggaggggtccccagaccaccctggggctgagagggccctgcaggacaggatggaggcatcggagcccgagcgtcgcgggaggtccaggcacctggccaagtacaaagcccagagcttccgtgaccagagggccttcgatttgtccttcagaccaatgagcgtcagggccagcgacacgtctgagctcccaaagtgaggccccgagtacacaccgtggctcgcccagcactgtgacatccgcccattgagggacttcaggcattttcctgcctccaaatgcgtcttggagcatcccctacagagacgcctgtttccataattttctttcccttcttcacaagctgaccttgggaggattgagctacatgtgggtcgggttcctgtcaccccacagagccacgaggccatgggggtgggaggtgcgggcctgtggcctcaccaggccctcgggattctttgtgtcttcactcgggggcgccggctcacccctctctcacacagcctgcagcgtggagctcacacctcccgcagtggcacggtgtgtgcgtccccttcgatctgcaggatgctggcactttgggacacctccccagctctcacagggccacctcccactgctccctgcccacaccccaccatgccctgctctgacgtggccgcatggcacccaccatccatgggcccaaagtgatgcacaccgccccacccccatgactcgaaagaaagggcagagcttcctccagcctcagacgcccaggtgggtgccgggtgctgtgtggctgctgggccatgtggtggtcaccagagggtgtggggacgctgggatcccaggccgaaaccagctcatccggaggaagaggcctcaggaaatgcccacgttaagttctgagaaagggacagtgcagagccgtgggaagccaggatcccagggaggcttcgtctggaaactgggtgctgggagaacgaacgggagcctgcccgcccttccctgcagtccctgtgggtggtgccactggtgccggtgacctgagagcctcgctgtctgtcctccgtcctcccgaacagcatagaagtgtttcctgccctggcccgagacggcccacgactccggccctgttcaggtactgaggtaatgcatgttcaggctggaatatttgaatgctgtctagaggcacaagaaggaaatcaaagccacctgtggtcacattgcctcgagatggtttttgttgctactctggactattttttaggctcttcctccatgcacctattttaaagcacattcttccccatgatggagccatgcacctccgtgtcgcgatccatcgtcccaggccactcggtggcctctgaaacccggacccgtgaggccacacggctgcctgagtggccccggagcagctggattttcagcgtgaaccgatgcagcctgtcgccctacagccccgcacccttgtttttggtggtgccctccctgtggaaagttaattcctgctttttgaaggtgtcttggcatcttctgcctttgctactgagcggtttcctgaaacagccctaagcgttcgcaaaggcgctttggtgcctgctgcgagcacctgttttctgactcggatgttcctttagaggaaggtgttttccagtgtcggccctgagagggcgttcagcaggcgcgtcctacccacgcggggctgaggtctctccttccagggaaggtccatcccggcagacgccagtggctttggctctgcagcgccaaggaggcggcgtggcgtcatgctccggggagcgcacaggtttccttccagtcgaacaattaacttcagatccagcaggtttgacccaccctcacctgctgggacatgcgagtgctggtgtctggaaggagggccgggctgtgctgagctctggggggccggtccccacagctcccccgacagggcccccggggcctcctctataaatcaggggtccgtgctcccagcccgcttcgaggggtttctgcttggcgtgtgggttctaagtgcgagctgctgtgtgtggaggctcctgagcaccgggtgcccctcgcgcgtgtgggtcccggggcagcccagctgcacacaggatggtccgggggtgcgggtgggggcagagctgagcatggcgtgtacttggccacagaagtcttgctgtggtgccgctggacccctgctaggaggacagggtcccctctctcacgaagcacacggacctccagagtccctgcccctgcagtcctgggagcctgcagttggggctggagttggcctctcggagccacccaaacggagaggcccatgagaggggagctcaggggtccagcagaggctgacagagtggcctctttgtcctgttggcggcccctgctcatgcctggggcgtcctccctggagctgggggagctcagggacccccaggtctgtgtggctgcccctgccactccaggcacagcggcacggccctcactctttacctatttggaattggaggcaatgagtggcaagaacatgatgacagacacgggaggtaaaaatatgttcactggctgttccctttataaataagaagtggtgggacttgcgctgctatttttaaatagaccagagagtacactggagaaggcattgagtggttttattttaagtggtggaaaaaatgatgagaatctcctccagatgacagctccggaagtgtcgtgcctgaacccctctcacagtctggcgggcgcagagtctgtgagcggccaggaggccacctgctcgactggcccgtcctctccatgtgccagatgcagcccagcatgacactgccctcagctcaaaaacagcacagctactctgtgtgcaggaaaaaactgccagtgacttcaccaggatttgagaacggtccgtacgttcacactaagctgagacagcgcaggttagaagatagcgcggggaagtattcacacttcagatacgaccatcacggccacatggctaaggcccacaccctcccggggtgaaataactacagcagaagaatggggcgctaaccacctccacgggcattttaaataaaacccaaagttgttttgtttttttaaaaaaaaaaaaaaagaaagaaagaaagtggccgggcacggtggctcatgcctgtaatcccagcactttgggaggccgaggcagacagatcacgaggtcaggagatcaagaccatcctggctaacacagtgaaaccctgtctctactaaaaatacaaaaattagccgggcgtggtggtgggtgcctgtagtcccagctactcgggagcctgagacaggagaatggcgtgaacccgggaggtggagcttgcagtgagccgagattgcgccactgcactccagcctgggtgacagagcgagactccgtcaaaaaaaaaaaaaaaaagaagaaaagaaaagaaaagaaaacaggatatttattttagcttcttagttaacatcattaattttgtgtagttgagcgactcgttgactgcctcctccctgcagttttttacggtgcctccggctgtcgacaggcccactgtgagccgcaggtctgtgggtgcaagtgacaacagccgggcgggaggcggtgcactcaggcggcaggaaggtcccgagacggcgacgagaatgtggtcatgttcaggacactcgctcagggagggtcgttgtctgggattttacacgctcagcaccacctccttattctgttctcagggtatctctgctgttggagttacggtctttcggttgtgtattaggctacagctatttattaaatttgttcttgttcatattcttctttgtatataaacaaccctaaaatgggttagtcagaaaaaattactaaatgtcatttgttgtattctctctgtatttttactaacatcattcagctggaaataatttcaaaaagaaataaaatacctttcccattac

SEQ ID NO: 105882 - DNA, 1668 bp, Homo sapiens
  Payload ID: 759
  Gene Symbol: ADPRHL2
  Gene Name: ADP-ribosylhydrolase like 2
  Uniprot ID: Q9NX46
  ENST ID: ENST00000373178
  CDS Start-End: 31-1122
caccggaagtggcgagcagtctgcgcgcggatggccgcagcggcgatggcggcagcggcaggtggaggggctggcgcggcccgctccctctcgcgcttccgaggctgcctggctggcgcgctgctcggggactgcgtgggctccttctacgaggcccacgacaccgtcgacctgacgtcagtcctgcgtcatgtccagagtctggagccggaccccggcacgcccgggagtgagcggacagaagccttgtactacacagatgacacagccatggccagggccctggtgcagtccctgctagccaaggaggcctttgacgaggtggacatggctcacagatttgctcaggagtacaagaaagaccctgacaggggctatggtgctggagtagtcactgtcttcaagaagctcctgaaccccaaatgtcgcgatgtctttgagcctgcccgggcccagtttaacgggaaaggctcctatggcaatggaggtgccatgcgggtggctggcatctccctggcctatagcagtgtccaggatgtgcagaagtttgcccggctctcggcccagctgacacacgcctcctccctgggttacaatggcgccatcctgcaggccctggctgtgcacctggccttgcagggcgagtcttccagcgagcactttctcaagcaactcctgggccacatggaggatctggagggtgatgcccagtccgtcttggatgccagggagttgggcatggaggagcgtccatactccagccgcctgaagaagattggagagcttctagaccaggcatcggtgaccagggaggaagtggtgtctgagctagggaatggcattgctgcctttgagtcggtacccaccgccatctactgcttcctacgctgcatggagccagaccctgagatcccttctgccttcaatagcctccaaaggactctcatttattccatctcacttggtggggacacagacaccattgccaccatggctggggccattgctggtgcctactatgggatggatcaggtgccagagagctggcagcaaagctgtgaaggctacgaggagacagacatcctggcccaaagcctgcaccgtgtcttccagaagagttgatgagggctacagctgttggggctctgccaggtcccctgggaccaactacagctccaatcagaaaccctgcgcttccttgagtgtggcttcccacttttcctgcattgtggagctgactgagtacaccggtgaggctggggtctctgcaggggaggtcactggaacagcgagcaagggactggtgcctcgctggtgctgggtctctggtttgctgcagagccgtaggacactcctggctcctcagtaggacagacagacgcaggcgggtttattttggaggggtacttgtggcattttcctgtattgtcttggacatgggatgtggggaggtggaaatgatgagcagtagcatcatttctccctgttgggttttagccagtttgccagcaagcgcatcctagcagggtccccgagcagcaggttgtgtggatgaagggacaggcacttgcatccagctgatctaggtcacacctggctcttggctgccatgtggcttattaacagcttccagtggaagtcgcaataaacagtttttggtaaatctca

SEQ ID NO: 105883 - DNA, 1312 bp, Homo sapiens
  Payload ID: 760
  Gene Symbol: ART1
  Gene Name: ADP-ribosyltransferase 1
  Uniprot ID: P52961
  ENST ID: ENST00000250693
  CDS Start-End: 102-1085
ggccatggtggagatcagcagcagcttccccacccaggacaaggcctagatgaggaaactgagacccaaaaagagacagcaactggcccagggtcaccagcatgcagatgcctgctatgatgtctctgcttcttgtgtctgtgggcctcatggaagcacttcaggcccagagccaccccatcacacgacgagacctcttctctcaagagattcagctggacatggccctggcctcctttgatgaccagtacgctggctgtgctgctgccatgacagctgctctcccggatctcaaccacacggagttccaggccaaccaggtgtatgcagacagctggacactggcaagcagccaatggcaggagcgtcaggccaggtggccagagtggagtctcagccccacccgtccatccccgccacccctgggcttccgcgatgagcatggggtggccctcctggcctacacagccaacagccccctgcacaaggagttcaatgcagccgtgcgtgaggcgggccgctcccgggcccactacctccaccacttctccttcaagacactccatttcctgctgactgaggccctgcagctcctgggcagcggccagcgtccaccccggtgccaccaggtgttccgaggtgtgcacggcctgcgcttccggccagcagggccccgggccaccgtgaggctggggggctttgcttctgcctccctgaagcatgttgcagcccagcagtttggtgaggacaccttcttcggcatctggacctgccttggggcccctatcaagggctactccttcttccctggagaggaagaggtgctgatccccccctttgagaccttccaagtgatcaatgccagcagactggcccagggccccgcccgcatctacctccgagccctgggcaagcacagcacctacaactgcgagtacatcaaagacaagaagtgcaagtctgggccttgccatctggataattcagccatgggtcagagccccctctctgcagtctggtctttgctgctgctgctctggttcctcgtggtgagggcctttccagatggtccaggcctcctttgatgcatgagacacgggacagcctcgcctgctgcctctgcccatcctgaggatgttggccatgtgtgctttcagtgtaaccaagattcctgtcaatcccatctgcagggaactctgggaccttctctggtagctgccagaccggctggtggagaaacaggagacaatctggggactgaaccttacccagggctgtaggagtgagactctgaataaagggttgggccggc

SEQ ID NO: 105884 - DNA, 1528 bp, Homo sapiens
  Payload ID: 761
  Gene Symbol: ART3
  Gene Name: ADP-ribosyltransferase 3
  Uniprot ID: Q13508
  ENST ID: ENST00000349321
  CDS Start-End: 120-1256
ctcactgtcaacaacatcccatcctgaagacttgcttaccacaactgagagtggggagtcagtttgaggcctagcatcacttaaacttcctccaaaggcacaaaagccagaagagaaaaatgaagacgggacattttgaaatagtcaccatgctgctggcaaccatgattctagtggacattttccaggtgaaggctgaagtgttagacatggcagataatgcatttgatgatgaatacctgaaatgtacggacaggatggaaattaaatacgttccccaactgctaaaggaggaaaaagcaagccaccagcaattagatactgtgtgggaaaatgcaaaagccaaatgggcagcccgaaagactcaaatctttctccctatgaattttaaggataaccatggaatagccctgatggcatatatttccgaagctcaagagcaaactcccttttaccatctgttcagtgaagctgtgaagatggctggccaatctcgagaagattatatctatggcttccagttcaaagctttccacttttacctcacaagagccctgcagttgctgagaaaaccttgtgaggccagttccaaaactgtggtatatagaacaagccagggcacttcatttacatttggagggctaaaccaagccaggtttggccattttaccttggcatattcagccaaacctcaggctgctaatgaccagctcactgtgttatccatctacacatgccttggagttgacattgaaaattttcttgataaagaaagtgaaagaattactttaatacctctgaatgaggtttttcaagtgtcacaggagggggctggcaataaccttatccttcaaagcataaacaagacctgcagccattatgagtgtgcatttctaggtggactaaaaaccgaaaactgtattgagaacctagaatattttcaacccatctatgtctacaaccctggtgagaaaaaccagaagcttgaagaccatagtgagaaaaactggaagcttgaagaccatggtgagaaaaaccagaagcttgaagaccatggtgtgaaaatccttgaacccacccaaatacctgaagataaaagtcaaggaaatatcaacaatcctactccaggtccagttcctgttccaggtcccaaaagccatccttctgcatcctcgggcaaactgctgcttccacagtttgggatggtcatcattttaatcagtgtttctgctataaatctctttgttgctctgtagtttgatgcattgtttatctttcttattctttacttgaaataactatagggatccacaggagatcaaaaggaatgatgtattttttacgtgttggccaaagtcactggataaaatgagaattgtatatttgttattcattttgcaaattcagaaagttggtccagatatatgtcacagaacttttcacttgtatactactcttacaatggaaaaaaatcccgaaaactgtatacttctgattaaattcaataaaagattttgattagatattt

SEQ ID NO: 105885 - DNA, 1517 bp, Homo sapiens
  Payload ID: 761
  Gene Symbol: ART3
  Gene Name: ADP-ribosyltransferase 3
  Uniprot ID: Q13508
  ENST ID: ENST00000341029
  CDS Start-End: 131-1234
agtgaggaggttatacccggaggtctcgacgctcgctcgtgctgctcgtgttgccgctgggtacgtttgctgccagtgctgatccagccggaggcgaagagaagcactttgggggcaaaagaagagaaaaatgaagacgggacattttgaaatagtcaccatgctgctggcaaccatgattctagtggacattttccaggtgaaggctgaagtgttagacatggcagataatgcatttgatgatgaatacctgaaatgtacggacaggatggaaattaaatacgttccccaactgctaaaggaggaaaaagcaagccaccagcaattagatactgtgtgggaaaatgcaaaagccaaatgggcagcccgaaagactcaaatctttctccctatgaattttaaggataaccatggaatagccctgatggcatatatttccgaagctcaagagcaaactcccttttaccatctgttcagtgaagctgtgaagatggctggccaatctcgagaagattatatctatggcttccagttcaaagctttccacttttacctcacaagagccctgcagttgctgagaaaaccttgtgaggccagttccaaaactgtggtatatagaacaagccagggcacttcatttacatttggagggctaaaccaagccaggtttggccattttaccttggcatattcagccaaacctcaggctgctaatgaccagctcactgtgttatccatctacacatgccttggagttgacattgaaaattttcttgataaagaaagtgaaagaattactttaatacctctgaatgaggtttttcaagtgtcacaggagggggctggcaataaccttatccttcaaagcataaacaagacctgcagccattatgagtgtgcatttctaggtggactaaaaaccgaaaactgtattgagaacctagaatattttcaacccatctatgtctacaaccctggtgagaaaaaccagaagcttgaagaccatagtgagaaaaactggaagcttgaagaccatggtgagaaaaaccagaagcttgaagaccatggtgtgaaaatccttgaacccacccaaatacctgctccaggtccagttcctgttccaggtcccaaaagccatccttctgcatcctcgggcaaactgctgcttccacagtttgggatggtcatcattttaatcagtgtttctgctataaatctctttgttgctctgtagtttgatgcattgtttatctttcttattctttacttgaaataactatagggatccacaggagatcaaaaggaatgatgtattttttacgtgttggccaaagtcactggataaaatgagaattgtatatttgttattcattttgcaaattcagaaagttggtccagatatatgtcacagaacttttcacttgtatactactcttacaatggaaaaaaatcccgaaaactgtatacttctgattaaattcaataaaagattttgattagatatttcagaattgcca

SEQ ID NO: 105886 - DNA, 1561 bp, Homo sapiens
  Payload ID: 761
  Gene Symbol: ART3
  Gene Name: ADP-ribosyltransferase 3
  Uniprot ID: Q13508
  ENST ID: ENST00000355810
  CDS Start-End: 120-1289
ctcactgtcaacaacatcccatcctgaagacttgcttaccacaactgagagtggggagtcagtttgaggcctagcatcacttaaacttcctccaaaggcacaaaagccagaagagaaaaatgaagacgggacattttgaaatagtcaccatgctgctggcaaccatgattctagtggacattttccaggtgaaggctgaagtgttagacatggcagataatgcatttgatgatgaatacctgaaatgtacggacaggatggaaattaaatacgttccccaactgctaaaggaggaaaaagcaagccaccagcaattagatactgtgtgggaaaatgcaaaagccaaatgggcagcccgaaagactcaaatctttctccctatgaattttaaggataaccatggaatagccctgatggcatatatttccgaagctcaagagcaaactcccttttaccatctgttcagtgaagctgtgaagatggctggccaatctcgagaagattatatctatggcttccagttcaaagctttccacttttacctcacaagagccctgcagttgctgagaaaaccttgtgaggccagttccaaaactgtggtatatagaacaagccagggcacttcatttacatttggagggctaaaccaagccaggtttggccattttaccttggcatattcagccaaacctcaggctgctaatgaccagctcactgtgttatccatctacacatgccttggagttgacattgaaaattttcttgataaagaaagtgaaagaattactttaatacctctgaatgaggtttttcaagtgtcacaggagggggctggcaataaccttatccttcaaagcataaacaagacctgcagccattatgagtgtgcatttctaggtggactaaaaaccgaaaactgtattgagaacctagaatattttcaacccatctatgtctacaaccctggtgagaaaaaccagaagcttgaagaccatagtgagaaaaactggaagcttgaagaccatggtgagaaaaaccagaagcttgaagaccatggtgtgaaaatccttgaacccacccaaatacctggaatgaaaattccagaaccttttccactacctgaagataaaagtcaaggaaatatcaacaatcctactccaggtccagttcctgttccaggtcccaaaagccatccttctgcatcctcgggcaaactgctgcttccacagtttgggatggtcatcattttaatcagtgtttctgctataaatctctttgttgctctgtagtttgatgcattgtttatctttcttattctttacttgaaataactatagggatccacaggagatcaaaaggaatgatgtattttttacgtgttggccaaagtcactggataaaatgagaattgtatatttgttattcattttgcaaattcagaaagttggtccagatatatgtcacagaacttttcacttgtatactactcttacaatggaaaaaaatcccgaaaactgtatacttctgattaaattcaataaaagattttgattagatattt

SEQ ID NO: 105887 - DNA, 502 bp, Homo sapiens
  Payload ID: 761
  Gene Symbol: ART3
  Gene Name: ADP-ribosyltransferase 3
  ENST ID: ENST00000513353
  CDS Start-End: 181-502
ttccagaaccttcttcagtgaggaggttatacccggaggtctcgacgctcgctcgtgctgctcgtgttgccgctgggtacgtttgctgccagtgctgatccagccggaggcgaagagaagcactttgggggcaaaaggccaaaaagaaaaaagaaaaccaatatttaagagaagagaaaaatgaagacgggacattttgaaatagtcaccatgctgctggcaaccatgattctagtggacattttccaggtgaaggctgaagtgttagacatggcagataatgcatttgatgatgaatacctgaaatgtacggacaggatggaaattaaatacgttccccaactgctaaaggaggaaaaagcaagccaccagcaattagatactgtgtgggaaaatgcaaaagccaaatgggcagcccgaaagactcaaatctttctccctatgaattttaaggataaccatggaatagccctgatggcatatatttccgaagctcaagagc

SEQ ID NO: 105888 - DNA, 545 bp, Homo sapiens
  Payload ID: 761
  Gene Symbol: ART3
  Gene Name: ADP-ribosyltransferase 3
  ENST ID: ENST00000504914
  CDS Start-End: 157-545
aaatgctaatgtaaccccaaagaactttacaaagcggaattcttagttttcacaagtgtggcccagcctccctcttgaatctttttggttgtggaatcgaggtgttctgtttaattatccagtgtgactgactctgtggcagggacgaagagaaaaatgaagacgggacattttgaaatagtcaccatgctgctggcaaccatgattctagtggacattttccaggtgaaggctgaagtgttagacatggcagataatgcatttgatgatgaatacctgaaatgtacggacaggatggaaattaaatacgttccccaactgctaaaggaggaaaaagcaagccaccagcaattagatactgtgtgggaaaatgcaaaagccaaatgggcagcccgaaagactcaaatctttctccctatgaattttaaggataaccatggaatagccctgatggcatatatttccgaagctcaagagcaaactcccttttaccatctgttcagtgaagctgtgaagatggctggccaatctcgagaagattatat

SEQ ID NO: 105889 - DNA, 352 bp, Homo sapiens
  Payload ID: 761
  Gene Symbol: ART3
  Gene Name: ADP-ribosyltransferase 3
  ENST ID: ENST00000511188
  CDS Start-End: 1-352
aagacctgcagccattatgagtgtgcatttctaggtggactaaaaaccgaaaactgtattgagaacctagaatattttcaacccatctatgtctacaaccctggtgagaaaaaccagaagcttgaagaccatagtgagaaaaactggaagcttgaagaccatggtgagaaaaaccagaagcttgaagaccatggtgtgaaaatccttgaacccacccaaatacctggaatgaaaattccagaaccttttccactacctggaataaaaatgatacaactgaatgaaaaacctgaagataaaagtcaaggaaatatcaacaatcctactccaggtccagttcctgttccaggtc

SEQ ID NO: 105890 - DNA, 801 bp, Homo sapiens
  Payload ID: 761
  Gene Symbol: ART3
  Gene Name: ADP-ribosyltransferase 3
  ENST ID: ENST00000513122
  CDS Start-End: 197-801
gttgccgctgggtacgtttgctgccagtgctgatccagccggaggcgaagagaagcactttgggggcaaaagaatcttctgatggcatgctaacaattgtagatggcaactgtgttggaaactaggggatcccatctgagttggtcaaagtctgccaaaaagaaaaaagaaaaccaatatttaagagaagagaaaaatgaagacgggacattttgaaatagtcaccatgctgctggcaaccatgattctagtggacattttccaggtgaaggctgaagtgttagacatggcagataatgcatttgatgatgaatacctgaaatgtacggacaggatggaaattaaatacgttccccaactgctaaaggaggaaaaagcaagccaccagcaattagatactgtgtgggaaaatgcaaaagccaaatgggcagcccgaaagactcaaatctttctccctatgaattttaaggataaccatggaatagccctgatggcatatatttccgaagctcaagagcaaactcccttttaccatctgttcagtgaagctgtgaagatggctggccaatctcgagaagattatatctatggcttccagttcaaagctttccacttttacctcacaagagccctgcagttgctgagaaaaccttgtgaggccagttccaaaactgtggtatatagaacaagccagggcacttcatttacatttggagggctaaaccaagccaggtttggccattttaccttggcatattcagccaaacctcaggctgctaatgaccagctcactgtgttatc

SEQ ID NO: 105891 - DNA, 560 bp, Homo sapiens
  Payload ID: 761
  Gene Symbol: ART3
  Gene Name: ADP-ribosyltransferase 3
  ENST ID: ENST00000510423
  CDS Start-End: 37-560
ttcttgttcccgccttcagaaagttataagagaaaaatgaagacgggacattttgaaatagtcaccatgctgctggcaaccatgattctagtggacattttccaggtgaaggctgaagtgttagacatggcagataatgcatttgatgatgaatacctgaaatgtacggacaggatggaaattaaatacgttccccaactgctaaaggaggaaaaagcaagccaccagcaattagatactgtgtgggaaaatgcaaaagccaaatgggcagcccgaaagactcaaatctttctccctatgaattttaaggataaccatggaatagccctgatggcatatatttccgaagctcaagagcaaactcccttttaccatctgttcagtgaagctgtgaagatggctggccaatctcgagaagattatatctatggcttccagttcaaagctttccacttttacctcacaagagccctgcagttgctgagaaaaccttgtgaggccagttccaaaactgtggtatatagaacaagccagggcacttcatttacatttggagggct

SEQ ID NO: 105892 - DNA, 5129 bp, Homo sapiens
  Payload ID: 762
  Gene Symbol: ART4
  Gene Name: ADP-ribosyltransferase 4 (Dombrock blood group)
  Uniprot ID: Q93070
  ENST ID: ENST00000228936
  CDS Start-End: 383-1327
gctttttcctgtttggctgggaaagggaaggctgaactgctgagtctgacacttaacaggacttcggcattcccctgaatacagactagatcagagattttatttttttaattgaaaagtaacttgggttctctttagaaacccttatttggtgtgcgcatctggctatttcacagagatttcagttttgcaaagaagtcggagttgatttcttccctcagacaagctattggttgttggtgggcaacagaagttgctcagcatagacaggggaaaaaacggttacggatgagactgaaagaaaacctcaaaggagaactctgagaattcatctcaggatgaagctgcaagggcaaaggagaagtacttgtgacacaagcaaatgggtccattgatcaacagatgcaagaagattcttctcccaactactgtacctcctgcaacgatgagaatctggctccttggaggcctgctgccattcctgctgctcctctctggcctgcagagacccacagagggttctgaggttgcaattaaaatcgacttcgacttcgcaccaggttcttttgatgatcagtaccaaggctgtagcaaacaggttatggagaaactaactcaaggggattatttcacaaaagacatagaagcccagaagaattattttaggatgtggcaaaaagcccacttagcctggcttaaccaaggaaaagttctaccccagaacatgactaccacacacgctgtggctattttgttttatacattgaacagcaatgttcattctgactttactagagccatggcctctgttgccaggactccacagcagtatgaacgttcattccacttcaaatatttacactactacctcacctcagcaatccagctgctgaggaaagacagcatcatggagaatggcactctgtgctatgaggtgcattataggacgaaggatgtccactttaatgcctacacaggggccaccattcgatttggccaattcctctccacatccctcctgaaagaagaggcacaggagtttgggaaccagacactatttaccatattcacctgcctgggtgcacctgtacagtacttctccctcaagaaggaagtcttgatccctccctatgagctgtttaaagttataaatatgagctaccacccaagaggagactggttgcagttgaggtcaactgggaacctgagcacatataactgtcagctgctaaaagcttccagcaagaaatgcatccctgatcctatagctattgcatctctctcctttttgaccagtgtcatcatcttttccaaaagcagagtataaagaaatcttgtggctccttttatttaaaaaaaatatttaaataaaatcttttttattggccttttggctagaaatggacatttattttccaggaaggatgatcccatcatacttctgctgaaaccagtgcatggcctcctctttgctaattctcttatgcctttccttgtacccctttgccttatttcaatctgggcaccctaagtactcttggggaaatcactctgcccagctagcaactgatgcagagctggctcagcccactgactgtgattggcctgtaactcaggccttagccaatcagtatatttcttcttcatggacacaaagattcatgctggaatagaaaatgatccaatcagagcctgtgagatacaatcagggtacttttgtggaattgcaattggaaatagaatgggagcttcttttctgaatggatattaatgaaagcagggtaggagcttatagctgccagcaaagatcccgccaccaggagaggagaccccatctccttgagaaaggatctaacacaacaaaggaagagctgataagtgaaaagaaactgagacctgatgagaatgtataagcctctggatccaactttgcctaaagctgaatactacaagatttttcattacataaatcaataatttatgtttttgcttgcataatttgaattagattttctatgtcaagcatcaagcagttgaagttccaacgaatacaagcactcttccttattttttttaatttagttattctaaataggaacaaatcaaagaagattaaattagaaagcaaaggacaaattcttcaccaaacagaaaagctttgaaccccagagattaaccaaggtgtgaattttcttcagagattttttatgagcattcaagattaagctagtatggcctcagatgagaagacacatggaaacttgagaaataaaagggaaagttaatgaaagatgttagtgaaatttcattcaccagcagtaatgggtgttcatgcatgttcctaagacattacaaaagttaaaatttaaactcatatgttaattcatagagaacttgatggcaaatttaagtcttcatagcaaatttaaatattaggaaaacatgagggtatgtgtgaaggttaacagagagtatgagagaaaaaaacactgattacaaacaaatatcagcaatatagcgaggtctcattacatgtaaactagtacatgcaaagaagtataaattgttgaattgtatagctggaaatgtcctctaacgcttccctcaggtagtaatttaggtagcgacataagggattatttaacccgatcacgatcactgaagaccctggtatcaggctaaatggagtaaagatgagggctagctctataattttggattttgaaagtccatgctccttatcccttttaagatttggataagaaacagcaaaactgaaaatcggtccatctatttactctccataggacttcctgaatggcctgtgtcatgatcaaagaaatggaatggggaataagctacataaaattacctggcagggagttcaggcatctctgtactatcattctttaaattgggatttgaaactaacagggccaaatcacctctgtcacctagttgcagtagcctctacagtcaataaaggaaagaatttctgccaggcatggtggctcacccctgtaatcccagcactttgggaggccgaggaggacggatcacgaggtcaggagttcaagaccagcctggccagcatggtgaaaccccgtctctactacaaatacaaaaattagccaggcatggtggcacgcacctgtaatcccagctacttgggaggctgaggcaggaaaattgcctaaacccaggaggcggaggtagtgcagtgagccaagttcacaccactgcactccagcctgggcaacagagtgagactcgatctcaaaaaaagaaaaaaagaaagaatttctacaaacagacaatttatgtgacttgcataggatagggtctttggcagtttggtggctacctagtagagagtcctggggacatggctctgggagcaagcttttccagtgagcatcgatgagtcagtaatgacatgctatgttggtaaaagccacccaacatcttaagtacatttttcctgtgccatataaatgcatgtattgagccatactgtgtacaaagcactttggggattaaaagttaagaacactaggccagatctctcatgagtttacaatctcttaggagaaattaagaacataaagcaagccacaagtgaaatgccaaaaaaaaaaaaggcaaaaatcaagttttctgttcataacaattcaaaagaaagatttcttccaactgaggcaagaagagacacccggaaggctttaagtaagaggctgcatttgaaccagccgttagggctctaggctgggagaaggggtgagcagaaggagaaaaaaacaagaaagagtatgtgccaagtgcgtagtgcccaaaacaaggccaaatattaaatgcttggagctgagagaaaaatgtgattcctctggcctatggttagataaagctttctatcagagatgatgttttacttagaggaaagcagaaaatagaagcgaatacggaatgatcgatgtatgtacagcataaggtcagggagcagataggtctggcagagagtgaggggtaatgtgggctggagaggaaattggaagccactcagtgaagctaaaaagtcagccaaaagcatttgatttccatgagaagtcataattttctgagtaagacaattctcctaaagcgttgactctctaggcacaagcagcaatagcatcctttaagaactcattagaaatgtgaattttagggcctgatcccagactacagactacagaaattgaacagtctgttttaataagtcctctagatgattctgctatacaccaacatttgagaacactgtgacttacacaattatgatccttaagggaatagccaagtttctaaaaaagataacttagttctaactcctgctgctgttttacagatcaaatctctggagacagaaactattctcttaaaattatgtagattcatgagtttggttaaggataaatgtacatagctcacatcccctcagtctctccctatagtccaaagttgttgagcaaggaatctgtagagtattgatttaaattgattaagttacatgtttatgaaactctaagagactagttttagaaatttcactgtaatttctgctgggataaatttgttagcctgggatatcttccaaagataaggcggatgctcaaatatgtgtaaattcatgcaactgttaacagagactgtgctgtaaggagtacttatgtcctatagtaattttattaaacaaatacatgtatgtctccttttgatgtgtacagaaatatactgtttaatctgaagaagctgattgaaacaggaaaaatttaaaaagtaaaaacactcaacccatgtaatactttatttttataacaaggtgttctctttaatacgcctattagattatcctgaagttctctatttactcttactttaaaaaaaatccaatgaaagaaaatttcagtaaagtttgttttgctagaagaatcaggattcttgtactgagttgtctaataatatgaatcaaattgatttacactgaatgaactagctcttgatttggtaaaattcaacaagcatttattaggtgctttcagaaataccaagatgcagcaaacactggcaactaataaaaaaaattacaagta

SEQ ID NO: 105893 - DNA, 887 bp, Homo sapiens
  Payload ID: 762
  Gene Symbol: ART4
  Gene Name: ADP-ribosyltransferase 4 (Dombrock blood group)
  ENST ID: ENST00000420600
  CDS Start-End: 1-822
cctcctgcaacgatgagaatctggctccttggaggcctgctgccattcctgctgctcctctctggcctgcagagacccacagagggttctgaggttgcaattaaaatcgacttcgacttcgcaccaggttcttttgatgatcagtaccaaggctgtagcaaacaggttatggagaaactaactcaaggggattatttcacaaaagacatagaagcccagaagaattattttaggatgtggcaaaaagcccacttagcctggcttaaccaaggaaaagttctaccccagaacatgactaccacacacgctgtggctattttgttttatacattgaacagcaatgttcattctgactttactagagccatggcctctgttgccaggactccacagcagtatgaacgttcattccacttcaaatatttacactactacctcacctcagcaatccagctgctgaggaaagacagcatcatggagaatggcactctgtgctatgaggtgcattataggacgaaggatgtccactttaatgcctacacaggggccaccattcgatttggccaattcctctccacatccctcctgaaagaagaggcacaggagtttgggaaccagacactatttaccatattcacctgcctgggtgcacctgtacagtacttctccctcaagaaggaagtcttgatccctccctatgagctgtttaaagttataaatatgagctaccacccaagaggagactggttgcagttgaggtcaactgggaacctgagcacatataactgtcagctgctaaaaggtattctttatctaaattgaggccactcaggatcacagaccactgctcttttataaaagttattttttctcagtgggtttttggg

SEQ ID NO: 105894 - DNA, 274 bp, Homo sapiens
  Payload ID: 762
  Gene Symbol: ART4
  Gene Name: ADP-ribosyltransferase 4 (Dombrock blood group)
  ENST ID: ENST00000430129
  CDS Start-End: 1-198
cctcctgcaacgatgagaatctggctccttggaggcctgctgccattcctgctgctcctctctggcctgcagagacccacagagggttctgaggttgcaattaaaatcgacttcgacttcgcaccaggttcttttgatgatcagtaccaaggctgtagcaaacagcttccagcaagaaatgcatccctgatcctatagctattgcatctctctcctttttgaccagtgtcatcatcttttccaaaagcagagtataaagaaatcttgtggctcc

SEQ ID NO: 105895 - DNA, 202 bp, Homo sapiens
  Payload ID: 762
  Gene Symbol: ART4
  Gene Name: ADP-ribosyltransferase 4 (Dombrock blood group)
  ENST ID: ENST00000544616
  CDS Start-End: 1-126
cctcctgcaacgatgagaatctggctccttggaggcctgctgccattcctgctgctcctctctggcctgcagagacccacagagggttctgagcttccagcaagaaatgcatccctgatcctatagctattgcatctctctcctttttgaccagtgtcatcatcttttccaaaagcagagtataaagaaatcttgtggctcc

SEQ ID NO: 105896 - DNA, 1241 bp, Homo sapiens
  Payload ID: 763
  Gene Symbol: ART5
  Gene Name: ADP-ribosyltransferase 5
  Uniprot ID: Q96L15
  ENST ID: ENST00000359918
  CDS Start-End: 142-1017
gtcgggttaccagcgcgggggctacagttagcctcgagaacctttgctttcagccggactccggactcctccggggacagcgcagcgcccgccagagccctcggcgctccctcccgctggcggcttccgcagccttcaaggatggcgctggcggctttgatgatcgccctcggcagcctcggcctccacacctggcaggcccaggctgttcccatcctgcccctgggcctggctccagacacctttgacgatacctatgtgggttgtgcagaggagatggaggagaaggcagcccccctgctaaaggaggaaatggcccaccatgccctgctgcgggaatcctgggaggcagcccaggagacctgggaggacaagcgtcgagggcttaccttgccccctggcttcaaagcccagaatggaatagccattatggtctacaccaactcatcgaacaccttgtactgggagttgaatcaggccgtgcggacgggcggaggctcccgggagctctacatgaggcactttcccttcaaggccctgcatttctacctgatccgggccctgcagctgctgcgaggcagtgggggctgcagcaggggacctggggaggtggtgttccgaggtgtgggcagccttcgctttgaacccaagaggctgggagactctgtccgcttgggccagtttgcctccagctccctggataaggcagtggcccacagatttggtaatgccaccctcttctctctaacaacttgctttggggcccctatacaggccttctctgtctttcccaaggagcgcgaggtgctgattcccccccatgaagtctttttggttaccagattctctcaggatggagcccagagcttggtgactctctggagctataatcagacctgtagccattttaactgcgcctatctgggtggggagaagaggcggggctgtgtgtctgcgccaggagccctgggaacgggtgaccttcatatgacgaagaggcacctccagcagccttgagaagcaagaacatggttccggacccagccctagcagccttctccccaaccaggatgttggcctggggaggccacagcagggctgagggaactctgctatgtgatggggacttcctgggacaagcaaggaaagtactgaggcagccacttgattgaacggtgttgcaatgtggagacatggagttttattgaggtagctacgtgattaaatggtattgcagtgtg

SEQ ID NO: 105897 - DNA, 1154 bp, Homo sapiens
  Payload ID: 763
  Gene Symbol: ART5
  Gene Name: ADP-ribosyltransferase 5
  Uniprot ID: Q96L15
  ENST ID: ENST00000397067
  CDS Start-End: 131-850
aatcctggacccgggatcccgtgcgcctggagacagggtccagatctgcctccagcccctcgaaaccaggactccagcacctctggtcccgccctcacccggacccctggccctcacgtctcctccagggatggcgctggcggctttgatgatcgccctcggcagcctcggcctccacacctggcaggcccaggctgttcccatcctgcccctgggcctggctccagacacctttgacgatacctatgtgggttgtgcagaggagatggaggagaaggcagcccccctgctaaaggaggaaatggcccaccatgccctgctgcgggaatcctgggaggcagcccaggagacctgggaggacaagcgtcgagggcttaccttgccccctggcttcaaagcccagaatggaatagccattatggtctacaccaactcatcgaacaccttgtactgggagttgaatcaggccgtgcggacgggcggaggctcccgggagctctacatgaggcactttcccttcaaggccctgcatttctacctgatccgggccctgcagctgctgcgaggcagtgggggctgcagcaggggacctggggaggtggtgttccgaggtgtgggcagccttcgctttgaacccaagaggctgggagactctgtccgcttgggccagtttgcctccagctccctggataaggcagtggcccacagatttggggagaagaggcggggctgtgtgtctgcgccaggggtgcagctagggtcacaatctgagggggcctcctctctgcccccctggaagactctgctcttggcccctggagagttccagctctcaggggttgggccctgaaagtccaacatctgccacttaggagccctgggaacgggtgaccttcatatgacgaagaggcacctccagcagccttgagaagcaagaacatggttccggacccagccctagcagccttctccccaaccaggatgttggcctggggaggccacagcagggctgagggaactctgctatgtgatggggacttcctgggacaagcaaggaaagtactgaggcagccacttgattgaacggtgttgcaatgtggagacatggagttttattgaggtagctacgtgattaaatggtattgcagtgtgga

SEQ ID NO: 105898 - DNA, 1504 bp, Homo sapiens
  Payload ID: 763
  Gene Symbol: ART5
  Gene Name: ADP-ribosyltransferase 5
  Uniprot ID: Q96L15
  ENST ID: ENST00000397068
  CDS Start-End: 394-1269
cggactcctccggggacagcgcagcgcccgccagagccctcggcgctccctcccgctggcggcttccgcagccttcaagtgggtcctccgcccccggccctcccctctcaggcggagccaaactgcggccccgcctttacagtctcggaaaggtccccagactggaggctctgaggaaggggtgtggggagtcgggggcggagacttggggcggggggcgggcaataaactcccaggccccgcccacgccccgccggggccctaatcctggacccgggatcccgtgcgcctggagacagggtccagatctgcctccagcccctcgaaaccaggactccagcacctctggtcccgccctcacccggacccctggccctcacgtctcctccagggatggcgctggcggctttgatgatcgccctcggcagcctcggcctccacacctggcaggcccaggctgttcccatcctgcccctgggcctggctccagacacctttgacgatacctatgtgggttgtgcagaggagatggaggagaaggcagcccccctgctaaaggaggaaatggcccaccatgccctgctgcgggaatcctgggaggcagcccaggagacctgggaggacaagcgtcgagggcttaccttgccccctggcttcaaagcccagaatggaatagccattatggtctacaccaactcatcgaacaccttgtactgggagttgaatcaggccgtgcggacgggcggaggctcccgggagctctacatgaggcactttcccttcaaggccctgcatttctacctgatccgggccctgcagctgctgcgaggcagtgggggctgcagcaggggacctggggaggtggtgttccgaggtgtgggcagccttcgctttgaacccaagaggctgggagactctgtccgcttgggccagtttgcctccagctccctggataaggcagtggcccacagatttggtaatgccaccctcttctctctaacaacttgctttggggcccctatacaggccttctctgtctttcccaaggagcgcgaggtgctgattcccccccatgaagtctttttggttaccagattctctcaggatggagcccagagcttggtgactctctggagctataatcagacctgtagccattttaactgcgcctatctgggtggggagaagaggcggggctgtgtgtctgcgccaggagccctgggaacgggtgaccttcatatgacgaagaggcacctccagcagccttgagaagcaagaacatggttccggacccagccctagcagccttctccccaaccaggatgttggcctggggaggccacagcagggctgagggaactctgctatgtgatggggacttcctgggacaagcaaggaaagtactgaggcagccacttgattgaacggtgttgcaatgtggagacatggagttttattgaggtagctacgtgattaaatggtattgcagtgtggagacatggaa

SEQ ID NO: 105899 - DNA, 844 bp, Homo sapiens
  Payload ID: 763
  Gene Symbol: ART5
  Gene Name: ADP-ribosyltransferase 5
  ENST ID: ENST00000453353
  CDS Start-End: 1-793
ggagatggaggagaaggcagcccccctgctaaaggaggaaatggcccaccatgccctgctgcgggaatcctgggaggcagcccaggagacctgggaggacaagcgtcgagggcttaccttgccccctggcttcaaagcccagaatggaatagccattatggtctacaccaactcatcgaacaccttgtactgggagttgaatcaggccgtgcggacgggcggaggctcccgggagctctacatgaggcactttcccttcaaggccctgcatttctacctgatccgggccctgcagctgctgcgaggcagtgggggctgcagcaggggacctggggaggtggtgttccgaggtgtgggcagccttcgctttgaacccaagaggctgggagactctgtccgcttgggccagtttgcctccagctccctggataaggcagtggcccacagatttggtaatgccaccctcttctctctaacaacttgctttggggcccctatacaggccttctctgtctttcccaaggagcgcgaggtgctgattcccccccatgaagtctttttggttaccagattctctcaggatggagcccagagcttggtgactctctggagctataatcagacctgtagccattttaactgcgcctatctgggtggggagaagaggcggggctgtgtgtctgcgccaggggtgcagctagggtcacaatctgagggggcctcctctctgcccccctggaagactctgctcttggcccctggagagttccagctctcaggggttgggccctgaaagtccaacatctgccacttaggagccctgggaacgggtgaccttcatatg

SEQ ID NO: 105900 - DNA, 455 bp, Homo sapiens
  Payload ID: 763
  Gene Symbol: ART5
  Gene Name: ADP-ribosyltransferase 5
  ENST ID: ENST00000425767
  CDS Start-End: 1-455
gctgttcccatcctgcccctgggcctggctccagacacctttgacgatacctatgtgggttgtgcagaggagatggaggagaaggcagcccccctgctaaaggaggaaatggcccaccatgccctgctgcgggaatcctgggaggcagcccaggagacctgggaggacaagcgtcgagggcttaccttgccccctggcttcaaagcccagaatggaatagccattatggtctacaccaactcatcgaacaccttgtactgggagttgaatcaggccgccttctctgtctttcccaaggagcgcgaggtgctgattcccccccatgaagtctttttggttaccagattctctcaggatggagcccagagcttggtgactctctggagctataatcagacctgtagccattttaactgcgcctatctgggtggggagaagaggcggggctgtgtgtc

SEQ ID NO: 105901 - DNA, 3466 bp, Homo sapiens
  Payload ID: 764
  Gene Symbol: ADRBK1
  Gene Name: adrenergic, beta, receptor kinase 1
  Uniprot ID: P25098
  ENST ID: ENST00000308595
  CDS Start-End: 291-2360
ggaggcggcggcggctccggggcgcgggcgcgcgggcggcggcggcggcggcgccccgactgcagtcccggcgggagcggagcgcgagccggggccgggcccgagccggcgccatggggcggcgccgcctgtgagcggcggcgagcggagccgcgggcgccgagcagggccaggcgggaggcgtcggcgcccgaggccgagcgagccgcggccgggccgggccgagcgccgagcgagcaggagcggcggcggcggcggcggcggcgggaggaggcagcgccgccgccaagatggcggacctggaggcggtgctggccgacgtgagctacctgatggccatggagaagagcaaggccacgccggccgcgcgcgccagcaagaagatcctgctgcccgagcccagcatccgcagtgtcatgcagaagtacctggaggaccggggcgaggtgacctttgagaagatcttttcccagaagctggggtacctgctcttccgagacttctgcctgaaccacctggaggaggccaggcccttggtggaattctatgaggagatcaagaagtacgagaagctggagacggaggaggagcgtgtggcccgcagccgggagatcttcgactcatacatcatgaaggagctgctggcctgctcgcatcccttctcgaagagtgccactgagcatgtccaaggccacctggggaagaagcaggtgcctccggatctcttccagccatacatcgaagagatttgtcaaaacctccgaggggacgtgttccagaaattcattgagagcgataagttcacacggttttgccagtggaagaatgtggagctcaacatccacctgaccatgaatgacttcagcgtgcatcgcatcattgggcgcgggggctttggcgaggtctatgggtgccggaaggctgacacaggcaagatgtacgccatgaagtgcctggacaaaaagcgcatcaagatgaagcagggggagaccctggccctgaacgagcgcatcatgctctcgctcgtcagcactggggactgcccattcattgtctgcatgtcatacgcgttccacacgccagacaagctcagcttcatcctggacctcatgaacggtggggacctgcactaccacctctcccagcacggggtcttctcagaggctgacatgcgcttctatgcggccgagatcatcctgggcctggagcacatgcacaaccgcttcgtggtctaccgggacctgaagccagccaacatccttctggacgagcatggccacgtgcggatctcggacctgggcctggcctgtgacttctccaagaagaagccccatgccagcgtgggcacccacgggtacatggctccggaggtcctgcagaagggcgtggcctacgacagcagtgccgactggttctctctggggtgcatgctcttcaagttgctgcgggggcacagccccttccggcagcacaagaccaaagacaagcatgagatcgaccgcatgacgctgacgatggccgtggagctgcccgactccttctcccctgaactacgctccctgctggaggggttgctgcagagggatgtcaaccggagattgggctgcctgggccgaggggctcaggaggtgaaagagagcccctttttccgctccctggactggcagatggtcttcttgcagaagtaccctcccccgctgatccccccacgaggggaggtgaacgcggccgacgccttcgacattggctccttcgatgaggaggacacaaaaggaatcaagttactggacagtgatcaggagctctaccgcaacttccccctcaccatctcggagcggtggcagcaggaggtggcagagactgtcttcgacaccatcaacgctgagacagaccggctggaggctcgcaagaaagccaagaacaagcagctgggccatgaggaagactacgccctgggcaaggactgcatcatgcatggctacatgtccaagatgggcaaccccttcctgacccagtggcagcggcggtacttctacctgttccccaaccgcctcgagtggcggggcgagggcgaggccccgcagagcctgctgaccatggaggagatccagtcggtggaggagacgcagatcaaggagcgcaagtgcctgctcctcaagatccgcggtgggaaacagttcattttgcagtgcgatagcgaccctgagctggtgcagtggaagaaggagctgcgcgacgcctaccgcgaggcccagcagctggtgcagcgggtgcccaagatgaagaacaagccgcgctcgcccgtggtggagctgagcaaggtgccgctggtccagcgcggcagtgccaacggcctctgacccgcccacccgccttttataaacctctaatttattttgtcgaatttttattatttgttttcccgccaagcggaaaaggttttattttgtaattattgtgatttcccgtggccccagcctggcccagctcccccgggaggggcccgcttgcctcggctcctgctgcaccaacccagccgctgcccggcgccctctgtcctgacttcaggggctgcccgctcccagtgtcttcctgtgggggaagagcacagccctcccgccccttccccgagggatgatgccacaccaagctgtgccaccctgggctctgtgggctgcactctgtgcccatgggcactgctgggtggcccatcccccctcaccaggggcaggcacagcacagggatccgacttgaattttcccactgcaccccctcctgctgcagaggggcaggccctgcactgtcctgctccacagtgttggcgagaggaggggcccgttgtctccctggccctcaaggcctcccacagtgactcgggctcctgtgcccttattcaggaaaagcctctgtgtcactggctgcctccactcccacttccctgacactgcggggcttggctgagagagtggcattggcagcaggtgctgctaccctccctgctgtcccctcttgccccaacccccagcacccgggctcagggaccacagcaaggcacctgcaggttgggccatactggcctcgcctggcctgaggtctcgctgatgctgggctgggtgcgaccccatctgcccaggacggggccggccaggtgggcgggcagcacagcaaggaggctggctggggcctatcagtgtgccccccatcctggcccatcagtgtacccccgcccaggctggccagccccacagcccacgtcctgtcagtgccgccgcctcgcccaccgcatgccccctcgtgccagtcgcgctgcctgtgtggtgtcgcgccttctcccccccggggctgggttggcgcaccctcccctcccgtctactcattccccggggcgtttctttgccgatttttgaatgtgattttaaagagtgaaaaatgagactatgcgtttttataaaaaatggtgcctga

SEQ ID NO: 105902 - DNA, 1458 bp, Homo sapiens
  Payload ID: 764
  Gene Symbol: ADRBK1
  Gene Name: adrenergic, beta, receptor kinase 1
  ENST ID: ENST00000526285
  CDS Start-End: 220-1446
cgggagcggagcgcgagccggggccgggcccgagccggcgccatggggcggcgccgcctgtgagcggcggcgagcggagccgcgggcgccgagcagggccaggcgggaggcgtcggcgcccgaggccgagcgagccgcggccgggccgggccgagcgccgagcgagcaggagcggcggcggcggcggcggcggcgggaggaggcagcgccgccgccaagatggcggacctggaggcggtgctggccgacgtgagctacctgatggccatggagaagagcaaggccacgccggccgcgcgcgccagcaagaagatcctgctgcccgagcccagcatccgcagtgtcatgcagaagtacctggaggaccggggcgaggtgacctttgagaagatcttttcccagaagctggggtacctgctcttccgagacttctgcctgaaccacctggaggaggccaggcccttggtggaattctatgaggagatcaagaagtacgagaagctggagacggaggaggagcgtgtggcccgcagccgggagatcttcgactcatacatcatgaaggagctgctggcctgctcgcatcccttctcgaagagtgccactgagcatgtccaaggccacctggggaagaagcaggtgcctccggatctcttccagccatacatcgaagagatttgtcaaaacctccgaggggacgtgttccagaaattcattgagagcgataagttcacacggttttgccagtggaagaatgtggagctcaacatccacctgaccatgaatgacttcagcgtgcatcgcatcattgggcgcgggggctttggcgaggtctatgggtgccggaaggctgacacaggcaagatgtacgccatgaagtgcctggacaaaaagcgcatcaagatgaagcagggggagaccctggccctgaacgagcgcatcatgctctcgctcgtcagcactggggactgcccattcattgtctgcatgtcatacgcgttccacacgccagacaagctcagcttcatcctggacctcatgaacggtggggacctgcactaccacctctcccagcacggggtcttctcagaggctgacatgcgcttctatgcggccgagatcatcctgggcctggagcacatgcacaaccgcttcgtggtctaccgggacctgaagccagccaacatccttctggacgagcatggccacgtgcggatctcggacctgggcctggcctgtgacttctccaagaagaagccccatgccagcgtgggcacccacgggtacatggctccggaggtcctgcagaagggctcgcgctgcctgtgtggtgtcgcgccttctcccccccggggctgggttggcgcaccctcccctcccgtctactcattccccggggcgtttctttgccgatttttgaatgtgattttaaagagtgaaaaatgagactatgcgttt

SEQ ID NO: 105903 - DNA, 9103 bp, Homo sapiens
  Payload ID: 765
  Gene Symbol: ADRBK2
  Gene Name: adrenergic, beta, receptor kinase 2
  Uniprot ID: P35626
  ENST ID: ENST00000324198
  CDS Start-End: 193-2259
ggccggctacagcctgcggcgcgcgcagagcgctagtggggcgcgcggcgcgcgcgcggggcgggggcgcgcggaggggggggctgccccggggcggcccccccaggtcggggcgcggcgggcggcggcggcgggcgcgcgtcccgtccaggtccggagtaaccgccgccgccgccgccaaagctcgccaacatggcggacctggaggctgtgctggccgatgtcagttacctgatggccatggagaagagcaaggcgaccccggccgcccgcgccagcaagaggatcgtcctgccggagcccagtatccggagtgtgatgcagaagtaccttgcagagagaaatgaaataacctttgacaagattttcaatcagaaaattggtttcttgctatttaaagatttttgtttgaatgaaattaatgaagctgtacctcaggtgaagttttatgaagagataaaggaatatgaaaaacttgataatgaggaagaccgcctttgcagaagtcgacaaatttatgatgcctacatcatgaaggaacttctttcctgttcacatcctttctcaaagcaagctgtagaacacgtacaaagtcatttatccaagaaacaagtgacatcaactctttttcagccatacatagaagaaatttgtgaaagccttcgaggtgacatttttcaaaaatttatggaaagtgacaagttcactagattttgtcagtggaaaaacgttgaattaaatatccatttgaccatgaatgagttcagtgtgcataggattattggacgaggaggattcggggaagtttatggttgcaggaaagcagacactggaaaaatgtatgcaatgaaatgcttagataagaagaggatcaaaatgaaacaaggagaaacattagccttaaatgaaagaatcatgttgtctcttgtcagcacaggagactgtcctttcattgtatgtatgacctatgccttccataccccagataaactctgcttcatcctggatctgatgaacgggggcgatttgcactaccacctttcacaacacggtgtgttctctgagaaggagatgcggttttatgccactgaaatcattctgggtctggaacacatgcacaatcggtttgttgtctacagagatttgaagccagcaaatattctcttggatgaacatggacacgcaagaatatcagatcttggtcttgcctgcgatttttccaaaaagaagcctcatgcgagtgttggcacccatgggtacatggctcccgaggtgctgcagaaggggacggcctatgacagcagtgccgactggttctccctgggctgcatgcttttcaaacttctgagaggtcacagccctttcagacaacataaaaccaaagacaagcatgaaattgaccgaatgacactcaccgtgaatgtggaacttccagacaccttctctcctgaactgaagtcccttttggagggcttgcttcagcgagacgttagcaagcggctgggctgtcacggaggcggctcacaggaagtaaaagagcacagctttttcaaaggtgttgactggcagcatgtctacttacaaaagtacccaccacccttgattcctccccggggagaagtcaatgctgctgatgcctttgatattggctcatttgatgaagaggataccaaagggattaagctacttgattgcgaccaagaactctacaagaacttccctttggtcatctctgaacgctggcagcaagaagtaacggaaacagtttatgaagcagtaaatgcagacacagataaaatcgaggccaggaagagagctaaaaataagcaacttggccacgaagaagattacgctctggggaaggactgtattatgcacgggtacatgctgaaactgggaaacccatttctgactcagtggcagcgtcgctatttttacctctttccaaatagacttgaatggagaggagagggagagtcccggcaaaatttactgacaatggaacagattctctctgtggaagaaactcaaattaaagacaaaaaatgcattttgttcagaataaaaggagggaaacaatttgtcttgcaatgtgagagtgatccagagtttgtgcagtggaagaaagagttgaacgaaaccttcaaggaggcccagcggctattgcgtcgtgccccgaagttcctcaacaaacctcggtcaggtactgtggagctcccaaagccatccctctgtcacagaaacagcaacggcctctagcacccagaaacagggagggtcctcgaggaggacacaccagggtctcagccttttggggtgaacgaggatgaggcatctgatctattcgctaccgggactcctccaggctcccgagaggagtcgggacccttcggcttggggtcagctcagctccctgccttgtcacatttgtctgcattagaaactactgaagaaataaaagttctttttctttgctacacactttggtacctatgaacctagaacttgaagtgactcctacttatcacgtaaatttttatgtctgatatcaaacacatcttagactccccagaatggaatttaaagatgttcagtgttgggtaacagattgccctaagcattgccacatattctgtctagtcactgctgattttctatgtctttgctccatactgctgggggatgggagagccacagtgtgtttcttttgtgcacttcgcaactgacttcttgtcctggggttaaaagttgaagatattttctgatgatattaaaagttgaagatatttctgcacttgggccctcctctgggagccgcacccacatgactgccctgcctctgaccagtctgttccggggccccctcagccaggtgggaatgacggacacgtactatccaagtgtatgggattaactaatcattgaaggcattcatccgtccatcattggaaagatttacagtgattctgaaggacaggccgtggagttttaggtttcaggggcaagagcagttttcaaaagtctttgagtccagtgtgcacgagtcgacaagcagtacctggcatgcaggagcactcatgggtgagtccgtctcaggtctcgacaattagcagttgtgtgacagtcattctggttccttctgcctgaccctgggagacatatcagtaatggatgtacaaaagcaggtctgttttatgtcttagtataatttcagatgaattgtattgaaaaaatgctgaggaatgaatgtgtcaaaatgggttaactgtgtatattgactttcatgtcgtcatgcatctgtcatgaatgaatgatactttgcactgggctgtacgacagtgaggaccttagggcatgaagcctttttcctggtcccagcagcatctgccctgtgaagtttgttttctcccactgcctccaggccccactgatacccccaaatagatgctgggttatgagaaccagcgaaatcccccatgtcatcagtcttaaaaaaaaaattttacaaatccacgtatttgtcccattcttggagtagttttagtgtatgtctttacattaactactaacagtataaataacttgacatcgtaattgtctgcatcctgtccttgatatttttagcagttccaaatctttgtttttgtatttgtttgctgtgttcatgggcaaagtaagtactttttaatgcagttattttgagagtttggaagataattaccaaaagggtccattatttcataagagttactttgcaaaaaaaaaaatgtgggtttttttttttgtctatctcaactactagttggggtttaaattaacatacattttctactatctgttatttccagtgtgggaggagggatgtactacttacatgcattctccttatttaaaaaggaagaatagtattcaaattctgttgaaacacacacacacacacacacacacacacacacacactccagaagcagaaaagccattgttcttaaagagtgaatgtcttcccagccctggttaattatagctgtgactgatgccgttcccgtctgcatctcaagctcataggttctcagcatgtgcagttgaggatgcgctgggcctcatgcctgttctagatctccaggataaagggcctgctgttgactccaccagggtctgggcttagcgtctaatatctcgtacctagggcgtgagctgcacaaacgtgttcagaaagattattcaactttcccatacttgttctaaaattgagctgatccgcatctctttcaaaaactagaatttctgctctaagaatagaacataaggctccactcccttttagaaaagatatatgaattggaaaatgctctgaaagtccttttgcttcaaacaaaagtgtaaacttttacacttccccaactcacatttgatttgtaatgatatggttgagaagtacatctagatgtcatttattaaaagtgctttgtaagactagattgagctgtttctgagggcggtcaccagttgtgttggggtctggtttgagtgccttctgccaaaatgttgtgatggaggtgtttctgcgaccagacacaggataccgctgtgtctgcacccggttgcctgcatggccagaggaaaagtcagttggattaaacatcatggtatacttggctgttgtttttttttaattttttaattttttgggatagggcctcgctctgtcacccaggctggagaacagtgggatgatcatggctcactgcagccttgaattcctaggttcaagcaatcctcccacgtcagcctcctgagtagctaggactacaggtgcatgccacctttcctggctaatttattttttgggtagagatggggtcttgaactcttaggctcaagtgatcctccttccttggcctcccaaaatgctggaattagagatgtaagccaccatgcccagccatagtacttggatgttttagaaggttttccaagtattacataattcctagatgttcacccttattacactccaactattaaaaaggtcaaaattcagcctattttttttcattattttagattcctgtggttgggatattttaacattgatgagaaaaataattgaggttgatatttttacaaaatcatgcggtaataagtcttgatttcatgattcaaaagaatcaataaagcctaaaaataatagattactttaagctgctatgtaagatatatatggaataaattaaaaacctttgtgaattcaggtttattatttttaacctaaaacattctctttggttcattcatcccctcatgtcatgggggctcattggttttccttctttgtcatatttaagtatgatttttcaacaaaacttctagaagtcagcttattatgtcaccattcatgcaaagtgctcatgcctctgattggtccattcactgacgtgacaatttcaggtcctatgtttaaaaagaaggggctggccgggcacgatggctcacgcctataatcccagcactttgggaggccgagaggggcggttcacgaggtcaggagattgagaccatcctggttagcagagtgaaaccccgtctctactaaaaatacaaataaaaattagccgggcgtggtggcgggcgcctgtagtcccagctacttgggaggctgaggcaggagaatggcatgaacccgggaggcagagcttgcagtgagccgagattgcgccactgcactccagcctgggcgacagagcgagactctgtctcaaaaaaaaaaaggaggggggctaaatatccagtgagatgcactgaggaaaggaagcattttgctgaagacagcagcagcaacaaacaatggtctgtttgttgcaaacaagatgtagcttgatttctggtctgacatatgccatatacagatattagaaacgactgtttgaaggccacactggtcatctacaaagtaatgtttaccaattgacgacagggatttaactagattaaaaagatcaaagtgtggtttttctctgctttttaaaatttcactcggaatttgtagctgggccaattcaacacattttacttttcagtggaattgatttttctaatgtttcagaattttaacatatcaagaagaaaacaacgttctcaaagtctggcctctttagcatgatgtaaacctatagaaatgctttgaaatgtgctggtgtaagataagagttatcttgtatgatttaatcatatgcagtgttgtctcagttacgttcagggaaatgtttctgtgtcattcagagatgcttgatgaattaacacctcccaccctgagtgaggggttgacttgttgggagatgatttgggcttcactgggatctgtgacaggtgggggctgggctgggtgtcacaaagagaatagtggtagaaatcgggcgaaggaagaaagaagttactggtaaaaatcattacaccataaagcaccaaggaaataactgagttaaaataggtgaagtttcttttttcccccctgtaacaggagagttttccttatgataattattctgagacttggtcactttgtttttgaatgtggagctgctgaactcattcagaagccatttgctgcctatcaggactttctgaagaagttcttttgcctctgcctaccctctggcaccctcccatggaggcacaggggacccagagctaaagcattaccaggccatctccaaaacaccccgtgtgtgtgtgtgtgtgtgtgtgtgtgtgtgtgtgtgtgtgtgtgcactttgcagcccccgaggtggagaggcagtgtctggatcactgtgaatgcattgccccattggtcagttggggacactgttacaaatccactgaagtcctggtaaaactgtcaagagtaacaggcctcttctgttctaccctgctcacttccacggtgagttaccagcctgggcaacacagcaagaccccatctctacaaaaaaaatttttttaagtaattaaccgtttaaattttttcctaaagatttaacatgatttttccctcctatgtaaagtttactggagagacttgaattacttaaattcatgttaatatgatttttttttaatccaggtcacattttaacaaagtttattatgaaacaaatgaaatttgaactctaaaatggtactccttggcttcctcaagtcacaatgaactttatattttctttgtccttaaggactaagatagttgttttatttcagccgaatcacagagataaccactcctgcaggcccccacagctggcccaaaggggctgtctttctgacctggctgtgttagcactgattgagaaacgcaggctcccaaattttaaattgcctttattaaaaacacaaactacagaaaatgggttaagagtatacgcatttcatcaaacacatataggggaaaaaatccttcaatttagagttaaataactcagctttgtatagtagagttagcgctccagtatctaacaatctcagaatcatctctgaaaactggtaactatgcttccatttttaattttgtcctaaatatcagatgtctttgatgtaagggtagggaatggagaaatattttcaattgtgtatttgtattacaaagaacttgaaatttactttcttagttgattatattaaatgatgtatatattatatgtggtttataagctcaacactggccatttttttagttttattgttaaatggtatttttctatgtttaattataatagatctggctttttctggatagcataaagatcactgaactatatatatataagaaacaagagttctattttagcacaaaggcattttatattatttattgaatccataagtttgttttcgtcaaaaacattccatattatttctgctcctttttatttgtatagtttgttatttaaagaaatggcagtccttcctgttcttaatacaataaaattgaaataatgcacctagtaatgtggccgacatctcttctcaccaccatggactgttttcaacaacagttgatcttctggtctgtgctgagaggcgcatgcatgtctttcgtcacgtcgggcagcacacctgctgtgaaatactgctttcatctacctcttcagaaggcttcttgcttgttgacaagtaccgcaaaggctttattctggactggctatctcataaaaggatttctgtaagactttgcagtgtcattccctcagaacctaggtttgtttctaaagccacggtattgtccaggagcccctgtgtgtggggcaggtagctatccctcccatgtcattagtaatcctttaggatttaaggtacaactggacagcatcattccttccccttattgtgccaaatccccaccatcagccttgccattgccttaagatttgattattgcacccaattacctaaccactaaacagaaaggccaccttcactctttgaaaaaggcaagctgtgcttagaaacactgcttttaagagtagcacatttgagtgtgactttttccccccttcactatttcaaaatggttttgaaatggggtcttaaaggtaagcgccctcatacatgactgaaactttgtgagaggtcttatatttgaatggacccttaatgatttatgtgaaatagaatgaagtcctgtctctgtgagagaacgtgcctcctcactcatttgtctctgtctgttttcatagccatcaatatagtaacatatttactatattcttgaatacccttgaagaaagaaatccgttttctattgtgcattgctatacgaagtgaagccagtaaactagatactgtaaatctagatattgtacctagacaaaatatcattggttctatctctttttgtatctgttgtgccagggaaggtttataatcccttctcagtatacactcactagtgcacgtctgaaatagtatcccacgggagatgctgctccacgtctgaggtcacctgccctgtgtggggcacaccaccgtcagcaccaccgtttttacagttactttggagctgctagactggttttctgtgttggtaaattgcctatataaatctgaataaaaaggatctgtacaaaga

SEQ ID NO: 105904 - DNA, 657 bp, Homo sapiens
  Payload ID: 765
  Gene Symbol: ADRBK2
  Gene Name: adrenergic, beta, receptor kinase 2
  ENST ID: ENST00000455558
  CDS Start-End: 1-138
accccggccgcccgcgccagcaagaggatcgtcctgccggagcccagtatccggagtgtgatgcagaagtaccttgcagagagaaatgaaataacctttgacaagattttcaatcagaaaattgataaaggaatatgaaaaacttgataatgaggaagaccgcctttgcagaagtcgacaaatttatgatgcctacatcatgaaggaacttctttcctgttcacatcctttctcaaagcaagctgtagaacacgtacaaagtcatttatccaagaaacaagtgacatcaactctttttcagccatacatagaagaaatttgtgaaagccttcgaggtgacatttttcaaaaatttatggaaagtgacaagttcactagattttgtcagtggaaaaacgttgaattaaatatccatttgaccatgaatgagttcagtgtgcataggattattggacgaggaggattcggggaagtttatggttgcaggaaagcagacactggaaaaatgtatgcaatgaaatgcttagataagaagaggatcaaaatgaaacaaggagaaacattagccttaaatgaaagaatcatgttgtctcttgtcagcacaggatgtttcaaaacaacgccacaaataacattcctccctccctgacccgtgct

SEQ ID NO: 105905 - DNA, 2873 bp, Homo sapiens
  Payload ID: 765
  Gene Symbol: ADRBK2
  Gene Name: adrenergic, beta, receptor kinase 2
  ENST ID: ENST00000619906
  CDS Start-End: 89-1252
ggggcgcgcggaggggggggctgccccggggcggcccccccaggtcggggcgcggcgggcggcggcgccgccgccaaagctcgccaacatggcggacctggaggctgtgctggccgatgtcagttacctgatggccatggagaagagcaaggcgaccccggccgcccgcgccagcaagaggatcgtcctgccggagcccagtatccggagtgtgatgcagaagtaccttgcagagagaaatgaaataacctttgacaagattttcaatcagaaaattggtttcttgctatttaaagatttttgtttgaatgaaattaatgaagctgtacctcaggtgaagttttatgaagagataaaggaatatgaaaaacttgataatgaggaagaccgcctttgcagaagtcgacaaatttatgatgcctacatcatgaaggaacttctttcctgttcacatcctttctcaaagcaagctgtagaacacgtacaaagtcatttatccaagaaacaagtgacatcaactctttttcagccatacatagaagaaatttgtgaaagccttcgaggtgacatttttcaaaaatttatggaaagtgacaagttcactagattttgtcagtggaaaaacgttgaattaaatatccatttgaccatgaatgagttcagtgtgcataggattattggacgaggaggattcggggaagtttatggttgcaggaaagcagacactggaaaaatgtatgcaatgaaatgcttagataagaagaggatcaaaatgaaacaaggagaaacattagccttaaatgaaagaatcatgttgtctcttgtcagcacaggagactgtcctttcattgtatgtatgacctatgccttccataccccagataaactctgcttcatcctggatctgatgaacgggggcgatttgcactaccacctttcacaacacggtgtgttctctgagaaggagatgcggttttatgccactgaaatcattctgggtctggaacacatgcacaatcggtttgttgtctacagagatttgaagccagcaaatattctcttggatgaacatggacacgcaagaatatcagatcttggtcttgcctgcgatttttccaaaaagaagcctcatgcgagtgttggcacccatgggtacatggctcccgaggtgctgcagaaggggacggcctatgacagcagtgccgactggttctccctgggctgcatgcttttcaaacttctgagaggatgaagaattgatactgaaggtttctatgtggctgacagtcactaaaccaacaagtcacaacttgaacccagcttttctgactctggagtcgggttctgcacagggaaaacaggaagcgctcagagctgtggagaatctgctggtgcacgtcacagccctttcagacaacataaaaccaaagacaagcatgaaattgaccgaatgacactcaccgtgaatgtggaacttccagacaccttctctcctgaactgaagtcccttttggagggcttgcttcagcgagacgttagcaagcggctgggctgtcacggaggcggctcacaggaagtaaaagagcacagctttttcaaaggtgttgactggcagcatgtctacttacaaaagtacccaccacccttgattcctccccggggagaagtcaatgctgctgatgcctttgatattggctcatttgatgaagaggataccaaagggattaagctacttgattgcgaccaagaactctacaagaacttccctttggtcatctctgaacgctggcagcaagaagtaacggaaacagtttatgaagcagtaaatgcagacacagataaaatcgaggccaggaagagagctaaaaataagcaacttggccacgaagaagattacgctctggggaaggactgtattatgcacgggtacatgctgaaactgggaaacccatttctgactcagtggcagcgtcgctatttttacctctttccaaatagacttgaatggagaggagagggagagtcccggcaaaatttactgacaatggaacagattctctctgtggaagaaactcaaattaaagacaaaaaatgcattttgttcagaataaaaggagggaaacaatttgtcttgcaatgtgagagtgatccagagtttgtgcagtggaagaaagagttgaacgaaaccttcaaggaggcccagcggctattgcgtcgtgccccgaagttcctcaacaaacctcggtcaggtactgtggagctcccaaagccatccctctgtcacagaaacagcaacggcctctagcacccagaaacagggagggtcctcgaggaggacacaccagggtctcagccttttggggtgaacgaggatgaggcatctgatctattcgctaccgggactcctccaggctcccgagaggagtcgggacccttcggcttggggtcagctcagctccctgccttgtcacatttgtctgcattagaaactactgaagaaataaaagttctttttctttgctacacactttggtacctatgaacctagaacttgaagtgactcctacttatcacgtaaatttttatgtctgatatcaaacacatcttagactccccagaatggaatttaaagatgttcagtgttgggtaacagattgccctaagcattgccacatattctgtctagtcactgctgattttctatgtctttgctccatactgctgggggatgggagagccacagtgtgtttcttttgtgcacttcgcaactgacttcttgtcctggggttaaaagttgaagatattttctgatgatattaaaagttgaagatatttctgcacttgggccctcctctgggagccgcacccacatg

SEQ ID NO: 105906 - DNA, 2281 bp, Homo sapiens
  Payload ID: 766
  Gene Symbol: ADRA1A
  Gene Name: adrenoceptor alpha 1A
  Uniprot ID: P35348
  ENST ID: ENST00000276393
  CDS Start-End: 437-1837
gaattccgaatcatgtgcagaatgctgaatcttcccccagccaggacgaataagacagcgcggaaaagcagattctcgtaattctggaattgcatgttgcaaggagtctcctggatcttcgcacccagcttcgggtagggagggagtccgggtcccgggctaggccagcccggcaggtggagagggtccccggcagccccgcgcgcccctggccatgtctttaatgccctgccccttcatgtggccttctgagggttcccagggctggccagggttgtttcccacccgcgcgcgcgctctcacccccagccaaacccacctggcagggctccctccagccgagaccttttgattcccggctcccgcgctcccgcctccgcgccagcccgggaggtggccctggacagccggacctcgcccggccccggctgggaccatggtgtttctctcgggaaatgcttccgacagctccaactgcacccaaccgccggcaccggtgaacatttccaaggccattctgctcggggtgatcttggggggcctcattcttttcggggtgctgggtaacatcctagtgatcctctccgtagcctgtcaccgacacctgcactcagtcacgcactactacatcgtcaacctggcggtggccgacctcctgctcacctccacggtgctgcccttctccgccatcttcgaggtcctaggctactgggccttcggcagggtcttctgcaacatctgggcggcagtggatgtgctgtgctgcaccgcgtccatcatgggcctctgcatcatctccatcgaccgctacatcggcgtgagctacccgctgcgctacccaaccatcgtcacccagaggaggggtctcatggctctgctctgcgtctgggcactctccctggtcatatccattggacccctgttcggctggaggcagccggcccccgaggacgagaccatctgccagatcaacgaggagccgggctacgtgctcttctcagcgctgggctccttctacctgcctctggccatcatcctggtcatgtactgccgcgtctacgtggtggccaagagggagagccggggcctcaagtctggcctcaagaccgacaagtcggactcggagcaagtgacgctccgcatccatcggaaaaacgccccggcaggaggcagcgggatggccagcgccaagaccaagacgcacttctcagtgaggctcctcaagttctcccgggagaagaaagcggccaaaacgctgggcatcgtggtcggctgcttcgtcctctgctggctgccttttttcttagtcatgcccattgggtctttcttccctgatttcaagccctctgaaacagtttttaaaatagtattttggctcggatatctaaacagctgcatcaaccccatcatatacccatgctccagccaagagttcaaaaaggcctttcagaatgtcttgagaatccagtgtctctgcagaaagcagtcttccaaacatgccctgggctacaccctgcacccgcccagccaggccgtggaagggcaacacaaggacatggtgcgcatccccgtgggatcaagagagaccttctacaggatctccaagacggatggcgtttgtgaatggaaatttttctcttccatgccccgtggatctgccaggattacagtgtccaaagaccaatcctcctgtaccacagcccgggtgagaagtaaaagctttttgcaggtctgctgctgtgtagggccctcaacccccagccttgacaagaaccatcaagttccaaccattaaggtccacaccatctccctcagtgagaacggggaggaagtctaggacaggaaagatgcagaggaaaggggaataatcttaggtacccaccccacttccttctcggaaggccagctcttcttggaggacaagacaggaccaatcaaagaggggacctgctgggaatggggtgggtggtagacccaactcatcaggcagcgggtagggcacagggaagagggagggtgtctcacaaccaaccagttcagaatgatacggaacagcatttccctgcagctaatgctttcttggtcactctgtgcccacttcaacgaaaaccaccatgggaaacagaatttcatgcacaatccaaaagactataaatataggattatgatttcatcatgaatattttgagcacacactctaagtttggagctatttcttgatggaagtgaggggattttattttcaggctcaacctactgacagccacatttgacatttatg

SEQ ID NO: 105907 - DNA, 1765 bp, Homo sapiens
  Payload ID: 766
  Gene Symbol: ADRA1A
  Gene Name: adrenoceptor alpha 1A
  Uniprot ID: P35348
  ENST ID: ENST00000354550
  CDS Start-End: 201-1568
tcatgtggccttctgagggttcccagggctggccagggttgtttcccacccgcgcgcgcgctctcacccccagccaaacccacctggcagggctccctccagccgagaccttttgattcccggctcccgcgctcccgcctccgcgccagcccgggaggtggccctggacagccggacctcgcccggccccggctgggaccatggtgtttctctcgggaaatgcttccgacagctccaactgcacccaaccgccggcaccggtgaacatttccaaggccattctgctcggggtgatcttggggggcctcattcttttcggggtgctgggtaacatcctagtgatcctctccgtagcctgtcaccgacacctgcactcagtcacgcactactacatcgtcaacctggcggtggccgacctcctgctcacctccacggtgctgcccttctccgccatcttcgaggtcctaggctactgggccttcggcagggtcttctgcaacatctgggcggcagtggatgtgctgtgctgcaccgcgtccatcatgggcctctgcatcatctccatcgaccgctacatcggcgtgagctacccgctgcgctacccaaccatcgtcacccagaggaggggtctcatggctctgctctgcgtctgggcactctccctggtcatatccattggacccctgttcggctggaggcagccggcccccgaggacgagaccatctgccagatcaacgaggagccgggctacgtgctcttctcagcgctgggctccttctacctgcctctggccatcatcctggtcatgtactgccgcgtctacgtggtggccaagagggagagccggggcctcaagtctggcctcaagaccgacaagtcggactcggagcaagtgacgctccgcatccatcggaaaaacgccccggcaggaggcagcgggatggccagcgccaagaccaagacgcacttctcagtgaggctcctcaagttctcccgggagaagaaagcggccaaaacgctgggcatcgtggtcggctgcttcgtcctctgctggctgccttttttcttagtcatgcccattgggtctttcttccctgatttcaagccctctgaaacagtttttaaaatagtattttggctcggatatctaaacagctgcatcaaccccatcatatacccatgctccagccaagagttcaaaaaggcctttcagaatgtcttgagaatccagtgtctctgcagaaagcagtcttccaaacatgccctgggctacaccctgcacccgcccagccaggccgtggaagggcaacacaaggacatggtgcgcatccccgtgggatcaagagagaccttctacaggatctccaagacggatggcgtttgtgaatggaaatttttctcttccatgccccgtggatctgccaggattacagtgtccaaagaccaatcctcctgtaccacagcccggaggggaatggattgtagatatttcaccaagaattgcagagagcatatcaagcatgtgaattttatgatgccaccgtggagaaagggttcagaatgctgatctccaggtagctggagacctaggcagtctgcaaatgaggagtcagctggaagctatggctatgtattatgtgacatcgcttgttcctaagtgaaaactggatatcccaaccttctggcccagtaggtttcatggttaagacctggtagtgagaacattttaggaactatttgcttgggcaggcaatttttcactct

SEQ ID NO: 105908 - DNA, 1697 bp, Homo sapiens
  Payload ID: 766
  Gene Symbol: ADRA1A
  Gene Name: adrenoceptor alpha 1A
  Uniprot ID: P35348
  ENST ID: ENST00000380572
  CDS Start-End: 437-1465
gaattccgaatcatgtgcagaatgctgaatcttcccccagccaggacgaataagacagcgcggaaaagcagattctcgtaattctggaattgcatgttgcaaggagtctcctggatcttcgcacccagcttcgggtagggagggagtccgggtcccgggctaggccagcccggcaggtggagagggtccccggcagccccgcgcgcccctggccatgtctttaatgccctgccccttcatgtggccttctgagggttcccagggctggccagggttgtttcccacccgcgcgcgcgctctcacccccagccaaacccacctggcagggctccctccagccgagaccttttgattcccggctcccgcgctcccgcctccgcgccagcccgggaggtggccctggacagccggacctcgcccggccccggctgggaccatggtgtttctctcgggaaatgcttccgacagctccaactgcacccaaccgccggcaccggtgaacatttccaaggccattctgctcggggtgatcttggggggcctcattcttttcggggtgctgggtaacatcctagtgatcctctccgtagcctgtcaccgacacctgcactcagtcacgcactactacatcgtcaacctggcggtggccgacctcctgctcacctccacggtgctgcccttctccgccatcttcgaggtcctaggctactgggccttcggcagggtcttctgcaacatctgggcggcagtggatgtgctgtgctgcaccgcgtccatcatgggcctctgcatcatctccatcgaccgctacatcggcgtgagctacccgctgcgctacccaaccatcgtcacccagaggaggggtctcatggctctgctctgcgtctgggcactctccctggtcatatccattggacccctgttcggctggaggcagccggcccccgaggacgagaccatctgccagatcaacgaggagccgggctacgtgctcttctcagcgctgggctccttctacctgcctctggccatcatcctggtcatgtactgccgcgtctacgtggtggccaagagggagagccggggcctcaagtctggcctcaagaccgacaagtcggactcggagcaagtgacgctccgcatccatcggaaaaacgccccggcaggaggcagcgggatggccagcgccaagaccaagacgcacttctcagtgaggctcctcaagttctcccgggagaagaaagcggccaaaacgctgggcatcgtggtcggctgcttcgtcctctgctggctgccttttttcttagtcatgcccattgatgaggaaactgaggcccaagaaggaaaaaatgactcacccagctttaaacaaccagttcaccatgcagcagtgctggggttggaggtgatggagaaggaaaatttggaaggtgtttcaaggaaagacacctgtggggtttggtgaccagttggaatgtaagaggcaaaaaaaagggagaaggaactagatacatattcttctggcaggaactgttaattgggttcctgctcccatcttgcactacagtgagagagataacctggtctcctaccattggaaagcatatcatctgtgctctggaggatgagacaatcaaagaaaacaagtaaataagaaaacttaaaaactgtgatatgtaccgtgaaataaataagcc

SEQ ID NO: 105909 - DNA, 2548 bp, Homo sapiens
  Payload ID: 766
  Gene Symbol: ADRA1A
  Gene Name: adrenoceptor alpha 1A
  Uniprot ID: P35348
  ENST ID: ENST00000380573
  CDS Start-End: 1025-2425
acgtcagcgagagctgcaaagttccttgctattcttttctggtgtcggggagctgaatattaaaagggtgattgtggagttaccggttatctgcatttttttttcttttcttattttgactctttttaaaaaatgcaggtaaagtgacagcggttcaggagcttaaagacatcagtggtggaggggtgagtcagcgggtgcaaaaggacaaggatttggtgcctcggagacacggtcccctctccgcctccagagaagagcaggcaggcagctcccgggaccgaagccgggtccacatcccccgcgcgcgagctggtggctcagcagcggcgcttcaggtggacgcggtcaaacgatgccccgcagcctcctgggtctcagcacatattccacacctacgtcccctgacctgtgctcctagaagctggagagagcaggagccttcggtggggcagctcaaaatgtaggtaactgcgggccaggagcagcgcccaacctgtagcgctgcgctacccaaccatcggtccctgcctttgagcgtcgacggctgatcttttggtttgagggagagactggcgctggagttttgaattccgaatcatgtgcagaatgctgaatcttcccccagccaggacgaataagacagcgcggaaaagcagattctcgtaattctggaattgcatgttgcaaggagtctcctggatcttcgcacccagcttcgggtagggagggagtccgggtcccgggctaggccagcccggcaggtggagagggtccccggcagccccgcgcgcccctggccatgtctttaatgccctgccccttcatgtggccttctgagggttcccagggctggccagggttgtttcccacccgcgcgcgcgctctcacccccagccaaacccacctggcagggctccctccagccgagaccttttgattcccggctcccgcgctcccgcctccgcgccagcccgggaggtggccctggacagccggacctcgcccggccccggctgggaccatggtgtttctctcgggaaatgcttccgacagctccaactgcacccaaccgccggcaccggtgaacatttccaaggccattctgctcggggtgatcttggggggcctcattcttttcggggtgctgggtaacatcctagtgatcctctccgtagcctgtcaccgacacctgcactcagtcacgcactactacatcgtcaacctggcggtggccgacctcctgctcacctccacggtgctgcccttctccgccatcttcgaggtcctaggctactgggccttcggcagggtcttctgcaacatctgggcggcagtggatgtgctgtgctgcaccgcgtccatcatgggcctctgcatcatctccatcgaccgctacatcggcgtgagctacccgctgcgctacccaaccatcgtcacccagaggaggggtctcatggctctgctctgcgtctgggcactctccctggtcatatccattggacccctgttcggctggaggcagccggcccccgaggacgagaccatctgccagatcaacgaggagccgggctacgtgctcttctcagcgctgggctccttctacctgcctctggccatcatcctggtcatgtactgccgcgtctacgtggtggccaagagggagagccggggcctcaagtctggcctcaagaccgacaagtcggactcggagcaagtgacgctccgcatccatcggaaaaacgccccggcaggaggcagcgggatggccagcgccaagaccaagacgcacttctcagtgaggctcctcaagttctcccgggagaagaaagcggccaaaacgctgggcatcgtggtcggctgcttcgtcctctgctggctgccttttttcttagtcatgcccattgggtctttcttccctgatttcaagccctctgaaacagtttttaaaatagtattttggctcggatatctaaacagctgcatcaaccccatcatatacccatgctccagccaagagttcaaaaaggcctttcagaatgtcttgagaatccagtgtctctgcagaaagcagtcttccaaacatgccctgggctacaccctgcacccgcccagccaggccgtggaagggcaacacaaggacatggtgcgcatccccgtgggatcaagagagaccttctacaggatctccaagacggatggcgtttgtgaatggaaatttttctcttccatgccccgtggatctgccaggattacagtgtccaaagaccaatcctcctgtaccacagcccgggtgagaagtaaaagctttttgcaggtctgctgctgtgtagggccctcaacccccagccttgacaagaaccatcaagttccaaccattaaggtccacaccatctccctcagtgagaacggggaggaagtctaggacaggaaagatgcagaggaaaggggaataatcttaggtacccaccccacttccttctcggaaggccagctcttcttggaggacaagacaggaccaatcaaagaggggacctgctgggaatgg

SEQ ID NO: 105910 - DNA, 2089 bp, Homo sapiens
  Payload ID: 766
  Gene Symbol: ADRA1A
  Gene Name: adrenoceptor alpha 1A
  Uniprot ID: P35348
  ENST ID: ENST00000380582
  CDS Start-End: 437-1726
gaattccgaatcatgtgcagaatgctgaatcttcccccagccaggacgaataagacagcgcggaaaagcagattctcgtaattctggaattgcatgttgcaaggagtctcctggatcttcgcacccagcttcgggtagggagggagtccgggtcccgggctaggccagcccggcaggtggagagggtccccggcagccccgcgcgcccctggccatgtctttaatgccctgccccttcatgtggccttctgagggttcccagggctggccagggttgtttcccacccgcgcgcgcgctctcacccccagccaaacccacctggcagggctccctccagccgagaccttttgattcccggctcccgcgctcccgcctccgcgccagcccgggaggtggccctggacagccggacctcgcccggccccggctgggaccatggtgtttctctcgggaaatgcttccgacagctccaactgcacccaaccgccggcaccggtgaacatttccaaggccattctgctcggggtgatcttggggggcctcattcttttcggggtgctgggtaacatcctagtgatcctctccgtagcctgtcaccgacacctgcactcagtcacgcactactacatcgtcaacctggcggtggccgacctcctgctcacctccacggtgctgcccttctccgccatcttcgaggtcctaggctactgggccttcggcagggtcttctgcaacatctgggcggcagtggatgtgctgtgctgcaccgcgtccatcatgggcctctgcatcatctccatcgaccgctacatcggcgtgagctacccgctgcgctacccaaccatcgtcacccagaggaggggtctcatggctctgctctgcgtctgggcactctccctggtcatatccattggacccctgttcggctggaggcagccggcccccgaggacgagaccatctgccagatcaacgaggagccgggctacgtgctcttctcagcgctgggctccttctacctgcctctggccatcatcctggtcatgtactgccgcgtctacgtggtggccaagagggagagccggggcctcaagtctggcctcaagaccgacaagtcggactcggagcaagtgacgctccgcatccatcggaaaaacgccccggcaggaggcagcgggatggccagcgccaagaccaagacgcacttctcagtgaggctcctcaagttctcccgggagaagaaagcggccaaaacgctgggcatcgtggtcggctgcttcgtcctctgctggctgccttttttcttagtcatgcccattgggtctttcttccctgatttcaagccctctgaaacagtttttaaaatagtattttggctcggatatctaaacagctgcatcaaccccatcatatacccatgctccagccaagagttcaaaaaggcctttcagaatgtcttgagaatccagtgtctctgcagaaagcagtcttccaaacatgccctgggctacaccctgcacccgcccagccaggccgtggaagggcaacacaaggacatggtgcgcatccccgtgggatcaagagagaccttctacaggatctccaagacggatggcgtttgtgaatggaaatttttctcttccatgccccgtggatctgccaggattacagtgtccaaagaccaatcctcctgtaccacagcccggggacacacacccatgacatgaagccagcttcccgtccacgactgttgtccttactgcccaaggaaggggagcatgaaacccaccactggtcctgcgacccactgtctttggaatccaccccaggagcccaggagccttgcctgacacttggatttacttctttatcaagcatccatctgactaaggcacaaatccaacatgttactgttactgatacaggaaaaacagtaacttaaggaatgatcatgaatgcaaagggaaagaggaaaagagccttcagggacaaatagctcgattttttgtaaatcagtttcatacaacctccctcccccatttcattcttaaaagttaattgagaatcatcagccacgtgtagggtgtgag

SEQ ID NO: 105911 - DNA, 2304 bp, Homo sapiens
  Payload ID: 766
  Gene Symbol: ADRA1A
  Gene Name: adrenoceptor alpha 1A
  Uniprot ID: P35348
  ENST ID: ENST00000380586
  CDS Start-End: 437-1864
gaattccgaatcatgtgcagaatgctgaatcttcccccagccaggacgaataagacagcgcggaaaagcagattctcgtaattctggaattgcatgttgcaaggagtctcctggatcttcgcacccagcttcgggtagggagggagtccgggtcccgggctaggccagcccggcaggtggagagggtccccggcagccccgcgcgcccctggccatgtctttaatgccctgccccttcatgtggccttctgagggttcccagggctggccagggttgtttcccacccgcgcgcgcgctctcacccccagccaaacccacctggcagggctccctccagccgagaccttttgattcccggctcccgcgctcccgcctccgcgccagcccgggaggtggccctggacagccggacctcgcccggccccggctgggaccatggtgtttctctcgggaaatgcttccgacagctccaactgcacccaaccgccggcaccggtgaacatttccaaggccattctgctcggggtgatcttggggggcctcattcttttcggggtgctgggtaacatcctagtgatcctctccgtagcctgtcaccgacacctgcactcagtcacgcactactacatcgtcaacctggcggtggccgacctcctgctcacctccacggtgctgcccttctccgccatcttcgaggtcctaggctactgggccttcggcagggtcttctgcaacatctgggcggcagtggatgtgctgtgctgcaccgcgtccatcatgggcctctgcatcatctccatcgaccgctacatcggcgtgagctacccgctgcgctacccaaccatcgtcacccagaggaggggtctcatggctctgctctgcgtctgggcactctccctggtcatatccattggacccctgttcggctggaggcagccggcccccgaggacgagaccatctgccagatcaacgaggagccgggctacgtgctcttctcagcgctgggctccttctacctgcctctggccatcatcctggtcatgtactgccgcgtctacgtggtggccaagagggagagccggggcctcaagtctggcctcaagaccgacaagtcggactcggagcaagtgacgctccgcatccatcggaaaaacgccccggcaggaggcagcgggatggccagcgccaagaccaagacgcacttctcagtgaggctcctcaagttctcccgggagaagaaagcggccaaaacgctgggcatcgtggtcggctgcttcgtcctctgctggctgccttttttcttagtcatgcccattgggtctttcttccctgatttcaagccctctgaaacagtttttaaaatagtattttggctcggatatctaaacagctgcatcaaccccatcatatacccatgctccagccaagagttcaaaaaggcctttcagaatgtcttgagaatccagtgtctctgcagaaagcagtcttccaaacatgccctgggctacaccctgcacccgcccagccaggccgtggaagggcaacacaaggacatggtgcgcatccccgtgggatcaagagagaccttctacaggatctccaagacggatggcgtttgtgaatggaaatttttctcttccatgccccgtggatctgccaggattacagtgtccaaagaccaatcctcctgtaccacagcccggacgaagtctcgctctgtcaccaggctggagtgcagtggcatgatcttggctcactgcaacctccgcctcccgggttcaagagattctcctgcctcagcctcccaagcagctgggactacagggatgtgccaccaggccgacgccaccaggcccagctaatttttgtatttttagtagagacggggtttcaccatgttggccaggatgatctcgatctcttgacctcatgatctgcctgcctcagcctcccaaagtgctgggattacaggcgtgagccaccgtgcccggcccaactattttttttttttatcttttttaacagtgcaatcctttctgtggatgaaatcttgctcagaagctcaatatgcaaaagaaagaaaaacagcagggctggacggatgttgggagtggggtaagaccccaaccactcagaaccacccccccaacacacacacacattctctccatggtgactggtgaggggcctctagagggtacatagtacaccatggagcacggtttaagcaccactggactacacattcttctgtggcagttatcttaccttcccatagacacccagcccatagccattggtt

SEQ ID NO: 105912 - DNA, 1877 bp, Homo sapiens
  Payload ID: 766
  Gene Symbol: ADRA1A
  Gene Name: adrenoceptor alpha 1A
  Uniprot ID: P35348
  ENST ID: ENST00000521711
  CDS Start-End: 437-1411
gaattccgaatcatgtgcagaatgctgaatcttcccccagccaggacgaataagacagcgcggaaaagcagattctcgtaattctggaattgcatgttgcaaggagtctcctggatcttcgcacccagcttcgggtagggagggagtccgggtcccgggctaggccagcccggcaggtggagagggtccccggcagccccgcgcgcccctggccatgtctttaatgccctgccccttcatgtggccttctgagggttcccagggctggccagggttgtttcccacccgcgcgcgcgctctcacccccagccaaacccacctggcagggctccctccagccgagaccttttgattcccggctcccgcgctcccgcctccgcgccagcccgggaggtggccctggacagccggacctcgcccggccccggctgggaccatggtgtttctctcgggaaatgcttccgacagctccaactgcacccaaccgccggcaccggtgaacatttccaaggccattctgctcggggtgatcttggggggcctcattcttttcggggtgctgggtaacatcctagtgatcctctccgtagcctgtcaccgacacctgcactcagtcacgcactactacatcgtcaacctggcggtggccgacctcctgctcacctccacggtgctgcccttctccgccatcttcgaggtcctaggctactgggccttcggcagggtcttctgcaacatctgggcggcagtggatgtgctgtgctgcaccgcgtccatcatgggcctctgcatcatctccatcgaccgctacatcggcgtgagctacccgctgcgctacccaaccatcgtcacccagaggaggggtctcatggctctgctctgcgtctgggcactctccctggtcatatccattggacccctgttcggctggaggcagccggcccccgaggacgagaccatctgccagatcaacgaggagccgggctacgtgctcttctcagcgctgggctccttctacctgcctctggccatcatcctggtcatgtactgccgcgtctacgtggtggccaagagggagagccggggcctcaagtctggcctcaagaccgacaagtcggactcggagcaagtgacgctccgcatccatcggaaaaacgccccggcaggaggcagcgggatggccagcgccaagaccaagacgcacttctcagtgaggctcctcaagttctcccgggagaagaaagcggccaaaacgctgggcatcgtggtcggctgcttcgtcctctgctggctgccttttttcttagtcatgcccattgggacatacattcttaaatatgacgtgctgttttggagaaaagggctgtcggtctgcactaggctgcgggagaggaaagagattaaaaactgaaaccagggcagggatgagtgtgctatccacagctgagaagtgaaacacccatgtttaatagggactgacccaggaaaatcagggacacacacccatgacatgaagccagcttcccgtccacgactgttgtccttactgcccaaggaaggggagcatgaaacccaccactggtcctgcgacccactgtctttggaatccaccccaggagcccaggagccttgcctgacacttggatttacttctttatcaagcatccatctgactaaggcacaaatccaacatgttactgttactgatacaggaaaaacagtaacttaaggaatgatcatgaatgcaaagggaaagaggaaaagagccttcagggacaaatagctcgattttttgtaaatcagtttcatacaacctccctcccccatttcattcttaaaagttaattgagaatcatcagccacgtgtagggtgtgag

SEQ ID NO: 105913 - DNA, 1838 bp, Homo sapiens
  Payload ID: 766
  Gene Symbol: ADRA1A
  Gene Name: adrenoceptor alpha 1A
  ENST ID: ENST00000519229
  CDS Start-End: 8-1291
tgggaccatggtgtttctctcgggaaatgcttccgacagctccaactgcacccaaccgccggcaccggtgaacatttccaaggccattctgctcggggtgatcttggggggcctcattcttttcggggtgctgggtaacatcctagtgatcctctccgtagcctgtcaccgacacctgcactcagtcacgcactactacatcgtcaacctggcggtggccgacctcctgctcacctccacggtgctgcccttctccgccatcttcgaggtcctaggctactgggccttcggcagggtcttctgcaacatctgggcggcagtggatgtgctgtgctgcaccgcgtccatcatgggcctctgcatcatctccatcgaccgctacatcggcgtgagctacccgctgcgctacccaaccatcgtcacccagaggaggggtctcatggctctgctctgcgtctgggcactctccctggtcatatccattggacccctgttcggctggaggcagccggcccccgaggacgagaccatctgccagatcaacgaggagccgggctacgtgctcttctcagcgctgggctccttctacctgcctctggccatcatcctggtcatgtactgccgcgtctacgtggtggccaagagggagagccggggcctcaagtctggcctcaagaccgacaagtcggactcggagcaagtgacgctccgcatccatcggaaaaacgccccggcaggaggcagcgggatggccagcgccaagaccaagacgcacttctcagtgaggctcctcaagttctcccgggagaagaaagcggccaaaacgctgggcatcgtggtcggctgcttcgtcctctgctggctgccttttttcttagtcatgcccattgggtctttcttccctgatttcaagccctctgaaacagtttttaaaatagtattttggctcggatatctaaacagctgcatcaaccccatcatatacccatgctccagccaagagttcaaaaaggcctttcagaatgtcttgagaatccagtgtctctgcagaaagcagtcttccaaacatgccctgggctacaccctgcacccgcccagccaggccgtggaagggcaacacaaggacatggtgcgcatccccgtgggatcaagagagaccttctacaggatctccaagacggatggcgtttgtgaatggaaatttttctcttccatgccccgtggatctgccaggattacagtgtccaaagaccaatcctcctgtaccacagcccggtcttctggattttgagaagcagctgcaaggatgaacggattggtgttggcccaaattaaaaagaagagtattcagttctttcagtgtttggagaaagaagaccaaaagcatcatctcacagggagcagaatgtgaccagcctggctaatgaggaaatgagagggatcctcaacttgagaacccgctctactgaagtctgaacttggaaaaatggacacattgggtttggagtaagaattcttactctacaaaaggataaaattgtgatcacattgatgcatgatgcctaggatattaaaaatgcatgattaattaaatgttagtctaccttgtgttttaaagggacacacacccatgacatgaagccagcttcccgtccacgactgttgtccttactgcccaaggaaggggagcatgaaacccaccactggtcctgcgacccactgtctttggaatccaccccaggagcccaggagccttgcctgacacttggatttacttctttatcaagcatccatctgactaaggcacaaatccaacatgttactgttactgatacagg

SEQ ID NO: 105914 - DNA, 2092 bp, Homo sapiens
  Payload ID: 766
  Gene Symbol: ADRA1A
  Gene Name: adrenoceptor alpha 1A
  Uniprot ID: P35348
  ENST ID: ENST00000519096
  CDS Start-End: 437-1411
gaattccgaatcatgtgcagaatgctgaatcttcccccagccaggacgaataagacagcgcggaaaagcagattctcgtaattctggaattgcatgttgcaaggagtctcctggatcttcgcacccagcttcgggtagggagggagtccgggtcccgggctaggccagcccggcaggtggagagggtccccggcagccccgcgcgcccctggccatgtctttaatgccctgccccttcatgtggccttctgagggttcccagggctggccagggttgtttcccacccgcgcgcgcgctctcacccccagccaaacccacctggcagggctccctccagccgagaccttttgattcccggctcccgcgctcccgcctccgcgccagcccgggaggtggccctggacagccggacctcgcccggccccggctgggaccatggtgtttctctcgggaaatgcttccgacagctccaactgcacccaaccgccggcaccggtgaacatttccaaggccattctgctcggggtgatcttggggggcctcattcttttcggggtgctgggtaacatcctagtgatcctctccgtagcctgtcaccgacacctgcactcagtcacgcactactacatcgtcaacctggcggtggccgacctcctgctcacctccacggtgctgcccttctccgccatcttcgaggtcctaggctactgggccttcggcagggtcttctgcaacatctgggcggcagtggatgtgctgtgctgcaccgcgtccatcatgggcctctgcatcatctccatcgaccgctacatcggcgtgagctacccgctgcgctacccaaccatcgtcacccagaggaggggtctcatggctctgctctgcgtctgggcactctccctggtcatatccattggacccctgttcggctggaggcagccggcccccgaggacgagaccatctgccagatcaacgaggagccgggctacgtgctcttctcagcgctgggctccttctacctgcctctggccatcatcctggtcatgtactgccgcgtctacgtggtggccaagagggagagccggggcctcaagtctggcctcaagaccgacaagtcggactcggagcaagtgacgctccgcatccatcggaaaaacgccccggcaggaggcagcgggatggccagcgccaagaccaagacgcacttctcagtgaggctcctcaagttctcccgggagaagaaagcggccaaaacgctgggcatcgtggtcggctgcttcgtcctctgctggctgccttttttcttagtcatgcccattgggacatacattcttaaatatgacgtgctgttttggagaaaagggctgtcggtctgcactaggctgcgggagaggaaagagattaaaaactgaaaccagggcagggatgagtgtgctatccacagctgagaagtgaaacacccatgtttaatagggactgacccaggaaaatcagacgaagtctcgctctgtcaccaggctggagtgcagtggcatgatcttggctcactgcaacctccgcctcccgggttcaagagattctcctgcctcagcctcccaagcagctgggactacagggatgtgccaccaggccgacgccaccaggcccagctaatttttgtatttttagtagagacggggtttcaccatgttggccaggatgatctcgatctcttgacctcatgatctgcctgcctcagcctcccaaagtgctgggattacaggcgtgagccaccgtgcccggcccaactattttttttttttatcttttttaacagtgcaatcctttctgtggatgaaatcttgctcagaagctcaatatgcaaaagaaagaaaaacagcagggctggacggatgttgggagtggggtaagaccccaaccactcagaaccacccccccaacacacacacacattctctccatggtgactggtgaggggcctctagagggtacatagtacaccatggagcacggtttaagcaccactggactacacattcttctgtggcagttatcttaccttcccatagacacccagcccatagccattggtt

SEQ ID NO: 105915 - DNA, 1738 bp, Homo sapiens
  Payload ID: 767
  Gene Symbol: ADRA1B
  Gene Name: adrenoceptor alpha 1B
  Uniprot ID: P35368
  ENST ID: ENST00000306675
  CDS Start-End: 124-1686
gccaggagggcgcctctgggaagaagaccacgggggaagcaaagtttcagggcagctgaggagccttcgccgcagcccttccgagcccaatcatccccctggctatggagggcggactctaagatgaatcccgacctggacaccggccacaacacatcagcacctgcccactggggagagttgaaaaatgccaacttcactggccccaaccagacctcgagcaactccacactgccccagctggacatcaccagggccatctctgtgggcctggtgctgggcgccttcatcctctttgccatcgtgggcaacatcctagtcatcttgtctgtggcctgcaaccggcacctgcggacgcccaccaactacttcattgtcaacctggccatggccgacctgctgttgagcttcaccgtcctgcccttctcagcggccctagaggtgctcggctactgggtgctggggcggatcttctgtgacatctgggcagccgtggatgtcctgtgctgcacagcgtccattctgagcctgtgcgccatctccatcgatcgctacatcggggtgcgctactctctgcagtatcccacgctggtcacccggaggaaggccatcttggcgctgctcagtgtctgggtcttgtccaccgtcatctccatcgggcctctccttgggtggaaggagccggcacccaacgatgacaaggagtgcggggtcaccgaagaacccttctatgccctcttctcctctctgggctccttctacatccctctggcggtcattctagtcatgtactgccgtgtctatatagtggccaagagaaccaccaagaacctagaggcaggagtcatgaaggagatgtccaactccaaggagctgaccctgaggatccattccaagaactttcacgaggacacccttagcagtaccaaggccaagggccacaaccccaggagttccatagctgtcaaactttttaagttctccagggaaaagaaagcagctaagacgttgggcattgtggtcggtatgttcatcttgtgctggctacccttcttcatcgctctaccgcttggctccttgttctccaccctgaagccccccgacgccgtgttcaaggtggtgttctggctgggctacttcaacagctgcctcaaccccatcatctacccatgctccagcaaggagttcaagcgcgctttcgtgcgcatcctcgggtgccagtgccgcggccgcggccgccgccgacgccgccgccgccgtcgcctgggcggctgcgcctacacctaccggccgtggacgcgcggcggctcgctggagcgctcgcagtcgcgcaaggactcgctggacgacagcggcagctgcctgagcggcagccagcggaccctgccctcggcctcgccgagcccgggctacctgggccgcggcgcgccaccgccagtcgagctgtgcgccttccccgagtggaaggcgcccggcgccctcctgagcctgcccgcgcctgagccccccggccgccgcggccgccacgactcgggcccgctcttcaccttcaagctcctgaccgagcccgagagccccgggaccgacggcggcgccagcaacggaggctgcgaggccgcggccgacgtggccaacgggcagccgggcttcaaaagcaacatgcccctggcgcccgggcagttttagggcccccgtgcgcagctttctttccctggggaggaaaacatcgtggggggga

SEQ ID NO: 105916 - DNA, 2728 bp, Homo sapiens
  Payload ID: 768
  Gene Symbol: ADRA1D
  Gene Name: adrenoceptor alpha 1D
  Uniprot ID: P25100
  ENST ID: ENST00000379453
  CDS Start-End: 118-1836
ccgacgggacccgtgcgcggagctgcatctggagccccgcggctatgccctgtgctcccctccctgccggccgctcgttctgtgccccggcccggccaccgacggccgcgcgttgagatgactttccgcgatctcctgagcgtcagtttcgagggaccccgcccggacagcagcgcagggggctccagcgcgggcggcggcgggggcagcgcgggcggcgcggccccctcggagggcccggcggtgggcggcgtgccggggggcgcgggcggcggcggcggcgtggtgggcgcaggcagcggcgaggacaaccggagctccgcgggggagccggggagcgcgggcgcgggcggcgacgtgaatggcacggcggccgtcgggggactggtggtgagcgcgcagggcgtgggcgtgggcgtcttcctggcagccttcatccttatggccgtggcaggtaacctgcttgtcatcctctcagtggcctgcaaccgccacctgcagaccgtcaccaactatttcatcgtgaacctggccgtggccgacctgctgctgagcgccaccgtactgcccttctcggccaccatggaggttctgggcttctgggcctttggccgcgccttctgcgacgtatgggccgccgtggacgtgctgtgctgcacggcctccatcctcagcctctgcaccatctccgtggaccggtacgtgggcgtgcgccactcactcaagtacccagccatcatgaccgagcgcaaggcggccgccatcctggccctgctctgggtcgtagccctggtggtgtccgtagggcccctgctgggctggaaggagcccgtgccccctgacgagcgcttctgcggtatcaccgaggaggcgggctacgctgtcttctcctccgtgtgctccttctacctgcccatggcggtcatcgtggtcatgtactgccgcgtgtacgtggtcgcgcgcagcaccacgcgcagcctcgaggcgggcgtcaagcgcgagcgaggcaaggcctccgaggtggtgctgcgcatccactgtcgcggcgcggccacgggcgccgacggggcgcacggcatgcgcagcgccaagggccacaccttccgcagctcgctctccgtgcgcctgctcaagttctcccgtgagaagaaagcggccaagactctggccatcgtcgtgggtgtcttcgtgctctgctggttccctttcttctttgtcctgccgctcggctccttgttcccgcagctgaagccatcggagggcgtcttcaaggtcatcttctggctcggctacttcaacagctgcgtgaacccgctcatctacccctgttccagccgcgagttcaagcgcgccttcctccgtctcctgcgctgccagtgccgtcgtcgccggcgccgccgccctctctggcgtgtctacggccaccactggcgggcctccaccagcggcctgcgccaggactgcgccccgagttcgggcgacgcgccccccggagcgccgctggccctcaccgcgctccccgaccccgaccccgaacccccaggcacgcccgagatgcaggctccggtcgccagccgtcgaaagccacccagcgccttccgcgagtggaggctgctggggccgttccggagacccacgacccagctgcgcgccaaagtctccagcctgtcgcacaagatccgcgccgggggcgcgcagcgcgcagaggcagcgtgcgcccagcgctcagaggtggaggctgtgtccctaggcgtcccacacgaggtggccgagggcgccacctgccaggcctacgaattggccgactacagcaacctacgggagaccgatatttaaggaccccagagctaggccgcggagtgtgctgggcttgggggtaagggggaccagagaggcgggctggtgttctaagagcccccgtgcaaatcggagacccggaaactgatcagggcagctgctctgtgacatccctgaggaactgggcagagcttgaggctggagcccttgaaaggtgaaaagtagtggggccccctgctggactcaggtgcccagaactcttttcttagaagggagaggctgcgggctccgtggggccttttgctcccaatccctatttgagaaacactgccccatcctccatgccctgaaccctgagtagacagccccaagcatggccaggaaggcctgcccctcctcttctgggaaataggcacagaagctttggccggctaccccagtgcctcccttagggaaaaagtcagtgggaccagggctcctcagtggacaaatttctccttcttactgccaactggaggaacccagtggacctaccaccacccacaagctttggtggcagattgtatagccgtcatacaagcctgctgtatttatccatgggcccgctgtccgccacccaggctcctccgtgcacaccccatcacctggcccctaccccttattacttcccctcaagggccttactgtttacactctgtacatagctcatcgtgcctgtgcccatcacttcttgctgggattccaagccaccaattggagagctttatttgtcattttgagacatatttattggtaagagtacttctattttgtccaagctgtgcaaactgtccctctttagcccataacccattaaaaaaaaaatactttttcccctaaagtctgtcaagaactaaaggcccgcaacagaatagattgggtctacatttgc

SEQ ID NO: 105917 - DNA, 3745 bp, Homo sapiens
  Payload ID: 769
  Gene Symbol: ADRA2A
  Gene Name: adrenoceptor alpha 2A
  Uniprot ID: P08913
  ENST ID: ENST00000280155
  CDS Start-End: 835-2232
gcgctcggcgcccaccaggcggacgcccaggagaacccctgcctccgtcgcggctcctggagagctgatcgttcacctgccccggcccgcctgaggacgggggtgccttcatgcggcccccacactcctcaccccgccgccgccgccgtcccggagctccgcacagtgtgccccagccccagcagggcgcacaactttggaagtctcgcggcgctccgagaggcggcagagtccgcgccccagccccgggccgggccgggccagaaccgcagcgtctgggggaagccagagagtcggtaatcgcttcggggatgtaaggcgacagacataggacccccgagctcgcatcagcacccttcggctgcctcccggggtgggggcgggccccgcacacggtaagacctcttgctttcgctcaggctcaagattcaagatacagatattgatatgtatatatatatttaatttcctgtcatccttccaagttatcaggccaccgatgatttttgttctcccttcttgaagaataaatctctctttacccatcggctctccctactctctcccgccgcttagaaataaaacttggctgtattaggagctcggagcaagaaggcgcccaccgagagcgtctgaagcgcgagccaggcgcagttcgcgggacccgggccatgggccgctagcggtcctccagttcgggcccggcctccctgcggccccctccctatgtgagccgcagccaggcgagcggggcgccggaggaagaggaggacccacgggcgccgggccggaaggcagctggcagcaggcccaggccagcgggcgcccgcgttcatgttccgccaggagcagccgttggccgagggcagctttgcgcccatgggctccctgcagccggacgcgggcaacgcgagctggaacgggaccgaggcgccggggggcggcgcccgggccaccccttactccctgcaggtgacgctgacgctggtgtgcctggccggcctgctcatgctgctcaccgtgttcggcaacgtgctcgtcatcatcgccgtgttcacgagccgcgcgctcaaggcgccccaaaacctcttcctggtgtctctggcctcggccgacatcctggtggccacgctcgtcatccctttctcgctggccaacgaggtcatgggctactggtacttcggcaaggcttggtgcgagatctacctggcgctcgacgtgctcttctgcacgtcgtccatcgtgcacctgtgcgccatcagcctggaccgctactggtccatcacacaggccatcgagtacaacctgaagcgcacgccgcgccgcatcaaggccatcatcatcaccgtgtgggtcatctcggccgtcatctccttcccgccgctcatctccatcgagaagaagggcggcggcggcggcccgcagccggccgagccgcgctgcgagatcaacgaccagaagtggtacgtcatctcgtcgtgcatcggctccttcttcgctccctgcctcatcatgatcctggtctacgtgcgcatctaccagatcgccaagcgtcgcacccgcgtgccacccagccgccggggtccggacgccgtcgccgcgccgccggggggcaccgagcgcaggcccaacggtctgggccccgagcgcagcgcgggcccggggggcgcagaggccgaaccgctgcccacccagctcaacggcgcccctggcgagcccgcgccggccgggccgcgcgacaccgacgcgctggacctggaggagagctcgtcttccgaccacgccgagcggcctccagggccccgcagacccgagcgcggtccccggggcaaaggcaaggcccgagcgagccaggtgaagccgggcgacagcctgccgcggcgcgggccgggggcgacggggatcgggacgccggctgcagggccgggggaggagcgcgtcggggctgccaaggcgtcgcgctggcgcgggcggcagaaccgcgagaagcgcttcacgttcgtgctggccgtggtcatcggagtgttcgtggtgtgctggttccccttcttcttcacctacacgctcacggccgtcgggtgctccgtgccacgcacgctcttcaaattcttcttctggttcggctactgcaacagctcgttgaacccggtcatctacaccatcttcaaccacgatttccgccgcgccttcaagaagatcctctgtcggggggacaggaagcggatcgtgtgaggtttccgctggcgcccgcgtagactcacgctgactgcaggcagcggggggcatcgaggggtgcttagccccagggcactcagaaacccgggcgctgcctgctctgcgtttcctcgtctggggtggctctgcagcctcctgcgggcgggcgtctgctgctcctacaagggaagcttcttgctgccaggcccacacatccccagttgttggtttggccactcttgacctggagccatcttcctagtgggccacccctaatcactattgcttcctaaaggtattttcaccctcttcgcctggtacagccctcacagctcttcagagcaagcactggactacaagggcatggctcacaaaaggttaatggatgggggttacctagccctggctaattccccttccattcccaactctctctctctttttaaagaaaaatgctaagggcagccctgcctgccctccccatcccccgctgtaaatatacactatttttgatagcacacatggggcccccatatctcttggccttggttttgatgttgaaatcctggccttgggagagatgccttccaggcagacacagctgtctggttcaggccaagcccctttgcaatgcaagccctttctggtgttatgaagtccctctatgtcgtcgttttcaccagcaactggtgactgtcccttcgacacggacctgctttgagatttcctgacagggaaaagatttctgtccatttttttcctgtgcctaacagcataattgccttttcctatgtaaatattatgatggtggatcaagacataagtaaatgagcctttctgcctcacatcagccctgtgtataaagccattattctctgatgcactgtttgccccagtaactcactttaaaacctctctttccagtgttccctctctccctccagggccactgcttgaagaagaatatgtatgtttctatcttgtatgtctgtgtgcccctcctgccccgaaagtgctgactatggggaaatcttttagctgctgtttttagactccaaggagtggaaattatgtggaagaagcaaacctgatacaatttgcccaaggtaaacagtttgaaaagacaaatgggcctgccaaactgtacagtttcttccccaagagctgttaggtatcaaaatgttgtcctttcccccctccgtgcttttctggttgagatcatgtcattgatgaactgccaaagtcaggggaggagggcagagactttgtgtttacatctgcatttctacatgttttagacagagacaatttaaggcctgcactcttatttcactaaagaaaaactaatgtcagcacatgttgctaatgacagtggatttttttttaaataaaaaagtttacagatcaaatgtgaaataaatatgaatggagtggtcctcttgtctgttatctgagttttcaaaagctttaagactctgggaacatctgattttatggattttttaaaaataaaaaatgtacattataaaaa

SEQ ID NO: 105918 - DNA, 3371 bp, Homo sapiens
  Payload ID: 770
  Gene Symbol: ADRA2B
  Gene Name: adrenoceptor alpha 2B
  ENST ID: ENST00000620793
  CDS Start-End: 97-1449
aggggcgacgctcttgtctagccgagccgggcagcgctgtcgtccacggtgcgcactgggcgggcagcgctccctctgcccacctcccgccccgtcatggaccaccaggacccctactccgtgcaggccacagcggccatagcggcggccatcaccttcctcattctctttaccatcttcggcaacgctctggtcatcctggctgtgttgaccagccgctcgctgcgcgcccctcagaacctgttcctggtgtcgctggccgccgccgacatcctggtggccacgctcatcatccctttctcgctggccaacgagctgctgggctactggtacttccggcgcacgtggtgcgaggtgtacctggcgctcgacgtgctcttctgcacctcgtccatcgtgcacctgtgcgccatcagcctggaccgctactgggccgtgagccgcgcgctggagtacaactccaagcgcaccccgcgccgcatcaagtgcatcatcctcactgtgtggctcatcgccgccgtcatctcgctgccgcccctcatctacaagggcgaccagggcccccagccgcgcgggcgcccccagtgcaagctcaaccaggaggcctggtacatcctggcctccagcatcggatctttctttgctccttgcctcatcatgatccttgtctacctgcgcatctacctgatcgccaaacgcagcaaccgcagaggtcccagggccaagggggggcctgggcagggtgagtccaagcagccccgacccgaccatggtggggctttggcctcagccaaactgccagccctggcctctgtggcttctgccagagaggtcaacggacactcgaagtccactggggagaaggaggagggggagacccctgaagatactgggacccgggccttgccacccagttgggctgcccttcccaactcaggccagggccagaaggagggtgtttgtggggcatctccagaggatgaagctgaagaggaggaagaggaggaggaggaggaggaagagtgtgaaccccaggcagtgccagtgtctccggcctcagcttgcagccccccgctgcagcagccacagggctcccgggtgctggccaccctacgtggccaggtgctcctgggcaggggcgtgggtgctataggtgggcagtggtggcgtcgacgggcgcagctgacccgggagaagcgcttcaccttcgtgctggctgtggtcattggcgtttttgtgctctgctggttccccttcttcttcagctacagcctgggagccatctgcccgaagcactgcaaggtgccccatggcctcttccagttcttcttctggatcggctactgcaacagctcactgaaccctgttatctacaccatcttcaaccaggacttccgccgtgccttccggaggatcctgtgccgcccgtggacccagacggcctggtgagcccgcctgcgctgcccctgtggggttggtgcggtggcgccggggtcaccctgcttcttgccctgctgtgtgtggctgcctcccctgggctttctgctccctgcccagatcctgtaggcctcatcttaggaaccccttgggaggggtgggcaggggggctgctagcaagggtcccagtgaagcttccccttgccggcttagctgtgggggaccccttctccaccctctccctgagcacaggccgatggaggtggttcaaatcctctggaacatagccaagaccaggagaagagagagcactttcttcccagagccccatgctctccagaccaatgtctgggcttccctttcttgaggaccttgtgttcctggcaggtcacttgcttgtggtgttttcgtttctttttcatctcccccccacccacaaagagcacggagccagccttccacttttcccagtggggcctgctgctgagggggaggaagaaacgaagactgatcacccacgctaggcactcgcggtccctggcaggcgctgggatgggggcttatggggtggcatcgtctctgggccctcctttccccctttgcctgttttcggatctgtggttcctttgaaagccagaacaatggatcggcttccttacccagcacccctccggtaggtgggtggccacgtggatgcctcgctggggcggtcttggaggcctggtctctgcctcgacgggagatccccgatcactggcattcaccccctgcaaaaatcggggcgacaatagctcactgcctacttgctgcagggagatgaaaggctttgcagaaagctttgagctctgtgggggaacacactagagaaccaaaaatgtgattatatggtgatataaaaatccctttcctctgtgtttaccaccacctgtcttcctgtagacttttgttctgtccctggggtgtgtgaattcctaccccgaactggaagccgggagtggcagacagaatcactatttcaagttaaaggatctctttgagaatgtgttcttctggctgcaaaggtctgagttattacgctacatgacaacgtttcgacatttcaccggcaacaccaagagggtttttagtggcttgggtctccccagtgggggataagtcttttgtcatcaaggaggcaaattgtctccccaagacagctcaaaatatccacacctcggcaacagtctaagatgagagcctgtgacaggtggcagcgcccccaggtggggtactggcatcagagcctggtgcgcccctaggggagcctcccactggagtgcccggccaggtctccaagccccaaatgagtccttgtgaaccacaactgatccccccaggtgggtgcttgtggactgcctcggacccagccacgctgctccccgcaatgctgatggggctgtgcattgaggacccctgcttcctggttctcagtcccaccccaaaacctggcacccagaacagttggaagtgtggaaaggaggtttatcggccttcccttggagagggcctggcttcaacattgggccagtaggcatcttagcttggcaggtgtcgggggaatgggccagatggacctgctagatttggaagggcaccgagggagttttctgggtgtagagagaatggaggggaccaaaaagagtccttcctggggtgtgggaggcttcccagcttggtcctcagtgggttgttgaggccagagtatcgccctgggatgtggtggggagctgggccaggagagggactgactgtgaccctctgctggccggtcttgtgtgcgccccatgggacccccagtgttcttgcctgtgacctcttattgcgacatgcaggtggtgttttttttttttttaaactctgagctattttatcaataaaggatattttgtaataag

SEQ ID NO: 105919 - DNA, 2129 bp, Homo sapiens
  Payload ID: 771
  Gene Symbol: ADRA2C
  Gene Name: adrenoceptor alpha 2C
  Uniprot ID: P18825
  ENST ID: ENST00000330055
  CDS Start-End: 210-1598
gcagctgcggggagcccggcagccacgctctccggcgcgccgcccgcggagccaccacggccgagggccggctgctgggcgccgcggtccccggcgggcgcgcccgagcagcaggcggcgatgcgggcgccgaccccggctggggggcgcccgagctgccgcggctgcgccccggctccaggagggacggcgtagctcgcgggaggaccatggcgtccccggcgctggcggcggcgctggcggtggcggcagcggcgggccccaatgcgagcggcgcgggcgagaggggcagcggcggggttgccaatgcctcgggggcttcctgggggccgccgcgcggccagtactcggcgggcgcggtggcagggctggctgccgtggtgggcttcctcatcgtcttcaccgtggtgggcaacgtgctggtggtgatcgccgtgctgaccagccgggcgctgcgcgcgccacagaacctcttcctggtgtcgctggcctcggccgacatcctggtggccacgctggtcatgcccttctcgttggccaacgagctcatggcctactggtacttcgggcaggtgtggtgcggcgtgtacctggcgctcgatgtgctgttttgcacctcgtcgatcgtgcatctgtgtgccatcagcctggaccgctactggtcggtgacgcaggccgtcgagtacaacctgaagcgcacaccacgccgcgtcaaggccaccatcgtggccgtgtggctcatctcggccgtcatctccttcccgccgctggtctcgctctaccgccagcccgacggcgccgcctacccgcagtgcggcctcaacgacgagacctggtacatcctgtcctcctgcatcggctccttcttcgcgccctgcctcatcatgggcctggtctacgcgcgcatctaccgagtggccaagctgcgcacgcgcacgctcagcgagaagcgcgcccccgtgggccccgacggtgcgtccccgactaccgaaaacgggctgggcgcggcggcaggcgcaggcgagaacgggcactgcgcgcccccgcccgccgacgtggagccggacgagagcagcgcagcggccgagaggcggcggcgccggggcgcgttgcggcggggcgggcggcggcgagcgggcgcggaggggggcgcgggcggtgcggacgggcagggggcggggccgggggcggctgagtcgggggcgctgaccgcctccaggtccccggggcccggtggccgcctgtcgcgcgccagctcgcgctccgtcgagttcttcctgtcgcgccggcgccgggcgcgcagcagcgtgtgccgccgcaaggtggcccaggcgcgcgagaagcgcttcacctttgtgctggctgtggtcatgggcgtgttcgtgctctgctggttccccttcttcttcagctacagcctgtacggcatctgccgcgaggcctgccaggtgcccggcccgctcttcaagttcttcttctggatcggctactgcaacagctcgctcaacccggtcatctacacggtcttcaaccaggatttccggcgatcctttaagcacatcctcttccgacggaggagaaggggcttcaggcagtgactcgcacccgtctgggaatcctggacagctccgcgctcggggctgggcagaaggggcggcccggacgggggagctttcccagagacccggggatggattggcctccagggcgcaggggagggtgcggcagggcaggagcttggcagagagatagccgggctccagggagtggggaggagagagggggagacccctttgccttcccccctcagcaaggggctgcttctggggctccctgcctggatccagctctgggagccctgccgaggtgtggctgtgaggtcagggttttagagagcagtggcagaggtagccccctaaatgggcaagcaaggagccccccaaagacactaccactccccatccccgtctgaccaagggctgacttctccaggacctagtcggggggtggctgccagggggcaaggagaaagcaccgacaatctttgattactgaaagtatttaaatgtttgccaaaaacaacagccaaaacaaccaaactattttctaaataaacctttgtaatctaa

SEQ ID NO: 105920 - DNA, 1600 bp, Homo sapiens
  Payload ID: 771
  Gene Symbol: ADRA2C
  Gene Name: adrenoceptor alpha 2C
  ENST ID: ENST00000509482
  CDS Start-End: 260-1384
ccgcgtcgccgctcgctccgggcgcctcctgctctgcacttacacgctcggcagctgcggggagcccggcagccacgctctccggcgcgccgcccgcggagccaccacggccgagggccggctgctgggcgccgcggtccccggcgggcgcgcccgagcagcaggcggcgatgcgggcgccgaccccggctggggggcgcccgagctgccgcggctgcgccccggctccaggagggacggcgtagctcgcgggaggaccatggcgtccccggcgctggcggcggcgctggcggtggcggcagcggcgggccccaatgcgagcggcgcgggcgagaggggcagcggcggggttgccaatgcctcgggggcttcctgggggccgccgcgcggccagtactcggcgggcgcggtggcagggctggctgccgtggtgggcttcctcatcgtcttcaccgtggtgggcaacgtgctggtggtgatcgccgtgctgaccagccgggcgctgcgcgcgccacagaacctcttcctggtgtcgctggcctcggccgacatcctggtggccacgctggtcatgcccttctcgttggccaacgagctcatggcctactggtacttcgggcaggtgtggtgcggcgtgtacctggcgctcgatgtgctgttttgcacctcgtcgatcgtgcatctgtgtgccatcagcctggaccgctactggtcggtgacgcaggccgtcgagtacaacctgaagcgcacaccacgccgcgtcaaggccaccatcgtggccgtgtggctcatctcggccgtcatctccttcccgccgctggtctcgctctaccgccagcccgacggcgccgcctacccgcagtgcggcctcaacgacgagacctggtacatcctgtcctcctgcatcggctccttcttcgcgccctgcctcatcatgggcctggtctacgcgcgcatctaccgagtggccaagctgcgcacgcgcacgctcagcgagaagcgcgcccccgtgggccccgacggtgcgtccccgactaccgaaaacgggctgggcgcggcggcaggcgcaggcgagaacgggcactgcgcgcccccgcccgccgacgtggagccggacgagagcagcgcagcggccgagaggcggcggcgccggggcgcgttgcggcggggcgggcggcggcgagcgggcgcggaggggggcgcgggcggtgcggacgggcagggggcggggccgggggcggctgagtcgggggcgctgaccgcctccagggagtggggaggagagagggggagacccctttgccttcccccctcagcaaggggctgcttctggggctccctgcctggatccagctctgggagccctgccgaggtgtggctgtgaggtcagggttttagagagcagtggcagaggtagccccctaaatgggcaagcaaggagccccccaaagacactaccactccccatccccgtctgaccaagggctgacttctccaggacctagtcggggggtggctgccagggggcaaggagaaagcaccgacaatctttgattactgaaagtatttaaatgtttgccaaaaacaacagccaaaacaa

SEQ ID NO: 105921 - DNA, 2853 bp, Homo sapiens
  Payload ID: 772
  Gene Symbol: ADRB1
  Gene Name: adrenoceptor beta 1
  Uniprot ID: P08588
  ENST ID: ENST00000369295
  CDS Start-End: 78-1511
cgcccgggcttctggggtgttccccaaccacggcccagccctgccacaccccccgcccccggcctccgcagctcggcatgggcgcgggggtgctcgtcctgggcgcctccgagcccggtaacctgtcgtcggccgcaccgctccccgacggcgcggccaccgcggcgcggctgctggtgcccgcgtcgccgcccgcctcgttgctgcctcccgccagcgaaagccccgagccgctgtctcagcagtggacagcgggcatgggtctgctgatggcgctcatcgtgctgctcatcgtggcgggcaatgtgctggtgatcgtggccatcgccaagacgccgcggctgcagacgctcaccaacctcttcatcatgtccctggccagcgccgacctggtcatggggctgctggtggtgccgttcggggccaccatcgtggtgtggggccgctgggagtacggctccttcttctgcgagctgtggacctcagtggacgtgctgtgcgtgacggccagcatcgagaccctgtgtgtcattgccctggaccgctacctcgccatcacctcgcccttccgctaccagagcctgctgacgcgcgcgcgggcgcggggcctcgtgtgcaccgtgtgggccatctcggccctggtgtccttcctgcccatcctcatgcactggtggcgggcggagagcgacgaggcgcgccgctgctacaacgaccccaagtgctgcgacttcgtcaccaaccgggcctacgccatcgcctcgtccgtagtctccttctacgtgcccctgtgcatcatggccttcgtgtacctgcgggtgttccgcgaggcccagaagcaggtgaagaagatcgacagctgcgagcgccgtttcctcggcggcccagcgcggccgccctcgccctcgccctcgcccgtccccgcgcccgcgccgccgcccggacccccgcgccccgccgccgccgccgccaccgccccgctggccaacgggcgtgcgggtaagcggcggccctcgcgcctcgtggccctgcgcgagcagaaggcgctcaagacgctgggcatcatcatgggcgtcttcacgctctgctggctgcccttcttcctggccaacgtggtgaaggccttccaccgcgagctggtgcccgaccgcctcttcgtcttcttcaactggctgggctacgccaactcggccttcaaccccatcatctactgccgcagccccgacttccgcaaggccttccagggactgctctgctgcgcgcgcagggctgcccgccggcgccacgcgacccacggagaccggccgcgcgcctcgggctgtctggcccggcccggacccccgccatcgcccggggccgcctcggacgacgacgacgacgatgtcgtcggggccacgccgcccgcgcgcctgctggagccctgggccggctgcaacggcggggcggcggcggacagcgactcgagcctggacgagccgtgccgccccggcttcgcctcggaatccaaggtgtagggcccggcgcggggcgcggactccgggcacggcttcccaggggaacgaggagatctgtgtttacttaagaccgatagcaggtgaactcgaagcccacaatcctcgtctgaatcatccgaggcaaagagaaaagccacggaccgttgcacaaaaaggaaagtttgggaagggatgggagagtggcttgctgatgttccttgttgttttttttttcttttcttttctttcttcttcttttttttttttttttttttttctgtttgtggtccggccttcttttgtgtgtgcgtgtgatgcatctttagatttttttcccccaccaggtggtttttgacactctctgagaggaccggagtggaagatgggtgggttaggggaagggagaagcattaggaggggattaaaatcgatcatcgtggctcccatccctttcccgggaacaggaacacactaccagccagagagaggagaatgacagtttgtcaagacatatttccttttgctttccagagaaatttcattttaatttctaagtaatgatttctgctgttatgaaagcaaagagaaaggatggaggcaaaataaaaaaaaatcacgtttcaagaaatgttaagctcttcttggaacaagccccaccttgctttccttgtgtagggcaaacccgctgtcccccgcgcgcctgggtggtcaggctgagggatttctacctcacactgtgcatttgcacagcagatagaaagacttgtttatattaaacagcttatttatgtatcaatattagttggaaggaccaggcgcagagcctctctctgtgacatgtgactctgtcaattgaagacaggacattaaaagagagcgagagagagaaacagttcagattactgcacatgtggataaaaacaaaaacaaaaaaaaggagtggttcaaaatgccatttttgcacagtgttaggaattacaaaatccacagaagatgttacttgcacaaaaagaaattaaatattttttaaagggagaggggctgggcagatcttaaataaaattcaaactctacttctgttgtctagtatgttattgagctaatgattcattgggaaaatacctttttatactcctttatcatggtactgtaactgtatccatattataaatataattatcttaaggattttttatttttttttatgtccaagtgcccacgtgaatttgctggtgaaagttagcacttgtgtgtaaattctacttcctcttgtgtgttttaccaagtatttatactctggtgcaactaactactgtgtgaggaattggtccatgtgcaataaataccaatgaagcacaatcaa

SEQ ID NO: 105922 - DNA, 3443 bp, Homo sapiens
  Payload ID: 773
  Gene Symbol: ADRB2
  Gene Name: adrenoceptor beta 2, surface
  Uniprot ID: P07550
  ENST ID: ENST00000305988
  CDS Start-End: 1588-2829
cccgggttcaagagattctcctgtctcagcctcccgagtagctgggactacaggtacgtgccaccacacctggctaatttttgtatttttagtagagacaagagttacaccatattggccaggatcttttgctttctatagcttcaaaatgttcttaatgttaagacattcttaatactctgaaccatatgaatttgccattttggtaagtcacagacgccagatggtggcaatttcacatggcacaacccgaaagattaacaaactatccagcagatgaaaggattttttttagtttcattgggtttactgaagaaattgtttgaattctcattgcatctccagttcaacagataatgagtgagtgatgccacactctcaagagttaaaaacaaaacaacaaaaaaattaaaacaaaagcacacaactttctctctctgtcccaaaatacatacttgcatacccccgctccagataaaatccaaagggtaaaactgtcttcatgcctgcaaattcctaaggagggcacctaaagtacttgacagcgagtgtgctgaggaaatcagcagctgttgaagtcacctcctgtgctcttgccaaatgtttgaaagggaatacactgggttaccgggtgtatgttgggaggggagcattatcagtgctcgggtgaggcaagttcggagtacccagatggagacatccgtgtctgtgtcgctctggatgcctccaagccagcgtgtgtttactttctgtgtgtgtcaccatgtctttgtgcttctgggtgcttctgtgtttgtttctggccgcgtttctgtgttggacaggggtgactttgtgccggatggcttctgtgtgagagcgcgcgcgagtgtgcatgtcggtgagctgggagggtgtgtctcagtgtctatggctgtggttcggtataagtctgagcatgtctgccagggtgtatttgtgcctgtatgtgcgtgcctcggtgggcactctcgtttccttccgaatgtggggcagtgccggtgtgctgccctctgccttgagacctcaagccgcgcaggcgcccagggcaggcaggtagcggccacagaagagccaaaagctcccgggttggctggtaaggacaccacctccagctttagccctctggggccagccagggtagccgggaagcagtggtggcccgccctccagggagcagttgggccccgcccgggccagccccaggagaaggagggcgaggggaggggagggaaaggggaggagtgcctcgccccttcgcggctgccggcgtgccattggccgaaagttcccgtacgtcacggcgagggcagttcccctaaagtcctgtgcacataacgggcagaacgcactgcgaagcggcttcttcagagcacgggctggaactggcaggcaccgcgagcccctagcacccgacaagctgagtgtgcaggacgagtccccaccacacccacaccacagccgctgaatgaggcttccaggcgtccgctcgcggcccgcagagccccgccgtgggtccgcccgctgaggcgcccccagccagtgcgctcacctgccagactgcgcgccatggggcaacccgggaacggcagcgccttcttgctggcacccaatggaagccatgcgccggaccacgacgtcacgcaggaaagggacgaggtgtgggtggtgggcatgggcatcgtcatgtctctcatcgtcctggccatcgtgtttggcaatgtgctggtcatcacagccattgccaagttcgagcgtctgcagacggtcaccaactacttcatcacttcactggcctgtgctgatctggtcatgggcctggcagtggtgccctttggggccgcccatattcttatgaaaatgtggacttttggcaacttctggtgcgagttttggacttccattgatgtgctgtgcgtcacggccagcattgagaccctgtgcgtgatcgcagtggatcgctactttgccattacttcacctttcaagtaccagagcctgctgaccaagaataaggcccgggtgatcattctgatggtgtggattgtgtcaggccttacctccttcttgcccattcagatgcactggtaccgggccacccaccaggaagccatcaactgctatgccaatgagacctgctgtgacttcttcacgaaccaagcctatgccattgcctcttccatcgtgtccttctacgttcccctggtgatcatggtcttcgtctactccagggtctttcaggaggccaaaaggcagctccagaagattgacaaatctgagggccgcttccatgtccagaaccttagccaggtggagcaggatgggcggacggggcatggactccgcagatcttccaagttctgcttgaaggagcacaaagccctcaagacgttaggcatcatcatgggcactttcaccctctgctggctgcccttcttcatcgttaacattgtgcatgtgatccaggataacctcatccgtaaggaagtttacatcctcctaaattggataggctatgtcaattctggtttcaatccccttatctactgccggagcccagatttcaggattgccttccaggagcttctgtgcctgcgcaggtcttctttgaaggcctatgggaatggctactccagcaacggcaacacaggggagcagagtggatatcacgtggaacaggagaaagaaaataaactgctgtgtgaagacctcccaggcacggaagactttgtgggccatcaaggtactgtgcctagcgataacattgattcacaagggaggaattgtagtacaaatgactcactgctgtaaagcagtttttctacttttaaagacccccccccccaacagaacactaaacagactatttaacttgagggtaataaacttagaataaaattgtaaaattgtatagagatatgcagaaggaagggcatccttctgccttttttatttttttaagctgtaaaaagagagaaaacttatttgagtgattatttgttatttgtacagttcagttcctctttgcatggaatttgtaagtttatgtctaaagagctttagtcctagaggacctgagtctgctatattttcatgacttttccatgtatctacctcactattcaagtattaggggtaatatattgctgctggtaatttgtatctgaaggagattttccttcctacacccttggacttgaggattttgagtatctcggacctttcagctgtgaacatggactcttcccccactcctcttatttgctcacacggggtattttaggcagggatttgaggagcagcttcagttgttttcccgagcaaagtctaaagtttacagtaaataaattgtttgaccatgccttcattgcacctgtttctccaaaaccccttgactggagtgctgttgcctcccccactggaaa

SEQ ID NO: 105923 - DNA, 2950 bp, Homo sapiens
  Payload ID: 774
  Gene Symbol: ADRB3
  Gene Name: adrenoceptor beta 3
  Uniprot ID: P13945
  ENST ID: ENST00000345060
  CDS Start-End: 497-1723
ctctgatacataaagggtggggatgggagcgctctcctctctccttcccctgccttgctgtgggaacttctgggaaaggaggtgcagggctccaggaagccagtgcccagggagtgctatgctgagtccaggagcctggccacggcaggggtggacagatggtggcagaggaaccacggtgtcccttcctccagatttagctaaaggaaacgtggagcatcccattggccatcctccccactctccaattcggctccagaggcccctccagactataggcagctgcccctttaagcgtcgctactcctcccccaagagcggtggcaccgagggagttggggtggggggaggctgagcgctctggctgggacagctagagaagatggcccaggctggggaagtcgctctcatgccttgctgtcccctcccctgagccaggtgatttgggagaccccctccttccttctttccctaccgccccacgcgcgacccggggatggctccgtggcctcacgagaacagctctcttgccccatggccggacctccccaccctggcgcccaataccgccaacaccagtgggctgccaggggttccgtgggaggcggccctagccggggccctgctggcgctggcggtgctggccaccgtgggaggcaacctgctggtcatcgtggccatcgcctggactccgagactccagaccatgaccaacgtgttcgtgacttcgctggccgcagccgacctggtgatgggactcctggtggtgccgccggcggccaccttggcgctgactggccactggccgttgggcgccactggctgcgagctgtggacctcggtggacgtgctgtgtgtgaccgccagcatcgaaaccctgtgcgccctggccgtggaccgctacctggctgtgaccaacccgctgcgttacggcgcactggtcaccaagcgctgcgcccggacagctgtggtcctggtgtgggtcgtgtcggccgcggtgtcgtttgcgcccatcatgagccagtggtggcgcgtaggggccgacgccgaggcgcagcgctgccactccaacccgcgctgctgtgccttcgcctccaacatgccctacgtgctgctgtcctcctccgtctccttctaccttcctcttctcgtgatgctcttcgtctacgcgcgggttttcgtggtggctacgcgccagctgcgcttgctgcgcggggagctgggccgctttccgcccgaggagtctccgccggcgccgtcgcgctctctggccccggccccggtggggacgtgcgctccgcccgaaggggtgcccgcctgcggccggcggcccgcgcgcctcctgcctctccgggaacaccgggccctgtgcaccttgggtctcatcatgggcaccttcactctctgctggttgcccttctttctggccaacgtgctgcgcgccctggggggcccctctctagtcccgggcccggctttccttgccctgaactggctaggttatgccaattctgccttcaacccgctcatctactgccgcagcccggactttcgcagcgccttccgccgtcttctgtgccgctgcggccgtcgcctgcctccggagccctgcgccgccgcccgcccggccctcttcccctcgggcgttcctgcggcccggagcagcccagcgcagcccaggctttgccaacggctcgacggggcttcttggggagtttcttaggcctgaaggacaagaagcaacaactctgttgatcagaacctgtggaaaacctctggcctctgttcagaatgagtcccatgggattccccggctgtgacactctaccctccagaacctgacgactgggccatgtgacccaaggagggatccttaccaagtgggttttcaccatcctcttgctctctgtctgagagatgttttctaaaccccagccttgaacttcactcctccctcagtggtagtgtccaggtgccgtggagcagcaggctggctttggtaggggcacccatcacccggcttgcctgtgcagtcagtgagtgcttagggcaaagagagctcccctggttccattccttctgccacccaaaccctgatgagaccttagtgttctccaggctctgtggcccaggctgagagcagcagggtagaaaagaccaagatttggggttttatctctggttcccttattactgctctcaagcagtggcctctctcactttagccatggaatggctccgatctacctcacagcagtgtcagaaggacttcgccagggttttgggagctccagggttcataagaaggtgaaccattagaacagatcccttcttttccttttgcaatcagataaataaatatcactgaatgcagttcatcctcggccccctttccctccgtttgttttcttttcataatccacttactcccttcccttctactctgcgctggcttttgacagaggcagtaaattaggcctaatcctcactcttttcttcctaatcttcatcaaacaaaaaatgaaaagtctgtctggacgaaggggagtgagcttgagcctttgatatcttgctcccccacccttcctgaaactcttgaaatccagttgccattgagtagcaaagccacgctccccacaggacttggacagagggcccacagggggatgggctggctgtggccaggtttagggcagggggcatttgtcccctccatgctataatccagtggtgccttacatggtgtgtgtgtgtgtgtgtgcgtgtgtgtgtgtgtgtgtgtgtctggaggcacaggcacaaagcattgcttgggttggtcaaatgtcttgtgtcataaatatattctgatgtttcccagcctttccacaacctctaccttcccactcaccttccccagctacaaaaatctgtattatcctcttaaagtaaaactggagttacaaatttg

SEQ ID NO: 105924 - DNA, 2642 bp, Homo sapiens
  Payload ID: 774
  Gene Symbol: ADRB3
  Gene Name: adrenoceptor beta 3
  Uniprot ID: P13945
  ENST ID: ENST00000614635
  CDS Start-End: 198-1424
gctactcctcccccaagagcggtggcaccgagggagttggggtggggggaggctgagcgctctggctgggacagctagagaagatggcccaggctggggaagtcgctctcatgccttgctgtcccctcccctgagccaggtgatttgggagaccccctccttccttctttccctaccgccccacgcgcgacccggggatggctccgtggcctcacgagaacagctctcttgccccatggccggacctccccaccctggcgcccaataccgccaacaccagtgggctgccaggggttccgtgggaggcggccctagccggggccctgctggcgctggcggtgctggccaccgtgggaggcaacctgctggtcatcgtggccatcgcctggactccgagactccagaccatgaccaacgtgttcgtgacttcgctggccgcagccgacctggtgatgggactcctggtggtgccgccggcggccaccttggcgctgactggccactggccgttgggcgccactggctgcgagctgtggacctcggtggacgtgctgtgtgtgaccgccagcatcgaaaccctgtgcgccctggccgtggaccgctacctggctgtgaccaacccgctgcgttacggcgcactggtcaccaagcgctgcgcccggacagctgtggtcctggtgtgggtcgtgtcggccgcggtgtcgtttgcgcccatcatgagccagtggtggcgcgtaggggccgacgccgaggcgcagcgctgccactccaacccgcgctgctgtgccttcgcctccaacatgccctacgtgctgctgtcctcctccgtctccttctaccttcctcttctcgtgatgctcttcgtctacgcgcgggttttcgtggtggctacgcgccagctgcgcttgctgcgcggggagctgggccgctttccgcccgaggagtctccgccggcgccgtcgcgctctctggccccggccccggtggggacgtgcgctccgcccgaaggggtgcccgcctgcggccggcggcccgcgcgcctcctgcctctccgggaacaccgggccctgtgcaccttgggtctcatcatgggcaccttcactctctgctggttgcccttctttctggccaacgtgctgcgcgccctggggggcccctctctagtcccgggcccggctttccttgccctgaactggctaggttatgccaattctgccttcaacccgctcatctactgccgcagcccggactttcgcagcgccttccgccgtcttctgtgccgctgcggccgtcgcctgcctccggagccctgcgccgccgcccgcccggccctcttcccctcgggcgttcctgcggcccggagcagcccagcgcagcccaggctttgccaacggctcgacggggcttcttggggagtttcttaggcctgaaggacaagaagcaacaactctgttgatcagaacctgtggaaaacctctggcctctgttcagaatgagtcccatgggattccccggctgtgacactctaccctccagaacctgacgactgggccatgtgacccaaggagggatccttaccaagtgggttttcaccatcctcttgctctctgtctgagagatgttttctaaaccccagccttgaacttcactcctccctcagtggtagtgtccaggtgccgtggagcagcaggctggctttggtaggggcacccatcacccggcttgcctgtgcagtcagtgagtgcttagggcaaagagagctcccctggttccattccttctgccacccaaaccctgatgagaccttagtgttctccaggctctgtggcccaggctgagagcagcagggtagaaaagaccaagatttggggttttatctctggttcccttattactgctctcaagcagtggcctctctcactttagccatggaatggctccgatctacctcacagcagtgtcagaaggacttcgccagggttttgggagctccagggttcataagaaggtgaaccattagaacagatcccttcttttccttttgcaatcagataaataaatatcactgaatgcagttcatcctcggccccctttccctccgtttgttttcttttcataatccacttactcccttcccttctactctgcgctggcttttgacagaggcagtaaattaggcctaatcctcactcttttcttcctaatcttcatcaaacaaaaaatgaaaagtctgtctggacgaaggggagtgagcttgagcctttgatatcttgctcccccacccttcctgaaactcttgaaatccagttgccattgagtagcaaagccacgctccccacaggacttggacagagggcccacagggggatgggctggctgtggccaggtttagggcagggggcatttgtcccctccatgctataatccagtggtgccttacatggtgtgtgtgtgtgtgtgtgcgtgtgtgtgtgtgtgtgtgtgtctggaggcacaggcacaaagcattgcttgggttggtcaaatgtcttgtgtcataaatatattctgatgtttcccagcctttccacaacctctaccttcccactcaccttccccagctacaaaaatctgtattatcctcttaaagtaaaactggagtt

SEQ ID NO: 105925 - DNA, 2052 bp, Homo sapiens
  Payload ID: 775
  Gene Symbol: ACD
  Gene Name: adrenocortical dysplasia homolog (mouse)
  Uniprot ID: Q96AP0
  ENST ID: ENST00000219251
  CDS Start-End: 333-1958
atcacgctgaggtccgcgcgcccccggagtctggggagcagggctccgccaatccgaggggagggcgaaggaagtaccatttatttagcgctgtgtgtgtgctcttatttccactggccttacaagaccgtgcactgtgtagatgaggaaactgagtcataataaatatgtgctgaaccgttcgggggtcacacggtgctgaaatggtttcgagtcaactcgctcggacggcactcggcctcagcctccggccctggaaccctctccagggacgggaccagcccttgttctgttccctaccggtaccacaggaatcttgacgaacggcccaaatgcctggccgctgtcagagtgacgccgcgatgagagtaaacgggccagcatcccgtgcaccagcggggtggaccagcgggagtctgcacacaggcccccgagcaggacgccctcgtgcgcaggcgcggggtgtacgtgggcggggcctcctcctccggccccgcccagcgaaggagcttcctcttccgaggaaaggcggggcctgggcgcccgcgggaaacccgggcccgttgcatccgctgggtgtagccgtggggatggcaggttcggggaggctggtcctacggccctggattcgggagctgattctggggtcagagacaccctccagtccacgagccgggcagctgcttgaggacgccgaggccgcggtcgcgggcccatcccacgcccctgatacgtccgacgtcggggccacgctgcttgtgtctgacgggacccacagtgtccgatgcctggtgacgcgggaggccctggacacctcggactgggaggagaaggagttcggcttccgcgggacagagggccggctgctgctgctgcaggactgcggggttcatgtccaggtcgctgagggcggcgcgcccgcagagttctatctccaggtggaccgcttcagcctgctgcccacggagcagccccggctacgggtgcctggttgcaaccaagacttagatgttcagaaaaagctctatgactgccttgaggagcacctttcagagtccacctcgtccaatgcaggcctatcactgtcccagcttctggatgaaatgcgggaggaccaggagcatcagggggcactcgtgtgcctggctgaaagctgcctgacactggagggcccttgcacagcaccccctgtcacccactgggctgcctcacgatgcaaggccacgggagaagctgtgtacactgtccccagctcaatgctgtgcatctctgagaatgaccagctaattctgagctctctaggcccctgtcagaggacacagggccctgagctgcccccaccagacccggctctgcaggacctatctctgaccctcatagcctctcctccttcctcacccagttcctcaggaaccccggccttacccggccacatgtcatccgaggaaagtggtaccagcatcagccttctgcctgccctgtccttggctgctccagacccagggcagagaagcagctcccagccctcaccagccatctgctcagcccctgccaccctgacccccaggtccccacacgccagccgtacccccagctccccactccagagctgcactcccagtctctcaccccgtagccatgtccccagtccacaccaggctcttgtgaccaggccccagaaacctagcctggagttcaaggagtttgtagggttgccctgcaagaatcggccgccttttcccaggaccggagctaccaggggagcccaggagccctgctctgtctgggaacccccaaagaggcatcgtgatggttctgccttccagtatgagtatgagccaccctgcacgtccctctgtgctcgggtccaagctgtcaggcttcctccccagctcatggcctgggccttgcactttctgatggatgcacagccagggtctgagccaactccgatgtgagacgtcacgcaggacagataccgctccacactctgcttcctttgagttttttaataaaataatctcatgcggcaggagaggagaggatcaggga

SEQ ID NO: 105926 - DNA, 1974 bp, Homo sapiens
  Payload ID: 775
  Gene Symbol: ACD
  Gene Name: adrenocortical dysplasia homolog (mouse)
  Uniprot ID: Q96AP0
  ENST ID: ENST00000393919
  CDS Start-End: 266-1900
aaggaagtaccatttatttagcgctgtgtgtgtgctcttatttccactggccttacaagaccgtgcactgtgtagatgaggaaactgagtcataataaatatgtgctgaaccgttcgggggtcacacggtgctgaaatggtttcgagtcaactcgctcggacggcactcggcctcagcctccggccctggaaccctctccagggacgggaccagcccttgttctgttccctaccggtaccacaggaatcttgacgaacggcccaaatgcctggccgctgtcagagtgacgccgcgatgagagtaaacgggccagcatcccgtgcaccagcggggtggaccagcgggagtctgcacacaggcccccgagcaggacgccctcgtgcgcaggcgcggggtgtacgtgggcggggcctcctcctccggccccgcccagcgaaggagcttcctcttccgaggaaaggcggggcctgggcgcccgcgggaaacccgggcccgttgcatccgctgggtgtagccgtggggatggcaggttcggggaggctggtcctacggccctggattcgggagctgattctggggtcagagacaccctccagtccacgagccgggcagctgcttgaggtactacaggacgccgaggccgcggtcgcgggcccatcccacgcccctgatacgtccgacgtcggggccacgctgcttgtgtctgacgggacccacagtgtccgatgcctggtgacgcgggaggccctggacacctcggactgggaggagaaggagttcggcttccgcgggacagagggccggctgctgctgctgcaggactgcggggttcatgtccaggtcgctgagggcggcgcgcccgcagagttctatctccaggtggaccgcttcagcctgctgcccacggagcagccccggctacgggtgcctggttgcaaccaagacttagatgttcagaaaaagctctatgactgccttgaggagcacctttcagagtccacctcgtccaatgcaggcctatcactgtcccagcttctggatgaaatgcgggaggaccaggagcatcagggggcactcgtgtgcctggctgaaagctgcctgacactggagggcccttgcacagcaccccctgtcacccactgggctgcctcacgatgcaaggccacgggagaagctgtgtacactgtccccagctcaatgctgtgcatctctgagaatgaccagctaattctgagctctctaggcccctgtcagaggacacagggccctgagctgcccccaccagacccggctctgcaggacctatctctgaccctcatagcctctcctccttcctcacccagttcctcaggaaccccggccttacccggccacatgtcatccgaggaaagtggtaccagcatcagccttctgcctgccctgtccttggctgctccagacccagggcagagaagcagctcccagccctcaccagccatctgctcagcccctgccaccctgacccccaggtccccacacgccagccgtacccccagctccccactccagagctgcactcccagtctctcaccccgtagccatgtccccagtccacaccaggctcttgtgaccaggccccagaaacctagcctggagttcaaggagtttgtagggttgccctgcaagaatcggccgccttttcccaggaccggagctaccaggggagcccaggagccctgctctgtctgggaacccccaaagaggcatcgtgatggttctgccttccagtatgagtatgagccaccctgcacgtccctctgtgctcgggtccaagctgtcaggcttcctccccagctcatggcctgggccttgcactttctgatggatgcacagccagggtctgagccaactccgatgtgagacgtcacgcaggacagataccgctccacactctgcttcctttgagttttttaataaaataatctcatgcggca

SEQ ID NO: 105927 - DNA, 662 bp, Homo sapiens
  Payload ID: 775
  Gene Symbol: ACD
  Gene Name: adrenocortical dysplasia homolog (mouse)
  ENST ID: ENST00000602382
  CDS Start-End: 1-547
ggagcacctttcagagtccacctcgtccaatgcaggcctatcactgtcccagcttctggatgaaatgcgggaggaccaggagcatcagggggcactcgtgtgcctggctgaaagctgcctgacactggagggcccttgcacagcaccccctgtcacccactgggctgcctcacgatgcaaggccacgggagaagctgtgtacactgtccccagctcaatgctgtgcatctctgagaatgaccagctaattctgagctctctaggcccctgtcagaggacacagggccctgagctgcccccaccagacccggctctgcaggacctatctctgaccctcatagcctctcctccttcctcacccagttcctcaggaccggagctaccaggggagcccaggagccctgctctgtctgggaacccccaaagaggcatcgtgatggttctgccttccagtatgagtatgagccaccctgcacgtccctctgtgctcgggtccaagctgtcaggcttcctccccagctcatggcctgggccttgcactttctgatggatgcacagccagggtctgagccaactccgatgtgagacgtcacgcaggacagataccgctccacactctgcttcctttgagttttttaataaaataatctcatgcggcagga

SEQ ID NO: 105928 - DNA, 883 bp, Homo sapiens
  Payload ID: 775
  Gene Symbol: ACD
  Gene Name: adrenocortical dysplasia homolog (mouse)
  ENST ID: ENST00000602850
  CDS Start-End: 1-51
agtgtccgatgcctggtgacgcgggaggccctggacacctcggactggtgagaggccccgcgcggctctggagggaggagaaggagttcggcttccgcgggacagagggccggctgctgctgctgcaggactgcggggttcatgtccaggtcgctgagggcggcgcgcccgcagagttctatctccaggtggaccgcttcagcctgctgcccacggagcagccccggctacgggtgcctggttgcaaccaagacttagatgttcagaaaaagctctatgactgccttgaggagcacctttcagagtccacctcgtccaatgcaggcctatcactgtcccagcttctggatgaaatgcgggaggaccaggagcatcagggggcactcgtgtgcctggctgaaagctgcctgacactggagggcccttgcacagcaccccctgtcacccactgggctgcctcacgatgcaaggccacgggagaagctgtgtacactgtccccagctcaatgctgtgcatctctgagaatgaccagctaattctgagctctctaggcccctgtcagaggacacagggccctgagctgcccccaccagacccggctctgcaggacctatctctgaccctcatagcctctcctccttcctcacccagttcctcaggaaccccggccttacccggccacatgtcatccgaggaaagtggtaccagcatcagccttctgcctgccctgtccttggctgctccagacccagggcagagaagcagctcccagccctcaccagccatctgctcagcccctgccaccctgacccccaggtccccacacgccagccgtacccccagctccccactccagagctgcactcccagtctctcaccccg

SEQ ID NO: 105929 - DNA, 1408 bp, Homo sapiens
  Payload ID: 775
  Gene Symbol: ACD
  Gene Name: adrenocortical dysplasia homolog (mouse)
  ENST ID: ENST00000602320
  CDS Start-End: 20-1348
gctgggtgtagccgtggggatggcaggttcggggaggctggtcctacggccctggattcgggagctgattctggggtcagagacaccctccagtccacgagccgggcagctgcttgaggacgccgaggccgcggtcgcgggcccatcccacgcccctgatacgtccgacgtcggggccacgctgcttgtgtctgacgggacccacagtgtccgatgcctggtgacgcgggaggccctggacacctcggactgggaggagaaggagttcggcttccgcgggacagagggccggctgctgctgctgcaggactgcggggttcatgtccaggtcgctgagggcggcgcgcccgcagagttctatctccaggtggaccgcttcagcctgctgcccacggagcagccccggctacgggtgcctggttgcaaccaagacttagatgttcagaaaaagctctatgactgccttgaggagcacctttcagagtccacctcgtccaatgcaggcctatcactgtcccagcttctggatgaaatgcgggaggaccaggagcatcagggggcactcgtgtgcctggctgaaagctgcctgacactggagggcccttgcacagcaccccctgtcacccactgggctgcctcacgatgcaaggccacgggagaagctgtgtacactgtccccagctcaatgctgtgcatctctgagaatgaccagctaattctgagctctctaggcccctgtcagaggacacagggccctgagctgcccccaccagacccggctctgcaggacctatctctgaccctcatagcctctcctccttcctcacccagttcctcaggaaccccggccttacccggccacatgtcatccgaggaaagtggtaccagcatcagccttctgcctgccctgtccttggctgctccagacccagggcagagaagcagctcccagccctcaccagccatctgctcagcccctgccaccctgacccccaggtccccacacgccagccgtacccccagctccccactccagagctgcactcccagtctctcaccccgtagccatgtccccagtccacaccaggctcttgtgaccaggccccagaaacctagcctggagttcaaggagtttgtagggttgccctgcaagaatcggccgccttttcccaggaccggagctaccaggggagcccaggagccctgctctgtctggtatgagtatgagccaccctgcacgtccctctgtgctcgggtccaagctgtcaggcttcctccccagctcatggcctgggccttgcactttctgatggatgcacagccagggtctgagccaactccgatgtgagacgtcacgcaggacagataccgctccacactctgcttcctttgagttttttaataaaat

SEQ ID NO: 105930 - DNA, 1483 bp, Homo sapiens
  Payload ID: 775
  Gene Symbol: ACD
  Gene Name: adrenocortical dysplasia homolog (mouse)
  ENST ID: ENST00000620761
  CDS Start-End: 13-1389
gtagccgtggggatggcaggttcggggaggctggtcctacggccctggattcgggagctgattctggggtcagagacaccctccagtccacgagccgggcagctgcttgaggtactacaggacgccgaggccgcggtcgcgggcccatcccacgcccctgatacgtccgacgtcggggccacgctgcttgtgtctgacgggacccacagtgtccgatgcctggtgacgcgggaggccctggacacctcggactgggaggagaaggagttcggcttccgcgggacagagggccggctgctgctgctgcaggactgcggggttcatgtccaggtcgctgagggcggcgcgcccgcagagttctatctccaggtggaccgcttcagcctgctgcccacggagcagccccggctacgggtgcctggttgcaaccaagacttagatgttcagaaaaagctctatgactgccttgaggagcacctttcagagtccacctcgtccaatgcaggcctatcactgtcccagcttctggatgaaatgcgggaggaccaggagcatcagggggcactcgtgtgcctggctgaaagctgcctgacactggagggcccttgcacagcaccccctgtcacccactgggctgcctcacgatgcaaggccacgggagaagctgtgtacactgtccccagctcaatgctgtgcatctctgagaatgaccagctaattctgagctctctaggcccctgtcagaggacacagggccctgagctgcccccaccagacccggctctgcaggacctatctctgaccctcatagcctctcctccttcctcacccagttcctcaggaaccccggccttacccggccacatgtcatccgaggaaagtggtaccagcatcagccttctgcctgccctgtccttggctgctccagacccagggcagagaagcagctcccagccctcaccagccatctgctcagcccctgccaccctgacccccaggtccccacacgccagccgtacccccagctccccactccagagctgcactcccagtctctcaccccgtagccatgtccccagtccacaccaggctcttgtgaccaggccccagaaacctagcctggagttcaaggagtttgtagggttgccctgcaagaatcggccgccttttcccaggaccggagctaccaggggagcccaggagccctgctctgtctgggaacccccaaagaggcatcgtgatggttctgccttccagtatgagtatgagccaccctgcacgtccctctgtgctcgggtccaagctgtcaggcttcctccccagctcatggcctgggccttgcactttctgatggatgcacagccagggtctgagccaactccgatgtgagacgtcacgcaggacagataccgctccacactctgcttcctttgagttttttaataaaataatctcatgcggcaggagaggagaggatcaggga

SEQ ID NO: 105931 - DNA, 2065 bp, Homo sapiens
  Payload ID: 775
  Gene Symbol: ACD
  Gene Name: adrenocortical dysplasia homolog (mouse)
  Uniprot ID: Q96AP0
  ENST ID: ENST00000620338
  CDS Start-End: 338-1972
gcgtcatcacgctgaggtccgcgcgcccccggagtctggggagcagggctccgccaatccgaggggagggcgaaggaagtaccatttatttagcgctgtgtgtgtgctcttatttccactggccttacaagaccgtgcactgtgtagatgaggaaactgagtcataataaatatgtgctgaaccgttcgggggtcacacggtgctgaaatggtttcgagtcaactcgctcggacggcactcggcctcagcctccggccctggaaccctctccagggacgggaccagcccttgttctgttccctaccggtaccacaggaatcttgacgaacggcccaaatgcctggccgctgtcagagtgacgccgcgatgagagtaaacgggccagcatcccgtgcaccagcggggtggaccagcgggagtctgcacacaggcccccgagcaggacgccctcgtgcgcaggcgcggggtgtacgtgggcggggcctcctcctccggccccgcccagcgaaggagcttcctcttccgaggaaaggcggggcctgggcgcccgcgggaaacccgggcccgttgcatccgctgggtgtagccgtggggatggcaggttcggggaggctggtcctacggccctggattcgggagctgattctggggtcagagacaccctccagtccacgagccgggcagctgcttgaggtactacaggacgccgaggccgcggtcgcgggcccatcccacgcccctgatacgtccgacgtcggggccacgctgcttgtgtctgacgggacccacagtgtccgatgcctggtgacgcgggaggccctggacacctcggactgggaggagaaggagttcggcttccgcgggacagagggccggctgctgctgctgcaggactgcggggttcatgtccaggtcgctgagggcggcgcgcccgcagagttctatctccaggtggaccgcttcagcctgctgcccacggagcagccccggctacgggtgcctggttgcaaccaagacttagatgttcagaaaaagctctatgactgccttgaggagcacctttcagagtccacctcgtccaatgcaggcctatcactgtcccagcttctggatgaaatgcgggaggaccaggagcatcagggggcactcgtgtgcctggctgaaagctgcctgacactggagggcccttgcacagcaccccctgtcacccactgggctgcctcacgatgcaaggccacgggagaagctgtgtacactgtccccagctcaatgctgtgcatctctgagaatgaccagctaattctgagctctctaggcccctgtcagaggacacagggccctgagctgcccccaccagacccggctctgcaggacctatctctgaccctcatagcctctcctccttcctcacccagttcctcaggaaccccggccttacccggccacatgtcatccgaggaaagtggtaccagcatcagccttctgcctgccctgtccttggctgctccagacccagggcagagaagcagctcccagccctcaccagccatctgctcagcccctgccaccctgacccccaggtccccacacgccagccgtacccccagctccccactccagagctgcactcccagtctctcaccccgtagccatgtccccagtccacaccaggctcttgtgaccaggccccagaaacctagcctggagttcaaggagtttgtagggttgccctgcaagaatcggccgccttttcccaggaccggagctaccaggggagcccaggagccctgctctgtctgggaacccccaaagaggcatcgtgatggttctgccttccagtatgagtatgagccaccctgcacgtccctctgtgctcgggtccaagctgtcaggcttcctccccagctcatggcctgggccttgcactttctgatggatgcacagccagggtctgagccaactccgatgtgagacgtcacgcaggacagataccgctccacactctgcttcctttgagttttttaataaaataatctcatgcggcaggagaggagaggatcaggg

SEQ ID NO: 105932 - DNA, 1885 bp, Homo sapiens
  Payload ID: 776
  Gene Symbol: ADM
  Gene Name: adrenomedullin
  Uniprot ID: P35318
  ENST ID: ENST00000278175
  CDS Start-End: 572-1129
atccgcgctgtcccttccgcgggctcttgctgttcttcgccaggaggctttgcactccgggccgcatgggtcctggataaggacctcaagaggttgtagtggcgccccttcgctccggcgtactgtctgaaccctgtgcccaaagagggctgtggcagttcctgcaccaaccgcctggagcccatacctaagccctctgggcacgagggacctcctctcccccgctcccccctccccccatcccaactccagccccaaaggaagcaatgcgcgcgtccgagagcaggagcgcgcgtggctgaggaaagaaagggaaggcaaccgggcagcccaggccccgccccgccgctcccccacccgtgcgcttataaagcacaggaaccagagctggccactcagtggtttcttggtgacactggatagaacagctcaagccttgccacttcgggcttctcactgcagctgggcttggacttcggagttttgccattgccagtgggacgtctgagactttctccttcaagtacttggcagatcactctcttagcagggtctgcgcttcgcagccgggatgaagctggtttccgtcgccctgatgtacctgggttcgctcgccttcctaggcgctgacaccgctcggttggatgtcgcgtcggagtttcgaaagaagtggaataagtgggctctgagtcgtgggaagagggaactgcggatgtccagcagctaccccaccgggctcgctgacgtgaaggccgggcctgcccagacccttattcggccccaggacatgaagggtgcctctcgaagccccgaagacagcagtccggatgccgcccgcatccgagtcaagcgctaccgccagagcatgaacaacttccagggcctccggagctttggctgccgcttcgggacgtgcacggtgcagaagctggcacaccagatctaccagttcacagataaggacaaggacaacgtcgcccccaggagcaagatcagcccccagggctacggccgccggcgccggcgctccctgcccgaggccggcccgggtcggactctggtgtcttctaagccacaagcacacggggctccagcccccccgagtggaagtgctccccactttctttaggatttaggcgcccatggtacaaggaatagtcgcgcaagcatcccgctggtgcctcccgggacgaaggacttcccgagcggtgtggggaccgggctctgacagccctgcggagaccctgagtccgggaggcaccgtccggcggcgagctctggctttgcaagggcccctccttctgggggcttcgcttccttagccttgctcaggtgcaagtgccccagggggcggggtgcagaagaatccgagtgtttgccaggcttaaggagaggagaaactgagaaatgaatgctgagacccccggagcaggggtctgagccacagccgtgctcgcccacaaactgatttctcacggcgtgtcaccccaccagggcgcaagcctcactattacttgaactttccaaaacctaaagaggaaaagtgcaatgcgtgttgtacatacagaggtaactatcaatatttaagtttgttgctgtcaagattttttttgtaacttcaaatatagagatatttttgtacgttatatattgtattaagggcattttaaaagcaattatattgtcctcccctattttaagacgtgaatgtctcagcgaggtgtaaagttgttcgccgcgtggaatgtgagtgtgtttgtgtgcatgaaagagaaagactgattacctcctgtgtggaagaaggaaacaccgagtctctgtataatctatttacataaaatgggtgatatgcgaacagcaaaccaataaactgtctcaatgctga

SEQ ID NO: 105933 - DNA, 1640 bp, Homo sapiens
  Payload ID: 776
  Gene Symbol: ADM
  Gene Name: adrenomedullin
  ENST ID: ENST00000534464
  CDS Start-End: 470-886
actcagtggtttcttggtgacactggatagaacagctcaagccttgccacttcgggcttctcactgcagctgggcttggacttcggagttttgccattgccagtgggacgtctgagactttctccttcaagtacttggcagatcactctcttagcagggtctgcgcttcgcagccgggatgaagctggtttccgtcgccctgatgtacctgggttcgctcgccttcctaggcgctgacaccgctcggttggatgtcgcgtcggagtttcgaaagaagtgagtccgggcagcgccttcccccttgctggtacctggcaggcaaggggaactgaccgttggtcccgaaggtctagaagtgaatgggagcagggacaggcctgggcgtcacctgaacgcacgcgaatcgggtctgcttgtgttttccaggtggaataagtgggctctgagtcgtgggaagagggaactgcggatgtccagcagctaccccaccgggctcgctgacgtgaaggccgggcctgcccagacccttattcggccccaggacatgaagggtgcctctcgaagccccgaagacagcagtccggatgccgcccgcatccgagtcaagcgctaccgccagagcatgaacaacttccagggcctccggagctttggctgccgcttcgggacgtgcacggtgcagaagctggcacaccagatctaccagttcacagataaggacaaggacaacgtcgcccccaggagcaagatcagcccccagggctacggccgccggcgccggcgctccctgcccgaggccggcccgggtcggactctggtgtcttctaagccacaagcacacggggctccagcccccccgagtggaagtgctccccactttctttaggatttaggcgcccatggtacaaggaatagtcgcgcaagcatcccgctggtgcctcccgggacgaaggacttcccgagcggtgtggggaccgggctctgacagccctgcggagaccctgagtccgggaggcaccgtccggcggcgagctctggctttgcaagggcccctccttctgggggcttcgcttccttagccttgctcaggtgcaagtgccccagggggcggggtgcagaagaatccgagtgtttgccaggcttaaggagaggagaaactgagaaatgaatgctgagacccccggagcaggggtctgagccacagccgtgctcgcccacaaactgatttctcacggcgtgtcaccccaccagggcgcaagcctcactattacttgaactttccaaaacctaaagaggaaaagtgcaatgcgtgttgtacatacagaggtaactatcaatatttaagtttgttgctgtcaagattttttttgtaacttcaaatatagagatatttttgtacgttatatattgtattaagggcattttaaaagcaattatattgtcctcccctattttaagacgtgaatgtctcagcgaggtgtaaagttgttcgccgcgtggaatgtgagtgtgtttgtgtgcatgaaagagaaagactgattacctcctgtgtggaagaaggaaacaccgagtctctgtataatctatttacataaaatgggtgatatgcgaacagcaaaccaataaactgtctcaatgct

SEQ ID NO: 105934 - DNA, 584 bp, Homo sapiens
  Payload ID: 776
  Gene Symbol: ADM
  Gene Name: adrenomedullin
  ENST ID: ENST00000524948
  CDS Start-End: 175-426
agtggtttcttggtgacactggatagaacagctcaagccttgccacttcgggcttctcactgcagctgggcttggacttcggagttttgccattgccagtgggacgtctgagactttctccttcaagtacttggcagatcactctcttagcagggtctgcgcttcgcagccgggatgaagctggtttccgtcgccctgatgtacctgggttcgctcgccttcctaggcgctgacaccgctcggttggatgtcgcgtcggagtttcgaaagaagtggaataagtgggctctgagtcgtgggaagagggaactgcggatgtccagcagctaccccaccgggctcgctgacgtgaaggccgggcctgcccagacccttattcggccccaggacatgaagggtgcctctcgaagccccgaagacaggtaactacgccctgtgctgtccagggacgggagggaaggaaggtgtgcgggaggagttctctgtctccactcccctggcccgggggatcgtcggggctggaccgcagctcagatggcgcgagcagtttccagctccctctggctctagaatggctcccgttc

SEQ ID NO: 105935 - DNA, 641 bp, Homo sapiens
  Payload ID: 776
  Gene Symbol: ADM
  Gene Name: adrenomedullin
  ENST ID: ENST00000526492
  CDS Start-End: 164-583
ggtgacactggatagaacagctcaagccttgccacttcgggcttctcactgcagctgggcttggacttcggagttttgccattgccagtgggacgtctgagactttctccttcaagtacttggcagatcactctcttagcagggtctgcgcttcgcagccgggatgaagctggtttccgtcgccctgatgtacctgggttcgctcgccttcctaggcgctgacaccgctcggttggatgtcgcgtcggagtttcgaaagaagtggaataagtgggctctgagtcgtgggaagagggaactgcggatgtccagcagctaccccaccgggctcgctgacgtgaaggccgggcctgcccagacccttattcggccccaggacatgaagggtgcctctcgaagccccgaagacagttgcctttcttccccctccccccgcccgcagcagtccggatgccgcccgcatccgagtcaagcgctaccgccagagcatgaacaacttccagggcctccggagctttggctgccgcttcgggacgtgcacggtgcagaagctggcacaccagatctaccagttcacagataaggacaaggacaacgtcgcccccaggagcaagatcagcccccagggctacggccgccgg

SEQ ID NO: 105936 - DNA, 586 bp, Homo sapiens
  Payload ID: 776
  Gene Symbol: ADM
  Gene Name: adrenomedullin
  ENST ID: ENST00000528544
  CDS Start-End: 325-576
gtgcacacagctggaggtccagagacccagtcccctctgctccgtcagccaagttccaagaagttgagcagagaccctctgggagcctggcggggtgcagcggcctcccctgcggggcctgtcacccggccggcgcgtgcaaacgcctctggcgcctctctgcgcggagggagataagcgtctgagccagggaaagcgcgggctaaacccgcctcgccggggcccctgcccgccctccgtgccccgcccgggcggtgcagctggcccgggtgctcacgctcgactctctttcttcttttccagggtctgcgcttcgcagccgggatgaagctggtttccgtcgccctgatgtacctgggttcgctcgccttcctaggcgctgacaccgctcggttggatgtcgcgtcggagtttcgaaagaagtggaataagtgggctctgagtcgtgggaagagggaactgcggatgtccagcagctaccccaccgggctcgctgacgtgaaggccgggcctgcccagacccttattcggccccaggacatgaagggtgcctctcgaagccccgaagacaggtaactacgccctg

SEQ ID NO: 105937 - DNA, 867 bp, Homo sapiens
  Payload ID: 776
  Gene Symbol: ADM
  Gene Name: adrenomedullin
  Uniprot ID: P35318
  ENST ID: ENST00000525063
  CDS Start-End: 164-721
ggtgacactggatagaacagctcaagccttgccacttcgggcttctcactgcagctgggcttggacttcggagttttgccattgccagtgggacgtctgagactttctccttcaagtacttggcagatcactctcttagcagggtctgcgcttcgcagccgggatgaagctggtttccgtcgccctgatgtacctgggttcgctcgccttcctaggcgctgacaccgctcggttggatgtcgcgtcggagtttcgaaagaagtggaataagtgggctctgagtcgtgggaagagggaactgcggatgtccagcagctaccccaccgggctcgctgacgtgaaggccgggcctgcccagacccttattcggccccaggacatgaagggtgcctctcgaagccccgaagacagcagtccggatgccgcccgcatccgagtcaagcgctaccgccagagcatgaacaacttccagggcctccggagctttggctgccgcttcgggacgtgcacggtgcagaagctggcacaccagatctaccagttcacagataaggacaaggacaacgtcgcccccaggagcaagatcagcccccagggctacggccgccggcgccggcgctccctgcccgaggccggcccgggtcggactctggtgtcttctaagccacaagcacacggggctccagcccccccgagtggaagtgctccccactttctttaggatttaggcaccgtccggcggcgagctctggctttgcaagggcccctccttctgggggcttcgcttccttagccttgctcaggtgcaagtgccccagggggcggggtgcagaagaatccgagtgtttgccaggcttaaggagagga

SEQ ID NO: 105938 - DNA, 1889 bp, Homo sapiens
  Payload ID: 776
  Gene Symbol: ADM
  Gene Name: adrenomedullin
  Uniprot ID: P35318
  ENST ID: ENST00000528655
  CDS Start-End: 618-1175
tcttggtgacactggatagaacagctcaagccttgccacttcgggcttctcactgcagctgggcttggacttcggagttttgccattgccagtgggacgtctgagactttctccttcaagtacttggcagatcactctcttagcaggtaggtgccgcagaccctgcgggttaagaggtggggtggggggcagtgcttgccaaggccctaaactgggagcgctgggtgaggggaacaacccactttggagggttctctgagagatagatacaccccatatcctgggcccagctcgtgcacacagctggaggtccagagacccagtcccctctgctccgtcagccaagttccaagaagttgagcagagaccctctgggagcctggcggggtgcagcggcctcccctgcggggcctgtcacccggccggcgcgtgcaaacgcctctggcgcctctctgcgcggagggagataagcgtctgagccagggaaagcgcgggctaaacccgcctcgccggggcccctgcccgccctccgtgccccgcccgggcggtgcagctggcccgggtgctcacgctcgactctctttcttcttttccagggtctgcgcttcgcagccgggatgaagctggtttccgtcgccctgatgtacctgggttcgctcgccttcctaggcgctgacaccgctcggttggatgtcgcgtcggagtttcgaaagaagtggaataagtgggctctgagtcgtgggaagagggaactgcggatgtccagcagctaccccaccgggctcgctgacgtgaaggccgggcctgcccagacccttattcggccccaggacatgaagggtgcctctcgaagccccgaagacagcagtccggatgccgcccgcatccgagtcaagcgctaccgccagagcatgaacaacttccagggcctccggagctttggctgccgcttcgggacgtgcacggtgcagaagctggcacaccagatctaccagttcacagataaggacaaggacaacgtcgcccccaggagcaagatcagcccccagggctacggccgccggcgccggcgctccctgcccgaggccggcccgggtcggactctggtgtcttctaagccacaagcacacggggctccagcccccccgagtggaagtgctccccactttctttaggatttaggcgcccatggtacaaggaatagtcgcgcaagcatcccgctggtgcctcccgggacgaaggacttcccgagcggtgtggggaccgggctctgacagccctgcggagaccctgagtccgggaggcaccgtccggcggcgagctctggctttgcaagggcccctccttctgggggcttcgcttccttagccttgctcaggtgcaagtgccccagggggcggggtgcagaagaatccgagtgtttgccaggcttaaggagaggagaaactgagaaatgaatgctgagacccccggagcaggggtctgagccacagccgtgctcgcccacaaactgatttctcacggcgtgtcaccccaccagggcgcaagcctcactattacttgaactttccaaaacctaaagaggaaaagtgcaatgcgtgttgtacatacagaggtaactatcaatatttaagtttgttgctgtcaagattttttttgtaacttcaaatatagagatatttttgtacgttatatattgtattaagggcattttaaaagcaattatattgtcctcccctattttaagacgtgaatgtctcagcgaggtgtaaagttgttcgccgcgtggaatgtgagtgtgtttgtgtgcatgaaagagaaagactgattacctcctgtgtggaagaaggaaacaccgagtctctgtataatctatttacataaaatgg

SEQ ID NO: 105939 - DNA, 1839 bp, Homo sapiens
  Payload ID: 776
  Gene Symbol: ADM
  Gene Name: adrenomedullin
  ENST ID: ENST00000530439
  CDS Start-End: 765-1118
ctcagtggtttcttggtgacactggatagaacagctcaagccttgccacttcgggcttctcactgcagctgggcttggacttcggagttttgccattgccagtgggacgtctgagactttctccttcaagtacttggcagatcactctcttagcagggtctgcgcttcgcagccgggatgaagctggtttccgtcgccctgatgtacctgggttcgctcgccttcctaggcgctgacaccgctcggttggatgtcgcgtcggagtttcgaaagaagtgagtccgggcagcgccttcccccttgctggtacctggcaggcaaggggaactgaccgttggtcccgaaggtctagaagtgaatgggagcagggacaggcctgggcgtcacctgaacgcacgcgaatcgggtctgcttgtgttttccaggtggaataagtgggctctgagtcgtgggaagagggaactgcggatgtccagcagctaccccaccgggctcgctgacgtgaaggccgggcctgcccagacccttattcggccccaggacatgaagggtgcctctcgaagccccgaagacaggtaactacgccctgtgctgtccagggacgggagggaaggaaggtgtgcgggaggagttctctgtctccactcccctggcccgggggatcgtcggggctggaccgcagctcagatggcgcgagcagtttccagctccctctggctctagaatggctcccgttcccggtgttggggccaaagctctgcttgatggggtctcaagttgcctttcttccccctccccccgcccgcagcagtccggatgccgcccgcatccgagtcaagcgctaccgccagagcatgaacaacttccagggcctccggagctttggctgccgcttcgggacgtgcacggtgcagaagctggcacaccagatctaccagttcacagataaggacaaggacaacgtcgcccccaggagcaagatcagcccccagggctacggccgccggcgccggcgctccctgcccgaggccggcccgggtcggactctggtgtcttctaagccacaagcacacggggctccagcccccccgagtggaagtgctccccactttctttaggatttaggcgcccatggtacaaggaatagtcgcgcaagcatcccgctggtgcctcccgggacgaaggacttcccgagcggtgtggggaccgggctctgacagccctgcggagaccctgagtccgggaggcaccgtccggcggcgagctctggctttgcaagggcccctccttctgggggcttcgcttccttagccttgctcaggtgcaagtgccccagggggcggggtgcagaagaatccgagtgtttgccaggcttaaggagaggagaaactgagaaatgaatgctgagacccccggagcaggggtctgagccacagccgtgctcgcccacaaactgatttctcacggcgtgtcaccccaccagggcgcaagcctcactattacttgaactttccaaaacctaaagaggaaaagtgcaatgcgtgttgtacatacagaggtaactatcaatatttaagtttgttgctgtcaagattttttttgtaacttcaaatatagagatatttttgtacgttatatattgtattaagggcattttaaaagcaattatattgtcctcccctattttaagacgtgaatgtctcagcgaggtgtaaagttgttcgccgcgtggaatgtgagtgtgtttgtgtgcatgaaagagaaagactgattacctcctgtgtggaagaaggaaacaccgagtctctgtataatctatttacataaaatgggtgatat

SEQ ID NO: 105940 - DNA, 535 bp, Homo sapiens
  Payload ID: 777
  Gene Symbol: ADM2
  Gene Name: adrenomedullin 2
  Uniprot ID: Q7Z4H4
  ENST ID: ENST00000395737
  CDS Start-End: 52-498
cgcccacgcccggcgccccgaccgcggaggactccccgagccccgcccgccatggcccggatcccgacggccgccctgggttgcatcagcctcctctgcctgcagctccctggctcgctgtcccgcagcctgggcggggacccgcgacccgtcaaacccagggagcccccagcccggagcccttccagcagcctgcagcccaggcaccccgcaccccgacctgtggtctggaagcttcaccgggccctccaggcacagaggggtgccggcctggcccctgttatgggtcagcctctccgggatggtggccgccaacactcgggcccccgaagacactcgggcccccgcaggacccaagcccagctcctgcgagtgggctgtgtgctgggcacctgccaggtgcagaatctcagccaccgcctgtggcaactcatgggaccggccggccggcaggactcagctcctgtggaccccagcagcccccacagctatggctgaggtggggccgggccacacccctgcccatcccagccag

SEQ ID NO: 105941 - DNA, 4276 bp, Homo sapiens
  Payload ID: 777
  Gene Symbol: ADM2
  Gene Name: adrenomedullin 2
  Uniprot ID: Q7Z4H4
  ENST ID: ENST00000395738
  CDS Start-End: 293-739
attcagccctggaggtgccatcccgggccgcgactccgctccaggcaggacccccaacccgcccagcccgctccgccttgcgccccggacccgcggccgaccccagacccgctgcccgcttcgcgcccgaggcctgcgccccgacggacgcccgtgcccagcttgccacgcccacgcccggcgccccgaccgcggaggactccccgaggtgccggcggagggggtggctcgcggctcaggctgcccccgacgtgcccggctcaccgccccctcccctgcagccccgcccgccatggcccggatcccgacggccgccctgggttgcatcagcctcctctgcctgcagctccctggctcgctgtcccgcagcctgggcggggacccgcgacccgtcaaacccagggagcccccagcccggagcccttccagcagcctgcagcccaggcaccccgcaccccgacctgtggtctggaagcttcaccgggccctccaggcacagaggggtgccggcctggcccctgttatgggtcagcctctccgggatggtggccgccaacactcgggcccccgaagacactcgggcccccgcaggacccaagcccagctcctgcgagtgggctgtgtgctgggcacctgccaggtgcagaatctcagccaccgcctgtggcaactcatgggaccggccggccggcaggactcagctcctgtggaccccagcagcccccacagctatggctgaggtggggccgggccacacccctgcccatcccagccagggtgctgtgcccccgtccagagctgcagctgagccccatctgaagcccagtccctcggagctgcagacagcaggtcctgcagcaacaatacctgcacggctttgcacacgtaaacctaggctggtctacacgcagtgctggtacgtcaaggagcctaaacaccctgaaattgtgaccccctgggggacagctgccagacacagctggcggcagcaccagatgctaagcgcttcagagaggaggtgtctgcccagagatgtggagcagaagctgggccctgaacacacggggccatgtctggacgagcaggggagagaggctgaactggccagaagtggcccctccgctgctggtccagtcagactgaagcccggccttgtgcctgggctgttcctgctctcatgcacaaccagcccttccacgtgcctgcctgtgggacaggagggggagcgtgggatgctgtagcccccggggttgggcaagggaaggatggtggccctccagaggtcatgaagggacctctgtggctccagctgccaaccctggagcccagaccgaggtggccatggagactccacctggatcccctgtaggaggccagggaggggaactcagcagttcaggagccaccccaaaccattctgggacagggacacccctttctaccccagggcagggcagggctgggtggggcaagatcccccagcccgactagacccacctcacctgaagggggtgagacccttgttggcagccagacaagggtggggctccacaggcagcacaggcgccccaccaccacccagtttggggacccagtgggaccaggtgcgggggcagagggtgacttaccaagagccagggagggcagcccaggcccaagtgacagcaagaacaagaaccactgccggcgtgcacagacttggtgtgtgtccttccctggggggacgggggactcacatgtgcctgccactggagcctctcaaccgtccagcagaacacggggttcagaaagggctccttctgctatttagcgaacactgagcatttaatttacaaatgtttgctagggtcaccctctcggccatcccacgagggtcgccatgatcaccccaactctagaggccgcagcagagctcaggacattcccccacagagcttgcccctcagttcctacctccaagggggagggtcctggaagcgcccacccaggcgccgcccctgtgcttgctccccgagctcagggattgccgagtccacgtaactgacctgtactccacgaggccctgtgggaacggtccaggctggtcctgccctgtggaggcctccgtgcactgagagatgtactaggattgcagcaaaggtggtcagggtgatgggccgcacagcgaggcagtcaaggccagctccctgggagaagcactgggtcaggtgaggtctgaggacagcaggccttccctaggggaaggagctgggagtgccaaggccccaggtgcacaggaggcgtggctgctgagaggctgcagggtggaggggcctcggcctcagagtcatgtgccctgtgaccactgaagggtgtcagcagagcacacggcatgaggacagagggaggggcacggggagtgaaggagggggccctggggcaaggctcgggggtcaggagctcagcgtccgctactcagcccagccaaaaccctcccagacgtctcctctcctgcctgggcaaagtccagcttggcaccccgtctggggcctgcctgtggtcagggccaagtgttccctcctccaggaaagcctttaccctcctcatgccctgtagtcaggaggccgcctgctgtaaccctccgtgtcgcctcgggtgcgaaatcagacccacctgacaccatcacgcggaggcccagcagcacctgcacccacttccagctgctctggccaaaatctccgctcggccaggccccgtggctcacacctgtaatcctagcacattgggaggccaaggcaggcacatcacctgagttcaggagttcaagaccagcctggccaacatggtgaaatcccgtctctactaaaaacagaaaattatccgggcgtggtggcacatgactgtaatcccagctactcaggaggctgaggcaggaggatcacttgaacctgggaggcggaggttgcagtgagctgagattgcgccattgcactccagcctgggcaacaagagcaaaattctgcctcaaaaaaaaaaatagtaataatacaaaaattagctgggcgtggtggcacatgccagtaattccatctactcgggaggctgaggcaggagaatcgtctaagcccgggaggtggaggttgcagtgagcccagatggcgctgctgcactcaagcttggatgacagagcaagactccgtttcaaaaaaaaaaaacctcctctcttccttcacaccttcctctgaatcccacccggtcccacctcctgaacctatccagacaccttctcctgacccaggcaccacctgctttcggggcgatggccgtagcctcctcccaggcacctgtctgcatccctctggccagtgcatgctgagcacgtgacctacccgtgttgggacacgtgaggatacagccttgacccccaggggctgacattctagggggagatagaaggagacaaacgtagaaggtagaataagtgggtggtggagtggcagggagtgctgagtgccacaggaagtcagacaaggaaggagagtgtggggcaggtgccgtttaaatggggggcgctggggtctcctcacagttgcttctcagctcagctgtgccaggatcttgttgagtcaggtcagctgcccacagccctcttgcctgacccctgaagcccagaactctgatcttcacagccctaggtatggccccagcaccccactgccctctctcctgccccagccgactgctgttcccagacttccctggccacgctccaagacgccagctctgccgcgggcactttgttctcacggtgtcctccatgcctgcagggcccatgcatgggaagttgcgttggcggcctgggtgttggcggttccgtgcctgctccaactctccgtgaggcccctctcccagagcctgacacactctgtggccgaactctaggcaggtgcccctgagtcctttcctcgacgaggcctgaccccatccccatcctcgctgggcccgccgaccccggtgttagcaagaatcctctaaatcagtttatggagaattacccaccctcgatatctgatcccattcctcatctcccacccttgatctcatcaccctgccggcctcctgcaagatcctcattgagccactccagtgagaatccccctaccctcgaaggccgccctaacaacttcccatccgctgacccctccaacgccatcaatctccagctgtggttgttgaactcggaggtgagctcctctcaccactctcttgaataaagcttttctcaccattttaacaa

SEQ ID NO: 105942 - DNA, 1718 bp, Homo sapiens
  Payload ID: 778
  Gene Symbol: ADM5
  Gene Name: adrenomedullin 5 (putative)
  Uniprot ID: C9JUS6
  ENST ID: ENST00000420022
  CDS Start-End: 1175-1636
gtccaactcttttcatccctctcctgggtctgcgcccctcccctctgcggtacccgtgtcctgcctagtaggggatgggggtggctttccagcacagccagccctcaagtttcccagaacagtctccccacctccccccaacactcgacattgttcctctctggctgttttttcctgttcgggtcccttcaaggcccaactgtgcccagccctctgcagctggggacactgagtgggttgggggtgtatgtttgcaaggatagaatttctcatgggggagtggccctgcttcctcccctagaatggcttggggcttagggctggggacttgccctccatggaggtcagtgggagttgcagctgtaaggtggcagggcctacccatcttacagaggtgaagacgaggtccctctgcctctgctgcagacatggcgtctgcacccacccttccaccctcagggcctggccacggggtcctgggtcccccacaatactgtgcactcgacctggttgacccaggacaccctcctcgttgaacagccctggctacacctgcttcagtgcaactggagccctcaccggcgagtgcctgacacctcggccttttctcttccggaggggcgctcctcagtgtgtttggggtctccctcgctccacgccctccagggggccgcatgtgcacttgccctgcattgcctggcccccgaggttccagggtcccaactgtctactaaccggcttcccgacagggtgagggtgaggtcgcatctacaaccagagccagcgcttccccgccgccaccccttttcttggaatcccgctgcttagctacctgcgggtgtcattggccccgccccatttccccacgctttgaagggggcgagtctccacagacctcctagggggatagacagcagctggtgtgaccccacacacccagtgaggtctctggagccgcggtgcgggaagcggggacccgggtttgaatcctgcccctctggtgtggtgcggcctcttcccacagacttttggcctcagtgttccccgcctgggaagtggggactggccctggtacctggctccagagctgcacccagaggcgatcagcccggtgcgggaacggggcggggtggccgcaactacgggccacggatcctgacccgccctgcccacgatgactatccacatcctcatcctgctgttgctcctcgccttctccgcccaaggggacctggacactgcagccaggcgaggccagcaccaggtcccccagcaccgcgggcacgtctgctacctgggcgtatgccggacccaccgcctggcggagatcatatactggattcgctgtctccaccaaggagccctcggggaaggccagccacgagccccaggacccctacagctatgggcgccgccggtggcgcgaggcggaagcccggctcggttcccaggattccggcctgcagcgagggggctagcgcagtgcccagctcgctgggtgacctcgggcacggctcgtcccctcctcggcttcagtttgcctatctgtatgttggagcttctactccacatttcttctcccctaactccagcccctgaaaccgtcttccccagtccctccccgggctgcgactaggttggacctagaagcacacgggaccaggctgggcgaagaacactgacgcccagagccgaataaacaagagttccgtgtttca

SEQ ID NO: 105943 - DNA, 1369 bp, Homo sapiens
  Payload ID: 779
  Gene Symbol: AGER
  Gene Name: advanced glycosylation end product-specific receptor
  Uniprot ID: Q15109
  ENST ID: ENST00000375055
  CDS Start-End: 25-1068
gccaggaccctggaaggaagcaggatggctgccggaacagcagttggagcctgggtgctggtcctcagtctgtggggggcagtagtaggtgctcaaaacatcacagcccggattggcgagccactggtgctgaagtgtaagggggcccccaagaaaccaccccagcggctggaatggaaactgaacacaggccggacagaagcttggaaggtcctgtctccccagggaggaggcccctgggacagtgtggctcgtgtccttcccaacggctccctcttccttccggctgtcgggatccaggatgaggggattttccggtgccaggcaatgaacaggaatggaaaggagaccaagtccaactaccgagtccgtgtctaccagattcctgggaagccagaaattgtagattctgcctctgaactcacggctggtgttcccaataaggtggggacatgtgtgtcagagggaagctaccctgcagggactcttagctggcacttggatgggaagcccctggtgcctaatgagaagggagtatctgtgaaggaacagaccaggagacaccctgagacagggctcttcacactgcagtcggagctaatggtgaccccagcccggggaggagatccccgtcccaccttctcctgtagcttcagcccaggccttccccgacaccgggccttgcgcacagcccccatccagccccgtgtctgggagcctgtgcctctggaggaggtccaattggtggtggagccagaaggtggagcagtagctcctggtggaaccgtaaccctgacctgtgaagtccctgcccagccctctcctcaaatccactggatgaaggatggtgtgcccttgccccttccccccagccctgtgctgatcctccctgagatagggcctcaggaccagggaacctacagctgtgtggccacccattccagccacgggccccaggaaagccgtgctgtcagcatcagcatcatcgaaccaggcgaggaggggccaactgcaggtgaggggtttgataaagtcagggaagcagaagatagcccccaacacatgtgactggggggatggtcaacaagaaaggaatggaaggccccagaaaaccaggaggaagaggaggagcgtgcagaactgaatcagtcggaggaacctgaggcaggcgagagtagtactggagggccttgaggggcccacagacagatcccatccatcagctcccttttctttttcccttgaactgttctggcctcagaccaactctctcctgtataatctctctcctgtataaccccaccttgccaagctttcttctacaaccagagccccccacaatgatgattaaacacctgacacatcttgc

SEQ ID NO: 105944 - DNA, 715 bp, Homo sapiens
  Payload ID: 779
  Gene Symbol: AGER
  Gene Name: advanced glycosylation end product-specific receptor
  ENST ID: ENST00000375056
  CDS Start-End: 16-715
ctggaaggaagcaggatggctgccggaacagcagttggagcctgggtgctggtcctcagtctgtggggggcagtagtaggtgctcaaaacatcacagcccggattggcgagccactggtgctgaagtgtaagggggcccccaagaaaccaccccagcggctggaatggaaactgaacacaggccggacagaagcttggaaggtcctgtctccccagggaggaggcccctgggacagtgtggctcgtgtccttcccaacggctccctcttccttccggctgtcgggatccaggatgaggggattttccggtgccaggcaatgaacaggaatggaaaggagaccaagtccaactaccgagtccgtgtctaccagattcctgggaagccagaaattgtagattctgcctctgaactcacggctggtgttcccaataaggtagtggaagaaagcaggagaagtagaaaacggccctgtgaacaggaggtggggacatgtgtgtcagagggaagctaccctgcagggactcttagctggcacttggatgggaagcccctggtgcctaatgagaagggagtatctgtgaaggaacagaccaggagacaccctgagacagggctcttcacactgcagtcggagctaatggtgaccccagcccggggaggagatccccgtcccaccttctcctgtagcttcagcccaggccttccccgacacc

SEQ ID NO: 105945 - DNA, 665 bp, Homo sapiens
  Payload ID: 779
  Gene Symbol: AGER
  Gene Name: advanced glycosylation end product-specific receptor
  ENST ID: ENST00000375065
  CDS Start-End: 264-665
atggctgccggaacagcagttggagcctgggtgctggtcctcagtctgtggggggcagtagtaggtgctcaaaacatcacagcccaggccttccccgacaccgggccttgcgcacagcccccatccagccccgtgtctgggagcctgtgcctctggaggaggtccaattggtggtggagccagaaggtggagcagtagctcctggtggaaccgtaaccctgacctgtgaagtccctgcccagccctctcctcaaatccactggatgaaggatggtgtgcccttgccccttccccccagccctgtgctgatcctccctgagatagggcctcaggaccagggaacctacagctgtgtggccacccattccagccacgggccccaggaaagccgtgctgtcagcatcagcatcatcgaaccaggcgaggaggggccaactgcaggctctgtgggaggatcagggctgggaactctagccctggccctggggatcctgggaggcctggggacagccgccctgctcattggggtcatcttgtggcaaaggcggcaacgccgaggagaggagaggaaggccccagaaaaccaggaggaagaggaggagcgtgcagaactgaatcagtcggaggaacctgaggcaggcgagagtagtactggagggccttga

SEQ ID NO: 105946 - DNA, 1250 bp, Homo sapiens
  Payload ID: 779
  Gene Symbol: AGER
  Gene Name: advanced glycosylation end product-specific receptor
  Uniprot ID: Q15109
  ENST ID: ENST00000375067
  CDS Start-End: 16-1044
ctggaaggaagcaggatggctgccggaacagcagttggagcctgggtgctggtcctcagtctgtggggggcagtagtaggtgctcaaaacatcacagcccggattggcgagccactggtgctgaagtgtaagggggcccccaagaaaccaccccagcggctggaatggaaactgggaggaggcccctgggacagtgtggctcgtgtccttcccaacggctccctcttccttccggctgtcgggatccaggatgaggggattttccggtgccaggcaatgaacaggaatggaaaggagaccaagtccaactaccgagtccgtgtctaccagattcctgggaagccagaaattgtagattctgcctctgaactcacggctggtgttcccaataaggtggggacatgtgtgtcagagggaagctaccctgcagggactcttagctggcacttggatgggaagcccctggtgcctaatgagaagggagtatctgtgaaggaacagaccaggagacaccctgagacagggctcttcacactgcagtcggagctaatggtgaccccagcccggggaggagatccccgtcccaccttctcctgtagcttcagcccaggccttccccgacaccgggccttgcgcacagcccccatccagccccgtgtctgggagcctgtgcctctggaggaggtccaattggtggtggagccagaaggtggagcagtagctcctggtggaaccgtaaccctgacctgtgaagtccctgcccagccctctcctcaaatccactggatgaaggatgtgagtgacctggagagaggggctgggagaaccaggcgaggaggggccaactgcaggctctgtgggaggatcagggctgggaactctagccctggccctggggatcctgggaggcctggggacagccgccctgctcattggggtcatcttgtggcaaaggcggcaacgccgaggagaggagaggaaggccccagaaaaccaggaggaagaggaggagcgtgcagaactgaatcagtcggaggaacctgaggcaggcgagagtagtactggagggccttgaggggcccacagacagatcccatccatcagctcccttttctttttcccttgaactgttctggcctcagaccaactctctcctgtataatctctctcctgtataaccccaccttgccaagctttcttctacaaccagagccccccacaatgatgattaaacacctgacacatcttgc

SEQ ID NO: 105947 - DNA, 1538 bp, Homo sapiens
  Payload ID: 779
  Gene Symbol: AGER
  Gene Name: advanced glycosylation end product-specific receptor
  Uniprot ID: Q15109
  ENST ID: ENST00000375069
  CDS Start-End: 101-1363
ctgaaagatgggggctggagagagggtgcaggccccacctagggcggaggccacagcagggagaggggcagacagagccaggaccctggaaggaagcaggatggctgccggaacagcagttggagcctgggtgctggtcctcagtctgtggggggcagtagtaggtgctcaaaacatcacagcccggattggcgagccactggtgctgaagtgtaagggggcccccaagaaaccaccccagcggctggaatggaaactgaacacaggccggacagaagcttggaaggtcctgtctccccagggaggaggcccctgggacagtgtggctcgtgtccttcccaacggctccctcttccttccggctgtcgggatccaggatgaggggattttccggtgccaggcaatgaacaggaatggaaaggagaccaagtccaactaccgagtccgtgtctaccagattcctgggaagccagaaattgtagattctgcctctgaactcacggctggtgttcccaataaggtagtggaagaaagcaggagaagtagaaaacggccctgtgaacaggaggtggggacatgtgtgtcagagggaagctaccctgcagggactcttagctggcacttggatgggaagcccctggtgcctaatgagaagggagtatctgtgaaggaacagaccaggagacaccctgagacagggctcttcacactgcagtcggagctaatggtgaccccagcccggggaggagatccccgtcccaccttctcctgtagcttcagcccaggccttccccgacaccgggccttgcgcacagcccccatccagccccgtgtctgggagcctgtgcctctggaggaggtccaattggtggtggagccagaaggtggagcagtagctcctggtggaaccgtaaccctgacctgtgaagtccctgcccagccctctcctcaaatccactggatgaaggatggtgtgcccttgccccttccccccagccctgtgctgatcctccctgagatagggcctcaggaccagggaacctacagctgtgtggccacccattccagccacgggccccaggaaagccgtgctgtcagcatcagcatcatcgaaccaggcgaggaggggccaactgcaggctctgtgggaggatcagggctgggaactctagccctggccctggggatcctgggaggcctggggacagccgccctgctcattggggtcatcttgtggcaaaggcggcaacgccgaggagaggagaggaaggccccagaaaaccaggaggaagaggaggagcgtgcagaactgaatcagtcggaggaacctgaggcaggcgagagtagtactggagggccttgaggggcccacagacagatcccatccatcagctcccttttctttttcccttgaactgttctggcctcagaccaactctctcctgtataatctctctcctgtataaccccaccttgccaagctttcttctacaaccagagccccccacaatgatgattaaacacctgacacatcttgc

SEQ ID NO: 105948 - DNA, 1463 bp, Homo sapiens
  Payload ID: 779
  Gene Symbol: AGER
  Gene Name: advanced glycosylation end product-specific receptor
  ENST ID: ENST00000375070
  CDS Start-End: 404-1288
ctgaaagatgggggctggagagagggtgcaggccccacctagggcggaggccacagcagggagaggggcagacagagccaggaccctggaaggaagcaggatggctgccggaacagcagttggagcctgggtgctggtcctcagtctgtggggggcagtagtaggtgctcaaaacatcacagcccggattggcgagccactggtgctgaagtgtaagggggcccccaagaaaccaccccagcggctggaatggaaactgaacacaggccggacagaagcttggaaggtcctgtctccccagggaggaggcccctgggacagtgtggctcgtgtccttcccaacggctccctcttccttccggctgtcgggatccaggatgaggggattttccggtgccaggcaatgaacaggaatggaaaggagaccaagtccaactaccgagtccgtgtctaccagattcctgggaagccagaaattgtagattctgcctctgaactcacggctggtgttcccaataaggtggggacatgtgtgtcagagggaagctaccctgcagggactcttagctggcacttggatgggaagcccctggtgcctaatgagaagggagtatctgtgaaggaacagaccaggagacaccctgagacagggctcttcacactgcagtcggagctaatggtgaccccagcccggggaggagatccccgtcccaccttctcctgtagcttcagcccaggccttccccgacaccgggccttgcgcacagcccccatccagccccgtgtctgggagcctgtgcctctggaggaggtccaattggtggtggagccagaaggtggagcagtagctcctggtggaaccgtaaccctgacctgtgaagtccctgcccagccctctcctcaaatccactggatgaaggatggtgtgcccttgccccttccccccagccctgtgctgatcctccctgagatagggcctcaggaccagggaacctacagctgtgtggccacccattccagccacgggccccaggaaagccgtgctgtcagcatcagcatcatcggctctgtgggaggatcagggctgggaactctagccctggccctggggatcctgggaggcctggggacagccgccctgctcattggggtcatcttgtggcaaaggcggcaacgccgaggagaggagaggaaggccccagaaaaccaggaggaagaggaggagcgtgcagaactgaatcagtcggaggaacctgaggcaggcgagagtagtactggagggccttgaggggcccacagacagatcccatccatcagctcccttttctttttcccttgaactgttctggcctcagaccaactctctcctgtataatctctctcctgtataaccccaccttgccaagctttcttctacaaccagagccccccacaatgatgattaaacacctgacacatcttgc

SEQ ID NO: 105949 - DNA, 1492 bp, Homo sapiens
  Payload ID: 779
  Gene Symbol: AGER
  Gene Name: advanced glycosylation end product-specific receptor
  Uniprot ID: Q15109
  ENST ID: ENST00000375076
  CDS Start-End: 103-1317
gactgaaagatgggggctggagagagggtgcaggccccacctagggcggaggccacagcagggagaggggcagacagagccaggaccctggaaggaagcaggatggctgccggaacagcagttggagcctgggtgctggtcctcagtctgtggggggcagtagtaggtgctcaaaacatcacagcccggattggcgagccactggtgctgaagtgtaagggggcccccaagaaaccaccccagcggctggaatggaaactgaacacaggccggacagaagcttggaaggtcctgtctccccagggaggaggcccctgggacagtgtggctcgtgtccttcccaacggctccctcttccttccggctgtcgggatccaggatgaggggattttccggtgccaggcaatgaacaggaatggaaaggagaccaagtccaactaccgagtccgtgtctaccagattcctgggaagccagaaattgtagattctgcctctgaactcacggctggtgttcccaataaggtggggacatgtgtgtcagagggaagctaccctgcagggactcttagctggcacttggatgggaagcccctggtgcctaatgagaagggagtatctgtgaaggaacagaccaggagacaccctgagacagggctcttcacactgcagtcggagctaatggtgaccccagcccggggaggagatccccgtcccaccttctcctgtagcttcagcccaggccttccccgacaccgggccttgcgcacagcccccatccagccccgtgtctgggagcctgtgcctctggaggaggtccaattggtggtggagccagaaggtggagcagtagctcctggtggaaccgtaaccctgacctgtgaagtccctgcccagccctctcctcaaatccactggatgaaggatggtgtgcccttgccccttccccccagccctgtgctgatcctccctgagatagggcctcaggaccagggaacctacagctgtgtggccacccattccagccacgggccccaggaaagccgtgctgtcagcatcagcatcatcgaaccaggcgaggaggggccaactgcaggctctgtgggaggatcagggctgggaactctagccctggccctggggatcctgggaggcctggggacagccgccctgctcattggggtcatcttgtggcaaaggcggcaacgccgaggagaggagaggaaggccccagaaaaccaggaggaagaggaggagcgtgcagaactgaatcagtcggaggaacctgaggcaggcgagagtagtactggagggccttgaggggcccacagacagatcccatccatcagctcccttttctttttcccttgaactgttctggcctcagaccaactctctcctgtataatctctctcctgtataaccccaccttgccaagctttcttctacaaccagagccccccacaatgatgattaaacacctgacacatcttgc

SEQ ID NO: 105950 - DNA, 1369 bp, Homo sapiens
  Payload ID: 779
  Gene Symbol: AGER
  Gene Name: advanced glycosylation end product-specific receptor
  Uniprot ID: Q15109
  ENST ID: ENST00000383275
  CDS Start-End: 25-1068
gccaggaccctggaaggaagcaggatggcagccggaacagcagttggagcctgggtgctggtcctcagtctgtggggggcagtagtaggtgctcaaaacatcacagcccggattggcgagccactggtgctgaagtgtaagggggcccccaagaaaccaccccagcggctggaatggaaactgaacacaggccggacagaagcttggaaggtcctgtctccccagggaggaggcccctgggacagtgtggctcgtgtccttcccaacggctccctcttccttccggctgtcgggatccaggatgaggggattttccggtgccaggcaatgaacaggaatggaaaggagaccaagtccaactaccgagtccgtgtctaccagattcctgggaagccagaaattgtagattctgcctctgaactcacggctggtgttcccaataaggtggggacatgtgtgtcagagggaagctaccctgcagggactcttagctggcacttggatgggaagcccctggtgcctaatgagaagggagtatctgtgaaggaacagaccaggagacaccctgagacagggctcttcacactgcagtcggagctaatggtgaccccagcccggggaggagatccccgtcccaccttctcctgtagcttcagcccaggccttccccgacaccgggccttgcgcacagcccccatccagccccgtgtctgggagcctgtgcctctggaggaggtccaattggtggtggagccagaaggtggagcagtagctcctggtggaaccgtaaccctgacctgtgaagtccctgcccagccctctcctcaaatccactggatgaaggatggtgtgcccttgccccttccccccagccctgtgctgatcctccctgagatagggcctcaggaccagggaacctacagctgtgtggccacccattccagccacgggccccaggaaagccgtgctgtcagcatcagcatcatcgaaccaggcgaggaggggccaactgcaggtgaggggtttgataaagtcagggaagcagaagatagcccccaacacatgtgactggggggatggtcaacaagaaaggaatggaaggccccagaaaaccaggaggaagaggaggagcgtgcagaactgaatcagtcggaggaacctgaggcaggcgagagtagtactggagggccttgaggggcccacagacagatcccatccatcagctcccttttctttttcccttgaactgttctggcctcagaccaactctctcctgtataatctctctcctgtataaccccaccttgccaagctttcttctacaaccagagccccccacaatgatgattaaacacctgacacatcttgc

SEQ ID NO: 105951 - DNA, 1250 bp, Homo sapiens
  Payload ID: 779
  Gene Symbol: AGER
  Gene Name: advanced glycosylation end product-specific receptor
  Uniprot ID: Q15109
  ENST ID: ENST00000383279
  CDS Start-End: 16-1044
ctggaaggaagcaggatggcagccggaacagcagttggagcctgggtgctggtcctcagtctgtggggggcagtagtaggtgctcaaaacatcacagcccggattggcgagccactggtgctgaagtgtaagggggcccccaagaaaccaccccagcggctggaatggaaactgggaggaggcccctgggacagtgtggctcgtgtccttcccaacggctccctcttccttccggctgtcgggatccaggatgaggggattttccggtgccaggcaatgaacaggaatggaaaggagaccaagtccaactaccgagtccgtgtctaccagattcctgggaagccagaaattgtagattctgcctctgaactcacggctggtgttcccaataaggtggggacatgtgtgtcagagggaagctaccctgcagggactcttagctggcacttggatgggaagcccctggtgcctaatgagaagggagtatctgtgaaggaacagaccaggagacaccctgagacagggctcttcacactgcagtcggagctaatggtgaccccagcccggggaggagatccccgtcccaccttctcctgtagcttcagcccaggccttccccgacaccgggccttgcgcacagcccccatccagccccgtgtctgggagcctgtgcctctggaggaggtccaattggtggtggagccagaaggtggagcagtagctcctggtggaaccgtaaccctgacctgtgaagtccctgcccagccctctcctcaaatccactggatgaaggatgtgagtgacctggagagaggggctgggagaaccaggcgaggaggggccaactgcaggctctgtgggaggatcagggctgggaactctagccctggccctggggatcctgggaggcctggggacagccgccctgctcattggggtcatcttgtggcaaaggcggcaacgccgaggagaggagaggaaggccccagaaaaccaggaggaagaggaggagcgtgcagaactgaatcagtcggaggaacctgaggcaggcgagagtagtactggagggccttgaggggcccacagacagatcccatccatcagctcccttttctttttcccttgaactgttctggcctcagaccaactctctcctgtataatctctctcctgtataaccccaccttgccaagctttcttctacaaccagagccccccacaatgatgattaaacacctgacacatcttgc

SEQ ID NO: 105952 - DNA, 1250 bp, Homo sapiens; identical to SEQ ID NO: 105951
  Payload ID: 779
  Gene Symbol: AGER
  Gene Name: advanced glycosylation end product-specific receptor
  Uniprot ID: Q15109
  ENST ID: ENST00000412470
  CDS Start-End: 16-1044

SEQ ID NO: 105953 - DNA, 1493 bp, Homo sapiens
  Payload ID: 779
  Gene Symbol: AGER
  Gene Name: advanced glycosylation end product-specific receptor
  Uniprot ID: Q15109
  ENST ID: ENST00000438221
  CDS Start-End: 101-1192
ctgaaagatgggggctggagagagggtgcaggccccacctagggcggaggccacagcagggagaggggcagacagagccaggaccctggaaggaagcaggatggctgccggaacagcagttggagcctgggtgctggtcctcagtctgtggggggcagtagtaggtgctcaaaacatcacagcccggattggcgagccactggtgctgaagtgtaagggggcccccaagaaaccaccccagcggctggaatggaaactgaacacaggccggacagaagcttggaaggtcctgtctccccagggaggaggcccctgggacagtgtggctcgtgtccttcccaacggctccctcttccttccggctgtcgggatccaggatgaggggattttccggtgccaggcaatgaacaggaatggaaaggagaccaagtccaactaccgagtccgtgtctaccagattcctgggaagccagaaattgtagattctgcctctgaactcacggctggtgttcccaataaggtagtggaagaaagcaggagaagtagaaaacggccctgtgaacaggaggtggggacatgtgtgtcagagggaagctaccctgcagggactcttagctggcacttggatgggaagcccctggtgcctaatgagaagggagtatctgtgaaggaacagaccaggagacaccctgagacagggctcttcacactgcagtcggagctaatggtgaccccagcccggggaggagatccccgtcccaccttctcctgtagcttcagcccaggccttccccgacaccgggccttgcgcacagcccccatccagccccgtgtctgggagcctgtgcctctggaggaggtccaattggtggtggagccagaaggtggagcagtagctcctggtggaaccgtaaccctgacctgtgaagtccctgcccagccctctcctcaaatccactggatgaaggatggtgtgcccttgccccttccccccagccctgtgctgatcctccctgagatagggcctcaggaccagggaacctacagctgtgtggccacccattccagccacgggccccaggaaagccgtgctgtcagcatcagcatcatcgaaccaggcgaggaggggccaactgcaggtgaggggtttgataaagtcagggaagcagaagatagcccccaacacatgtgactggggggatggtcaacaagaaaggaatggaaggccccagaaaaccaggaggaagaggaggagcgtgcagaactgaatcagtcggaggaacctgaggcaggcgagagtagtactggagggccttgaggggcccacagacagatcccatccatcagctcccttttctttttcccttgaactgttctggcctcagaccaactctctcctgtataatctctctcctgtataaccccaccttgccaagctttcttctacaaccagagccccccacaatgatgattaaacacctgacacatcttgc

SEQ ID NO: 105954 - DNA, 716 bp, Homo sapiens
  Payload ID: 779
  Gene Symbol: AGER
  Gene Name: advanced glycosylation end product-specific receptor
  ENST ID: ENST00000436653
  CDS Start-End: 14-716
ggaaggaagcaggatggcagccggaacagcagttggagcctgggtgctggtcctcagtctgtggggggcagtagtaggtgctcaaaacatcacagcccggattggcgagccactggtgctgaagtgtaagggggcccccaagaaaccaccccagcggctggaatggaaactgaacacaggccggacagaagcttggaaggtcctgtctccccagggaggaggcccctgggacagtgtggctcgtgtccttcccaacagctccctcttccttccggctgtcgggatccaggatgaggggattttccggtgccaggcaatgaacaggaatggaaaggagaccaagtccaactaccgaagtttgagaaccttcacaattacagcctctgactggatttttcctccttcagagattcctgggaagccagaaattgtagattctgcctctgaactcacggctggtgttcccaataaggtggggacatgtgtgtcagagggaagctaccctgcagggactcttagctggcacttggatgggaagcccctggtgcctaatgagaagggagtatctgtgaaggaacagaccaggagacaccctgagacagggctcttcacactgcagtcggagctaatggtgaccccagcccggggaggagatccccgtcccaccttctcctgtagcttcagcccaggccttccccgacaccgggccttgcgca

SEQ ID NO: 105955 - DNA, 1250 bp, Homo sapiens; identical to SEQ ID NO: 105951
  Payload ID: 779
  Gene Symbol: AGER
  Gene Name: advanced glycosylation end product-specific receptor
  Uniprot ID: Q15109
  ENST ID: ENST00000441180
  CDS Start-End: 16-1044

SEQ ID NO: 105956 - DNA, 716 bp, Homo sapiens
  Payload ID: 779
  Gene Symbol: AGER
  Gene Name: advanced glycosylation end product-specific receptor
  ENST ID: ENST00000455471
  CDS Start-End: 14-716
ggaaggaagcaggatggcagccggaacagcagttggagcctgggtgctggtcctcagtctgtggggggcagtagtaggtgctcaaaacatcacagcccggattggcgagccactggtgctgaagtgtaagggggcccccaagaaaccaccccagcggctggaatggaaactgaacacaggccggacagaagcttggaaggtcctgtctccccagggaggaggcccctgggacagtgtggctcgtgtccttcccaacggctccctcttccttccggctgtcgggatccaggatgaggggattttccggtgccaggcaatgaacaggaatggaaaggagaccaagtccaactaccgaagtttgagaaccttcacaattacagcctctgactggatttttcctccttcagagattcctgggaagccagaaattgtagattctgcctctgaactcacggctggtgttcccaataaggtggggacatgtgtgtcagagggaagctaccctgcagggactcttagctggcacttggatgggaagcccctggtgcctaatgagaagggagtatctgtgaaggaacagaccaggagacaccctgagacagggctcttcacactgcagtcggagctaatggtgaccccagcccggggaggagatccccgtcccaccttctcctgtagcttcagcccaggccttccccgacaccgggccttgcgca

SEQ ID NO: 105957 - DNA, 1250 bp, Homo sapiens; identical to SEQ ID NO: 105951
  Payload ID: 779
  Gene Symbol: AGER
  Gene Name: advanced glycosylation end product-specific receptor
  Uniprot ID: Q15109
  ENST ID: ENST00000441804
  CDS Start-End: 16-1044

SEQ ID NO: 105958 - DNA, 1250 bp, Homo sapiens
  Payload ID: 779
  Gene Symbol: AGER
  Gene Name: advanced glycosylation end product-specific receptor
  ENST ID: ENST00000424145
  CDS Start-End: 16-1044
ctggaaggaagcaggatggcagccggaacagcagttggagcctgggtgctggtcctcagtctgtggggggcagtagtaggtgctcaaaacatcacagcccggattggcgagccactggtgctgaagtgtaagggggcccccaagaaaccaccccagcggctggaatggaaactgggaggaggcccctgggacagtgtggctcgtgtccttcccaacagctccctcttccttccggctgtcgggatccaggatgaggggattttccggtgccaggcaatgaacaggaatggaaaggagaccaagtccaactaccgagtccgtgtctaccagattcctgggaagccagaaattgtagattctgcctctgaactcacggctggtgttcccaataaggtggggacatgtgtgtcagagggaagctaccctgcagggactcttagctggcacttggatgggaagcccctggtgcctaatgagaagggagtatctgtgaaggaacagaccaggagacaccctgagacagggctcttcacactgcagtcggagctaatggtgaccccagcccggggaggagatccccgtcccaccttctcctgtagcttcagcccaggccttccccgacaccgggccttgcgcacagcccccatccagccccgtgtctgggagcctgtgcctctggaggaggtccaattggtggtggagccagaaggtggagcagtagctcctggtggaaccgtaaccctgacctgtgaagtccctgcccagccctctcctcaaatccactggatgaaggatgtgagtgacctggagagaggggctgggagaaccaggcgaggaggggccaactgcaggctctgtgggaggatcagggctgggaactctagccctggccctggggatcctgggaggcctggggacagccgccctgctcattggggtcatcttgtggcaaaggcggcaacgccgaggagaggagaggaaggccccagaaaaccaggaggaagaggaggagcgtgcagaactgaatcagtcggaggaacctgaggcaggcgagagtagtactggagggccttgaggggcccacagacagatcccatccatcagctcccttttctttttcccttgaactgttctggcctcagaccaactctctcctgtataatctctctcctgtataaccccaccttgccaagctttcttctacaaccagagccccccacaatgatgattaaacacctgacacatcttgc

SEQ ID NO: 105959 - DNA, 715 bp, Homo sapiens
  Payload ID: 779
  Gene Symbol: AGER
  Gene Name: advanced glycosylation end product-specific receptor
  ENST ID: ENST00000424476
  CDS Start-End: 16-715
ctggaaggaagcaggatggcagccggaacagcagttggagcctgggtgctggtcctcagtctgtggggggcagtagtaggtgctcaaaacatcacagcccggattggcgagccactggtgctgaagtgtaagggggcccccaagaaaccaccccagcggctggaatggaaactgaacacaggccggacagaagcttggaaggtcctgtctccccagggaggaggcccctgggacagtgtggctcgtgtccttcccaacggctccctcttccttccggctgtcgggatccaggatgaggggattttccggtgccaggcaatgaacaggaatggaaaggagaccaagtccaactaccgagtccgtgtctaccagattcctgggaagccagaaattgtagattctgcctctgaactcacggctggtgttcccaataaggtagtggaagaaagcaggagaagtagaaaacggccctgtgaacaggaggtggggacatgtgtgtcagagggaagctaccctgcagggactcttagctggcacttggatgggaagcccctggtgcctaatgagaagggagtatctgtgaaggaacagaccaggagacaccctgagacagggctcttcacactgcagtcggagctaatggtgaccccagcccggggaggagatccccgtcccaccttctcctgtagcttcagcccaggccttccccgacacc

SEQ ID NO: 105960 - DNA, 716 bp, Homo sapiens; identical to SEQ ID NO: 105956
  Payload ID: 779
  Gene Symbol: AGER
  Gene Name: advanced glycosylation end product-specific receptor
  ENST ID: ENST00000415973
  CDS Start-End: 14-716

SEQ ID NO: 105961 - DNA, 1492 bp, Homo sapiens
  Payload ID: 779
  Gene Symbol: AGER
  Gene Name: advanced glycosylation end product-specific receptor
  Uniprot ID: Q15109
  ENST ID: ENST00000447921
  CDS Start-End: 103-1317
gactgaaagatgggggctggagagagggtgcaggccccacctagggcggaggccacagcagggagaggggcagacagagccaggaccctggaaggaagcaggatggcagccggaacagcagttggagcctgggtgctggtcctcagtctgtggggggcagtagtaggtgctcaaaacatcacagcccggattggcgagccactggtgctgaagtgtaagggggcccccaagaaaccaccccagcggctggaatggaaactgaacacaggccggacagaagcttggaaggtcctgtctccccagggaggaggcccctgggacagtgtggctcgtgtccttcccaacggctccctcttccttccggctgtcgggatccaggatgaggggattttccggtgccaggcaatgaacaggaatggaaaggagaccaagtccaactaccgagtccgtgtctaccagattcctgggaagccagaaattgtagattctgcctctgaactcacggctggtgttcccaataaggtggggacatgtgtgtcagagggaagctaccctgcagggactcttagctggcacttggatgggaagcccctggtgcctaatgagaagggagtatctgtgaaggaacagaccaggagacaccctgagacagggctcttcacactgcagtcggagctaatggtgaccccagcccggggaggagatccccgtcccaccttctcctgtagcttcagcccaggccttccccgacaccgggccttgcgcacagcccccatccagccccgtgtctgggagcctgtgcctctggaggaggtccaattggtggtggagccagaaggtggagcagtagctcctggtggaaccgtaaccctgacctgtgaagtccctgcccagccctctcctcaaatccactggatgaaggatggtgtgcccttgccccttccccccagccctgtgctgatcctccctgagatagggcctcaggaccagggaacctacagctgtgtggccacccattccagccacgggccccaggaaagccgtgctgtcagcatcagcatcatcgaaccaggcgaggaggggccaactgcaggctctgtgggaggatcagggctgggaactctagccctggccctggggatcctgggaggcctggggacagccgccctgctcattggggtcatcttgtggcaaaggcggcaacgccgaggagaggagaggaaggccccagaaaaccaggaggaagaggaggagcgtgcagaactgaatcagtcggaggaacctgaggcaggcgagagtagtactggagggccttgaggggcccacagacagatcccatccatcagctcccttttctttttcccttgaactgttctggcctcagaccaactctctcctgtataatctctctcctgtataaccccaccttgccaagctttcttctacaaccagagccccccacaatgatgattaaacacctgacacatcttgc

SEQ ID NO: 105962 - DNA, 1492 bp, Homo sapiens; identical to SEQ ID NO: 105961
  Payload ID: 779
  Gene Symbol: AGER
  Gene Name: advanced glycosylation end product-specific receptor
  Uniprot ID: Q15109
  ENST ID: ENST00000436456
  CDS Start-End: 103-1317

SEQ ID NO: 105963 - DNA, 715 bp, Homo sapiens
  Payload ID: 779
  Gene Symbol: AGER
  Gene Name: advanced glycosylation end product-specific receptor
  ENST ID: ENST00000412794
  CDS Start-End: 16-715
ctggaaggaagcaggatggcagccggaacagcagttggagcctgggtgctggtcctcagtctgtggggggcagtagtaggtgctcaaaacatcacagcccggattggcgagccactggtgctgaagtgtaagggggcccccaagaaaccaccccagcggctggaatggaaactgaacacaggccggacagaagcttggaaggtcctgtctccccagggaggaggcccctgggacagtgtggctcgtgtccttcccaacagctccctcttccttccggctgtcgggatccaggatgaggggattttccggtgccaggcaatgaacaggaatggaaaggagaccaagtccaactaccgagtccgtgtctaccagattcctgggaagccagaaattgtagattctgcctctgaactcacggctggtgttcccaataaggtagtggaagaaagcaggagaagtagaaaacggccctgtgaacaggaggtggggacatgtgtgtcagagggaagctaccctgcagggactcttagctggcacttggatgggaagcccctggtgcctaatgagaagggagtatctgtgaaggaacagaccaggagacaccctgagacagggctcttcacactgcagtcggagctaatggtgaccccagcccggggaggagatccccgtcccaccttctcctgtagcttcagcccaggccttccccgacacc

SEQ ID NO: 105964 - DNA, 1250 bp, Homo sapiens; identical to SEQ ID NO: 105958
  Payload ID: 779
  Gene Symbol: AGER
  Gene Name: advanced glycosylation end product-specific receptor
  ENST ID: ENST00000448768
  CDS Start-End: 16-1044

SEQ ID NO: 105965 - DNA, 716 bp, Homo sapiens
  Payload ID: 779
  Gene Symbol: AGER
  Gene Name: advanced glycosylation end product-specific receptor
  ENST ID: ENST00000450110
  CDS Start-End: 14-716
ggaaggaagcaggatggctgccggaacagcagttggagcctgggtgctggtcctcagtctgtggggggcagtagtaggtgctcaaaacatcacagcccggattggcgagccactggtgctgaagtgtaagggggcccccaagaaaccaccccagcggctggaatggaaactgaacacaggccggacagaagcttggaaggtcctgtctccccagggaggaggcccctgggacagtgtggctcgtgtccttcccaacggctccctcttccttccggctgtcgggatccaggatgaggggattttccggtgccaggcaatgaacaggaatggaaaggagaccaagtccaactaccgaagtttgagaaccttcacaattacagcctctgactggatttttcctccttcagagattcctgggaagccagaaattgtagattctgcctctgaactcacggctggtgttcccaataaggtggggacatgtgtgtcagagggaagctaccctgcagggactcttagctggcacttggatgggaagcccctggtgcctaatgagaagggagtatctgtgaaggaacagaccaggagacaccctgagacagggctcttcacactgcagtcggagctaatggtgaccccagcccggggaggagatccccgtcccaccttctcctgtagcttcagcccaggccttccccgacaccgggccttgcgca

SEQ ID NO: 105966 - DNA, 715 bp, Homo sapiens; identical to SEQ ID NO: 105959
  Payload ID: 779
  Gene Symbol: AGER
  Gene Name: advanced glycosylation end product-specific receptor
  ENST ID: ENST00000434502
  CDS Start-End: 16-715

SEQ ID NO: 105967 - DNA, 1369 bp, Homo sapiens; identical to SEQ ID NO: 105950
  Payload ID: 779
  Gene Symbol: AGER
  Gene Name: advanced glycosylation end product-specific receptor
  Uniprot ID: Q15109
  ENST ID: ENST00000453588
  CDS Start-End: 25-1068

SEQ ID NO: 105968 - DNA, 1369 bp, Homo sapiens; identical to SEQ ID NO: 105950
  Payload ID: 779
  Gene Symbol: AGER
  Gene Name: advanced glycosylation end product-specific receptor
  Uniprot ID: Q15109
  ENST ID: ENST00000449037
  CDS Start-End: 25-1068

SEQ ID NO: 105969 - DNA, 1492 bp, Homo sapiens; identical to SEQ ID NO: 105961
  Payload ID: 779
  Gene Symbol: AGER
  Gene Name: advanced glycosylation end product-specific receptor
  Uniprot ID: Q15109
  ENST ID: ENST00000451115
  CDS Start-End: 103-1317

SEQ ID NO: 105970 - DNA, 716 bp, Homo sapiens; identical to SEQ ID NO: 105956
  Payload ID: 779
  Gene Symbol: AGER
  Gene Name: advanced glycosylation end product-specific receptor
  ENST ID: ENST00000444630
  CDS Start-End: 14-716

SEQ ID NO: 105971 - DNA, 1369 bp, Homo sapiens
  Payload ID: 779
  Gene Symbol: AGER
  Gene Name: advanced glycosylation end product-specific receptor
  ENST ID: ENST00000452945
  CDS Start-End: 25-1068
gccaggaccctggaaggaagcaggatggcagccggaacagcagttggagcctgggtgctggtcctcagtctgtggggggcagtagtaggtgctcaaaacatcacagcccggattggcgagccactggtgctgaagtgtaagggggcccccaagaaaccaccccagcggctggaatggaaactgaacacaggccggacagaagcttggaaggtcctgtctccccagggaggaggcccctgggacagtgtggctcgtgtccttcccaacagctccctcttccttccggctgtcgggatccaggatgaggggattttccggtgccaggcaatgaacaggaatggaaaggagaccaagtccaactaccgagtccgtgtctaccagattcctgggaagccagaaattgtagattctgcctctgaactcacggctggtgttcccaataaggtggggacatgtgtgtcagagggaagctaccctgcagggactcttagctggcacttggatgggaagcccctggtgcctaatgagaagggagtatctgtgaaggaacagaccaggagacaccctgagacagggctcttcacactgcagtcggagctaatggtgaccccagcccggggaggagatccccgtcccaccttctcctgtagcttcagcccaggccttccccgacaccgggccttgcgcacagcccccatccagccccgtgtctgggagcctgtgcctctggaggaggtccaattggtggtggagccagaaggtggagcagtagctcctggtggaaccgtaaccctgacctgtgaagtccctgcccagccctctcctcaaatccactggatgaaggatggtgtgcccttgccccttccccccagccctgtgctgatcctccctgagatagggcctcaggaccagggaacctacagctgtgtggccacccattccagccacgggccccaggaaagccgtgctgtcagcatcagcatcatcgaaccaggcgaggaggggccaactgcaggtgaggggtttgataaagtcagggaagcagaagatagcccccaacacatgtgactggggggatggtcaacaagaaaggaatggaaggccccagaaaaccaggaggaagaggaggagcgtgcagaactgaatcagtcggaggaacctgaggcaggcgagagtagtactggagggccttgaggggcccacagacagatcccatccatcagctcccttttctttttcccttgaactgttctggcctcagaccaactctctcctgtataatctctctcctgtataaccccaccttgccaagctttcttctacaaccagagccccccacaatgatgattaaacacctgacacatcttgc

SEQ ID NO: 105972 - DNA, 1369 bp, Homo sapiens; identical to SEQ ID NO: 105971
  Payload ID: 779
  Gene Symbol: AGER
  Gene Name: advanced glycosylation end product-specific receptor
  ENST ID: ENST00000426320
  CDS Start-End: 25-1068

SEQ ID NO: 105973 - DNA, 1492 bp, Homo sapiens; identical to SEQ ID NO: 105961
  Payload ID: 779
  Gene Symbol: AGER
  Gene Name: advanced glycosylation end product-specific receptor
  Uniprot ID: Q15109
  ENST ID: ENST00000456918
  CDS Start-End: 103-1317

SEQ ID NO: 105974 - DNA, 715 bp, Homo sapiens; identical to SEQ ID NO: 105959
  Payload ID: 779
  Gene Symbol: AGER
  Gene Name: advanced glycosylation end product-specific receptor
  ENST ID: ENST00000441753
  CDS Start-End: 16-715

SEQ ID NO: 105975 - DNA, 715 bp, Homo sapiens; identical to SEQ ID NO: 105959
  Payload ID: 779
  Gene Symbol: AGER
  Gene Name: advanced glycosylation end product-specific receptor
  ENST ID: ENST00000453119
  CDS Start-End: 16-715

SEQ ID NO: 105976 - DNA, 715 bp, Homo sapiens; identical to SEQ ID NO: 105963
  Payload ID: 779
  Gene Symbol: AGER
  Gene Name: advanced glycosylation end product-specific receptor
  ENST ID: ENST00000418313
  CDS Start-End: 16-715

SEQ ID NO: 105977 - DNA, 716 bp, Homo sapiens; identical to SEQ ID NO: 105956
  Payload ID: 779
  Gene Symbol: AGER
  Gene Name: advanced glycosylation end product-specific receptor
  ENST ID: ENST00000416532
  CDS Start-End: 14-716

SEQ ID NO: 105978 - DNA, 1369 bp, Homo sapiens; identical to SEQ ID NO: 105950
  Payload ID: 779
  Gene Symbol: AGER
  Gene Name: advanced glycosylation end product-specific receptor
  Uniprot ID: Q15109
  ENST ID: ENST00000432831
  CDS Start-End: 25-1068

SEQ ID NO: 105979 - DNA, 1492 bp, Homo sapiens
  Payload ID: 779
  Gene Symbol: AGER
  Gene Name: advanced glycosylation end product-specific receptor
  Uniprot ID: Q15109
  ENST ID: ENST00000426138
  CDS Start-End: 103-1317
gactgaaagatgggggctggagagagggtgcaggccccacctagggcggaggccacagcagggagaggggcagacagagccaggaccctggaaggaagcaggatggcagccggaacagcagttggagcctgggtgctggtcctcagtctgtggggggcagtagtaggtgctcaaaacatcacagcccggattggcgagccactggtgctgaagtgtaagggggcccccaagaaaccaccccagcggctggaatggaaactgaacacaggccggacagaagcttggaaggtcctgtctccccagggaggaggcccctgggacagtgtggctcgtgtccttcccaacagctccctcttccttccggctgtcgggatccaggatgaggggattttccggtgccaggcaatgaacaggaatggaaaggagaccaagtccaactaccgagtccgtgtctaccagattcctgggaagccagaaattgtagattctgcctctgaactcacggctggtgttcccaataaggtggggacatgtgtgtcagagggaagctaccctgcagggactcttagctggcacttggatgggaagcccctggtgcctaatgagaagggagtatctgtgaaggaacagaccaggagacaccctgagacagggctcttcacactgcagtcggagctaatggtgaccccagcccggggaggagatccccgtcccaccttctcctgtagcttcagcccaggccttccccgacaccgggccttgcgcacagcccccatccagccccgtgtctgggagcctgtgcctctggaggaggtccaattggtggtggagccagaaggtggagcagtagctcctggtggaaccgtaaccctgacctgtgaagtccctgcccagccctctcctcaaatccactggatgaaggatggtgtgcccttgccccttccccccagccctgtgctgatcctccctgagatagggcctcaggaccagggaacctacagctgtgtggccacccattccagccacgggccccaggaaagccgtgctgtcagcatcagcatcatcgaaccaggcgaggaggggccaactgcaggctctgtgggaggatcagggctgggaactctagccctggccctggggatcctgggaggcctggggacagccgccctgctcattggggtcatcttgtggcaaaggcggcaacgccgaggagaggagaggaaggccccagaaaaccaggaggaagaggaggagcgtgcagaactgaatcagtcggaggaacctgaggcaggcgagagtagtactggagggccttgaggggcccacagacagatcccatccatcagctcccttttctttttcccttgaactgttctggcctcagaccaactctctcctgtataatctctctcctgtataaccccaccttgccaagctttcttctacaaccagagccccccacaatgatgattaaacacctgacacatcttgc

SEQ ID NO: 105980 - DNA, 716 bp, Homo sapiens; identical to SEQ ID NO: 105954
  Payload ID: 779
  Gene Symbol: AGER
  Gene Name: advanced glycosylation end product-specific receptor
  ENST ID: ENST00000454284
  CDS Start-End: 14-716

SEQ ID NO: 105981 - DNA, 1492 bp, Homo sapiens; identical to SEQ ID NO: 105979
  Payload ID: 779
  Gene Symbol: AGER
  Gene Name: advanced glycosylation end product-specific receptor
  Uniprot ID: Q15109
  ENST ID: ENST00000427822
  CDS Start-End: 103-1317

SEQ ID NO: 105982 - DNA, 487 bp, Homo sapiens
  Payload ID: 779
  Gene Symbol: AGER
  Gene Name: advanced glycosylation end product-specific receptor
  ENST ID: ENST00000538695
  CDS Start-End: 101-487
ctgaaagatgggggctggagagagggtgcaggccccacctagggcggaggccacagcagggagaggggcagacagagccaggaccctggaaggaagcaggatggctgccggaacagcagttggagcctgggtgctggtcctcagtctgtggggggcagtagtaggtgctcaaaacatcacagcccggattggcgagccactggtgctgaagtgtaagggggcccccaagaaaccaccccagcggctggaatggaaactgaacacaggccggacagaagcttggaaggtcctgtctccccagggaggaggcccctgggacagtgtggctcgtgtccttcccaacggctccctcttccttccggctgtcgggatccaggatgaggggattttccggtgccaggcaatgaacaggaatggaaaggagaccaagtccaactaccgagtccgtgtctaccagtttgagaaccttcacaattacagcctctga

SEQ ID NO: 105983 - DNA, 665 bp, Homo sapiens
  Payload ID: 779
  Gene Symbol: AGER
  Gene Name: advanced glycosylation end product-specific receptor
  ENST ID: ENST00000552517
  CDS Start-End: 264-665
atggcagccggaacagcagttggagcctgggtgctggtcctcagtctgtggggggcagtagtaggtgctcaaaacatcacagcccaggccttccccgacaccgggccttgcgcacagcccccatccagccccgtgtctgggagcctgtgcctctggaggaggtccaattggtggtggagccagaaggtggagcagtagctcctggtggaaccgtaaccctgacctgtgaagtccctgcccagccctctcctcaaatccactggatgaaggatggtgtgcccttgccccttccccccagccctgtgctgatcctccctgagatagggcctcaggaccagggaacctacagctgtgtggccacccattccagccacgggccccaggaaagccgtgctgtcagcatcagcatcatcgaaccaggcgaggaggggccaactgcaggctctgtgggaggatcagggctgggaactctagccctggccctggggatcctgggaggcctggggacagccgccctgctcattggggtcatcttgtggcaaaggcggcaacgccgaggagaggagaggaaggccccagaaaaccaggaggaagaggaggagcgtgcagaactgaatcagtcggaggaacctgaggcaggcgagagtagtactggagggccttga

SEQ ID NO: 105984 - DNA, 665 bp, Homo sapiens; identical to SEQ ID NO: 105983
  Payload ID: 779
  Gene Symbol: AGER
  Gene Name: advanced glycosylation end product-specific receptor
  ENST ID: ENST00000550441
  CDS Start-End: 264-665

SEQ ID NO: 105985 - DNA, 487 bp, Homo sapiens
  Payload ID: 779
  Gene Symbol: AGER
  Gene Name: advanced glycosylation end product-specific receptor
  ENST ID: ENST00000553014
  CDS Start-End: 101-487
ctgaaagatgggggctggagagagggtgcaggccccacctagggcggaggccacagcagggagaggggcagacagagccaggaccctggaaggaagcaggatggcagccggaacagcagttggagcctgggtgctggtcctcagtctgtggggggcagtagtaggtgctcaaaacatcacagcccggattggcgagccactggtgctgaagtgtaagggggcccccaagaaaccaccccagcggctggaatggaaactgaacacaggccggacagaagcttggaaggtcctgtctccccagggaggaggcccctgggacagtgtggctcgtgtccttcccaacggctccctcttccttccggctgtcgggatccaggatgaggggattttccggtgccaggcaatgaacaggaatggaaaggagaccaagtccaactaccgagtccgtgtctaccagtttgagaaccttcacaattacagcctctga

SEQ ID NO: 105986 - DNA, 1493 bp, Homo sapiens
  Payload ID: 779
  Gene Symbol: AGER
  Gene Name: advanced glycosylation end product-specific receptor
  ENST ID: ENST00000552891
  CDS Start-End: 101-1192
ctgaaagatgggggctggagagagggtgcaggccccacctagggcggaggccacagcagggagaggggcagacagagccaggaccctggaaggaagcaggatggcagccggaacagcagttggagcctgggtgctggtcctcagtctgtggggggcagtagtaggtgctcaaaacatcacagcccggattggcgagccactggtgctgaagtgtaagggggcccccaagaaaccaccccagcggctggaatggaaactgaacacaggccggacagaagcttggaaggtcctgtctccccagggaggaggcccctgggacagtgtggctcgtgtccttcccaacagctccctcttccttccggctgtcgggatccaggatgaggggattttccggtgccaggcaatgaacaggaatggaaaggagaccaagtccaactaccgagtccgtgtctaccagattcctgggaagccagaaattgtagattctgcctctgaactcacggctggtgttcccaataaggtagtggaagaaagcaggagaagtagaaaacggccctgtgaacaggaggtggggacatgtgtgtcagagggaagctaccctgcagggactcttagctggcacttggatgggaagcccctggtgcctaatgagaagggagtatctgtgaaggaacagaccaggagacaccctgagacagggctcttcacactgcagtcggagctaatggtgaccccagcccggggaggagatccccgtcccaccttctcctgtagcttcagcccaggccttccccgacaccgggccttgcgcacagcccccatccagccccgtgtctgggagcctgtgcctctggaggaggtccaattggtggtggagccagaaggtggagcagtagctcctggtggaaccgtaaccctgacctgtgaagtccctgcccagccctctcctcaaatccactggatgaaggatggtgtgcccttgccccttccccccagccctgtgctgatcctccctgagatagggcctcaggaccagggaacctacagctgtgtggccacccattccagccacgggccccaggaaagccgtgctgtcagcatcagcatcatcgaaccaggcgaggaggggccaactgcaggtgaggggtttgataaagtcagggaagcagaagatagcccccaacacatgtgactggggggatggtcaacaagaaaggaatggaaggccccagaaaaccaggaggaagaggaggagcgtgcagaactgaatcagtcggaggaacctgaggcaggcgagagtagtactggagggccttgaggggcccacagacagatcccatccatcagctcccttttctttttcccttgaactgttctggcctcagaccaactctctcctgtataatctctctcctgtataaccccaccttgccaagctttcttctacaaccagagccccccacaatgatgattaaacacctgacacatcttgc

SEQ ID NO: 105987 - DNA, 1538 bp, Homo sapiens
  Payload ID: 779
  Gene Symbol: AGER
  Gene Name: advanced glycosylation end product-specific receptor
  ENST ID: ENST00000551244
  CDS Start-End: 101-1363
ctgaaagatgggggctggagagagggtgcaggccccacctagggcggaggccacagcagggagaggggcagacagagccaggaccctggaaggaagcaggatggcagccggaacagcagttggagcctgggtgctggtcctcagtctgtggggggcagtagtaggtgctcaaaacatcacagcccggattggcgagccactggtgctgaagtgtaagggggcccccaagaaaccaccccagcggctggaatggaaactgaacacaggccggacagaagcttggaaggtcctgtctccccagggaggaggcccctgggacagtgtggctcgtgtccttcccaacagctccctcttccttccggctgtcgggatccaggatgaggggattttccggtgccaggcaatgaacaggaatggaaaggagaccaagtccaactaccgagtccgtgtctaccagattcctgggaagccagaaattgtagattctgcctctgaactcacggctggtgttcccaataaggtagtggaagaaagcaggagaagtagaaaacggccctgtgaacaggaggtggggacatgtgtgtcagagggaagctaccctgcagggactcttagctggcacttggatgggaagcccctggtgcctaatgagaagggagtatctgtgaaggaacagaccaggagacaccctgagacagggctcttcacactgcagtcggagctaatggtgaccccagcccggggaggagatccccgtcccaccttctcctgtagcttcagcccaggccttccccgacaccgggccttgcgcacagcccccatccagccccgtgtctgggagcctgtgcctctggaggaggtccaattggtggtggagccagaaggtggagcagtagctcctggtggaaccgtaaccctgacctgtgaagtccctgcccagccctctcctcaaatccactggatgaaggatggtgtgcccttgccccttccccccagccctgtgctgatcctccctgagatagggcctcaggaccagggaacctacagctgtgtggccacccattccagccacgggccccaggaaagccgtgctgtcagcatcagcatcatcgaaccaggcgaggaggggccaactgcaggctctgtgggaggatcagggctgggaactctagccctggccctggggatcctgggaggcctggggacagccgccctgctcattggggtcatcttgtggcaaaggcggcaacgccgaggagaggagaggaaggccccagaaaaccaggaggaagaggaggagcgtgcagaactgaatcagtcggaggaacctgaggcaggcgagagtagtactggagggccttgaggggcccacagacagatcccatccatcagctcccttttctttttcccttgaactgttctggcctcagaccaactctctcctgtataatctctctcctgtataaccccaccttgccaagctttcttctacaaccagagccccccacaatgatgattaaacacctgacacatcttgc

SEQ ID NO: 105988 - DNA, 665 bp, Homo sapiens; identical to SEQ ID NO: 105983
  Payload ID: 779
  Gene Symbol: AGER
  Gene Name: advanced glycosylation end product-specific receptor
  ENST ID: ENST00000547213
  CDS Start-End: 264-665

SEQ ID NO: 105989 - DNA, 1493 bp, Homo sapiens
  Payload ID: 779
  Gene Symbol: AGER
  Gene Name: advanced glycosylation end product-specific receptor
  Uniprot ID: Q15109
  ENST ID: ENST00000550562
  CDS Start-End: 101-1192
ctgaaagatgggggctggagagagggtgcaggccccacctagggcggaggccacagcagggagaggggcagacagagccaggaccctggaaggaagcaggatggcagccggaacagcagttggagcctgggtgctggtcctcagtctgtggggggcagtagtaggtgctcaaaacatcacagcccggattggcgagccactggtgctgaagtgtaagggggcccccaagaaaccaccccagcggctggaatggaaactgaacacaggccggacagaagcttggaaggtcctgtctccccagggaggaggcccctgggacagtgtggctcgtgtccttcccaacggctccctcttccttccggctgtcgggatccaggatgaggggattttccggtgccaggcaatgaacaggaatggaaaggagaccaagtccaactaccgagtccgtgtctaccagattcctgggaagccagaaattgtagattctgcctctgaactcacggctggtgttcccaataaggtagtggaagaaagcaggagaagtagaaaacggccctgtgaacaggaggtggggacatgtgtgtcagagggaagctaccctgcagggactcttagctggcacttggatgggaagcccctggtgcctaatgagaagggagtatctgtgaaggaacagaccaggagacaccctgagacagggctcttcacactgcagtcggagctaatggtgaccccagcccggggaggagatccccgtcccaccttctcctgtagcttcagcccaggccttccccgacaccgggccttgcgcacagcccccatccagccccgtgtctgggagcctgtgcctctggaggaggtccaattggtggtggagccagaaggtggagcagtagctcctggtggaaccgtaaccctgacctgtgaagtccctgcccagccctctcctcaaatccactggatgaaggatggtgtgcccttgccccttccccccagccctgtgctgatcctccctgagatagggcctcaggaccagggaacctacagctgtgtggccacccattccagccacgggccccaggaaagccgtgctgtcagcatcagcatcatcgaaccaggcgaggaggggccaactgcaggtgaggggtttgataaagtcagggaagcagaagatagcccccaacacatgtgactggggggatggtcaacaagaaaggaatggaaggccccagaaaaccaggaggaagaggaggagcgtgcagaactgaatcagtcggaggaacctgaggcaggcgagagtagtactggagggccttgaggggcccacagacagatcccatccatcagctcccttttctttttcccttgaactgttctggcctcagaccaactctctcctgtataatctctctcctgtataaccccaccttgccaagctttcttctacaaccagagccccccacaatgatgattaaacacctgacacatcttgc

SEQ ID NO: 105990 - DNA, 487 bp, Homo sapiens; identical to SEQ ID NO: 105985
  Payload ID: 779
  Gene Symbol: AGER
  Gene Name: advanced glycosylation end product-specific receptor
  ENST ID: ENST00000548959
  CDS Start-End: 101-487

SEQ ID NO: 105991 - DNA, 1538 bp, Homo sapiens
  Payload ID: 779
  Gene Symbol: AGER
  Gene Name: advanced glycosylation end product-specific receptor
  Uniprot ID: Q15109
  ENST ID: ENST00000549758
  CDS Start-End: 101-1363
ctgaaagatgggggctggagagagggtgcaggccccacctagggcggaggccacagcagggagaggggcagacagagccaggaccctggaaggaagcaggatggcagccggaacagcagttggagcctgggtgctggtcctcagtctgtggggggcagtagtaggtgctcaaaacatcacagcccggattggcgagccactggtgctgaagtgtaagggggcccccaagaaaccaccccagcggctggaatggaaactgaacacaggccggacagaagcttggaaggtcctgtctccccagggaggaggcccctgggacagtgtggctcgtgtccttcccaacggctccctcttccttccggctgtcgggatccaggatgaggggattttccggtgccaggcaatgaacaggaatggaaaggagaccaagtccaactaccgagtccgtgtctaccagattcctgggaagccagaaattgtagattctgcctctgaactcacggctggtgttcccaataaggtagtggaagaaagcaggagaagtagaaaacggccctgtgaacaggaggtggggacatgtgtgtcagagggaagctaccctgcagggactcttagctggcacttggatgggaagcccctggtgcctaatgagaagggagtatctgtgaaggaacagaccaggagacaccctgagacagggctcttcacactgcagtcggagctaatggtgaccccagcccggggaggagatccccgtcccaccttctcctgtagcttcagcccaggccttccccgacaccgggccttgcgcacagcccccatccagccccgtgtctgggagcctgtgcctctggaggaggtccaattggtggtggagccagaaggtggagcagtagctcctggtggaaccgtaaccctgacctgtgaagtccctgcccagccctctcctcaaatccactggatgaaggatggtgtgcccttgccccttccccccagccctgtgctgatcctccctgagatagggcctcaggaccagggaacctacagctgtgtggccacccattccagccacgggccccaggaaagccgtgctgtcagcatcagcatcatcgaaccaggcgaggaggggccaactgcaggctctgtgggaggatcagggctgggaactctagccctggccctggggatcctgggaggcctggggacagccgccctgctcattggggtcatcttgtggcaaaggcggcaacgccgaggagaggagaggaaggccccagaaaaccaggaggaagaggaggagcgtgcagaactgaatcagtcggaggaacctgaggcaggcgagagtagtactggagggccttgaggggcccacagacagatcccatccatcagctcccttttctttttcccttgaactgttctggcctcagaccaactctctcctgtataatctctctcctgtataaccccaccttgccaagctttcttctacaaccagagccccccacaatgatgattaaacacctgacacatcttgc

SEQ ID NO: 105992 - DNA, 1463 bp, Homo sapiens
  Payload ID: 779
  Gene Symbol: AGER
  Gene Name: advanced glycosylation end product-specific receptor
  ENST ID: ENST00000552621
  CDS Start-End: 404-1288
ctgaaagatgggggctggagagagggtgcaggccccacctagggcggaggccacagcagggagaggggcagacagagccaggaccctggaaggaagcaggatggcagccggaacagcagttggagcctgggtgctggtcctcagtctgtggggggcagtagtaggtgctcaaaacatcacagcccggattggcgagccactggtgctgaagtgtaagggggcccccaagaaaccaccccagcggctggaatggaaactgaacacaggccggacagaagcttggaaggtcctgtctccccagggaggaggcccctgggacagtgtggctcgtgtccttcccaacggctccctcttccttccggctgtcgggatccaggatgaggggattttccggtgccaggcaatgaacaggaatggaaaggagaccaagtccaactaccgagtccgtgtctaccagattcctgggaagccagaaattgtagattctgcctctgaactcacggctggtgttcccaataaggtggggacatgtgtgtcagagggaagctaccctgcagggactcttagctggcacttggatgggaagcccctggtgcctaatgagaagggagtatctgtgaaggaacagaccaggagacaccctgagacagggctcttcacactgcagtcggagctaatggtgaccccagcccggggaggagatccccgtcccaccttctcctgtagcttcagcccaggccttccccgacaccgggccttgcgcacagcccccatccagccccgtgtctgggagcctgtgcctctggaggaggtccaattggtggtggagccagaaggtggagcagtagctcctggtggaaccgtaaccctgacctgtgaagtccctgcccagccctctcctcaaatccactggatgaaggatggtgtgcccttgccccttccccccagccctgtgctgatcctccctgagatagggcctcaggaccagggaacctacagctgtgtggccacccattccagccacgggccccaggaaagccgtgctgtcagcatcagcatcatcggctctgtgggaggatcagggctgggaactctagccctggccctggggatcctgggaggcctggggacagccgccctgctcattggggtcatcttgtggcaaaggcggcaacgccgaggagaggagaggaaggccccagaaaaccaggaggaagaggaggagcgtgcagaactgaatcagtcggaggaacctgaggcaggcgagagtagtactggagggccttgaggggcccacagacagatcccatccatcagctcccttttctttttcccttgaactgttctggcctcagaccaactctctcctgtataatctctctcctgtataaccccaccttgccaagctttcttctacaaccagagccccccacaatgatgattaaacacctgacacatcttgc

SEQ ID NO: 105993 - DNA, 487 bp, Homo sapiens; identical to SEQ ID NO: 105985
  Payload ID: 779
  Gene Symbol: AGER
  Gene Name: advanced glycosylation end product-specific receptor
  ENST ID: ENST00000551684
  CDS Start-End: 101-487

SEQ ID NO: 105994 - DNA, 737 bp, Homo sapiens
  Payload ID: 779
  Gene Symbol: AGER
  Gene Name: advanced glycosylation end product-specific receptor
  ENST ID: ENST00000552209
  CDS Start-End: 101-562
ctgaaagatgggggctggagagagggtgcaggccccacctagggcggaggccacagcagggagaggggcagacagagccaggaccctggaaggaagcaggatggcagccggaacagcagttggagcctgggtgctggtcctcagtctgtggggggcagtagtaggtgctcaaaacatcacagcccggattggcgagccactggtgctgaagtgtaagggggcccccaagaaaccaccccagcggctggaatggaaactgaacacaggccggacagaagcttggaaggtcctgtctccccagggaggaggcccctgggacagtgtggctcgtgtccttcccaacagctccctcttccttccggctgtcgggatccaggatgaggggatcctgggaggcctggggacagccgccctgctcattggggtcatcttgtggcaaaggcggcaacgccgaggagaggagaggaaggccccagaaaaccaggaggaagaggaggagcgtgcagaactgaatcagtcggaggaacctgaggcaggcgagagtagtactggagggccttgaggggcccacagacagatcccatccatcagctcccttttctttttcccttgaactgttctggcctcagaccaactctctcctgtataatctctctcctgtataaccccaccttgccaagctttcttctacaaccagagccccccacaatgatgattaaacacctgacacatcttgc

SEQ ID NO: 105995 - DNA, 665 bp, Homo sapiens; identical to SEQ ID NO: 105983
  Payload ID: 779
  Gene Symbol: AGER
  Gene Name: advanced glycosylation end product-specific receptor
  ENST ID: ENST00000547770
  CDS Start-End: 264-665

SEQ ID NO: 105996 - DNA, 1463 bp, Homo sapiens; identical to SEQ ID NO: 105992
  Payload ID: 779
  Gene Symbol: AGER
  Gene Name: advanced glycosylation end product-specific receptor
  ENST ID: ENST00000547155
  CDS Start-End: 404-1288

SEQ ID NO: 105997 - DNA, 737 bp, Homo sapiens; identical to SEQ ID NO: 105994
  Payload ID: 779
  Gene Symbol: AGER
  Gene Name: advanced glycosylation end product-specific receptor
  ENST ID: ENST00000549839
  CDS Start-End: 101-562

SEQ ID NO: 105998 - DNA, 487 bp, Homo sapiens
  Payload ID: 779
  Gene Symbol: AGER
  Gene Name: advanced glycosylation end product-specific receptor
  ENST ID: ENST00000548935
  CDS Start-End: 101-487
ctgaaagatgggggctggagagagggtgcaggccccacctagggcggaggccacagcagggagaggggcagacagagccaggaccctggaaggaagcaggatggcagccggaacagcagttggagcctgggtgctggtcctcagtctgtggggggcagtagtaggtgctcaaaacatcacagcccggattggcgagccactggtgctgaagtgtaagggggcccccaagaaaccaccccagcggctggaatggaaactgaacacaggccggacagaagcttggaaggtcctgtctccccagggaggaggcccctgggacagtgtggctcgtgtccttcccaacagctccctcttccttccggctgtcgggatccaggatgaggggattttccggtgccaggcaatgaacaggaatggaaaggagaccaagtccaactaccgagtccgtgtctaccagtttgagaaccttcacaattacagcctctga

SEQ ID NO: 105999 - DNA, 1538 bp, Homo sapiens; identical to SEQ ID NO: 105991
  Payload ID: 779
  Gene Symbol: AGER
  Gene Name: advanced glycosylation end product-specific receptor
  Uniprot ID: Q15109
  ENST ID: ENST00000547328
  CDS Start-End: 101-1363

SEQ ID NO: 106000 - DNA, 1538 bp, Homo sapiens; identical to SEQ ID NO: 105991
  Payload ID: 779
  Gene Symbol: AGER
  Gene Name: advanced glycosylation end product-specific receptor
  Uniprot ID: Q15109
  ENST ID: ENST00000551381
  CDS Start-End: 101-1363

SEQ ID NO: 106001 - DNA, 737 bp, Homo sapiens
  Payload ID: 779
  Gene Symbol: AGER
  Gene Name: advanced glycosylation end product-specific receptor
  ENST ID: ENST00000548034
  CDS Start-End: 101-562
ctgaaagatgggggctggagagagggtgcaggccccacctagggcggaggccacagcagggagaggggcagacagagccaggaccctggaaggaagcaggatggcagccggaacagcagttggagcctgggtgctggtcctcagtctgtggggggcagtagtaggtgctcaaaacatcacagcccggattggcgagccactggtgctgaagtgtaagggggcccccaagaaaccaccccagcggctggaatggaaactgaacacaggccggacagaagcttggaaggtcctgtctccccagggaggaggcccctgggacagtgtggctcgtgtccttcccaacggctccctcttccttccggctgtcgggatccaggatgaggggatcctgggaggcctggggacagccgccctgctcattggggtcatcttgtggcaaaggcggcaacgccgaggagaggagaggaaggccccagaaaaccaggaggaagaggaggagcgtgcagaactgaatcagtcggaggaacctgaggcaggcgagagtagtactggagggccttgaggggcccacagacagatcccatccatcagctcccttttctttttcccttgaactgttctggcctcagaccaactctctcctgtataatctctctcctgtataaccccaccttgccaagctttcttctacaaccagagccccccacaatgatgattaaacacctgacacatcttgc

SEQ ID NO: 106002 - DNA, 1493 bp, Homo sapiens; identical to SEQ ID NO: 105986
  Payload ID: 779
  Gene Symbol: AGER
  Gene Name: advanced glycosylation end product-specific receptor
  ENST ID: ENST00000551378
  CDS Start-End: 101-1192

SEQ ID NO: 106003 - DNA, 1493 bp, Homo sapiens; identical to SEQ ID NO: 105989
  Payload ID: 779
  Gene Symbol: AGER
  Gene Name: advanced glycosylation end product-specific receptor
  Uniprot ID: Q15109
  ENST ID: ENST00000551827
  CDS Start-End: 101-1192

SEQ ID NO: 106004 - DNA, 1463 bp, Homo sapiens
  Payload ID: 779
  Gene Symbol: AGER
  Gene Name: advanced glycosylation end product-specific receptor
  ENST ID: ENST00000550885
  CDS Start-End: 404-1288
ctgaaagatgggggctggagagagggtgcaggccccacctagggcggaggccacagcagggagaggggcagacagagccaggaccctggaaggaagcaggatggcagccggaacagcagttggagcctgggtgctggtcctcagtctgtggggggcagtagtaggtgctcaaaacatcacagcccggattggcgagccactggtgctgaagtgtaagggggcccccaagaaaccaccccagcggctggaatggaaactgaacacaggccggacagaagcttggaaggtcctgtctccccagggaggaggcccctgggacagtgtggctcgtgtccttcccaacagctccctcttccttccggctgtcgggatccaggatgaggggattttccggtgccaggcaatgaacaggaatggaaaggagaccaagtccaactaccgagtccgtgtctaccagattcctgggaagccagaaattgtagattctgcctctgaactcacggctggtgttcccaataaggtggggacatgtgtgtcagagggaagctaccctgcagggactcttagctggcacttggatgggaagcccctggtgcctaatgagaagggagtatctgtgaaggaacagaccaggagacaccctgagacagggctcttcacactgcagtcggagctaatggtgaccccagcccggggaggagatccccgtcccaccttctcctgtagcttcagcccaggccttccccgacaccgggccttgcgcacagcccccatccagccccgtgtctgggagcctgtgcctctggaggaggtccaattggtggtggagccagaaggtggagcagtagctcctggtggaaccgtaaccctgacctgtgaagtccctgcccagccctctcctcaaatccactggatgaaggatggtgtgcccttgccccttccccccagccctgtgctgatcctccctgagatagggcctcaggaccagggaacctacagctgtgtggccacccattccagccacgggccccaggaaagccgtgctgtcagcatcagcatcatcggctctgtgggaggatcagggctgggaactctagccctggccctggggatcctgggaggcctggggacagccgccctgctcattggggtcatcttgtggcaaaggcggcaacgccgaggagaggagaggaaggccccagaaaaccaggaggaagaggaggagcgtgcagaactgaatcagtcggaggaacctgaggcaggcgagagtagtactggagggccttgaggggcccacagacagatcccatccatcagctcccttttctttttcccttgaactgttctggcctcagaccaactctctcctgtataatctctctcctgtataaccccaccttgccaagctttcttctacaaccagagccccccacaatgatgattaaacacctgacacatcttgc

SEQ ID NO: 106005 - DNA, 1463 bp, Homo sapiens; identical to SEQ ID NO: 105992
  Payload ID: 779
  Gene Symbol: AGER
  Gene Name: advanced glycosylation end product-specific receptor
  ENST ID: ENST00000550196
  CDS Start-End: 404-1288

SEQ ID NO: 106006 - DNA, 737 bp, Homo sapiens; identical to SEQ ID NO: 106001
  Payload ID: 779
  Gene Symbol: AGER
  Gene Name: advanced glycosylation end product-specific receptor
  ENST ID: ENST00000552991
  CDS Start-End: 101-562

SEQ ID NO: 106007 - DNA, 1493 bp, Homo sapiens; identical to SEQ ID NO: 105989
  Payload ID: 779
  Gene Symbol: AGER
  Gene Name: advanced glycosylation end product-specific receptor
  Uniprot ID: Q15109
  ENST ID: ENST00000551254
  CDS Start-End: 101-1192

SEQ ID NO: 106008 - DNA, 1463 bp, Homo sapiens; identical to SEQ ID NO: 105992
  Payload ID: 779
  Gene Symbol: AGER
  Gene Name: advanced glycosylation end product-specific receptor
  ENST ID: ENST00000549168
  CDS Start-End: 404-1288

SEQ ID NO: 106009 - DNA, 665 bp, Homo sapiens; identical to SEQ ID NO: 105983
  Payload ID: 779
  Gene Symbol: AGER
  Gene Name: advanced glycosylation end product-specific receptor
  ENST ID: ENST00000549776
  CDS Start-End: 264-665

SEQ ID NO: 106010 - DNA, 665 bp, Homo sapiens; identical to SEQ ID NO: 105983
  Payload ID: 779
  Gene Symbol: AGER
  Gene Name: advanced glycosylation end product-specific receptor
  ENST ID: ENST00000551677
  CDS Start-End: 264-665

SEQ ID NO: 106011 - DNA, 1493 bp, Homo sapiens; identical to SEQ ID NO: 105989
  Payload ID: 779
  Gene Symbol: AGER
  Gene Name: advanced glycosylation end product-specific receptor
  Uniprot ID: Q15109
  ENST ID: ENST00000547651
  CDS Start-End: 101-1192

SEQ ID NO: 106012 - DNA, 1538 bp, Homo sapiens; identical to SEQ ID NO: 105987
  Payload ID: 779
  Gene Symbol: AGER
  Gene Name: advanced glycosylation end product-specific receptor
  ENST ID: ENST00000549227
  CDS Start-End: 101-1363

SEQ ID NO: 106013 - DNA, 1463 bp, Homo sapiens; identical to SEQ ID NO: 106004
  Payload ID: 779
  Gene Symbol: AGER
  Gene Name: advanced glycosylation end product-specific receptor
  ENST ID: ENST00000546535
  CDS Start-End: 404-1288

SEQ ID NO: 106014 - DNA, 737 bp, Homo sapiens; identical to SEQ ID NO: 106001
  Payload ID: 779
  Gene Symbol: AGER
  Gene Name: advanced glycosylation end product-specific receptor
  ENST ID: ENST00000549626
  CDS Start-End: 101-562

SEQ ID NO: 106015 - DNA, 737 bp, Homo sapiens; identical to SEQ ID NO: 106001
  Payload ID: 779
  Gene Symbol: AGER
  Gene Name: advanced glycosylation end product-specific receptor
  ENST ID: ENST00000550959
  CDS Start-End: 101-562

SEQ ID NO: 106016 - DNA, 487 bp, Homo sapiens; identical to SEQ ID NO: 105998
  Payload ID: 779
  Gene Symbol: AGER
  Gene Name: advanced glycosylation end product-specific receptor
  ENST ID: ENST00000548009
  CDS Start-End: 101-487

SEQ ID NO: 106017 - DNA, 1538 bp, Homo sapiens; identical to SEQ ID NO: 105991
  Payload ID: 779
  Gene Symbol: AGER
  Gene Name: advanced glycosylation end product-specific receptor
  Uniprot ID: Q15109
  ENST ID: ENST00000548464
  CDS Start-End: 101-1363

SEQ ID NO: 106018 - DNA, 487 bp, Homo sapiens; identical to SEQ ID NO: 105985
  Payload ID: 779
  Gene Symbol: AGER
  Gene Name: advanced glycosylation end product-specific receptor
  ENST ID: ENST00000550854
  CDS Start-End: 101-487

SEQ ID NO: 106019 - DNA, 737 bp, Homo sapiens
  Payload ID: 779
  Gene Symbol: AGER
  Gene Name: advanced glycosylation end product-specific receptor
  ENST ID: ENST00000620802
  CDS Start-End: 101-562
ctgaaagatgggggctggagagagggtgcaggccccacctagggcggaggccacagcagggagaggggcagacagagccaggaccctggaaggaagcaggatggctgccggaacagcagttggagcctgggtgctggtcctcagtctgtggggggcagtagtaggtgctcaaaacatcacagcccggattggcgagccactggtgctgaagtgtaagggggcccccaagaaaccaccccagcggctggaatggaaactgaacacaggccggacagaagcttggaaggtcctgtctccccagggaggaggcccctgggacagtgtggctcgtgtccttcccaacggctccctcttccttccggctgtcgggatccaggatgaggggatcctgggaggcctggggacagccgccctgctcattggggtcatcttgtggcaaaggcggcaacgccgaggagaggagaggaaggccccagaaaaccaggaggaagaggaggagcgtgcagaactgaatcagtcggaggaacctgaggcaggcgagagtagtactggagggccttgaggggcccacagacagatcccatccatcagctcccttttctttttcccttgaactgttctggcctcagaccaactctctcctgtataatctctctcctgtataaccccaccttgccaagctttcttctacaaccagagccccccacaatgatgattaaacacctgacacatcttgc

SEQ ID NO: 106020 - DNA, 2891 bp, Homo sapiens
  Payload ID: 780
  Gene Symbol: AVIL
  Gene Name: advillin
  Uniprot ID: O75366
  ENST ID: ENST00000257861
  CDS Start-End: 432-2891
agagtgtgatcttgtacaagttattcagcctttgcaaacctcagattcacacaatgtaagatgaagaaactcaccttctgaaaattagagataacatatgcaaagtgaatcaatacagggcttaacatatttatcacccctttggtaaataaccatgacgattaccagagctcttaagggcaatggcaggtgggaagcagaactcatgggtggtaatccccaggccagccaggctcaccatgtgcacttggacaagtccttgcccccatcattgtgaaatggtgcagggatgcaccatgagggtgtggcaggatggctgacaacagactgggaagcagctcggcagaaaaactggattgatgcccactatggcaagagatatcatctcccctcttgttctgtgatgtttcagtcctggaaagacaagcatcatgcctctgaccagtgccttcagggctgtggacaacgaccctgggatcattgtctggagaatagagaaaatggagctggcgctggtgcctgtgagcgcccacggcaacttctatgagggggactgctacgtcatcctctcgacccggagagtggccagtctcctatcccaggacatccacttctggatcgggaaggactcctcccaggatgagcaaagctgcgcagccatatataccacacagctggacgactacctgggaggcagccctgtgcagcaccgagaggtccagtaccatgagtcagacactttccgtggctacttcaagcagggcatcatctacaagcaggggggtgtcgcctctgggatgaagcacgtggagaccaatacctacgacgtgaagcggctgctacatgtgaaagggaaaagaaacatcagggctaccgaggtggaaatgagctgggacagtttcaaccgaggtgatgtcttcttgctggaccttgggaaagtcatcatccaatggaatggcccagagagcaacagtggggagcgcctgaaggctatgcttctggcaaaggatattcgagacagggagcgagggggccgtgctaaaataggagtgatcgagggagacaaggaggcagccagcccagagctgatgaaggtccttcaggacacccttggccgacgctccattatcaagcctacagtccctgatgagatcatagatcagaagcagaaatcaactatcatgttgtatcatatctcagattcagctgggcagctggcagtcacagaggtagcaacaaggcctctggtccaggacttactgaaccatgatgactgctacatcctggaccaaagtggaaccaaaatctacgtgtggaaaggaaaaggagccacaaaggctgaaaaacaggcagccatgtctaaagcgctgggcttcatcaagatgaagagctaccccagcagcaccaatgtggagaccgtcaacgatggtgctgagtcggccatgttcaagcagctgttccagaagtggtcagtaaaggaccagaccatgggcctggggaaaacgttcagcattggtaaaattgctaaagttttccaggataaatttgatgtgactctgctacacaccaagccagaggtagctgcccaggaaagaatggtcgatgatggcaacggaaaagttgaggtctggagaattgagaacctggagctggtccctgtggagtatcaatggtatggcttcttttatgggggagactgttatctggtcctctacacatacgaggtaaatgggaagccacatcacatcttgtacatctggcagggccgccacgcctcacaggatgagctggcagcctcagcataccaggcagtggaggtggatcggcagtttgatggggctgctgtgcaggttcgagtcaggatgggaacggagccacgccacttcatggccatcttcaaagggaagctagttatctttgagggtgggacttccaggaagggaaatgccgagcctgaccctccagtaagactcttccaaattcatggaaatgacaaatctaacaccaaagcagtggaagttccagcctttgcctcctccctaaactccaatgatgtctttctgctgcgaactcaggcagagcactacctgtggtatggcaaggggtctagtggggatgagcgggcaatggctaaggagctggccagccttctctgtgatggcagcgagaacactgtggccgagggccaggagccagccgagttctgggacctactgggagggaaaactccctatgccaatgataaaagacttcagcaggaaatcctagatgtccagtctcgtctctttgaatgttccaataagaccggccaattcgttgtcactgagatcacagacttcacccaggatgacctgaaccctactgacgtgatgctcctagatacctgggaccaggtgttcttgtggattggggctgaggccaatgccacggagaaggagagtgcccttgccacagcacagcagtacctgcacactcaccccagcggccgagatcccgacacaccaatcctgatcattaagcaggggtttgagcctcccatcttcacaggctggttcctagcctgggaccctaacatttggagtgcaggaaaaacatatgaacaattaaaagaagagctgggagatgctgctgctatcatgcgaatcactgctgacatgaagaatgcaaccctctccctgaattctaatgacagtgagccaaaatattaccctatagcagttctgttgaaaaaccagaatcaggagctgcctgaggatgtaaaccctgccaaaaaggagaattacctctctgaacaggactttgtgtctgtgtttggcatcacaagagggcaatttgcagctctgcctggctggaaacagctccaaatgaagaaagaaaaggggcttttctaa

SEQ ID NO: 106021 - DNA, 568 bp, Homo sapiens
  Payload ID: 780
  Gene Symbol: AVIL
  Gene Name: advillin
  ENST ID: ENST00000549994
  CDS Start-End: 96-568
gctttggagtggttcttcaatactgctgctgcttacgcgccgggaaactgggaaggctggtgagcgagaaggcaagtcctggaaagacaagcatcatgcctctgaccagtgccttcagggctgtggacaacgaccctgggatcattgtctggagaatagagaaaatggagctggcgctggtgcctgtgagcgcccacggcaacttctatgagggggactgctacgtcatcctctcgacccggagagtggccagtctcctatcccaggacatccacttctggatcgggaaggactcctcccaggatgagcaaagctgcgcagccatatataccacacagctggacgactacctgggaggcagccctgtgcagcaccgagaggtccagtaccatgagtcagacactttccgtggctacttcaagcagggcatcatctacaagcaggggggtgtcgcctctgggatgaagcacgtggagaccaatacctacgacgtgaagcggctgctacatgtgaaagggaaaagaaacatcagggctaccgaggtggaaatgagctgggacagtttcaa

SEQ ID NO: 106022 - DNA, 2735 bp, Homo sapiens
  Payload ID: 780
  Gene Symbol: AVIL
  Gene Name: advillin
  ENST ID: ENST00000549851
  CDS Start-End: 19-249
cctggaaagacaagcatcatgcctctgaccagtgccttcagggctgtggacaacgaccctgggatcattgtctggagaatagaggaaacaccctggaaagacaggtgggacctactcagcagactcctggcagcttccatcagagaaatggaacatgtcttccacggggcaccctggctcctacaaaatatggggagagaaaatggagctggcgctggtgcctgtgagcgcccacggcaacttctatgagggggactgctacgtcatcctctcgacccggagagtggccagtctcctatcccaggacatccacttctggatcgggaaggactcctcccaggatgagcaaagctgcgcagccatatataccacacagctggacgactacctgggaggcagccctgtgcagcaccgagaggtccagtaccatgagtcagacactttccgtggctacttcaagcagggcatcatctacaagcaggggggtgtcgcctctgggatgaagcacgtggagaccaatacctacgacgtgaagcggctgctacatgtgaaagggaaaagaaacatcagggctaccgaggtggaaatgagctgggacagtttcaaccgaggtgatgtcttcttgctggaccttgggaaagtcatcatccaatggaatggcccagagagcaacagtggggagcgcctgaaggctatgcttctggcaaaggatattcgagacagggagcgagggggccgtgctaaaataggagtgatcgagggagacaaggaggcagccagcccagagctgatgaaggtccttcaggacacccttggccgacgctccattatcaagcctacagtccctgatgagatcatagatcagaagcagaaatcaactatcatgttgtatcatatctcagattcagctgggcagctggcagtcacagaggtagcaacaaggcctctggtccaggacttactgaaccatgatgactgctacatcctggaccaaagtggaaccaaaatctacgtgtggaaaggaaaaggagccacaaaggctgaaaaacaggcagccatgtctaaagcgctgggcttcatcaagatgaagagctaccccagcagcaccaatgtggagaccgtcaacgatggtgctgagtcggccatgttcaagcagctgttccagaagtggtcagtaaaggaccagaccatgggcctggggaaaacgttcagcattggtaaaattgctaaagttttccaggataaatttgatgtgactctgctacacaccaagccagaggtagctgcccaggaaagaatggtcgatgatggcaacggaaaagttgaggtctggagaattgagaacctggagctggtccctgtggagtatcaatggtatggcttcttttatgggggagactgttatctggtcctctacacatacgaggtaaatgggaagccacatcacatcttgtacatctggcagggccgccacgcctcacaggatgagctggcagcctcagcataccaggcagtggaggtggatcggcagtttgatggggctgctgtgcaggttcgagtcaggatgggaacggagccacgccacttcatggccatcttcaaagggaagctagttatctttgagggtgggacttccaggaagggaaatgccgagcctgaccctccagtaagactcttccaaattcatggaaatgacaaatctaacaccaaagcagtggaagttccagcctttgcctcctccctaaactccaatgatgtctttctgctgcgaactcaggcagagcactacctgtggtatggcaaggggtctagtggggatgagcgggcaatggctaaggagctggccagccttctctgtgatggcagcgagaacactgtggccgagggccaggagccagccgagttctgggacctactgggagggaaaactccctatgccaatgataaaagacttcagcaggaaatcctagatgtccagtctcgtctctttgaatgttccaataagaccggccaattcgttgtcactgagatcacagacttcacccaggatgacctgaaccctactgacgtgatgctcctagatacctgggaccaggtgttcttgtggattggggctgaggccaatgccacggagaaggagagtgcccttgccacagcacagcagtacctgcacactcaccccagcggccgagatcccgacacaccaatcctgatcattaagcaggggtttgagcctcccatcttcacaggctggttcctagcctgggaccctaacatttggagtgcaggaaaaacatatgaacaattaaaagaagagctgggagatgctgctgctatcatgcgaatcactgctgacatgaagaatgcaaccctctccctgaattctaatgacagtgagccaaaatattaccctatagcagttctgttgaaaaaccagaatcaggagctgcctgaggatgtaaaccctgccaaaaaggagaattacctctctgaacaggactttgtgtctgtgtttggcatcacaagagggcaatttgcagctctgcctggctggaaacagctccaaatgaagaaagaaaaggggcttttctaaagcaagaaggcctatacctattgcaaggccacagaaaagagcagatagtgccaatatcaggaaataatttatccaccaatttctgcctgacattcagctacttaatttagatataatagagtctgcaaatcacggcatgttc

SEQ ID NO: 106023 - DNA, 4081 bp, Homo sapiens
  Payload ID: 781
  Gene Symbol: AEBP1
  Gene Name: AE binding protein 1
  Uniprot ID: Q8IUX7
  ENST ID: ENST00000223357
  CDS Start-End: 306-3782
cggctatccgcgcgggagtgcgccacgcggggccggagcgcctattagccgccaggacctcggagcgccccgaccacccctgagcccctctggcttcggagccccccagcaccccttcccgggtcccctcgcccaccctaatccactctccctccctttcccggattccctcgctcaccccatcctctctcccgccccttcctggattccctcacccgtctcgatcccctctccgccctttcccagagacccagagcccctgaccccccgcgccctccccggagccccccgcgcgtgccgcggccatggcggccgtgcgcggggcgcccctgctcagctgcctcctggcgttgctggccctgtgccctggagggcgcccgcagacggtgctgaccgacgacgagatcgaggagttcctcgagggcttcctgtcagagctagaacctgagccccgggaggacgacgtggaggccccgccgcctcccgagcccaccccgcgggtccgaaaagcccaggcggggggcaagccagggaagcggccagggacggccgcagaagtgcctccggaaaagaccaaagacaaagggaagaaaggcaagaaagacaaaggccccaaggtgcccaaggagtccttggaggggtcccccaggccgcccaagaaggggaaggagaagccacccaaggccaccaagaagcccaaggagaagccacctaaggccaccaagaagcccaaggagaagccacccaaggccaccaagaagcccaaagagaagccacccaaggccaccaagaagcccccgtcagggaagaggccccccattctggctccctcagaaaccctggagtggccactgcccccaccccccagccctggccccgaggagctaccccaggagggaggggcgcccctctcaaataactggcagaatccaggagaggagacccatgtggaggcacgggagcaccagcctgagccggaggaggagaccgagcaacccacactggactacaatgaccagatcgagagggaggactatgaggactttgagtacattcggcgccagaagcaacccaggccacccccaagcagaaggaggaggcccgagcgggtctggccagagccccctgaggagaaggccccggccccagccccggaggagaggattgagcctcctgtgaagcctctgctgcccccgctgccccctgactatggtgatggttacgtgatccccaactacgatgacatggactattactttgggcctcctccgccccagaagcccgatgctgagcgccagacagacgaagagaaggaggagctgaagaaacccaaaaaggaggacagcagccccaaggaggagaccgacaagtgggcagtggagaagggcaaggaccacaaagagccccgaaagggcgaggagttggaggaggagtggacgcctacggagaaagtcaagtgtccccccattgggatggagtcacaccgtattgaggacaaccagatccgagcctcctccatgctgcgccacggcctgggggcacagcgcggccggctcaacatgcagaccggtgccactgaggacgactactatgatggtgcgtggtgtgccgaggacgatgccaggacccagtggatagaggtggacaccaggaggactacccggttcacaggcgtcatcacccagggcagagactccagcatccatgacgattttgtgaccaccttcttcgtgggcttcagcaatgacagccagacatgggtgatgtacaccaacggctatgaggaaatgacctttcatgggaacgtggacaaggacacacccgtgctgagtgagctcccagagccggtggtggctcgtttcatccgcatctacccactcacctggaatggcagcctgtgcatgcgcctggaggtgctggggtgctctgtggcccctgtctacagctactacgcacagaatgaggtggtggccaccgatgacctggatttccggcaccacagctacaaggacatgcgccagctcatgaaggtggtgaacgaggagtgccccaccatcacccgcacttacagcctgggcaagagctcacgaggcctcaagatctatgccatggagatctcagacaaccctggggagcatgaactgggggagcccgagttccgctacactgctgggatccatggcaacgaggtgctgggccgagagctgttgctgctgctcatgcagtacctgtgccgagagtaccgcgatgggaacccacgtgtgcgcagcctggtgcaggacacacgcatccacctggtgccctcactgaaccctgatggctacgaggtggcagcgcagatgggctcagagtttgggaactgggcgctgggactgtggactgaggagggctttgacatctttgaagatttcccggatctcaactctgtgctctggggagctgaggagaggaaatgggtcccctaccgggtccccaacaataacttgcccatccctgaacgctacctttcgccagatgccacggtatccacggaggtccgggccatcattgcctggatggagaagaaccccttcgtgctgggagcaaatctgaacggcggcgagcggctagtatcctacccctacgatatggcccgcacgcctacccaggagcagctgctggccgcagccatggcagcagcccggggggaggatgaggacgaggtctccgaggcccaggagactccagaccacgccatcttccggtggcttgccatctccttcgcctccgcacacctcaccttgaccgagccctaccgcggaggctgccaagcccaggactacaccggcggcatgggcatcgtcaacggggccaagtggaacccccggaccgggactatcaatgacttcagttacctgcataccaactgcctggagctctccttctacctgggctgtgacaagttccctcatgagagtgagctgccccgcgagtgggagaacaacaaggaggcgctgctcaccttcatggagcaggtgcaccgcggcattaagggggtggtgacggacgagcaaggcatccccattgccaacgccaccatctctgtgagtggcattaatcacggcgtgaagacagccagtggtggtgattactggcgaatcttgaacccgggtgagtaccgcgtgacagcccacgcggagggctacaccccgagcgccaagacctgcaatgttgactatgacatcggggccactcagtgcaacttcatcctggctcgctccaactggaagcgcatccgggagatcatggccatgaacgggaaccggcctatcccacacatagacccatcgcgccctatgaccccccaacagcgacgcctgcagcagcgacgcctacaacaccgcctgcggcttcgggcacagatgcggctgcggcgcctcaacgccaccaccaccctaggcccccacactgtgcctcccacgctgccccctgcccctgccaccaccctgagcactaccatagagccctggggcctcataccgccaaccaccgctggctgggaggagtcggagactgagacctacacagaggtggtgacagagtttgggaccgaggtggagcccgagtttgggaccaaggtggagcccgagtttgagacccagttggagcctgagtttgagacccagctggaacccgagtttgaggaagaggaggaggaggagaaagaggaggagatagccactggccaggcattccccttcacaacagtagagacctacacagtgaactttggggacttctgagatcagcgtcctaccaagaccccagcccaactcaagctacagcagcagcacttcccaagcctgctgaccacagtcacatcacccatcagcacatggaaggcccctggtatggacactgaaaggaagggctggtcctgcccctttgagggggtgcaaacatgactgggacctaagagccagaggctgtgtagaggctcctgctccacctgccagtctcgtaagagatggggttgctgcagtgttggagtaggggcagagggagggagccaaggtcactccaataaaacaagctcatggca

SEQ ID NO: 106024 - DNA, 618 bp, Homo sapiens
  Payload ID: 781
  Gene Symbol: AEBP1
  Gene Name: AE binding protein 1
  ENST ID: ENST00000434445
  CDS Start-End: 1-315
aggacccagtggatagaggtggacaccaggaggactacccggttcacaggcgtcatcacccagggcagagactccagcatccatgacgattttgtgaccaccttcttcgtgggcttcagcaatgacagccagacatgggtgatgtacaccaacggctatgaggaaatggtgggcaccatgcccaggctcttggctctgctcccattgtctgggcgaggggtgggctctcagaggggctggcagtactgctctgaggcctgcctctccccagacctttcatgggaacgtggacaaggacacacccgtgctgagtgagctcccagagccggtggtggctcgtttcatccgcatctacccactcacctggaatggcagcctgtgcatgcgcctggaggtgctggggtgctctgtggcccctgtctacagctactacgcacagaatgaggtggtggccaccgatgacctggatttccggcaccacagctacaaggacatgcgccagctcatgaaggtggtgaacgaggagtgccccaccatcacccgcacttacagcctgggcaagagctcacgaggcctcaagatctatgccatggagatctcagacaaccctggggagca

SEQ ID NO: 106025 - DNA, 2571 bp, Homo sapiens
  Payload ID: 781
  Gene Symbol: AEBP1
  Gene Name: AE binding protein 1
  Uniprot ID: Q8IUX7
  ENST ID: ENST00000450684
  CDS Start-End: 69-2270
ttttgtgaccaccttcttcgtgggcttcagcaatgacagccagacatgggtgatgtacaccaacggctatgaggaaatggtgggcaccatgcccaggctcttggctctgctcccattgtctgggcgaggggtgggctctcagaggggctggcagtactgctctgaggcctgcctctccccagacctttcatgggaacgtggacaaggacacacccgtgctgagtgagctcccagagccggtggtggctcgtttcatccgcatctacccactcacctggaatggcagcctgtgcatgcgcctggaggtgctggggtgctctgtggcccgtgagtgtggagggctggcaggggctctgagtggaggtggggtgctagggtgggccagccggcacccagctaaagacaaccccgcctcccttgcagctgtctacagctactacgcacagaatgaggtggtggccaccgatgacctggatttccggcaccacagctacaaggacatgcgccagctcatgaaggtggtgaacgaggagtgccccaccatcacccgcacttacagcctgggcaagagctcacgaggcctcaagatctatgccatggagatctcagacaaccctggggagcatgaactgggggagcccgagttccgctacactgctgggatccatggcaacgaggtgctgggccgagagctgttgctgctgctcatgcagtacctgtgccgagagtaccgcgatgggaacccacgtgtgcgcagcctggtgcaggacacacgcatccacctggtgccctcactgaaccctgatggctacgaggtggcagcgcagatgggctcagagtttgggaactgggcgctgggactgtggactgaggagggctttgacatctttgaagatttcccggatctcaactctgtgctctggggagctgaggagaggaaatgggtcccctaccgggtccccaacaataacttgcccatccctgaacgctacctttcgccagatgccacggtatccacggaggtccgggccatcattgcctggatggagaagaaccccttcgtgctgggagcaaatctgaacggcggcgagcggctagtatcctacccctacgatatggcccgcacgcctacccaggagcagctgctggccgcagccatggcagcagcccggggggaggatgaggacgaggtctccgaggcccaggagactccagaccacgccatcttccggtggcttgccatctccttcgcctccgcacacctcaccttgaccgagccctaccgcggaggctgccaagcccaggactacaccggcggcatgggcatcgtcaacggggccaagtggaacccccggaccgggactatcaatgacttcagttacctgcataccaactgcctggagctctccttctacctgggctgtgacaagttccctcatgagagtgagctgccccgcgagtgggagaacaacaaggaggcgctgctcaccttcatggagcaggtgcaccgcggcattaagggggtggtgacggacgagcaaggcatccccattgccaacgccaccatctctgtgagtggcattaatcacggcgtgaagacagccagtggtggtgattactggcgaatcttgaacccgggtgagtaccgcgtgacagcccacgcggagggctacaccccgagcgccaagacctgcaatgttgactatgacatcggggccactcagtgcaacttcatcctggctcgctccaactggaagcgcatccgggagatcatggccatgaacgggaaccggcctatcccacacatagacccatcgcgccctatgaccccccaacagcgacgcctgcagcagcgacgcctacaacaccgcctgcggcttcgggcacagatgcggctgcggcgcctcaacgccaccaccaccctaggcccccacactgtgcctcccacgctgccccctgcccctgccaccaccctgagcactaccatagagccctggggcctcataccgccaaccaccgctggctgggaggagtcggagactgagacctacacagaggtggtgacagagtttgggaccgaggtggagcccgagtttgggaccaaggtggagcccgagtttgagacccagttggagcctgagtttgagacccagctggaacccgagtttgaggaagaggaggaggaggagaaagaggaggagatagccactggccaggcattccccttcacaacagtagagacctacacagtgaactttggggacttctgagatcagcgtcctaccaagaccccagcccaactcaagctacagcagcagcacttcccaagcctgctgaccacagtcacatcacccatcagcacatggaaggcccctggtatggacactgaaaggaagggctggtcctgcccctttgagggggtgcaaacatgactgggacctaagagccagaggctgtgtagaggctcctgctccacctgccagtctcgtaagagatggggttgctgcagtgttggagtaggggcagagggagggagccaaggtcactccaataaaacaagctcatggcacg

SEQ ID NO: 106026 - DNA, 665 bp, Homo sapiens
  Payload ID: 781
  Gene Symbol: AEBP1
  Gene Name: AE binding protein 1
  ENST ID: ENST00000453052
  CDS Start-End: 1-210
aagcccgatgctgagcgccagacagacgaagagaaggaggagctgaagaaacccaaaaaggaggacagcagccccaaggaggagaccgacaagtgggcagtggagaagggcaaggaccacaaagagccccgaaagggcgaggagttggaggaggagtggacgcctacggagaaagtcaggccattgtgcagacggtccccatctggatgacatctgtggctgcgccctgggggagctctacctgtgatttcacgtgtgtcccctgagagctgggcatggtcagcccgttctccagatggggcagctgaggcccagggaggggaagcacaggctgggattggaaacagctcctggcctggctttgagtcgattccaggtgggctggtgcagggcaccagggagccaccagctgaccagagctgccctctgactgtgcccccgatgtgccgggagtgggctctgggctccttggttctgggtttggtggagggaaggatggagctagtgagccaccattctggggtacgcgtcctcagagtgtccccccattgggatggagtcacaccgtattgaggacaaccagatccgagcctcctccatgctgcgccacggcctgggggcacagcgcggccggctcaacatgcagaccggtgccactgaggacg

SEQ ID NO: 106027 - DNA, 566 bp, Homo sapiens
  Payload ID: 781
  Gene Symbol: AEBP1
  Gene Name: AE binding protein 1
  ENST ID: ENST00000449162
  CDS Start-End: 80-566
agatgctcctccaggcctggatggctcagtcacctctctgccccttctgtgcccagaacagaatagtggaggagtggatatgcctccggaaaagaccaaagacaaagggaagaaaggcaagaaagacaaaggccccaaggtgcccaaggagtccttggaggggtcccccaggccgcccaagaaggggaaggagaagccacccaaggccaccaagaagcccaaggagaagccacctaaggccaccaagaagcccaaggagaagccacccaaggccaccaagaagcccaaagagaagccacccaaggccaccaagaagcccccgtcagggaagaggccccccattctggctccctcagaaaccctggagtggccactgcccccaccccccagccctggccccgaggagctaccccaggagggaggggcgcccctctcaaataactggcagaatccaggagaggagacccatgtggaggcacgggagcaccagcctgagccggaggaggagaccgagcaacccacactggactacaatgaccagatcgagagggaggactatgaggact

SEQ ID NO: 106028 - DNA, 2172 bp, Homo sapiens
  Payload ID: 781
  Gene Symbol: AEBP1
  Gene Name: AE binding protein 1
  ENST ID: ENST00000413907
  CDS Start-End: 1-200
atttccggcaccacagctacaaggacatgcgccagctcatgaaggtggtgaacgaggagtgccccaccatcacccgcacttacagcctgggcaagagctcacgaggcctcaagatctatgccatggagatctcagacaaccctggggagcatgaactgggtgagggtctgtgggggccagcagctggcctctgctgctgatgtgcagagctcactgcctcccgcctgttccggagcctctctggggattctggcttgtcttacagggccctaggagccccagctgtcccccagaccctcgggggagcccgagttccgctacactgctgggatccatggcaacgaggtgctgggccgagagctgttgctgctgctcatgcagtacctgtgccgagagtaccgcgatgggaacccacgtgtgcgcagcctggtgcaggacacacgcatccacctggtgccctcactgaaccctgatggctacgaggtggcagcgcagatgatttcccggatctcaactctgtgctctggggagctgaggagaggaaatgggtcccctaccgggtccccaacaataacttgcccatccctgaacgctacctttcgccagatgccacggtatccacggaggtccgggccatcattgcctggatggagaagaaccccttcgtgctgggagcaaatctgaacggcggcgagcggctagtatcctacccctacgatatggcccgcacgcctacccaggagcagctgctggccgcagccatggcagcagcccggggggaggatgaggacgaggtctccgaggcccaggagactccagaccacgccatcttccggtggcttgccatctccttcgcctccgcacacctcaccttgaccgagccctaccgcggaggctgccaagcccaggactacaccggcggcatgggcatcgtcaacggggccaagtggaacccccggaccgggactatcaatgacttcagttacctgcataccaactgcctggagctctccttctacctgggctgtgacaagttccctcatgagagtgagctgccccgcgagtgggagaacaacaaggaggcgctgctcaccttcatggagcaggtgcaccgcggcattaagggggtggtgacggacgagcaaggcatccccattgccaacgccaccatctctgtgagtggcattaatcacggcgtgaagacagccagtggtggtgattactggcgaatcttgaacccgggtgagtaccgcgtgacagcccacgcggagggctacaccccgagcgccaagacctgcaatgttgactatgacatcggggccactcagtgcaacttcatcctggctcgctccaactggaagcgcatccgggagatcatggccatgaacgggaaccggcctatcccacacatagacccatcgcgccctatgaccccccaacagcgacgcctgcagcagcgacgcctacaacaccgcctgcggcttcgggcacagatgcggctgcggcgcctcaacgccaccaccaccctaggcccccacactgtgcctcccacgctgccccctgcccctgccaccaccctgagcactaccatagagccctggggcctcataccgccaaccaccgctggctgggaggagtcggagactgagacctacacagaggtggtgacagagtttgggaccgaggtggagcccgagtttgggaccaaggtggagcccgagtttgagacccagttggagcctgagtttgagacccagctggaacccgagtttgaggaagaggaggaggaggagaaagaggaggagatagccactggccaggcattccccttcacaacagtagagacctacacagtgaactttggggacttctgagatcagcgtcctaccaagaccccagcccaactcaagctacagcagcagcacttcccaagcctgctgaccacagtcacatcacccatcagcacatggaaggcccctggtatggacactgaaaggaagggctggtcctgcccctttgagggggtgcaaacatgactgggacctaagagccagaggctgtgtagaggctcctgctccacctgccagtctcgtaagagatggggttgctgcagtgttggagtaggggcagagggagggagccaaggtcactccaataaaacaagctcatggc

SEQ ID NO: 106029 - DNA, 751 bp, Homo sapiens
  Payload ID: 781
  Gene Symbol: AEBP1
  Gene Name: AE binding protein 1
  ENST ID: ENST00000455443
  CDS Start-End: 1-751
agagctagaacctgagccccgggaggacgacgtggaggccccgccgcctcccgagcccaccccgcgggtccgaaaagcccaggcggggggcaagccagggaagcggccagggacggccgcagaagtgcctccggaaaagaccaaagacaaagggaagaaaggcaagaaagacaaaggccccaaggtgcccaaggagtccttggaggggtcccccaggccgcccaagaaggggaaggagaagccacccaaggccaccaagaagcccaaggagaagccacctaaggccaccaagaagcccaaggagaagccacccaaggccaccaagaagcccaaagagaagccacccaaggccaccaagaagcccccgtcagggaagaggccccccattctggctccctcagaaaccctggagtggccactgcccccaccccccagccctggccccgaggagctaccccaggagggaggggcgcccctctcaaataactggcagaatccaggagaggagacccatgtggaggcacgggagcaccagcctgagcctcctgtgaagcctctgctgcccccgctgccccctgactatggtgatggttacgtgatccccaactacgatgacatggactattactttgggcctcctccgccccagaagcccgatgctgagcgccagacagacgaagagaaggaggagctgaagaaacccaaaaaggaggacagcagccccaaggaggagaccgacaagtgggcagtg

SEQ ID NO: 106030 - DNA, 783 bp, Homo sapiens
  Payload ID: 781
  Gene Symbol: AEBP1
  Gene Name: AE binding protein 1
  ENST ID: ENST00000431035
  CDS Start-End: 1-165
ctcatgaaggtggtgaacgaggagtgccccaccatcacccgcacttacagcctgggcaagagctcacgaggcctcaagatctatgccatggagatctcagacaaccctggggagcatgaactgggtgagggtctgtgggggccagcagctggcctctgctgctgatgtgcagagctcactgcctcccgcctgttccggagcctctctggggattctggcttgtcttacagggccctaggagccccagctgtcccccagaccctcgggtatgaggtgggtctgggtccttcctcagctgccctgggcctcgggagactgagtgctcactgaggctcccgcccttgcaggggagcccgagttccgctacactgctgggatccatggcaacgaggtgctgggccgagagctgttgctgctgctcatgcagtacctgtgccgagagtaccgcgatgggaacccacgtgtgcgcagcctggtgcaggacacacgcatccacctggtgccctcactgaaccctgatggctacgaggtggcagcgcagatgggctcagagtttgggaactgggcgctgggactgtggactgaggagggctttgacatctttgaagatttcccggatctcaactctgtgctctggggagctgaggagaggaaatgggtcccctaccgggtccccaacaataacttgcccatccctgaacgctacctttcgccagatgccacggtatccacggaggtccgggccatcattgcctggatggagaagaaccccttcgtgctggg

SEQ ID NO: 106031 - DNA, 3620 bp, Homo sapiens
  Payload ID: 782
  Gene Symbol: AEBP2
  Gene Name: AE binding protein 2
  Uniprot ID: Q6ZN18
  ENST ID: ENST00000266508
  CDS Start-End: 2-1513
catggccgccgctatcaccgacatggccgacctggaggagctctcccgcctgagccctctgccccccggcagcccgggttcggcggcgcggggccgggctgagccccccgaggaggaggaggaagaggaggaggaggaagaggaggcggaggccgaggcggtggcggcgctgctgctgaacggcggcagcggtgggggcggcggaggcggcggcggaggagtggggggcggcgaggcagagacgatgtcggagccgagccccgagagcgccagccaggccggggaggacgaagacgaggaggaggacgacgaggaggaggaagatgagagcagcagcagcggcgggggtgaggaggagagtagcgccgagagcctggtgggcagcagcggcgggagcagcagcgacgagacccgctcgttgagccccggcgccgccagcagcagcagcggggatggggacggcaaggagggcctggaggagcccaagggaccgcggggcagccagggcggcggcgggggcggcagcagtagcagcagcgtagtctccagcggcggcgacgagggctacgggactgggggaggcggaagcagcgcgacctccgggggccggcggggcagcttggagatgtcgtcggatggggaacccctgagccgcatggactcggaggacagcataagcagtactataatggatgtagacagcacaatttccagtgggcgttcaactccagcaatgatgaatggacaaggaagcactacttcttcaagcaaaaatattgcctataattgttgttgggaccagtgccaggcttgcttcaactctagcccagatctggcagatcacatccgttccatacatgtagatggtcagcgaggaggggtatttgtttgcttatggaaaggttgtaaagtatataacactccatctaccagtcaaagttggttacaaaggcatatgctgacacacagtggagacaaacctttcaagtgtgttgttggtggctgcaatgccagctttgcttctcagggagggctagctcgtcatgtacccacacacttcagtcagcagaactcctcaaaagtttctagccagccaaaggccaaagaagaatctccttctaaagctggaatgaacaaaaggaggaaattaaagaacaaaagacgacgctcattaccacggccacatgatttcttcgatgcacaaacactggatgcgataagacatcgagccatatgctttaacctctcagctcatatagaaagtttagggaagggacacagtgttgtttttcatagtactgtaatagctaagagaaaagaagattctgggaagatcaaacttttgcttcattggatgcctgaagacattctgcctgatgtgtgggtgaatgaaagtgaacgacatcagttaaaaactaaagtagttcatttatcaaagctacccaaagatactgccttgcttttggacccaaacatatacagaacaatgccgcagaagaggttgaagaggtaaaaaataaataaatacataaaaagcaaacaagcggggacacctgcagtcttagtcactgacaatgggtttagggaaagttgcacattagagtcaaccccttcttttttttttttttttttttaaatccagtatttaggataatatttatgcttagtgtaaacattctgtgaatgaagtagactcttcggtggaatatattaatatattactgtatatccacattttcatggaatggtactgtgggagactgagcaaacactcttttggcaacttagtagaacagcttcttaaaggctttgcatgcttgctgctttaagctgcttttttttttcttttcttccctttagtgatttcagtagtttatattggaaagaaaaacaattacaacatgtgcccttacaaataccaaaagcactgtaaggatatttgtcttgacagtgtttattgatttgaagtcatattaggaaatatttagacaatgaaaattatcaagagataatttacctttcaattatgataaatagatgtgattggttgccatttgtgttcttttgcagaactctgataagaaaagtgttcaatttgtatttaagcaaacagtgaacgacgtttgcaatcaactaaaaattcgtctatcgaattagggctgaaaattactgttaaagagtgttgcagtatgtctggtggctcccttttcaggactagggctttctcatggagtacagtatgttaatatttacctatataactaatctgttaacggtttttgaaaaacctttcaaattatttgaataatcttcatattttcatttaacctatatgactctaattttttttctgaggaaatcatttggtttttgagttgttttttcttaatgtaagaaaaattgtattttttttacaagtatcttcaaactgaatcttttatgcaccaaagttggtcttgaaaaggaaaataaaatcactttcttgcttggtaagcaagaagccatatcgattttttttaacttacagaaatggaaatatgtgtaacttgttagtattgtattaaacaaatgttgcatagagataatagaacattgcttgtaaataattcagcagatttgtaatatatttttatattttgaaatgtactgtagatgttttctagaggcatgaaagttaaatgtatatattatggtagaaataatattgaaggatattgtacttcactagtgctgccagaggaattgttaataaaagcaccttctttaacaataaatgtctttcacagacttaagggactatgtactactgttaatatctctaagaacaaaacacattgaacatccttccagaaagtctttgagggaggacctatacccataatagaattatggcactcatttctgacagtgatcaagaaatcagttatttccttactgttggaaggacattgtaaagtatgtggttatatgcagtgaaactgcagaaaatactcctggttgaggagttttcactttactacagtgatataaaaaccagcagtttttacactaaattttttaaagaaatattagacaaaaatatagaattaaaacctttggttccaaaatgggaaaggttccacgatacataaatcatttctcatttgctttaaaaaatttaaaagtgtaaaaattatgagagactttattcgttaacaatgggggtaaagagctatatacatgaaaatgagtcttataaaattaagtgaagtgcaaataaaagcactgctactataagacattctggaatggttgtttaataagggtattatccatttgatctatagcaatgtgattttatttttaaaaagaaaagcagtgtgttttctttttttgttgttttcttttgcttaagcacttcatcaattgctttattctgtatctgcgaagtaatctgcaatctcttttgttctttttaaaatttgatttgttataaaattgccaaatagaagtgtttcagatacatagtttgtacctgtatttttattttattgcctcatgttcttgtaagtcattcttaattgaccaatgattgtagaccttgcttgagtattttttctaataaaacaaagcaaatcaca

SEQ ID NO: 106032 - DNA, 2533 bp, Homo sapiens
  Payload ID: 782
  Gene Symbol: AEBP2
  Gene Name: AE binding protein 2
  Uniprot ID: Q6ZN18
  ENST ID: ENST00000360995
  CDS Start-End: 125-1030
aactctcctttccccgccctctttcccctcggcgcttcgctcctcacggacctcaggacggctctaactcggaaacagtccccaaacgggcccagatcctctggcggagcagaagagggccttgatgtacacacgtcggtactcaagcataagcagtactataatggatgtagacagcacaatttccagtgggcgttcaactccagcaatgatgaatggacaaggaagcactacttcttcaagcaaaaatattgcctataattgttgttgggaccagtgccaggcttgcttcaactctagcccagatctggcagatcacatccgttccatacatgtagatggtcagcgaggaggggtatttgtttgcttatggaaaggttgtaaagtatataacactccatctaccagtcaaagttggttacaaaggcatatgctgacacacagtggagacaaacctttcaagtgtgttgttggtggctgcaatgccagctttgcttctcagggagggctagctcgtcatgtacccacacacttcagtcagcagaactcctcaaaagtttctagccagccaaaggccaaagaagaatctccttctaaagctggaatgaacaaaaggaggaaattaaagaacaaaagacgacgctcattaccacggccacatgatttcttcgatgcacaaacactggatgcgataagacatcgagccatatgctttaacctctcagctcatatagaaagtttagggaagggacacagtgttgtttttcatagtactgtaatagctaagagaaaagaagattctgggaagatcaaacttttgcttcattggatgcctgaagacattctgcctgatgtgtgggtgaatgaaagtgaacgacatcagttaaaaactaaagtagttcatttatcaaagctacccaaagatactgccttgcttttggacccaaacatatacagaacaatgccgcagaagaggttgaagagaactctgataagaaaagtgttcaatttgtatttaagcaaacagtgaacgacgtttgcaatcaactaaaaattcgtctatcgaattagggctgaaaattactgttaaagagtgttgcagtatgtctggtggctcccttttcaggactagggctttctcatggagtacagtatgttaatatttacctatataactaatctgttaacggtttttgaaaaacctttcaaattatttgaataatcttcatattttcatttaacctatatgactctaattttttttctgaggaaatcatttggtttttgagttgttttttcttaatgtaagaaaaattgtattttttttacaagtatcttcaaactgaatcttttatgcaccaaagttggtcttgaaaaggaaaataaaatcactttcttgcttggtaagcaagaagccatatcgattttttttaacttacagaaatggaaatatgtgtaacttgttagtattgtattaaacaaatgttgcatagagataatagaacattgcttgtaaataattcagcagatttgtaatatatttttatattttgaaatgtactgtagatgttttctagaggcatgaaagttaaatgtatatattatggtagaaataatattgaaggatattgtacttcactagtgctgccagaggaattgttaataaaagcaccttctttaacaataaatgtctttcacagacttaagggactatgtactactgttaatatctctaagaacaaaacacattgaacatccttccagaaagtctttgagggaggacctatacccataatagaattatggcactcatttctgacagtgatcaagaaatcagttatttccttactgttggaaggacattgtaaagtatgtggttatatgcagtgaaactgcagaaaatactcctggttgaggagttttcactttactacagtgatataaaaaccagcagtttttacactaaattttttaaagaaatattagacaaaaatatagaattaaaacctttggttccaaaatgggaaaggttccacgatacataaatcatttctcatttgctttaaaaaatttaaaagtgtaaaaattatgagagactttattcgttaacaatgggggtaaagagctatatacatgaaaatgagtcttataaaattaagtgaagtgcaaataaaagcactgctactataagacattctggaatggttgtttaataagggtattatccatttgatctatagcaatgtgattttatttttaaaaagaaaagcagtgtgttttctttttttgttgttttcttttgcttaagcacttcatcaattgctttattctgtatctgcgaagtaatctgcaatctcttttgttctttttaaaatttgatttgttataaaattgccaaatagaagtgtttcagatacatagtttgtacctgtatttttattttattgcctcatgttcttgtaagtcattcttaattgaccaatgattgtagaccttgcttgagtattttttctaataaaacaaagcaaatcac

SEQ ID NO: 106033 - DNA, 722 bp, Homo sapiens
  Payload ID: 782
  Gene Symbol: AEBP2
  Gene Name: AE binding protein 2
  ENST ID: ENST00000398731
  CDS Start-End: 1-423
ctggatgcgataagacatcgagccatatgctttaacctctcagctcatatagaaagtttagggaagggacacagtgttgtttttcatagtactgtaatagctaagagaaaagaagattctgggaagatcaaacttttgcttcattggatgcctgaagacattctgcctgatgtgtgggtgaatgaaagtgaacgacatcagttaaaaactaaagtagttcatttatcaaagctacccaaagatactgccttgcttttggacccaaacatatacagaacaatgccgcagaagaggttgaagagatggagtttcactcttgttgcccaggctggtgtgcaatggcgcgatcttggctcaccgcaacctccgcttcccgggttcaagcgattcttctgcctcagcttcctgagtagctgggattaaagacacccgccaccacgcccagctaattttgtattttaagtagagacggggtttcaccatattgaccaggctggtctcaaactcccgacctcaggtgatctgcccacctcggcctcccaaagtgctgagattacaggcgtgagccaccgtgcccagccaagtttaatttttacaccaatgattcatttctgcttttacaggtgattactttatctcactagaaaaaaaaaatgtaaaaatctaaacaaaaagtgtccaaaacttacaataagccttaatctcgaataattaccatgaca

SEQ ID NO: 106034 - DNA, 5099 bp, Homo sapiens
  Payload ID: 782
  Gene Symbol: AEBP2
  Gene Name: AE binding protein 2
  Uniprot ID: Q6ZN18
  ENST ID: ENST00000398864
  CDS Start-End: 27-1580
gaggaggaggaggagcaggcgccgccatggccgccgctatcaccgacatggccgacctggaggagctctcccgcctgagccctctgccccccggcagcccgggttcggcggcgcggggccgggctgagccccccgaggaggaggaggaagaggaggaggaggaagaggaggcggaggccgaggcggtggcggcgctgctgctgaacggcggcagcggtgggggcggcggaggcggcggcggaggagtggggggcggcgaggcagagacgatgtcggagccgagccccgagagcgccagccaggccggggaggacgaagacgaggaggaggacgacgaggaggaggaagatgagagcagcagcagcggcgggggtgaggaggagagtagcgccgagagcctggtgggcagcagcggcgggagcagcagcgacgagacccgctcgttgagccccggcgccgccagcagcagcagcggggatggggacggcaaggagggcctggaggagcccaagggaccgcggggcagccagggcggcggcgggggcggcagcagtagcagcagcgtagtctccagcggcggcgacgagggctacgggactgggggaggcggaagcagcgcgacctccgggggccggcggggcagcttggagatgtcgtcggatggggaacccctgagccgcatggactcggaggacagcataagcagtactataatggatgtagacagcacaatttccagtgggcgttcaactccagcaatgatgaatggacaaggaagcactacttcttcaagcaaaaatattgcctataattgttgttgggaccagtgccaggcttgcttcaactctagcccagatctggcagatcacatccgttccatacatgtagatggtcagcgaggaggggtatttgtttgcttatggaaaggttgtaaagtatataacactccatctaccagtcaaagttggttacaaaggcatatgctgacacacagtggagacaaacctttcaagtgtgttgttggtggctgcaatgccagctttgcttctcagggagggctagctcgtcatgtacccacacacttcagtcagcagaactcctcaaaagtttctagccagccaaaggccaaagaagaatctccttctaaagctggaatgaacaaaaggaggaaattaaagaacaaaagacgacgctcattaccacggccacatgatttcttcgatgcacaaacactggatgcgataagacatcgagccatatgctttaacctctcagctcatatagaaagtttagggaagggacacagtgttgtttttcatagtactgtaatagctaagagaaaagaagattctgggaagatcaaacttttgcttcattggatgcctgaagacattctgcctgatgtgtgggtgaatgaaagtgaacgacatcagttaaaaactaaagtagttcatttatcaaagctacccaaagatactgccttgcttttggacccaaacatatacagaacaatgccgcagaagaggttgaagagaactctgataagaaaagtgttcaatttgtatttaagcaaacagtgaacgacgtttgcaatcaactaaaaattcgtctatcgaattagggctgaaaattactgttaaagagtgttgcagtatgtctggtggctcccttttcaggactagggctttctcatggagtacagtatgttaatatttacctatataactaatctgttaacggtttttgaaaaacctttcaaattatttgaataatcttcatattttcatttaacctatatgactctaattttttttctgaggaaatcatttggtttttgagttgttttttcttaatgtaagaaaaattgtattttttttacaagtatcttcaaactgaatcttttatgcaccaaagttggtcttgaaaaggaaaataaaatcactttcttgcttggtaagcaagaagccatatcgattttttttaacttacagaaatggaaatatgtgtaacttgttagtattgtattaaacaaatgttgcatagagataatagaacattgcttgtaaataattcagcagatttgtaatatatttttatattttgaaatgtactgtagatgttttctagaggcatgaaagttaaatgtatatattatggtagaaataatattgaaggatattgtacttcactagtgctgccagaggaattgttaataaaagcaccttctttaacaataaatgtctttcacagacttaagggactatgtactactgttaatatctctaagaacaaaacacattgaacatccttccagaaagtctttgagggaggacctatacccataatagaattatggcactcatttctgacagtgatcaagaaatcagttatttccttactgttggaaggacattgtaaagtatgtggttatatgcagtgaaactgcagaaaatactcctggttgaggagttttcactttactacagtgatataaaaaccagcagtttttacactaaattttttaaagaaatattagacaaaaatatagaattaaaacctttggttccaaaatgggaaaggttccacgatacataaatcatttctcatttgctttaaaaaatttaaaagtgtaaaaattatgagagactttattcgttaacaatgggggtaaagagctatatacatgaaaatgagtcttataaaattaagtgaagtgcaaataaaagcactgctactataagacattctggaatggttgtttaataagggtattatccatttgatctatagcaatgtgattttatttttaaaaagaaaagcagtgtgttttctttttttgttgttttcttttgcttaagcacttcatcaattgctttattctgtatctgcgaagtaatctgcaatctcttttgttctttttaaaatttgatttgttataaaattgccaaatagaagtgtttcagatacatagtttgtacctgtatttttattttattgcctcatgttcttgtaagtcattcttaattgaccaatgattgtagaccttgcttgagtattttttctaataaaacaaagcaaatcacatttagcttcaaattgtaacaattcaattgaattttaaaatgacacctgaaaagatacatctgatattttctatatagagcacagtaaataagttttttcattgtgtagaaatacttagatgtcaaaaccagatttcgtgatccttgattaacttctgagtactcaatcaatcataatccttttgctgcttatctgatgttggtttgatactgttaacacaccaaaaagaatatggaattgaaatgagctagctttataacttgtatgtatacatatatacacataacatccaattatgactgggtaataagtgtgaaaattttaatttgtggttttcatttattaatgtctgcccatctgtattgttgctcctaccttcaaatatgacacctgaaataataagtctgttgtccagaatttatgtattgttcagcatcaagcaaactacagctcacaagcatacccatttatatgttgtctatgcctgctttctcctgcagtggcagaattgagtggtgagaccttaggtcctgcaagcccccaatttttactacaggttggcaatccctaatccaaaaatctgacataaaaaatgctccaaagttcaaaactttctgagtgctgacatcatgctgcaagtggaaaattccacgcctgacctcatgtgactggtcatagtcaaaacaattaagactttgtttcatgcacaaaattattaaaactgttgtataaaattaccttcagtctatgtgtataaggtgtttgtgagatataaatgaactttatgtttagtcttggatcgcatttctgagtctcattatgtatatgcagatactcaaaaatctgaaaaaaatcaaaaatctgaaatacttctggtcccaagcatttcggataagggatactcagcctgtctctggtcctttaagaaaaagttttcgattcctttgtctagttgacaaaaagtttggaaacataaacttagaccacacaacttgcattttaatatgacaatgttgatcttggtaataagccagtacattaaattttagtgaaagctgtttcatgtattttacagtaaatactgccatattaggtacctacaacaaatggtggtttttggaaacttttacggtgggtttttaaagttattaatagtccatcatttcatcatttgtgtttctgtatttattttgctaagaactaaataagattttgtacatcagattgtgtttgaaccgtaaggcacatctgctttatctaaaagaatcttaaggtggaaatagtgtaaaatttaaaattttttatatttctaataaactttttatatataaatgttacctaaagtggacacatgttacttctgaatttcacatgaaaggaaattaaagatggacaataattatctctcaatattttaagatttgttttactaattgaaaacagtatgtcagtaaatctttggccttagtgcttttttcccccttttacacattaataaaatgttttaaatatggtaatactcttaaaacggtagaatttgccacagttgtttaaagcatttttattttttctttgaattcttaattcatggtgaacagatgttgggttcttaaaatataaaaatgagaaaatatgtattaaaaatacttgatagagggttttctctttaatcacaacttaaaaaaagaaacctttaatacctctgcataagttctctgaaagaacttaaattcttagtttatatgaaaactgatatgtatgtctgtgtaacaaagcctgttgggtacaggtctacaaggagatactttgtttctaaaaaaggagttaaatcgtgtcacctgaattttttttttttgagataagtggacattttggggattttggttaaaacatatttctctattctaaaaattacagaatatgtattcataaaagggaagaaattgttagaaaatttcctgtgtacgtagtttgtttttaaattaaagaatcttgtgacctggtgtaggacattt

SEQ ID NO: 106035 - DNA, 975 bp, Homo sapiens
  Payload ID: 782
  Gene Symbol: AEBP2
  Gene Name: AE binding protein 2
  ENST ID: ENST00000541908
  CDS Start-End: 76-900
ttcgccgcacttcccgctcgaccctcggttctggacaacggagatcgtccccagtcaagcataagcagtactataatggatgtagacagcacaatttccagtgggcgttcaactccagcaatgatgaatggacaaggaagcactacttcttcaagcaaaaatattgcctataattgttgttgggaccagtgccaggcttgcttcaactctagcccagatctggcagatcacatccgttccatacatgtagatggtcagcgaggaggggtatttgtttgcttatggaaaggttgtaaagtatataacactccatctaccagtcaaagttggttacaaaggcatatgctgacacacagtggagacaaacctttcaagtgtgttgttggtggctgcaatgccagctttgcttctcagggagggctagctcgtcatgtacccacacacttcagtcagcagaactcctcaaaagtttctagccagccaaaggccaaagaagaatctccttctaaagctggaatgaacaaaaggaggaaattaaagaacaaaagacgacgctcattaccacggccacatgatttcttcgatgcacaaacactggatgcgataagacatcgagccatatgctttaacctctcagctcatatagaaagtttagggaagggacacagtgttgtttttcatagtactgtaatagctaagagaaaagaagattctgggaagatcaaacttttgcttcattggatgcctgaagacattctgcctgatgtgtgggtgaatgaaagtgaacgacatcagttaaaaactaaagtagttcatttatcaaagctacccaaagatactgccttgcttttggacccaaacatatacagaacaatgccgcagaagaggttgaagaggtaaaaaataaataaatacataaaaagcaaacaagcggggacacctgcagtcttagtcactgacaatgggtttagggaa

SEQ ID NO: 106036 - DNA, 518 bp, Homo sapiens
  Payload ID: 782
  Gene Symbol: AEBP2
  Gene Name: AE binding protein 2
  ENST ID: ENST00000538425
  CDS Start-End: 189-518
aaagcaagggcaaccagctccttcgccgcacttcccgctcgaccctcggttctggacaacggagatcgtccccagtcaaggtgattatatcgcagatctcacttgggagcttctcttaacctgtgaccatcgcctgagttagctggccgacttcccagcggtcctttgtgagcataagcagtactataatggatgtagacagcacaatttccagtgggcgttcaactccagcaatgatgaatggacaaggaagcactacttcttcaagcaaaaatattgcctataattgttgttgggaccagtgccaggcttgcttcaactctagcccagatctggcagatcacatccgttccatacatgtagatggtcagcgaggaggggtatttgtttgcttatggaaaggttgtaaagtatataacactccatctaccagtcaaagttggttacaaaggcatatgctgacacacagtggagacaaacctttcaagtgtgttgttggtggctgcaatgccagcttt

SEQ ID NO: 106037 - DNA, 507 bp, Homo sapiens
  Payload ID: 782
  Gene Symbol: AEBP2
  Gene Name: AE binding protein 2
  ENST ID: ENST00000512223
  CDS Start-End: 1-393
ttagcacggccacatgatttcttcgatgcacaaacactggatgcgataagacatcgagccatatgctttaacctctcagctcatatagaaagtttagggaagggacacagtgttgtttttcatagtactgtaatagctaagagaaaagaagattctgggaagatcaaacttttgcttcattggatgcctgaagacattctgcctgatgtgtgggtgaatgaaagtgaacgacatcagttaaaaactaaagtagttcatttatcaaagctacccaaagatactgccttgcttttggacccaaacatatacagaacaatgccgcagaagaggttgaagaggtcagacaagcctttcaccttctgccatgattgtgaggcctcctcagccatgtgaaactgtgagtccattcaacctctttttctttataaattacccagtcttgggtatatttttatcagcaatgtgagaagggactaattctggtatgattaaaatattttgtgcttt

SEQ ID NO: 106038 - DNA, 2635 bp, Homo sapiens
  Payload ID: 783
  Gene Symbol:
  Gene Name: AF011889.5
  ENST ID: ENST00000422081
  CDS Start-End: 1413-2432
tcggagttcagccaccttagcaagtcctgggtttgttcttcagattttgctgctcgcccattgcctggatcgggggctactttgtaaaccaccaggaagactccagtgtttctgcttaatttttagatgtttgttaattgctcttggcctctcattaatcccctgtgggtcatccaggaaatatactcaccactgtctgttctctgagttttcatttccaggcatccgccctgcctggatctcctcacctgccaggaacttcctctccacaagccggccatcccagcaaaagttctaacaccaaaggtctggcaactagcctgccatcttgtgcctggagccgcctgcgtgccacctactcccgaagatgggaaccttgttgccagttgggcagatgcggggcaatcctgtaccaagaccccattttaccacctgctttctcagaccactctggaacccactgtctcagattgtgtcctccaggaagcagaccatgagagggagttggcagggccaaagatttactggggctaactaacactcaggaaagggataggaaggaaacagggctggagagcaggttgagcccgacctgacagtctcgagcagcccaacagggaggtgtggagcaagggttgcccactagaggggcctgcattgggtacgggtgatggggtccacatggtacctggcatatagcaggctgtgcaatccatattaactgactggataaattaatgctcagaaaaggtgccctggagaatgggtgcgtgctgaacacaatagggaagggcccagcatctgccttggcataggcagaactgtgctgtgccctgcaacaggccacctgagagctgctttgatcttgtgtgtacattagatgactgccaggggcatgaaggggatgtgcttccagggcatttgctggcagggcgtctcgtgatctcttggtattggtgtgagcacagcctggcaggagagggcagatctccatgcaaagtatgtcagaaagcagatggaagccaggccccctcctgaaagaggctccttgaagataattctaacatctttgtcatcagtgttgacatctcttgattgtatcctgtcattccatttgagatcttcctggttctggctggcatcctctgacatcactccagcagaagaaagggaaggaacacgctgcattactgcgtgggatatcttctaaccataccgatgattctccgtatagctggtcttttccaccttatcatccttcctctgagaagtatgaaaacactaagacatgtcgagggccagatggagaactccatgccaacctgctttgccctgtggatgtgctggatgttcccgagggcaccttgcctgacaaacagagcactgagcaagccatacagttgttggaaaagatgaaaacgtcagccagtcctttcttcctggccgttgggtatcataagccacacatccccttcagataccccaaggaatttcagaagttgtatcccttggagaacatcaccctggcccccgatcccgaggtccctgatggcctaccccctgtggcctacaacccctggatggacatcaggcaacgggaagacgtccaagccttaaacatcagtgtgccgtatggtccaattcctgtggactttcagcggaaaatccgccagagctactttgcctctgtgtcatatttggatacacaggtcggccgcctcttgagtgctttggacgatcttcagctggccaacagcaccatcattgcatttacctcggatcatgggtgggctctaggtgaacatggagaatgggccaaatacagcaattttgatgttgctacccatgttcccctgatattctatgttcctggaaggacggcttcacttccggaggcaggcgagaagcttttcccttacctcgacccttttgattccgcctcacagttgatggagccaggcaggcaatccatggaccttgtggaacttgtgtctctttttcccacgctggctggacttgcaggactgcaggttccacctcgctgccccgttccttcatttcacgttgagctgtgcagagaaggcaagaaccttctgaagcattttcgattccgtgacttggaagaggatccgtacctccctggtaatccccgtgaactgattgcctatagccagtatccccggccttcagacatccctcagtggaattctgacaagccgagtttaaaagatataaagatcatgggctattccatacgcaccatagactataggtatactgtgtgggttggcttcaatcctgatgaatttctagctaacttttctgacatccatgcaggggaactgtattttgtggattctgacccattgcaggatcacaatatgtataatgattcccaaggtggagatcttttccagttgttgatgccttgagttttgccaaccatggatggcaaatgtgatgtgctcccttccagctggtgagaggaggagttagagctggtcgttttgtgattacccataatattggaagcagcctgagggctagttaatccaaacatgcatcaacaatttggcctgagaatatgtaacagccaaaccttttcgtttagtctttattaaaatttataattggt

SEQ ID NO: 106039 - DNA, 375 bp, Homo sapiens
  Payload ID: 784
  Gene Symbol:
  Gene Name: AF111168.2
  ENST ID: ENST00000623612
  CDS Start-End: 1-375
atgactcttaaggagcatgctgccttcaagcatctgtttaacaaagcacatcttgcaccgcccttaatccattcaaccctgagtggatacagcacatgtttcagagagcacagggttgggggtaaggtcaccgatcaacaggatcccaaggcagaagaatttttcttagtacagaacaaaatgaaaagtctcccatgtctacctctttctacacagacacggcaaccatccgatttctcaatcttttccccacccttcccccctttctattccacaaaaccgccattgtcatcatggcccgttctcaatgagctgttgggtacacctcccagacggggtggtggctgggcagaggggctcctcacttcccagtag

SEQ ID NO: 106040 - DNA, 1569 bp, Homo sapiens
  Payload ID: 785
  Gene Symbol:
  Gene Name: AF131216.1
  ENST ID: ENST00000622929
  CDS Start-End: 699-1061
cttgtcgatggcgtcgatgtttgaatggaggagccacagctcctccgtattgtcctgccgggaggacaggatcaagtggtggcccgtcaggcacagggtgccctcgacagccgggtagaaaggccggtgcagcaccacattgtccacccgcggggtcttaatcagctccgcaaactccatgctcccccgcggccggagccagggaaccgagcccggtaggtgcgaggcggttaccccgccgcagggaagtagcggaaacacccggcgcggggctggcccgtggggcggggcgggccgggcggtgaggctgggcccgccccaggctgggtgggcgcggcgaggcctacagccgccggcaccggccgcggggagacaggggctggggctggacgaggcccaagcgcctctcccgcaccgcgcggttcaccaggcctaggactcggccacagagaacccctctccacaggcccaaggaccgccgctgccgttgggctccgggtcccgcgttggcaagcggagggcagtaggagaaagccgcctcagaatccgcttccacgccctggccgctagggactcctagcggaagtggctactcgctgctggagcccacaacaactccgggcggaagcagcaggtctcgaaactcggaagacgcggaagtcgcagccggaagttggtcctcgctaggtcctctggaaatgcctccggaaacacagccagaccagaagatgtgtgttcctacgagaaaaaaagcttgtctttgccttcacgccctcccgctgcctttcttaaccacctacaaatattccttatcagaagaggtccgggaagagggaggaggtccctgtcttgccttcctccgcttgagtagtatcccctccagaagctcttcagagcgtggggctgctgtaaattgtgataattgttatgcattagccctgaagacatggcaagtaggggatggaggcggtgactgtgaccttacggaatcctccaggggtcagggagggacacagggccactccacaggctctccgagagcgccgcgccacgaggtgtaacctggagcaagaaagaggaaaaacaggaatacctgtgagaggaacccaagtacatgcagtgcacagaagagcaagtcacttgacttgctggcggccaccccgttaatctgcagcagagcctggacttcagtctgcatctgtgaaacccagcgcatgggtgcgttggtcaccaccgcacagcctccccgtcagacacccacgtttcgccaaaaatttattcaaataattactcctttgcttgttcctttcccaccgcccacttctgacatttttattcaaaagtaggaaatagaagagaaatatgtttgagtgctggtctgctgtgacttcattgaccttttaaatcctcaccatctagtacctaagcacagcgagttggacaaactctcacagtattcacaaagtaaattgccacaacctcatcagctcatccaacacttgtccatgcttttgattttgtccttcttaaaatgtacccttcttaaaataaaccactttatagacttgt

SEQ ID NO: 106041 - DNA, 808 bp, Homo sapiens
  Payload ID: 786
  Gene Symbol:
  Gene Name: AF165138.7
  ENST ID: ENST00000400562
  CDS Start-End: 51-548
ggcaatcatatttttcaaagcagggcaacaagagagtgaagctggtcaaaatgaatcttttctgcatttcgctggagggctctatggatagcttatatgagccaatcccagagcaacaagctaaccaagaaaacatgtctagtagaactgattctcctatcccaccctttggagagagtgaacaaacaccaaacaatctcttcgtgggagtttctaatttagagaatgcaaaaccaaaaaagagaaagttattccggagatttatgtctgaaaataaaatatttgaaggaaaaactgtgaatgacaaaatctggcaggaacacagcaagcataagaatgattcccacatcagaaggccctgtcagctaaaagatctaaatgaagatgattttctaagtaacaacatacatacctatcaaggaaaaactctacaaggaacttcctatcaggtgacctctgaatgttggagtccatttcactatcaaagacatgttgagaccactgttgatgaactggtgagacatttcttcccagatgtaactatttaagtggatttcccatctcttttccactcattttaatgccacaagcactgttttctatagttctttattacttctgttttcagctgccacatggaagtgtttctaaagaacataaatagaggcttgtccttactgagtggttttctgaactaaaaggaacataaagcatttccttcaaagaaggaaaggttgttatataaaaaattttccctaaaatttagcaatttttcctgagataggaaaaaatttataatgttaaaaag

SEQ ID NO: 106042 - DNA, 1151 bp, Homo sapiens
  Payload ID: 786
  Gene Symbol:
  Gene Name: AF165138.7
  ENST ID: ENST00000435732
  CDS Start-End: 1-459
gagggctctatggatagcttatatgagccaatcccagagcaacaagctaaccaagaaaacatgtctagtagaactgattctcctatcccaccctttggagagagtgaacaaacaccaaacaatctcttcgtgggagtttctaatttagagaatgcaaaaccaaaaaagagaaagttattccggagatttatgtctgaaaataaaatatttgaaggaaaaactgtgaatgacaaaatctggcaggaacacagcaagcataagaatgattcccacatcagaaggccctgtcagctaaaagatctaaatgaagatgattttctaagtaacaacatacatacctatcaaggaaaaactctacaaggaacttcctatcaggtgacctctgaatgttggagtccatttcactatcaaagacatgttgagaccactgttgatgaactggctcaagaatttatgtaaagtaacaaaagaagatacttatgtagtcaaatgtccccaaggatatttgaggaacaatgaattcctgtgatccaatccttcaatttaaagatgaagggctgaagtgcagagaggagaagtggctcactcaagttcacatggccagtcacaaagcagattttcaaagcagaacaatcattagtcggcacacaagggcaggttcttactctaggttttcttaacatttcttgtgtatatgaaataaatattagataaaaatgtttttttactgtgtaattttccattcatagctcctcttcttgctaagaatccaatagatacttaataaaaattaattaatttgcatactggctcttaaatttcctattgttcataatttttggtcagctaggaggtgtacccagaaacagaaatgttcttatgagtagttctagaaacttcttcaaaatttcagagcagaggatattacgcaggaagtaagaaagatgtggcttctgtggccttttctcttaaatcaacacaacccccatttgcaatgctggtttgtgtaatcctggcaactcccagctagcttggcagtgtgtccacattcaaagactgacccaaagctataggtcagtgagcaaaaagcagtcttggcttcccctgcagaagtggagaaatggcagtgacattgcgacttcattatacta

SEQ ID NO: 106043 - DNA, 9390 bp, Homo sapiens
  Payload ID: 787
  Gene Symbol: AFF1
  Gene Name: AF4/FMR2 family, member 1
  Uniprot ID: P51825
  ENST ID: ENST00000307808
  CDS Start-End: 421-4053
ggcaatttcttttcctttctaactgtggcccgcgttgtgctgttgctgggcaggcgttgggcgccggcggtcttcgagcgtgggggcccgctggctttcccttctcagaaactgcgccgggggcgctcgcttgccccggattcggacgcggcgctccccgggctcgtctgaagtgcagatcgccgcagaggccccagtgcccggatgtccatcaggattagcgcgagccaatacgggccgagcccggggctgcgccgaggacgcccggggctcgagagcaggtagtcccgtaacatcggggcgccgcgccgggacgcgtccccgcccggctccgccaaatggtgagcgcggcgctggcagcagggcccgcggggtgaaggcgctcatggacggaagacccctggctctataagctgaattatggcagcccagtcaagtttgtacaatgacgacagaaacctgcttcgaattagagagaaggaaagacgcaaccaggaagcccaccaagagaaagaggcatttcctgaaaagattcccctttttggagagccctacaagacagcaaaaggtgatgagctgtctagtcgaatacagaacatgttgggaaactacgaagaagtgaaggagttccttagtactaagtctcacactcatcgcctggatgcttctgaaaataggttgggaaagccgaaatatcctttaattcctgacaaagggagcagcattccatccagctccttccacactagtgtccaccaccagtccattcacactcctgcgtctggaccactttctgttggcaacattagccacaatccaaagatggcgcagccaagaactgaaccaatgccaagtctccatgccaaaagctgcggcccaccggacagccagcacctgacccaggatcgccttggtcaggaggggttcggctctagtcatcacaagaaaggtgaccgaagagctgacggagaccactgtgcttcggtgacagattcggctccagagagggagctttctcccttaatctctttgccttccccagttccccctttgtcacctatacattccaaccagcaaactcttccccggacgcaaggaagcagcaaggttcatggcagcagcaataacagtaaaggctattgcccagccaaatctcccaaggacctagcagtgaaagtccatgataaagagacccctcaagacagtttggtggcccctgcccagccgccttctcagacatttccacctccctccctcccctcaaaaagtgttgcaatgcagcagaagcccacggcttatgtccggcccatggatggtcaagatcaggcccctagtgaatcccctgaactgaaaccactgccggaggactatcgacagcagacctttgaaaaaacagacttgaaagtgcctgccaaagccaagctcaccaaactgaagatgccttctcagtcagttgagcagacctactccaatgaagtccattgtgttgaagagattctgaaggaaatgacccattcatggccgcctcctttgacagcaatacatacgcctagtacagctgagccatccaagtttcctttccctacaaaggactctcagcatgtcagttctgtaacccaaaaccaaaaacaatatgatacatcttcaaaaactcactcaaattctcagcaaggaacgtcatccatgctcgaagacgaccttcagctcagtgacagtgaggacagtgacagtgaacaaaccccagagaagcctccctcctcatctgcacctccaagtgctccacagtcccttccagaaccagtggcatcagcacattccagcagtgcagagtcagaaagcaccagtgactcagacagttcctcagactcagagagcgagagcagttcaagtgacagcgaagaaaatgagcccctagaaaccccagctccggagcctgagcctccaacaacaaacaaatggcagctggacaactggctgaccaaagtcagccagccagctgcgccaccagagggccccaggagcacagagcccccacggcggcacccagagagtaagggcagcagcgacagtgccacgagtcaggagcattctgaatccaaagatcctccccctaaaagctccagcaaagccccccgggccccacccgaagccccccaccccggaaagaggagctgtcagaagtctccggcacagcaggagcccccacaaaggcaaaccgttggaaccaaacaacccaaaaaacctgtcaaggcctctgcccgggcaggttcacggaccagcctgcagggggaaagggagccagggcttcttccctatggctcccgagaccagacttccaaagacaagcccaaggtgaagacgaaaggacggccccgggccgcagcaagcaacgaacccaagccagcagtgcccccctccagtgagaagaagaagcacaagagctccctccctgccccctctaaggctctctcaggcccagaacccgcgaaggacaatgtggaggacaggacccctgagcactttgctcttgttcccctgactgagagccagggcccaccccacagtggcagcggcagcaggactagtggctgccgccaagccgtggtggtccaggaggacagccgcaaagacagactcccattgcctttgagagacaccaagctgctctcaccgctcagggacactcctcccccacaaagcttgatggtgaagatcaccctagacctgctctctcggataccccagcctcccgggaaggggagccgccagaggaaagcagaagataaacagccgcccgcagggaagaagcacagctctgagaagaggagctcagacagctcaagcaagttggccaaaaagagaaagggtgaagcagaaagagactgtgataacaagaaaatcagactggagaaggaaatcaaatcacagtcatcttcatcttcatcctcccacaaagaatcttctaaaacaaagccctccaggccctcctcacagtcctcaaagaaggaaatgctccccccgccacccgtgtcctcgtcctcccagaagccagccaagcctgcacttaagaggtcaaggcgggaagcagacacctgtggccaggaccctcccaaaagtgccagcagtaccaagagcaaccacaaagactcttccattcccaagcagagaagagtagaggggaagggctccagaagctcctcggagcacaagggttcttccggagatactgcaaatccttttccagtgccttctttgccaaatggtaactctaaaccagggaagcctcaagtgaagtttgacaaacaacaagcagaccttcacatgagggaggcaaaaaagatgaagcagaaagcagagttaatgacggacagggttggaaaggcttttaagtacctggaagccgtcttgtccttcattgagtgcggaattgccacagagtctgaaagccagtcatccaagtcagcttactctgtctactcagaaactgtagatctcattaaattcataatgtcattaaaatccttctcagatgccacagcgccaacacaagagaaaatatttgctgttttatgcatgcgttgccagtccattttgaacatggcgatgtttcgttgtaaaaaagacatagcaataaagtattctcgtactcttaataaacacttcgagagttcttccaaagtcgcccaggcaccttctccatgcattgcaagcacaggcacaccatcccctctttccccaatgccttctcctgccagctccgtagggtcccagtcaagtgctggcagtgtggggagcagtggggtggctgccactatcagcaccccagtcaccatccagaatatgacatcttcctatgtcaccatcacatcccatgttcttaccgcctttgacctttgggaacaggccgaggccctcacgaggaagaataaagaattctttgctcggctcagcacaaatgtgtgcaccttggccctcaacagcagtttggtggacctggtgcactatacacgacagggttttcagcagctacaagaattaaccaaaacaccttaatggagccccaggttgattcaatgccttgggaactatttttgcacattggaagcctcaaaaacagtccagacatttgtttcatcaggacaccaaactctaaaaaagaagcaccacgagatggccaggacatttgtccacttaaactctcaacaacagtgtgatcattggttggacactgtggttatgcagaagcagagatgaggaggctggccccagagatgatcttgcccttcctaactaaaggacagaagtgcaatttagcttaaatgggtgtatgaatggtctagaaacatttctattttttttttaaaccagcaggatacaagttgcaaatgaaatgaggagaaacagtttcaactctgaaagtgaatttcacgtcatctcagtagccacgctagtccattcccagaaggaaatttttttttttaacaatgacttttggtaaagggttttgtggatgattttttttcttttgagttttgggagaaatatttgtttagtaacttctaatggccatctgtaaaccataagtaatgaaggactccactgtgccccactttctgccaatgaacagtggcttgataataccaagtattgttgtaatttataaaattgaaggcaacccccgctcctgccgcccccaatctccccattgcctagagcgctgcacattgaccccagctctgacttctcattactgtgctgaaagtcagcccacgtcggagcggtgaggaggagccacagcacatggggtgccacctcgaggtctgcacaggaggacttggcgctgccatttcctacccctgccatttcccacccctgcttcagcgaaagggactctctaacagggcagtcactgttgactctattctgaatttcctcccttggggaagaagggaaccaacatttatacctgaccagatggctaaagtgcttttaaagttttgtttaagtagagctggaatttgaggtgctgatctgtggtctacagttatgtggtaactcatgttgtccagccaactcagagtttcgtcagtgaacaagaaacatgaaatctgcttcttagagaggctatatttttctgctacaaatattttatatttatagcaaaactagactttcagagtccttgattgtctaggggaagttaactccctgagaggatgtagagatttggggtggttgattagacttttgaaaaactcatcaccacatgccttcactccagagtgttctcagctagatttgatttggttgaggaggaactgtggccctccgtaagttattgccatagtgtatgcattaaaccaagtccattttgaatgacctaaaatgaagtaacacaatcagaaatcccatgtgcccataagcacagatttttctttttcattgaaactttaaaggttattattggaaacattactttgagtgcagtgtttttaaaagccaattcttttttatcccttttagaagtagaatttgcacacttactacaattgaggagtgtcatctctataactttttctccgcctttgtcccattctgcccctgtacatgtttcctaccaagcatgtttcacattttcctattagtggaggagggagaaccatatttatttataatgaagacatctaagatccctatgatgaatgcaggaactctcttggtagtttgtaaatacacaaagggatgtgtcgagggatgggagcgatgcttatctctcacagtgtgagtggtctgtgtgaggctgttccttcagtttcttctccagactgttctttggttgtcactaagtcagaggtctggtccctcatgtttaggtgaaagccagagaatgacagctgtagtcatatctgagcataagaccttgatgtgtgattcctgatgaccggtttcatttattcatgttataaagcaaagccctggtcctttttaaactactagttttaaaaacctgtgttaaatgaacagtaattgcctggtaggtttggtgtgtgtgtagcattgtgtgtccatctgttatatgtaaaggacaaggcaccagaatcaggctttatttcgatattgaagatgttatttaacatctttcttttttccttactcccttagccatcccctccccttttgtcctatcattccctagaacaagccacctgtcaattgtgaagggttgtgttctttatggcaggttctatgcagattgtgccagagcatgtgcgtgttctgttggcaagccacagtgctcccttgactgaagacatttccaggtagatttctcagccagctctaaaacagattgctttttcagtggccttactctttgtgggtttttttttttttctctgaacttgatataaagattttatttgtcccttgaaaaagtaacaaatgtgcatagatcaatttgtactactttggtcattggatatttctgatccttattgcattgtacctaaaggagagtaactaatggtaacctttttaatagagtatgtgaaaggtagtggctgatgaatccttaacgttcatagggtctttttgctgttacggttgtatatagaggtctgaaggatttttaaaatgatttgcactttttcactgcatgcttacaattcccaaaggcaaaatctgtactgaggtagatcatttgaaagggctagattataaaattaagccttagagtatggaaagttcttataacaataatagtacacacttcagagtaagacaaatgcaaagcatcttaaggagtgaaaatagagtgtaaatcttgcctttggcactacaaggtgtgtgtgtgtgtgtgtgtgtgtgtgtgtgtctttagtaggaaatggaagaacactgttttattttttaaagtgtttaatgtttctgtcctttctgtgaattattgaatttaagagccctgctaaataatgaaaaaacactttactaaaatttatcaaattatactgggttcggattgtgaaaacattggccacctagtagcagtggtgaggagtgggagggcccagcaagcatttatcagaaatagaatcacaataggaggagaatttgactgtctgatattatgatttgattacaatactgaatgggaaaagtatctaatattttgtaacaaaaagaccttcatattatctgttttgaccaaaatatgtagctatttcccttacacagattggaccgcacttatctcccttgtcctgtatcctttaatttcaggtctcaggatgtttagaaagctaaaaccccctacccctttctggctgaaaacttgccttatttggtatcttacacattaatgttactagcatcaggagcttactgttttattatgattcatcttcagtaatttttagaagcaagaagaaagccattgtgtcctctacaattaacaaaacttatctctgatatacaaagggatataaatatatacacttaaatagagaaaaagaggttgattgaattgtgcctttgagtgaacccagtttttaaataccgctgtgtttgtttcgccatggcttcagggatgctacatggctcttgcaccttttactcctctgctttatgaagtttgagttgtatttgtgcatcttaaagtaggttgaggcttgaggctgggctttcgggtttttttgttttttgttttgttttgttttgttttgttttcttgtacttaaacctgcttgcttcctaccacagattctttattttcccaaacactacaaaaaaacttttaaaactttgccatttcatctgtttacactctttgccactgattagcagtatttaaatcttgcaagaatattttgtgctttctttagaaacacaagagtatagatttttctcactgaaaagtgagagttacgcattgcagccatgaagggatgctaggatcaattatggcagtaccttttttcccctcctgttcttgagccagttgtctcttttgttttgggtcccacttaggattaatggatgtaaggtattttcctgtgcctttattttgtgtcattctattggaaggaggtgtaacggcagaatagcatcgtgttgggggttttccttcaaacactgcaagtgatattgccaccatgtgaacctcaaatatgcaatccagttgtgttggtttctcggtgacttggagtgttcatctcttcatgaattgtgagcactgaccatgttcttcagttcttaattatggtgagttgacaaataccaactactgcttttctttaggtggctataaatttcttactgtcaggaggaaatgacattatattctgttccactgaacgtcagagatcagcaggcactgtactgggtagagaagtgcctatacttctctacctaagagggcaggagggaaaccctacagctccttgtgagcctatatattagtatatcggcctggagaggacaagggaataagaccactcatagtgaggctggccaagctgcactggtcggaccaggcagtggctgacctaaggaagacaacttgctttgcttaaaagtagattttttaagcaatgcttaacacaggcagcattcacctttgttcaggccatcgacatgtattgttaaaattactgcatatccccctcagatatcaagtatacactgttcatgttggggttgtgtgtgtgtatgtgtgtatgtacgcacgcatgtgtcccaaatcttgttttaattttttttttctgaatgtgatcatgttttggatgatacctgagcagggttgccttttttttatttattaccattatatattatattatattatattatatattttttgctttcttataactttggaggaaagtcaaatcttggtattattaaaattgttttaaaaaggagtaaattttccagttgataaatgaaaatcactggcctatgtttaataagtttttctttaattactgtggaataacgtgccagctatcatcaacacaatgattttgtacatagggtagggaagcagtgatgctctcaatgggaagatgtgcaacacaaattaaggggaactccatgtattttacctacttcagcaatggaactgcaacttggggctttgtgaataaaatttagctgccttgtatagtcgtttgaaagaatatgtgatctgtgagagaattatagtttttttttagaagaaaaatctgcaaaagatctttccaaagacaatgtgccacagatcttttgttctctgtaatgaggattaattgctgtttaaacaaaaatgtaattgttcatctttaaattctttccttttcataagaggatcaagctgtaaaaaaacaaaaaaattaataaaaatttcgagaaatc

SEQ ID NO: 106044 - DNA, 9285 bp, Homo sapiens
  Payload ID: 787
  Gene Symbol: AFF1
  Gene Name: AF4/FMR2 family, member 1
  Uniprot ID: P51825
  ENST ID: ENST00000395146
  CDS Start-End: 276-3932
gagcttgccagccagctagcgagcgacgggcgcgcgcggcccctgcgcactcggccgccgcctgcgcgcgttgcggccgcagctgcacctttgcctccgcggttccgcagccgagccccgggaggaggcgctcccctgcgtcgtccgcacttgcgccctttcccaccgcaacaggtcaggggagggcggaggtgacgagggcgcccgacccgggactagaggacggaagggtctggaagatgaacagactagccactttgcattgactggaaacaatggcatttacagaaagagtcaacagcagtggcaacagtttgtacaatgacgacagaaacctgcttcgaattagagagaaggaaagacgcaaccaggaagcccaccaagagaaagaggcatttcctgaaaagattcccctttttggagagccctacaagacagcaaaaggtgatgagctgtctagtcgaatacagaacatgttgggaaactacgaagaagtgaaggagttccttagtactaagtctcacactcatcgcctggatgcttctgaaaataggttgggaaagccgaaatatcctttaattcctgacaaagggagcagcattccatccagctccttccacactagtgtccaccaccagtccattcacactcctgcgtctggaccactttctgttggcaacattagccacaatccaaagatggcgcagccaagaactgaaccaatgccaagtctccatgccaaaagctgcggcccaccggacagccagcacctgacccaggatcgccttggtcaggaggggttcggctctagtcatcacaagaaaggtgaccgaagagctgacggagaccactgtgcttcggtgacagattcggctccagagagggagctttctcccttaatctctttgccttccccagttccccctttgtcacctatacattccaaccagcaaactcttccccggacgcaaggaagcagcaaggttcatggcagcagcaataacagtaaaggctattgcccagccaaatctcccaaggacctagcagtgaaagtccatgataaagagacccctcaagacagtttggtggcccctgcccagccgccttctcagacatttccacctccctccctcccctcaaaaagtgttgcaatgcagcagaagcccacggcttatgtccggcccatggatggtcaagatcaggcccctagtgaatcccctgaactgaaaccactgccggaggactatcgacagcagacctttgaaaaaacagacttgaaagtgcctgccaaagccaagctcaccaaactgaagatgccttctcagtcagttgagcagacctactccaatgaagtccattgtgttgaagagattctgaaggaaatgacccattcatggccgcctcctttgacagcaatacatacgcctagtacagctgagccatccaagtttcctttccctacaaaggactctcagcatgtcagttctgtaacccaaaaccaaaaacaatatgatacatcttcaaaaactcactcaaattctcagcaaggaacgtcatccatgctcgaagacgaccttcagctcagtgacagtgaggacagtgacagtgaacaaaccccagagaagcctccctcctcatctgcacctccaagtgctccacagtcccttccagaaccagtggcatcagcacattccagcagtgcagagtcagaaagcaccagtgactcagacagttcctcagactcagagagcgagagcagttcaagtgacagcgaagaaaatgagcccctagaaaccccagctccggagcctgagcctccaacaacaaacaaatggcagctggacaactggctgaccaaagtcagccagccagctgcgccaccagagggccccaggagcacagagcccccacggcggcacccagagagtaagggcagcagcgacagtgccacgagtcaggagcattctgaatccaaagatcctccccctaaaagctccagcaaagccccccgggccccacccgaagccccccaccccggaaagaggagctgtcagaagtctccggcacagcaggagcccccacaaaggcaaaccgttggaaccaaacaacccaaaaaacctgtcaaggcctctgcccgggcaggttcacggaccagcctgcagggggaaagggagccagggcttcttccctatggctcccgagaccagacttccaaagacaagcccaaggtgaagacgaaaggacggccccgggccgcagcaagcaacgaacccaagccagcagtgcccccctccagtgagaagaagaagcacaagagctccctccctgccccctctaaggctctctcaggcccagaacccgcgaaggacaatgtggaggacaggacccctgagcactttgctcttgttcccctgactgagagccagggcccaccccacagtggcagcggcagcaggactagtggctgccgccaagccgtggtggtccaggaggacagccgcaaagacagactcccattgcctttgagagacaccaagctgctctcaccgctcagggacactcctcccccacaaagcttgatggtgaagatcaccctagacctgctctctcggataccccagcctcccgggaaggggagccgccagaggaaagcagaagataaacagccgcccgcagggaagaagcacagctctgagaagaggagctcagacagctcaagcaagttggccaaaaagagaaagggtgaagcagaaagagactgtgataacaagaaaatcagactggagaaggaaatcaaatcacagtcatcttcatcttcatcctcccacaaagaatcttctaaaacaaagccctccaggccctcctcacagtcctcaaagaaggaaatgctccccccgccacccgtgtcctcgtcctcccagaagccagccaagcctgcacttaagaggtcaaggcgggaagcagacacctgtggccaggaccctcccaaaagtgccagcagtaccaagagcaaccacaaagactcttccattcccaagcagagaagagtagaggggaagggctccagaagctcctcggagcacaagggttcttccggagatactgcaaatccttttccagtgccttctttgccaaatggtaactctaaaccagggaagcctcaagtgaagtttgacaaacaacaagcagaccttcacatgagggaggcaaaaaagatgaagcagaaagcagagttaatgacggacagggttggaaaggcttttaagtacctggaagccgtcttgtccttcattgagtgcggaattgccacagagtctgaaagccagtcatccaagtcagcttactctgtctactcagaaactgtagatctcattaaattcataatgtcattaaaatccttctcagatgccacagcgccaacacaagagaaaatatttgctgttttatgcatgcgttgccagtccattttgaacatggcgatgtttcgttgtaaaaaagacatagcaataaagtattctcgtactcttaataaacacttcgagagttcttccaaagtcgcccaggcaccttctccatgcattgcaagaagcacaggcacaccatcccctctttccccaatgccttctcctgccagctccgtagggtcccagtcaagtgctggcagtgtggggagcagtggggtggctgccactatcagcaccccagtcaccatccagaatatgacatcttcctatgtcaccatcacatcccatgttcttaccgcctttgacctttgggaacaggccgaggccctcacgaggaagaataaagaattctttgctcggctcagcacaaatgtgtgcaccttggccctcaacagcagtttggtggacctggtgcactatacacgacagggttttcagcagctacaagaattaaccaaaacaccttaatggagccccaggttgattcaatgccttgggaactatttttgcacattggaagcctcaaaaacagtccagacatttgtttcatcaggacaccaaactctaaaaaagaagcaccacgagatggccaggacatttgtccacttaaactctcaacaacagtgtgatcattggttggacactgtggttatgcagaagcagagatgaggaggctggccccagagatgatcttgcccttcctaactaaaggacagaagtgcaatttagcttaaatgggtgtatgaatggtctagaaacatttctattttttttttaaaccagcaggatacaagttgcaaatgaaatgaggagaaacagtttcaactctgaaagtgaatttcacgtcatctcagtagccacgctagtccattcccagaaggaaatttttttttttaacaatgacttttggtaaagggttttgtggatgattttttttcttttgagttttgggagaaatatttgtttagtaacttctaatggccatctgtaaaccataagtaatgaaggactccactgtgccccactttctgccaatgaacagtggcttgataataccaagtattgttgtaatttataaaattgaaggcaacccccgctcctgccgcccccaatctccccattgcctagagcgctgcacattgaccccagctctgacttctcattactgtgctgaaagtcagcccacgtcggagcggtgaggaggagccacagcacatggggtgccacctcgaggtctgcacaggaggacttggcgctgccatttcctacccctgccatttcccacccctgcttcagcgaaagggactctctaacagggcagtcactgttgactctattctgaatttcctcccttggggaagaagggaaccaacatttatacctgaccagatggctaaagtgcttttaaagttttgtttaagtagagctggaatttgaggtgctgatctgtggtctacagttatgtggtaactcatgttgtccagccaactcagagtttcgtcagtgaacaagaaacatgaaatctgcttcttagagaggctatatttttctgctacaaatattttatatttatagcaaaactagactttcagagtccttgattgtctaggggaagttaactccctgagaggatgtagagatttggggtggttgattagacttttgaaaaactcatcaccacatgccttcactccagagtgttctcagctagatttgatttggttgaggaggaactgtggccctccgtaagttattgccatagtgtatgcattaaaccaagtccattttgaatgacctaaaatgaagtaacacaatcagaaatcccatgtgcccataagcacagatttttctttttcattgaaactttaaaggttattattggaaacattactttgagtgcagtgtttttaaaagccaattcttttttatcccttttagaagtagaatttgcacacttactacaattgaggagtgtcatctctataactttttctccgcctttgtcccattctgcccctgtacatgtttcctaccaagcatgtttcacattttcctattagtggaggagggagaaccatatttatttataatgaagacatctaagatccctatgatgaatgcaggaactctcttggtagtttgtaaatacacaaagggatgtgtcgagggatgggagcgatgcttatctctcacagtgtgagtggtctgtgtgaggctgttccttcagtttcttctccagactgttctttggttgtcactaagtcagaggtctggtccctcatgtttaggtgaaagccagagaatgacagctgtagtcatatctgagcataagaccttgatgtgtgattcctgatgaccggtttcatttattcatgttataaagcaaagccctggtcctttttaaactactagttttaaaaacctgtgttaaatgaacagtaattgcctggtaggtttggtgtgtgtgtagcattgtgtgtccatctgttatatgtaaaggacaaggcaccagaatcaggctttatttcgatattgaagatgttatttaacatctttcttttttccttactcccttagccatcccctccccttttgtcctatcattccctagaacaagccacctgtcaattgtgaagggttgtgttctttatggcaggttctatgcagattgtgccagagcatgtgcgtgttctgttggcaagccacagtgctcccttgactgaagacatttccaggtagatttctcagccagctctaaaacagattgctttttcagtggccttactctttgtgggtttttttttttttctctgaacttgatataaagattttatttgtcccttgaaaaagtaacaaatgtgcatagatcaatttgtactactttggtcattggatatttctgatccttattgcattgtacctaaaggagagtaactaatggtaacctttttaatagagtatgtgaaaggtagtggctgatgaatccttaacgttcatagggtctttttgctgttacggttgtatatagaggtctgaaggatttttaaaatgatttgcactttttcactgcatgcttacaattcccaaaggcaaaatctgtactgaggtagatcatttgaaagggctagattataaaattaagccttagagtatggaaagttcttataacaataatagtacacacttcagagtaagacaaatgcaaagcatcttaaggagtgaaaatagagtgtaaatcttgcctttggcactacaaggtgtgtgtgtgtgtgtgtgtgtgtgtgtgtgtctttagtaggaaatggaagaacactgttttattttttaaagtgtttaatgtttctgtcctttctgtgaattattgaatttaagagccctgctaaataatgaaaaaacactttactaaaatttatcaaattatactgggttcggattgtgaaaacattggccacctagtagcagtggtgaggagtgggagggcccagcaagcatttatcagaaatagaatcacaataggaggagaatttgactgtctgatattatgatttgattacaatactgaatgggaaaagtatctaatattttgtaacaaaaagaccttcatattatctgttttgaccaaaatatgtagctatttcccttacacagattggaccgcacttatctcccttgtcctgtatcctttaatttcaggtctcaggatgtttagaaagctaaaaccccctacccctttctggctgaaaacttgccttatttggtatcttacacattaatgttactagcatcaggagcttactgttttattatgattcatcttcagtaatttttagaagcaagaagaaagccattgtgtcctctacaattaacaaaacttatctctgatatacaaagggatataaatatatacacttaaatagagaaaaagaggttgattgaattgtgcctttgagtgaacccagtttttaaataccgctgtgtttgtttcgccatggcttcagggatgctacatggctcttgcaccttttactcctctgctttatgaagtttgagttgtatttgtgcatcttaaagtaggttgaggcttgaggctgggctttcgggtttttttgttttttgttttgttttgttttgttttgttttcttgtacttaaacctgcttgcttcctaccacagattctttattttcccaaacactacaaaaaaacttttaaaactttgccatttcatctgtttacactctttgccactgattagcagtatttaaatcttgcaagaatattttgtgctttctttagaaacacaagagtatagatttttctcactgaaaagtgagagttacgcattgcagccatgaagggatgctaggatcaattatggcagtaccttttttcccctcctgttcttgagccagttgtctcttttgttttgggtcccacttaggattaatggatgtaaggtattttcctgtgcctttattttgtgtcattctattggaaggaggtgtaacggcagaatagcatcgtgttgggggttttccttcaaacactgcaagtgatattgccaccatgtgaacctcaaatatgcaatccagttgtgttggtttctcggtgacttggagtgttcatctcttcatgaattgtgagcactgaccatgttcttcagttcttaattatggtgagttgacaaataccaactactgcttttctttaggtggctataaatttcttactgtcaggaggaaatgacattatattctgttccactgaacgtcagagatcagcaggcactgtactgggtagagaagtgcctatacttctctacctaagagggcaggagggaaaccctacagctccttgtgagcctatatattagtatatcggcctggagaggacaagggaataagaccactcatagtgaggctggccaagctgcactggtcggaccaggcagtggctgacctaaggaagacaacttgctttgcttaaaagtagattttttaagcaatgcttaacacaggcagcattcacctttgttcaggccatcgacatgtattgttaaaattactgcatatccccctcagatatcaagtatacactgttcatgttggggttgtgtgtgtgtatgtgtgtatgtacgcacgcatgtgtcccaaatcttgttttaattttttttttctgaatgtgatcatgttttggatgatacctgagcagggttgccttttttttatttattaccattatatattatattatattatattatatattttttgctttcttataactttggaggaaagtcaaatcttggtattattaaaattgttttaaaaaggagtaaattttccagttgataaatgaaaatcactggcctatgtttaataagtttttctttaattactgtggaataacgtgccagctatcatcaacacaatgattttgtacatagggtagggaagcagtgatgctctcaatgggaagatgtgcaacacaaattaaggggaactccatgtattttacctacttcagcaatggaactgcaacttggggctttgtgaataaaatttagctgccttgtatagtcgtttgaaagaatatgtgatctgtgagagaattatagtttttttttagaagaaaaatctgcaaaagatctttccaaagacaatgtgccacagatcttttgttctctgtaatgaggattaattgctgtttaaacaaaaatgtaattgttcatctttaaattctttccttttcataagaggatcaagctgtaaaaaaacaaaaaaattaataaaaatttcgagaaatcattggggttgaatcca

SEQ ID NO: 106045 - DNA, 1478 bp, Homo sapiens
  Payload ID: 787
  Gene Symbol: AFF1
  Gene Name: AF4/FMR2 family, member 1
  ENST ID: ENST00000503477
  CDS Start-End: 228-1478
actcggccgccgcctgcgcgcgttgcggccgcagctgcacctttgcctccgcggttccgcagccgagccccgggaggaggcgctcccctgcgtcgtccgcacttgcgccctttcccaccgcaacaggtcaggggagggcggaggtgacgagggcgcccgacccgggactagaggacggaagggtctggaagatgaacagactagccactttgcattgactggaaacaatggcatttacagaaagagtcaacagcagtggcaacagtttgtacaatgacgacagaaacctgcttcgaattagagagaaggaaagacgcaaccaggaagcccaccaagagaaagaggcatttcctgaaaagattcccctttttggagagccctacaagacagcaaaaggtgatgagctgtctagtcgaatacagaacatgttgggaaactacgaagaagtgaaggagttccttagtactaagtctcacactcatcgcctggatgcttctgaaaataggttgggaaagccgaaatatcctttaattcctgacaaagggagcagcattccatccagctccttccacactagtgtccaccaccagtccattcacactcctgcgtctggaccactttctgttggcaacattagccacaatccaaagatggcgcagccaagaactgaaccaatgccaagtctccatgccaaaagctgcggcccaccggacagccagcacctgacccaggatcgccttggtcaggaggggttcggctctagtcatcacaagaaaggtgaccgaagagctgacggagaccactgtgcttcggtgacagattcggctccagagagggagctttctcccttaatctctttgccttccccagttccccctttgtcacctatacattccaaccagcaaactcttccccggacgcaaggaagcagcaaggttcatggcagcagcaataacagtaaaggctattgcccagccaaatctcccaaggacctagcagtgaaagtccatgataaagagacccctcaagacagtttggtggcccctgcccagccgccttctcagacatttccacctccctccctcccctcaaaaagtgttgcaatgcagcagaagcccacggcttatgtccggcccatggatggtcaagatcaggcccctagtgaatcccctgaactgaaaccactgccggaggactatcgacagcagacctttgaaaaaacagacttgaaagtgcctgccaaagccaagctcaccaaactgaagatgccttctcagtcagttgagcagacctactccaatgaagtccattgtgttgaagagattctgaaggactctcagcatgtcagttctgtaacccaaaaccaaaaacaatatgatacatcttcaaaaactcactcaaattctcagcaaggaacgtcatccatgctcgaagacgaccttcagctcagtgacagtgaggacagtgacagtgaacaa

SEQ ID NO: 106046 - DNA, 638 bp, Homo sapiens
  Payload ID: 787
  Gene Symbol: AFF1
  Gene Name: AF4/FMR2 family, member 1
  ENST ID: ENST00000511722
  CDS Start-End: 228-638
cgaggacgcccggggctcgagagcaggtagtcccgtaacatcggggcgccgcgccgggacgcgtccccgcccggctccgccaaatggtgagcgcggcgctggcagcagggcccgcggggtgaaggcgctcatggacggaagacccctggctctataagctgaattatggcagcccagtcaagacctactccaatgaagtccattgtgttgaagagattctgaaggaaatgacccattcatggccgcctcctttgacagcaatacatacgcctagtacagctgagccatccaagtttcctttccctacaaaggactctcagcatgtcagttctgtaacccaaaaccaaaaacaatatgatacatcttcaaaaactcactcaaattctcagcaaggaacgtcatccatgctcgaagacgaccttcagctcagtgacagtgaggacagtgacagtgaacaaaccccagagaagcctccctcctcatctgcacctccaagtgctccacagtcccttccagaaccagtggcatcagcacattccagcagtgcagagtcagaaagcaccagtgactcagacagttcctcagactcagagagcgagagcagttcaagtgacagcgaagaaaatgagcccctagaa

SEQ ID NO: 106047 - DNA, 582 bp, Homo sapiens
  Payload ID: 787
  Gene Symbol: AFF1
  Gene Name: AF4/FMR2 family, member 1
  ENST ID: ENST00000514970
  CDS Start-End: 1-582
acagtcagcatttcctttaatgcggtggttccctctggtctcggcccgagttctcatgccaggcagcggcagctgtggtaccaactgcctgggagccccgtggcgctgttgcagacctactccaatgaagtccattgtgttgaagagattctgaaggaaatgacccattcatggccgcctcctttgacagcaatacatacgcctagtacagctgagccatccaagtttcctttccctacaaaggactctcagcatgtcagttctgtaacccaaaaccaaaaacaatatgatacatcttcaaaaactcactcaaattctcagcaaggaacgtcatccatgctcgaagacgaccttcagctcagtgacagtgaggacagtgacagtgaacaaaccccagagaagcctccctcctcatctgcacctccaagtgctccacagtcccttccagaaccagtggcatcagcacattccagcagtgcagagtcagaaagcaccagtgactcagacagttcctcagactcagagagcgagagcagttcaagtgacagcgaagaaaatgagcccctagaaaccccagctccg

SEQ ID NO: 106048 - DNA, 463 bp, Homo sapiens
  Payload ID: 787
  Gene Symbol: AFF1
  Gene Name: AF4/FMR2 family, member 1
  ENST ID: ENST00000511442
  CDS Start-End: 307-463
agtctgagaggcgtggagaattttgcttgtgcaagattatttcagagcaaggtcgtgcggtgtgtgtagaagatgaacagactagccactttgcattgactggaaacaatggcatttacagaaagagtcaacagcagtggcaacagtttgtacaatgacgacagaaacctgcttcgaattagagagaaggaaagacgcaaccaggaagcccaccaagagaaagaggcatttcctgaaaagattcccctttttggagagccctacaagacagcaaaaggtgatgagctgtctagtcgaatacagaacatgttgggaaactacgaagaagtgaaggagttccttagtactaagtctcacactcatcgcctggatgcttctgaaaataggttgggaaagccgaaatatcctttaattcctgacaaagggagcagcattccatccagctccttccacactagtgtcc

SEQ ID NO: 106049 - DNA, 1486 bp, Homo sapiens
  Payload ID: 787
  Gene Symbol: AFF1
  Gene Name: AF4/FMR2 family, member 1
  ENST ID: ENST00000507468
  CDS Start-End: 267-1486
agccagctagcgagcgacgggcgcgcgcggcccctgcgcactcggccgccgcctgcgcgcgttgcggccgcagctgcacctttgcctccgcggttccgcagccgagccccgggaggaggcgctcccctgcgtcgtccgcacttgcgccctttcccaccgcaacaggtcaggggagggcggaggtgacgagggcgcccgacccgggactagaggacggaagggtctggaagatgaacagactagccactttgcattgactggaaacaatggcatttacagaaagagtcaacagcagtggcaacagtttgtacaatgacgacagaaacctgcttcgaattagagagaaggaaagacgcaaccaggaagcccaccaagagaaagaggcatttcctgaaaagattcccctttttggagagccctacaagacagcaaaaggtgatgagctgtctagtcgaatacagaacatgttgggaaactacgaagaagtgaaggagttccttagtactaagtctcacactcatcgcctggatgcttctgaaaataggttgggaaagccgaaatatcctttaattcctgacaaagggagcagcattccatccagctccttccacactagtgtccaccaccagtccattcacactcctgcgtctggaccactttctgttggcaacattagccacaatccaaagatggcgcagccaagaactgaaccaatgccaagtctccatgccaaaagctgcggcccaccggacagccagcacctgacccaggatcgccttggtcaggaggggttcggctctagtcatcacaagaaaggtgaccgaagagctgacggagaccactgtgcttcggtgacagattcggctccagagagggagctttctcccttaatctctttgccttccccagttccccctttgtcacctatacattccaaccagcaaactcttccccggacgcaaggaagcagcaaggttcatggcagcagcaataacagtaaaggctattgcccagccaaatctcccaaggacctagcagtgaaagtccatgataaagagacccctcaagacagtttggtggcccctgcccagccgccttctcagacatttccacctccctccctcccctcaaaaagtgttgcaatgcagcagaagcccacggcttatgtccggcccatggatggtcaagatcaggcccctagtgaatcccctgaactgaaaccactgccggaggactatcgacagcagacctttgaaaaaacagacttgaaagtgcctgccaaagccaagctcaccaaactgaagatgccttctcagtcagttgagacctactccaatgaagtccattgtgttgaagagattctgaaggaaatgacccattcatggccgcctcctttgacagcaatacatacgcctagtacagctgagccatccaagtttcctttccctacaaaggactctcagcatgtcagttctgtaacccaaaa

SEQ ID NO: 106050 - DNA, 3644 bp, Homo sapiens
  Payload ID: 787
  Gene Symbol: AFF1
  Gene Name: AF4/FMR2 family, member 1
  ENST ID: ENST00000544085
  CDS Start-End: 13-3630
ataagctgaattatggcagcccagtcaagtttgtacaatgacgacagaaacctgcttcgaattagagagaaggaaagacgcaaccaggaagcccaccaagagaaagaggcatttcctgaaaagattcccctttttggagagccctacaagacagcaaaaggtgatgagctgtctagtcgaatacagaacatgttgggaaactacgaagaagtgaaggagttccttagtactaagtctcacactcatcgcctggatgcttctgaaaataggttgggaaagccgaaatatcctttaattcctgacaaagggagcagcattccatccagctccttccacactagtgtccaccaccagtccattcacactcctgcgtctggaccactttctgttggcaacattagccacaatccaaagatggcgcagccaagaactgaaccaatgccaagtctccatgccaaaagctgcggcccaccggacagccagcacctgacccaggatcgccttggtcaggaggggttcggctctagtcatcacaagaaaggtgaccgaagagctgacggagaccactgtgcttcggtgacagattcggctccagagagggagctttctcccttaatctctttgccttccccagttccccctttgtcacctatacattccaaccagcaaactcttccccggacgcaaggaagcagcaaggttcatggcagcagcaataacagtaaaggctattgcccagccaaatctcccaaggacctagcagtgaaagtccatgataaagagacccctcaagacagtttggtggcccctgcccagccgccttctcagacatttccacctccctccctcccctcaaaaagtgttgcaatgcagcagaagcccacggcttatgtccggcccatggatggtcaagatcaggcccctagtgaatcccctgaactgaaaccactgccggaggactatcgacagcagacctttgaaaaaacagacttgaaagtgcctgccaaagccaagctcaccaaactgaagatgccttctcagtcagttgagcagacctactccaatgaagtccattgtgttgaagagattctgaaggaaatgacccattcatggccgcctcctttgacagcaatacatacgcctagtacagctgagccatccaagtttcctttccctacaaaggactctcagcatgtcagttctgtaacccaaaaccaaaaacaatatgatacatcttcaaaaactcactcaaattctcagcaaggaacgtcatccatgctcgaagacgaccttcagctcagtgacagtgaggacagtgacagtgaacaaaccccagagaagcctccctcctcatctgcacctccaagtgctccacagtcccttccagaaccagtggcatcagcacattccagcagtgcagagtcagaaagcaccagtgactcagacagttcctcagactcagagagcgagagcagttcaagtgacagcgaagaaaatgagcccctagaaaccccagctccggagcctgagcctccaacaacaaacaaatggcagctggacaactggctgaccaaagtcagccagccagctgcgccaccagagggccccaggagcacagagcccccacggcggcacccagagagtaagggcagcagcgacagtgccacgagtcaggagcattctgaatccaaagatcctccccctaaaagctccagcaaagccccccgggccccacccgaagccccccaccccggaaagaggagctgtcagaagtctccggcacagcaggagcccccacaaaggcaaaccgttggaaccaaacaacccaaaaaacctgtcaaggcctctgcccgggcaggttcacggaccagcctgcagggggaaagggagccagggcttcttccctatggctcccgagaccagacttccaaagacaagcccaaggtgaagacgaaaggacggccccgggccgcagcaagcaacgaacccaagccagcagtgcccccctccagtgagaagaagaagcacaagagctccctccctgccccctctaaggctctctcaggcccagaacccgcgaaggacaatgtggaggacaggacccctgagcactttgctcttgttcccctgactgagagccagggcccaccccacagtggcagcggcagcaggactagtggctgccgccaagccgtggtggtccaggaggacagccgcaaagacagactcccattgcctttgagagacaccaagctgctctcaccgctcagggacactcctcccccacaaagcttgatggtgaagatcaccctagacctgctctctcggataccccagcctcccgggaaggggagccgccagaggaaagcagaagataaacagccgcccgcagggaagaagcacagctctgagaagaggagctcagacagctcaagcaagttggccaaaaagagaaagggtgaagcagaaagagactgtgataacaagaaaatcagactggagaaggaaatcaaatcacagtcatcttcatcttcatcctcccacaaagaatcttctaaaacaaagccctccaggccctcctcacagtcctcaaagaaggaaatgctccccccgccacccgtgtcctcgtcctcccagaagccagccaagcctgcacttaagaggtcaaggcgggaagcagacacctgtggccaggaccctccaaaagtgccagcagtaccaagagcaaccacagactcttccattcccaagcagagaagagtagaggggaagggctccagaagctcctcggagcacaagggttcttccggagatactgcaaatccttttccagtgccttctttgccaaatggtaactctaaaccagggaagcctcaagtgaagtttgacaaacaacaagcagaccttcacatgagggaggcaaaaaagatgaagcagaaagcagagttaatgacggacagggttggaaaggcttttaagtacctggaagccgtcttgtccttcattgagtgcggaattgccacagagtctgaaagccagtcatccaagtcagcttactctgtctactcagaaactgtagatctcattaaattcataatgtcattaaaatccttctcagatgccacagcgccaacacaagagaaaatatttgctgttttatgcatgcgttgccagtccattttgaacatggcgatgtttcgttgtaaaaaagacatagcaataaagtattctcgtactcttaataaacacttcgagagttcttccaaagtcgcccaggcaccttctccatgcattgcaagaagcacaggcacaccatcccctctttccccaatgccttctcctgccagctccgtagggtcccagtcaagtgctggcagtgtggggagcagtggggtggctgccactatcagcaccccagtcaccatccagaatatgacatcttcctatgtcaccatcacatcccatgttcttaccgcctttgacctttgggaacaggccgaggccctcacgaggaagaataaagaattctttgctcggctcagccaaatgtgtgcaccttggccctcaacagcagtttggtggacctggtgcactatacacgacagggttttcagcagctacaagaattaaccaaaacaccttaa

SEQ ID NO: 106051 - DNA, 12280 bp, Homo sapiens
  Payload ID: 788
  Gene Symbol: AFF2
  Gene Name: AF4/FMR2 family, member 2
  Uniprot ID: P51816
  ENST ID: ENST00000286437
  CDS Start-End: 91-2949
agttttggttgtggcaacccagaggaaggttgcagtggcccatctatctatcccagatgtaagatatgcttcacccctctttcttgatccatgaagttcaaaaggaggcaccaagcatttccgtccttcttcaagatgaaggtaagccttcccagtgatccaagctgtgttgaagaaatcttgcgggaatcgcagcatctgaccccaggattcaccttacaaaagtggaatgacccaaccaccagagcttctacaaagtcagtgtctttcaaatcgatgcttgaggatgacctgaagctgagcagtgatgaagatgaccttgagcctgtgaagaccttgaccactcagtgcactgccactgagctctaccaggctgttgaaaaggcaaaacctaggaataatcctgtgaacccacccttggccactccccagcccccacctgcagtgcaagccagcgggggttctggcagctccagcgaatcggagagcagctctgagtcggattcagacactgaaagtagcaccactgacagcgaatctaatgaggcacctcgtgtggcaactccagagcctgagccaccctcaaccaacaagtggcaactggataaatggcttaacaaagtgacatcccagaacaagtcttttatttgtggccaaaatgaaacacccatggagactatttctctgcctcctccaatcatccaaccaatggaagtccagatgaaagtgaagacgaatgccagtcaggtcccagctgaacccaaagaaaggcctctcctcagtctcattagggagaaagcccgtccacggcccactcagaaaattccagaaacaaaggctttgaagcataagttgtcaacaactagtgagacagtgtctcaaaggacaattgggaaaaaacagcccaaaaaagttgagaagaacaccagcactgacgagtttacctggcccaaaccaaatattaccagcagcactcccaaagaaaaagaaagtgtggagcttcatgacccaccaagaggccgcaacaaagccactgcccacaaaccagcccctaggaaagaaccaagacctaacatccctttggctcccgagaagaagaagtacagagggcctggcaagattgtgccaaagtctcgggaattcattgaaacagattcatctacatctgactccaacacagatcaggaagagaccctgcaaatcaaagtcctgcctccgtgcattatttctggaggtaatactgccaaatccaaggaaatctgtggtgccagcctgaccctcagcaccttaatgagtagcagtggcagcaacaacaacttatccatcagtaatgaagagccaacattttcacctattcctgtcatgcaaactgaaatcctgtcccctctgcgagatcatgagaacctgaaaaacctctgggtgaagattgaccttgacttactctctagagtacctggccacagctcactccatgcagcacctgccaagccagaccacaaggagactgccacaaaacccaagcgtcagacagctgtcacagctgtggagaaaccagcccctaagggcaaacgtaagcacaagccaatagaagttgcagagaagatccctgagaagaagcagcgcctggaggaggccacaactatctgcttgctccctccttgcatctcaccagccccaccccacaagcctcccaacactagagaaaataattcatccaggagagcaaatagaagaaaggaagaaaaactatttcctcctccactttccccactgccagaggaccctccacgccgcagaaatgtcagtggcaataatggtccctttggtcaagacaaaaacatcgccatgactggacaaatcacatctaccaaacctaagagaactgaaggcaaattctgtgctactttcaaagggatatcggtaaatgagggagacactccaaaaaaggcatcctctgccaccatcactgtcaccaatactgctattgccactgctactgtcactgctactgccattgtcaccaccactgtcacagctactgccaccgccacggccaccaccacaactactaccactaccatttccaccatcacctctaccatcactactggcctcatggatagcagtcacctggagatgacgtcctgggcggctctgccccttctatccagcagcagcactaatgtccggagacccaagctcacttttgatgactcggttcacaatgctgattattacatgcaagaagctaagaagctgaagcacaaagctgatgcactgttcgagaaatttggcaaagctgtgaattatgctgatgccgccctctccttcactgaatgtggcaatgccatggaacgcgaccctctggaagcaaagtccccatacaccatgtactctgagactgtggagctcctcaggtatgcaatgaggctgaagaactttgcaagtcccttggcttcggatggggacaaaaagctagcagtactatgctaccgatgtttatcactcctctatttgagaatgtttaagctgaagaaggaccatgctatgaagtactccagatcactgatggaatattttaagcaaaatgcttcaaaagtcgcacagataccctctccatgggtaagcaatggaaagaacactccatccccagtgtctctcaacaacgtctcccccatcaacgcaatggggaactgtaacaatggcccagtcaccattccccagcgcattcaccacatggctgccagccacgtcaacatcactagcaatgtgttacggggctatgaacactgggatatggccgacaaactgacaagagaaaacaaagaattctttggtgatctggacacgctgatggggcctctgacccagcacagcagcatgaccaatcttgtccgctacgttcgccaaggactgtgttggctgcgcatcgatgcccacttgttgtagtgggtgttctcagatctctagcatcacgacccatcactctacctctaccagcgcactgatggtcactggtggaactccactcactggggaacgttctctttggttatgtttgtttttatgcttcttttgttatctgtaaaaaacagaagtcattgtaagttgacactacaacttaagggcagtgtacgttttattacttagtcattttttttcttttagcatttgatatgcatttctcagattccaccatctttttgtgctttatggaatgacagtccctacaatattgttttaagcccacactacccaaaacaaagaatgggaagcacttgtgataaagacaggctcctgagaaatgcaacaagtggtcttacatatacatgagaacttagacacaagggaccatcccccaaactctactcttatacccagaaaagaacatatttcagaatctgtcaaacttttgtgtatcccacagattcaatcttcaggtgagaattttcattgtcaaaacccactggttagatgttgtagcaacatcataaaatcaagagtatcaagaaaataaatgagcatagcaatgctactcttaaaaagatgctatgccacacaaccagaggactttcttgttagcatccctttcctgattccctattttgttaattttaatgataagaagaaagggtgacatttattttgacaagttttaggcatcagctggcatcagtgtttttcaactccattatttgaagtgtaaatcctcacctggggttctctgtgtgcaaagctgtccttttgaagaacagtttggttgatgcatgccttagtagccaaaatgctacactctagacttacaagtgggagttaagagaggtctggaaagtgtccaacaaggaattcacacctctgcctcctttgcaacaacaacatttacacagttggtaagtgggtccataactggcaggatttttaaattgtattttgctcaaatctatgggaacaaaagtcaaggtatcactacctagaagtaatgatatacagttttcttcctagtggcttgaaaatctggacttcctcaattattattcacattttctctcttataggttttctgttttctactttcttttttctcttatctgtgtttccctttcctttgtttggctcattaacttttgactgaattacaattactccttttattaaagtccatattattgtgaatcatttccatgaaaatttctaagaaaactccaaactctctaaatagtagctaacttttatttttttaaaatgagtcgtggggtagtgcttcaccttgagatgctttgaaagagccctaaacattgggaaccattcacctaatttggagacatttctcactggttgtgactacccccttatgatccttcacattcattttatgtccctaaacatcacaatgtaaatatcatttttgatgttccagctcaccagaagattcttacacttggggtaaacactatccatgcattacttactggtaattacctgctggtatataattccatgtagcctttaatatgctgggttatcaaattctgttcactgagttatgaccagataaataatagatatgcacatgaaagatgcaaacttgtgtgattattaaagccagccatgcaggtccatgatagaaacagcaggtgatgactctgcactctcattgtcaaggttagatatatccccagttgcaaaacagccagacttgagctgtgctctggtcatctttgagtttaaggccttttgttgtataaggctgtggaagttgtactccaatggctgaagccatgttgttaatatggctgatgggagcatccctgcagctgaacccagcactttttatgctcccactgtggttgagctttatgtttacagtctcagcaacaacacttatgcatccaaacactcacaaatgaaacctgaaagaatcttttctgagcctcttaaaagaggaaaatgatgataacattaaagactctgaacacccaaggttggtgtcacatataaaaattaagctgatgactttgcagtgactcaagttgtctctttatcatggtttaccaggtagagtgcctggctattactatataatgaagcccactggcttgacttgtaagttcaacctaaaccacaatcctagaccatcatggatttaggagtagattcttcttgaaatcccacatccagaaactagacattagaatgttgaggcagtttcccagagaaacaagcatattgcctcatggatgaaagacttgtagttctagtttcagtgacttgttatatctacttacatacaacagggaggcaagaggattctctgtcatctctggtgactgagtgtaaaatatgtgccaagtctgcagcacagtgaccaaatctgacaatcgagctctggatcaccacttgattatgtagtagactcatttataaagcagcttaggaactaattaaacatggaggatgaattaccttcctatcccttgagataagacatctttcagtttcatgattaaggattgttgctgttttatagttactctgttcatcacagtgtaaatggtgatgcgtgtcgtaggtgtgcagctatttgagggactaagggatggagatattctgtcaaatgaatctcttcagtataccagtttgtgggagggatatgagacatgtggatggcagtgagagatcgtgcctctagatcttgatggaggcttggtgagacacacttaaataagcacgtggaggttagaatagagggcagagtaaaaggaagctccatctgagcaagtacaccaaatgatctcagccctgcaacttgacccaggtagggccaccactacgccttcacttgtcacccaagctccaaccacagagagtttgacaagtttgtgttatgatgttggcttggctttgtatttttaattaactttggatttttagtggttttgtcatataactgtctgagtttggtaggtaggattactttgaaaagggtttactagtgtggtcctccgggtagaatttagctgtaagcatgttgttagccagcctgtagactgttaattacttaataatctcattgggaaaatactagtagttttatatttggatgacataattggaaaagcagattagctgctactacttttaaaagacttaaggtcgggatgcctttttttccatgtaaggaaatgaaaagaccaaaatcttcaggcaaaaagcaagttgcaaaattagaaaccattggctaaaaatgtgttttgttgagtttccaaatggatgaattttcatttggacattacatcactaaattcattagattttgtctgcattggaaagatactcttctagcatatctttcccaaagatatctaatttggattctgtttcatgcaaatttgcatcccggaggttgaagttggagtttgaggttggaaaatatctttgaaggcagaatcagttgagttgtgagggtgaagcctcacatacttctcaacagacatgataaaattcacctgcatgagttggcaggtgggagaaccaaactggatcactgggtaagactactcagtaaagcaatgaactgcttgcttagagaagcatcactatccccattgagaaaaatgtgtggcaagatgatacagctacacagtatcaaatgaatgggtcaattcagcacccccaaatttaattctgtggggaaaaattattgagccagttgtcagtgttctgttacatgactggcagactaaattcttcatcgttgttgttattgttgttgttgtttctcattttcactcgcacggccttattctcataattaaaatctaattcattttctctttagtgttagtagactccaacaacagaagtggcatctgtgtattcataatcagcatttaccctggcaggagactaatcagataggccggtctcagacattaatcctaccatctgatatttttggtgaaggaaaaagtattaattctctttccatcctcctcctcagaaatatagaagccctctttaccaaaatcatcacattttactctgtaatctaccagctaaaagaaaattgcattgtggggagggcagaaagggggtgggggtgggggcgggggggtggggggtggggaagccccacaaagccagattgcagttcttgcccctttttgcgtctgacatgagatgttaaagaattattcatagtgctcacattgggttaggggacactgaactgctttttagatccatgatcagtcatcattcttctaagagattggagctttgctgtttcattaactgtgcagtgtagactaatggtgtttaataaaaatcattcaaaatttcaaactcttttgccagtgacctcaattttgttggctctgtgatttgtatcagactttgaggagggaagggggaagtgaaggaagcctacgtccaggcccctgacaggatgctgcagtagcaagctcaagctcgcctgcctgccagcagttgctggtgagcagcagcatgcagaccagctgtgggaagcctcctgaagaatgccccagctgatgctttcagctgggaatagtttgttcctattggggaactcattgttctccagtctctgcagcaggaagccagctgtcatattcggagggaatttcagatgctttacctttttggttttgtcctgcatcactcatgtggctacgaaagtgtctctgagaatagagcccaatgtggtgacaatgggtagtcaaatgcaccccagatgctcaagccctgttgtggttctgcagtgtttatgaaattgggaggaaggagaccctggacagtaagcaaaattggagacactccaacgaggctaagttaatgccgtgttgcccagaacaagatctagcttctcatttggtcagcctagcatgcaaccagtggtgtgctggtaaaatgtttaacaaccagctcgctgagaatagaaagcacctggtttgcaccatttgccaatttccatggcataaatactaccactttagatgattttaagctaccaactgtgatgtcactgaacacatggttggaaagagatgcacgcagttggctcttgcaagcctgggcaaaaatgcttcaacacgccactggatgcagccagtcagagggttcatatttaatatatgtgttcatgtggacacacacagacacacacacacaaactcacccttacacacacacttcgatgactaaaacaattacatagttttaagatatgaatcaatgtgtgaatgtagaaagcttatgataaggccctagaggtatgggttgccctggaagcctaggttttaagcaggagaatagctgagaagaatgaagccctcctgagctgaaaggagagatggatcaatggagatggttccatcatctccttccatatctcacaggtaaaatgggcactcagaaaaccctcacgattgattttttaaaaagataagtgagtgttttttattttattattattgtcatcattattttgatttacaaatgctatttgtaacttttacatgtaactaggataaagtatttacgggaactctatggagaatagcacaatccagaatttactgtgtttttcttttatgtgacgtggaaactcagtaattctcccaccttcacattgttgttcataagaattttactttagttattagggaatctaagttttttgttaacatttgtttttagttaaaagtatctacttactgttttagctctgaactcaaaccagaatatctctgtatcaattgcatgactattcagaaacaataatccaaaccaaaataattctttttccacccagtacgaagaaaactaagctcagtaacaagaaggcataaactaaagtatataatgaggctttcattaaatacacacacacacacactcacacacacacacatacactttttaaatttttaaattaggcctccacacataaatcattttgaaagtagaatagaaaatctcaaagaattcattctcctggtcctgtgcatcttctgcagttaataagaggtttgtatctggaaagatggaagaacttgttctaaaatcttatttttcaaaaaaaaatttccattttctctctgggcctgtatccatggttgaatgttagccctggaggagatccatgtcttactcgctctttctggcccttctgtcttttgcctctgcaattctttttgtagctggcacgatagcagggactgggggtctatcctttcatggtattgctacaatatttgtccttactggaaaatggtaacatccgggtctgatttaattggcattacacttacacagggactctgagcacccccgtcaccacaccagacagtggaccagttttcacagctacaaagagctagaaatgtgtttaacatcatccagtgcatcccctaattcaaaaccatcctcactaatcaatcatattcacccataaatattacaaatgagattgattccatctcaagacaatttgtcaaatacttaattttcttcctggatgattctacttactggatattttagaaagagaaatgtctgagataaaatccctcacatttactcaatataacaaattactgtttctactcctattctgagtagtgcttctgaagattgtttgctgtagtgttgtctttgataaaatgaatgtcagtagtgagccttttagagataccatgctcagaaatcctctttgggatcagaagatacctaaaattctccccttttgcccacttggttagatgagtgatatattctttggatcctgcaaagaagagattggtttattttcttttctggtggtggtagtggttgtatctgtggctgtgatggttgttgttacttgtctctctctctctctggctctggcttttgctttcctgctagtgttctttctctttccaaacaaatagttaaattaaatgtgagcttctgaattgtacttgttcatactttcaaaacataacagattaataaaaatagatgtgtcctgatttaaaacatgccccctggaaaggcatgctgtattatgaaatcgtgataatataactgcattattacatggcagtataaatattagtctgttgaattcatttgtccaattgtataactttgtggagcagtgttttgacctttgatacataattctggagcaagtggagtggttgcaggcagatgagacagtgttatatcaggatttttcaatcaactttagttggaggcctggcaattacaaacatcttcagatgtttctgtaaccattataaatatgaaaaaaacctcttcaaaaaatttcccatagtacttcagtcaagactttttaggtttatcttttttttttcatttctccttttccttttccattatttttcgatgggggggttgttatcattgactgaagaaatattttgattgcaatggtctctctctctctccccctctctctctctctcctctattctttcctccttccctctgtccatcacccctcattaaaatattgaaatctggagtctttgataaatctgcattagaccaggctatatgctaggaatgaaatctgggcaaatatcgatgggttttcaaagaatgctccatgttcattgggccctttcacaccccacagtgataaatgaaaaggatagaggtagttttttcaaaagagcactttaataatatcctctgagacctaatgcagtttaacaaatgactccacctatttttccagtaggtaaattgactgagacttgcaaaatacccctgagagttgtcaggggtgtcttctgcctggtctatagcgtgtgtgtttgctttgtatctaacaggcacattcacgtctcgtgtactcatatgaagtatttcctaacattcccattagcctgtatataagaatcagaaagataatcccaacatgttgtaaatgaagatgtgactctataacctttctcttcttcctggaaaaaaaaggacattttcatgcatattttaaacagaaattttgtatatttaagtgtcatagaaaatatttattgagtaactgggacacaaatgggaatttaattgtcatcatatgctttgtgtgtggggatgcttaccaacaccatgtcgctggaccattgtggcaagccataactgcacaaagagtacacatcgtcagtgtgtgtgtgtgtgtgtgtgtgcgcgcacacacgtgcgtgtgtgtgtccctgcatgtgcaacatgtctagcttgctgtccttcatgggattttagctttcccttcttgaaaaacattattttacagttccaggaggccctggttacattactatatgaaggcagtgatttgaaatgaaaattcctttcctcttggaagctttggtcataatatcatggttcaattaaacggattccaccggactttgtgatgaaaaaggctctgttaaaatccaattgagtttccaagaggaaattgtagtaggtcaagatgcatgagagggaagatggaggccacctcaactggagaacatgagctgagttgagccctcagtgttgaagttgacttgctccaagctgcagtctaaaaccctggggcccgtgcctggcctatgctccctcccaagtaagtagaggagcagaaccatcaggaacagcctgcctggctcctatgaagaaaacttcctgacgtcctgtccccaaaggaagaccctttccccaagggcaccccaggtggccattaaattgtgatgatcattcagaaagtgcccccttggctttatgagaatccaattagtcttctgaaccaccttttcttgggtgcagatttccaacattcatgctcattgcagatccaccaactgtcactgttcttaacaagcatgctcgtcttgtcagaatttcagtaagttccaatttcctgtacagaccagggtaaactgttctaaaatcaatcaattaatgaaatgttatctggtttttaaaagctggtttcatgtgctttatgtgtataaaactatatctgcctgtgtggctttgcatttcaaatgtgtggcgcacaagcgttttgttggtgctttgttctcagtacagtaactctgtgtacaaacattttaatgtggttttgttgttttccaacaagatgtctctgtaaaaatgatattggctgagctggtgcgttggtttctctcatagaggcattaactatactgccaatgcattgaattatttaaaaatgcaaaataaaatttttatgaaaatctca

SEQ ID NO: 106052 - DNA, 7313 bp, Homo sapiens
  Payload ID: 788
  Gene Symbol: AFF2
  Gene Name: AF4/FMR2 family, member 2
  Uniprot ID: P51816
  ENST ID: ENST00000342251
  CDS Start-End: 391-4221
gccgctgcctctgccccggccgcccccgccgccgctgccgccgccggcccgcagccagccaggcgggcggcccagcccgcctgagcccgcagcggctgccgccgcagcgtcgggtcgctgggtgcgcgggctaccgcggaccgagcggacccgagtgggcgaccaggcgcttgcccgcccagtgccactgccgccgcttcctcgccggagcacaggaccagacacctccagcgcccgctgctgctgccgatgcggcccggacacttttagctgggcgggagggctggagagccgggggccgccgagaaccgccagcgagctgtgccgagagccgcgccgacccgctgcgatcagggacaggcgcccgcccgccgccgccgcctggccgctatggatctattcgactttttcagagactgggacttggagcagcagtgtcactatgaacaagaccgtagtgcacttaaaaaaagggaatgggagcggaggaatcaagaagtccagcaagaagacgatctcttttcttcaggctttgatctttttggggagccatacaagacaaacaaaggtgatgcacttgccaaccgagtccagaacacgcttggaaactatgatgaaatgaagaatttgctaactaaccattctaatcagaatcacctagtgggaattccaaagaattctgtgccccagaatcccaacaacaaaaatgaaccaagcttttttccagaacaaaagaacagaataattccacctcaccaggataatacccatccttcagcaccaatgcctccaccttctgttgtgatactgaattcaactctaatacacagcaacagaaaatcaaaacctgagtggtcacgtgatagtcataaccctagcactgtactggcaagccaggccagtggtcagccaaacaagatgcagactttgacacaggaccagtctcaagccaaactggaagacttctttgtctacccagctgaacagccccagattggagaagttgaagagtcaaacccatctgcaaaggaagacagtaaccctaattctagtggagaagatgctttcaaagaaatctttcaatccaattcaccggaagaatctgaattcgccgtgcaagcgcctgggtctcccctagtggcttcctctttattagctcctagcagtggcctttcagttcaaaacttcccaccagggctttactgcaaaacaagcatggggcagcaaaagccaactgcatacgtcagacccatggatggccaggaccaggcaccggacatctcaccaacactgaaaccttcaattgaatttgagaacagctttgggaatctgtcatttggaacactcttggatggaaaacccagtgcagccagttcaaagactaaactgccaaagttcaccatcctccaaacaagtgaagtaagccttcccagtgatccaagctgtgttgaagaaatcttgcgggaatcgcagcatctgaccccaggattcaccttacaaaagtggaatgacccaaccaccagagcttctacaaagtcagtgtctttcaaatcgatgcttgaggatgacctgaagctgagcagtgatgaagatgaccttgagcctgtgaagaccttgaccactcagtgcactgccactgagctctaccaggctgttgaaaaggcaaaacctaggaataatcctgtgaacccacccttggccactccccagcccccacctgcagtgcaagccagcgggggttctggcagctccagcgaatcggagagcagctctgagtcggattcagacactgaaagtagcaccactgacagcgaatctaatgaggcacctcgtgtggcaactccagagcctgagccaccctcaaccaacaagtggcaactggataaatggcttaacaaagtgacatcccagaacaagtcttttatttgtggccaaaatgaaacacccatggagactatttctctgcctcctccaatcatccaaccaatggaagtccagatgaaagtgaagacgaatgccagtcaggtcccagctgaacccaaagaaaggcctctcctcagtctcattagggagaaagcccgtccacggcccactcagaaaattccagaaacaaaggctttgaagcataagttgtcaacaactagtgagacagtgtctcaaaggacaattgggaaaaaacagcccaaaaaagttgagaagaacaccagcactgacgagtttacctggcccaaaccaaatattaccagcagcactcccaaagaaaaagaaagtgtggagcttcatgacccaccaagaggccgcaacaaagccactgcccacaaaccagcccctaggaaagaaccaagacctaacatccctttggctcccgagaagaagaagtacagagggcctggcaagattgtgccaaagtctcgggaattcattgaaacagattcatctacatctgactccaacacagatcaggaagagaccctgcaaatcaaagtcctgcctccgtgcattatttctggaggtaatactgccaaatccaaggaaatctgtggtgccagcctgaccctcagcaccttaatgagtagcagtggcagcaacaacaacttatccatcagtaatgaagagccaacattttcacctattcctgtcatgcaaactgaaatcctgtcccctctgcgagatcatgagaacctgaaaaacctctgggtgaagattgaccttgacttactctctagagtacctggccacagctcactccatgcagcacctgccaagccagaccacaaggagactgccacaaaacccaagcgtcagacagctgtcacagctgtggagaaaccagcccctaagggcaaacgtaagcacaagccaatagaagttgcagagaagatccctgagaagaagcagcgcctggaggaggccacaactatctgcttgctccctccttgcatctcaccagccccaccccacaagcctcccaacactagagaaaataattcatccaggagagcaaatagaagaaaggaagaaaaactatttcctcctccactttccccactgccagaggaccctccacgccgcagaaatgtcagtggcaataatggtccctttggtcaagacaaaaacatcgccatgactggacaaatcacatctaccaaacctaagagaactgaaggcaaattctgtgctactttcaaagggatatcggagggagacactccaaaaaaggcatcctctgccaccatcactgtcaccaatactgctattgccactgctactgtcactgctactgccattgtcaccaccactgtcacagctactgccaccgccacggccaccaccacaactactaccactaccatttccaccatcacctctaccatcactactggcctcatggatagcagtcacctggagatgacgtcctgggcggctctgccccttctatccagcagcagcactaatgtccggagacccaagctcacttttgatgactcggttcacaatgctgattattacatgcaagaagctaagaagctgaagcacaaagctgatgcactgttcgagaaatttggcaaagctgtgaattatgctgatgccgccctctccttcactgaatgtggcaatgccatggaacgcgaccctctggaagcaaagtccccatacaccatgtactctgagactgtggagctcctcaggtatgcaatgaggctgaagaactttgcaagtcccttggcttcggatggggacaaaaagctagcagtactatgctaccgatgtttatcactcctctatttgagaatgtttaagctgaagaaggaccatgctatgaagtactccagatcactgatggaatattttaagcaaaatgcttcaaaagtcgcacagataccctctccatgggtaagcaatggaaagaacactccatccccagtgtctctcaacaacgtctcccccatcaacgcaatggggaactgtaacaatggcccagtcaccattccccagcgcattcaccacatggctgccagccacgtcaacatcactagcaatgtgttacggggctatgaacactgggatatggccgacaaactgacaagagaaaacaaagaattctttggtgatctggacacgctgatggggcctctgacccagcacagcagcatgaccaatcttgtccgctacgttcgccaaggactgtgttggctgcgcatcgatgcccacttgttgtagtgggtgttctcagatctctagcatcacgacccatcactctacctctaccagcgcactgatggtcactggtggaactccactcactggggaacgttctctttggttatgtttgtttttatgcttcttttgttatctgtaaaaaacagaagtcattgtaagttgacactacaacttaagggcagtgtacgttttattacttagtcattttttttcttttagcatttgatatgcatttctcagattccaccatctttttgtgctttatggaatgacagtccctacaatattgttttaagcccacactacccaaaacaaagaatgggaagcacttgtgataaagacaggctcctgagaaatgcaacaagtggtcttacatatacatgagaacttagacacaagggaccatcccccaaactctactcttatacccagaaaagaacatatttcagaatctgtcaaacttttgtgtatcccacagattcaatcttcaggtgagaattttcattgtcaaaacccactggttagatgttgtagcaacatcataaaatcaagagtatcaagaaaataaatgagcatagcaatgctactcttaaaaagatgctatgccacacaaccagaggactttcttgttagcatccctttcctgattccctattttgttaattttaatgataagaagaaagggtgacatttattttgacaagttttaggcatcagctggcatcagtgtttttcaactccattatttgaagtgtaaatcctcacctggggttctctgtgtgcaaagctgtccttttgaagaacagtttggttgatgcatgccttagtagccaaaatgctacactctagacttacaagtgggagttaagagaggtctggaaagtgtccaacaaggaattcacacctctgcctcctttgcaacaacaacatttacacagttggtaagtgggtccataactggcaggatttttaaattgtattttgctcaaatctatgggaacaaaagtcaaggtatcactacctagaagtaatgatatacagttttcttcctagtggcttgaaaatctggacttcctcaattattattcacattttctctcttataggttttctgttttctactttcttttttctcttatctgtgtttccctttcctttgtttggctcattaacttttgactgaattacaattactccttttattaaagtccatattattgtgaatcatttccatgaaaatttctaagaaaactccaaactctctaaatagtagctaacttttatttttttaaaatgagtcgtggggtagtgcttcaccttgagatgctttgaaagagccctaaacattgggaaccattcacctaatttggagacatttctcactggttgtgactacccccttatgatccttcacattcattttatgtccctaaacatcacaatgtaaatatcatttttgatgttccagctcaccagaagattcttacacttggggtaaacactatccatgcattacttactggtaattacctgctggtatataattccatgtagcctttaatatgctgggttatcaaattctgttcactgagttatgaccagataaataatagatatgcacatgaaagatgcaaacttgtgtgattattaaagccagccatgcaggtccatgatagaaacagcaggtgatgactctgcactctcattgtcaaggttagatatatccccagttgcaaaacagccagacttgagctgtgctctggtcatctttgagtttaaggccttttgttgtataaggctgtggaagttgtactccaatggctgaagccatgttgttaatatggctgatgggagcatccctgcagctgaacccagcactttttatgctcccactgtggttgagctttatgtttacagtctcagcaacaacacttatgcatccaaacactcacaaatgaaacctgaaagaatcttttctgagcctcttaaaagaggaaaatgatgataacattaaagactctgaacacccaaggttggtgtcacatataaaaattaagctgatgactttgcagtgactcaagttgtctctttatcatggtttaccaggtagagtgcctggctattactatataatgaagcccactggcttgacttgtaagttcaacctaaaccacaatcctagaccatcatggatttaggagtagattcttcttgaaatcccacatccagaaactagacattagaatgttgaggcagtttcccagagaaacaagcatattgcctcatggatgaaagacttgtagttctagtttcagtgacttgttatatctacttacatacaacagggaggcaagaggattctctgtcatctctggtgactgagtgtaaaatatgtgccaagtctgcagcacagtgaccaaatctgacaatcgagctctggatcaccacttgattatgtagtagactcatttataaagcagcttaggaactaattaaacatggaggatgaattaccttcctatcccttgagataagacatctttcagtttcatgattaaggattgttgctgttttatagttactctgttcatcacagtgtaaatggtgatgcgtgtcgtaggtgtgcagctatttgagggactaagggatggagatattctgtcaaatgaatctcttcagtataccagtttgtgggagggatatgagacatgtggatggcagtgagagatcgtgcctctagatcttgatggaggcttggtgagacacacttaaataagcacgtggaggttagaatagagggcagagtaaaaggaagctccatctgagcaagtacaccaaatgatctcagccctgcaacttgacccaggtagggccaccactacgccttcacttgtcacccaagctccaaccacagagagtttgacaagtttgtgttatgatgttggcttggctttgtatttttaattaactttggatttttagtggttttgtcatataactgtctgagtttggtaggtaggattactttgaaaagggtttactagtgtggtcctccgggtagaatttagctgtaagcatgttgttagccagcc

SEQ ID NO: 106053 - DNA, 3952 bp, Homo sapiens
  Payload ID: 788
  Gene Symbol: AFF2
  Gene Name: AF4/FMR2 family, member 2
  Uniprot ID: P51816
  ENST ID: ENST00000370457
  CDS Start-End: 52-3882
acccgctgcgatcagggacaggcgcccgcccgccgccgccgcctggccgctatggatctattcgactttttcagagactgggacttggagcagcagtgtcactatgaacaagaccgtagtgcacttaaaaaaagggaatgggagcggaggaatcaagaagtccagcaagaagacgatctcttttcttcaggctttgatctttttggggagccatacaaggtagctgaatatacaaacaaaggtgatgcacttgccaaccgagtccagaacacgcttggaaactatgatgaaatgaagaatttgctaactaaccattctaatcagaatcacctagtgggaattccaaagaattctgtgccccagaatcccaacaacaaaaatgaaccaagcttttttccagaacaaaagaacagaataattccacctcaccaggataatacccatccttcagcaccaatgcctccaccttctgttgtgatactgaattcaactctaatacacagcaacagaaaatcaaaacctgagtggtcacgtgatagtcataaccctagcactgtactggcaagccaggccagtggtcagccaaacaagatgcagactttgacacaggaccagtctcaagccaaactggaagacttctttgtctacccagctgaacagccccagattggagaagttgaagagtcaaacccatctgcaaaggaagacagtaaccctaattctagtggagaagatgctttcaaagaaatctttcaatccaattcaccggaagaatctgaattcgccgtgcaagcgcctgggtctcccctagtggcttcctctttattagctcctagcagtggcctttcagttcaaaacttcccaccagggctttactgcaaaacaagcatggggcagcaaaagccaactgcatacgtcagacccatggatggccaggaccaggcaccggacatctcaccaacactgaaaccttcaattgaatttgagaacagctttgggaatctgtcatttggaacactcttggatggaaaacccagtgcagccagttcaaagactaaactgccaaagttcaccatcctccaaacaagtgaagtaagccttcccagtgatccaagctgtgttgaagaaatcttgcgggaatcgcagcatctgaccccaggattcaccttacaaaagtggaatgacccaaccaccagagcttctacaaagatgcttgaggatgacctgaagctgagcagtgatgaagatgaccttgagcctgtgaagaccttgaccactcagtgcactgccactgagctctaccaggctgttgaaaaggcaaaacctaggaataatcctgtgaacccacccttggccactccccagcccccacctgcagtgcaagccagcgggggttctggcagctccagcgaatcggagagcagctctgagtcggattcagacactgaaagtagcaccactgacagcgaatctaatgaggcacctcgtgtggcaactccagagcctgagccaccctcaaccaacaagtggcaactggataaatggcttaacaaagtgacatcccagaacaagtcttttatttgtggccaaaatgaaacacccatggagactatttctctgcctcctccaatcatccaaccaatggaagtccagatgaaagtgaagacgaatgccagtcaggtcccagctgaacccaaagaaaggcctctcctcagtctcattagggagaaagcccgtccacggcccactcagaaaattccagaaacaaaggctttgaagcataagttgtcaacaactagtgagacagtgtctcaaaggacaattgggaaaaaacagcccaaaaaagttgagaagaacaccagcactgacgagtttacctggcccaaaccaaatattaccagcagcactcccaaagaaaaagaaagtgtggagcttcatgacccaccaagaggccgcaacaaagccactgcccacaaaccagcccctaggaaagaaccaagacctaacatccctttggctcccgagaagaagaagtacagagggcctggcaagattgtgccaaagtctcgggaattcattgaaacagattcatctacatctgactccaacacagatcaggaagagaccctgcaaatcaaagtcctgcctccgtgcattatttctggaggtaatactgccaaatccaaggaaatctgtggtgccagcctgaccctcagcaccttaatgagtagcagtggcagcaacaacaacttatccatcagtaatgaagagccaacattttcacctattcctgtcatgcaaactgaaatcctgtcccctctgcgagatcatgagaacctgaaaaacctctgggtgaagattgaccttgacttactctctagagtacctggccacagctcactccatgcagcacctgccaagccagaccacaaggagactgccacaaaacccaagcgtcagacagctgtcacagctgtggagaaaccagcccctaagggcaaacgtaagcacaagccaatagaagttgcagagaagatccctgagaagaagcagcgcctggaggaggccacaactatctgcttgctccctccttgcatctcaccagccccaccccacaagcctcccaacactagagaaaataattcatccaggagagcaaatagaagaaaggaagaaaaactatttcctcctccactttccccactgccagaggaccctccacgccgcagaaatgtcagtggcaataatggtccctttggtcaagacaaaaacatcgccatgactggacaaatcacatctaccaaacctaagagaactgaaggcaaattctgtgctactttcaaagggatatcggtaaatgagggagacactccaaaaaaggcatcctctgccaccatcactgtcaccaatactgctattgccactgctactgtcactgctactgccattgtcaccaccactgtcacagctactgccaccgccacggccaccaccacaactactaccactaccatttccaccatcacctctaccatcactactggcctcatggatagcagtcacctggagatgacgtcctgggcggctctgccccttctatccagcagcagcactaatgtccggagacccaagctcacttttgatgactcggttcacaatgctgattattacatgcaagaagctaagaagctgaagcacaaagctgatgcactgttcgagaaatttggcaaagctgtgaattatgctgatgccgccctctccttcactgaatgtggcaatgccatggaacgcgaccctctggaagcaaagtccccatacaccatgtactctgagactgtggagctcctcaggtatgcaatgaggctgaagaactttgcaagtcccttggcttcggatggggacaaaaagctagcagtactatgctaccgatgtttatcactcctctatttgagaatgtttaagctgaagaaggaccatgctatgaagtactccagatcactgatggaatattttaagcaaaatgcttcaaaagtcgcacagataccctctccatgggtaagcaatggaaagaacactccatccccagtgtctctcaacaacgtctcccccatcaacgcaatggggaactgtaacaatggcccagtcaccattccccagcgcattcaccacatggctgccagccacgtcaacatcactagcaatgtgttacggggctatgaacactgggatatggccgacaaactgacaagagaaaacaaagaattctttggtgatctggacacgctgatggggcctctgacccagcacagcagcatgaccaatcttgtccgctacgttcgccaaggactgtgttggctgcgcatcgatgcccacttgttgtagtgggtgttctcagatctctagcatcacgacccatcactctacctctaccagcgcactgatggtcactggt

SEQ ID NO: 106054 - DNA, 1488 bp, Homo sapiens
  Payload ID: 788
  Gene Symbol: AFF2
  Gene Name: AF4/FMR2 family, member 2
  Uniprot ID: P51816
  ENST ID: ENST00000370458
  CDS Start-End: 90-1373
ccgagaaccgccagcgagctgtgccgagagccgcgccgacccgctgcgatcagggacaggcgcccgcccgccgccgccgcctggccgctatggatctattcgactttttcagagactgggacttggagcagcagtgtcactatgaacaagaccgtagtgcacttaaaaaaagggaatgggagcggaggaatcaagaagtccagcaagaagacgatctcttttcttcaggctttgatctttttggggagccatacaagacaaacaaaggtgatgcacttgccaaccgagtccagaacacgcttggaaactatgatgaaatgaagaatttgctaactaaccattctaatcagaatcacctagtgggaattccaaagaattctgtgccccagaatcccaacaacaaaaatgaaccaagcttttttccagaacaaaagaacagaataattccacctcaccaggataatacccatccttcagcaccaatgcctccaccttctgttgtgatactgaattcaactctaatacacagcaacagaaaatcaaaacctgagtggtcacgtgatagtcataaccctagcactgtactggcaagccaggccagtggtcagccaaacaagatgcagactttgacacaggaccagtctcaagccaaactggaagacttctttgtctacccagctgaacagccccagattggagaagttgaagagtcaaacccatctgcaaaggaagacagtaaccctaattctagtggagaagatgctttcaaagaaatctttcaatccaattcaccggaagaatctgaattcgccgtgcaagcgcctgggtctcccctagtggcttcctctttattagctcctagcagtggcctttcagttcaaaacttcccaccagggctttactgcaaaacaagcatggggcagcaaaagccaactgcatacgtcagacccatggatggccaggaccaggcaccggacatctcaccaacactgaaaccttcaattgaatttgagaacagctttgggaatctgtcatttggaacactcttggatggaaaacccagtgcagccagttcaaagactaaactgccaaagttcaccatcctccaaacaagtgaagtaagccttcccagtgatccaagctgtgttgaagaaatcttgcgggaatcgcagcatctgaccccaggattcaccttacaaaagtggaatgacccaaccaccagagcttctacaaagatgcttgaggatgacctgaagctgagcagtgatgaagatgaccttgagcctgtgaagaccttgaccactcagtgcactgccactgagctctaccaggctgttgaaaaggcaaaacctaggaataatcctgtgaagtaagttattatttttattagttgcaaatgttaattttaacggactcgatgcatgtgaaaaaataaggtcataaaagagaccttggattttgagttaatctctattcatgacaatttaa

SEQ ID NO: 106055 - DNA, 13746 bp, Homo sapiens
  Payload ID: 788
  Gene Symbol: AFF2
  Gene Name: AF4/FMR2 family, member 2
  Uniprot ID: P51816
  ENST ID: ENST00000370460
  CDS Start-End: 480-4415
cgccgcctgtgcagccgctgccgccgccgccgccgccgccgccgccgccgccgccgccgccgccgctgccgccccggctgccgcgccgcgccgctgcctctgccccggccgcccccgccgccgctgccgccgccggcccgcagccagccaggcgggcggcccagcccgcctgagcccgcagcggctgccgccgcagcgtcgggtcgctgggtgcgcgggctaccgcggaccgagcggacccgagtgggcgaccaggcgcttgcccgcccagtgccactgccgccgcttcctcgccggagcacaggaccagacacctccagcgcccgctgctgctgccgatgcggcccggacacttttagctgggcgggagggctggagagccgggggccgccgagaaccgccagcgagctgtgccgagagccgcgccgacccgctgcgatcagggacaggcgcccgcccgccgccgccgcctggccgctatggatctattcgactttttcagagactgggacttggagcagcagtgtcactatgaacaagaccgtagtgcacttaaaaaaagggaatgggagcggaggaatcaagaagtccagcaagaagacgatctcttttcttcaggctttgatctttttggggagccatacaaggtagctgaatatacaaacaaaggtgatgcacttgccaaccgagtccagaacacgcttggaaactatgatgaaatgaagaatttgctaactaaccattctaatcagaatcacctagtgggaattccaaagaattctgtgccccagaatcccaacaacaaaaatgaaccaagcttttttccagaacaaaagaacagaataattccacctcaccaggataatacccatccttcagcaccaatgcctccaccttctgttgtgatactgaattcaactctaatacacagcaacagaaaatcaaaacctgagtggtcacgtgatagtcataaccctagcactgtactggcaagccaggccagtggtcagccaaacaagatgcagactttgacacaggaccagtctcaagccaaactggaagacttctttgtctacccagctgaacagccccagattggagaagttgaagagtcaaacccatctgcaaaggaagacagtaaccctaattctagtggagaagatgctttcaaagaaatctttcaatccaattcaccggaagaatctgaattcgccgtgcaagcgcctgggtctcccctagtggcttcctctttattagctcctagcagtggcctttcagttcaaaacttcccaccagggctttactgcaaaacaagcatggggcagcaaaagccaactgcatacgtcagacccatggatggccaggaccaggcaccggacatctcaccaacactgaaaccttcaattgaatttgagaacagctttgggaatctgtcatttggaacactcttggatggaaaacccagtgcagccagttcaaagactaaactgccaaagttcaccatcctccaaacaagtgaagtaagccttcccagtgatccaagctgtgttgaagaaatcttgcgggagatgacccattcctggcctactcctctcacttccatgcatactgctggacactctgagcagagcaccttttccatcccaggacaggaatcgcagcatctgaccccaggattcaccttacaaaagtggaatgacccaaccaccagagcttctacaaagtcagtgtctttcaaatcgatgcttgaggatgacctgaagctgagcagtgatgaagatgaccttgagcctgtgaagaccttgaccactcagtgcactgccactgagctctaccaggctgttgaaaaggcaaaacctaggaataatcctgtgaacccacccttggccactccccagcccccacctgcagtgcaagccagcgggggttctggcagctccagcgaatcggagagcagctctgagtcggattcagacactgaaagtagcaccactgacagcgaatctaatgaggcacctcgtgtggcaactccagagcctgagccaccctcaaccaacaagtggcaactggataaatggcttaacaaagtgacatcccagaacaagtcttttatttgtggccaaaatgaaacacccatggagactatttctctgcctcctccaatcatccaaccaatggaagtccagatgaaagtgaagacgaatgccagtcaggtcccagctgaacccaaagaaaggcctctcctcagtctcattagggagaaagcccgtccacggcccactcagaaaattccagaaacaaaggctttgaagcataagttgtcaacaactagtgagacagtgtctcaaaggacaattgggaaaaaacagcccaaaaaagttgagaagaacaccagcactgacgagtttacctggcccaaaccaaatattaccagcagcactcccaaagaaaaagaaagtgtggagcttcatgacccaccaagaggccgcaacaaagccactgcccacaaaccagcccctaggaaagaaccaagacctaacatccctttggctcccgagaagaagaagtacagagggcctggcaagattgtgccaaagtctcgggaattcattgaaacagattcatctacatctgactccaacacagatcaggaagagaccctgcaaatcaaagtcctgcctccgtgcattatttctggaggtaatactgccaaatccaaggaaatctgtggtgccagcctgaccctcagcaccttaatgagtagcagtggcagcaacaacaacttatccatcagtaatgaagagccaacattttcacctattcctgtcatgcaaactgaaatcctgtcccctctgcgagatcatgagaacctgaaaaacctctgggtgaagattgaccttgacttactctctagagtacctggccacagctcactccatgcagcacctgccaagccagaccacaaggagactgccacaaaacccaagcgtcagacagctgtcacagctgtggagaaaccagcccctaagggcaaacgtaagcacaagccaatagaagttgcagagaagatccctgagaagaagcagcgcctggaggaggccacaactatctgcttgctccctccttgcatctcaccagccccaccccacaagcctcccaacactagagaaaataattcatccaggagagcaaatagaagaaaggaagaaaaactatttcctcctccactttccccactgccagaggaccctccacgccgcagaaatgtcagtggcaataatggtccctttggtcaagacaaaaacatcgccatgactggacaaatcacatctaccaaacctaagagaactgaaggcaaattctgtgctactttcaaagggatatcggtaaatgagggagacactccaaaaaaggcatcctctgccaccatcactgtcaccaatactgctattgccactgctactgtcactgctactgccattgtcaccaccactgtcacagctactgccaccgccacggccaccaccacaactactaccactaccatttccaccatcacctctaccatcactactggcctcatggatagcagtcacctggagatgacgtcctgggcggctctgccccttctatccagcagcagcactaatgtccggagacccaagctcacttttgatgactcggttcacaatgctgattattacatgcaagaagctaagaagctgaagcacaaagctgatgcactgttcgagaaatttggcaaagctgtgaattatgctgatgccgccctctccttcactgaatgtggcaatgccatggaacgcgaccctctggaagcaaagtccccatacaccatgtactctgagactgtggagctcctcaggtatgcaatgaggctgaagaactttgcaagtcccttggcttcggatggggacaaaaagctagcagtactatgctaccgatgtttatcactcctctatttgagaatgtttaagctgaagaaggaccatgctatgaagtactccagatcactgatggaatattttaagcaaaatgcttcaaaagtcgcacagataccctctccatgggtaagcaatggaaagaacactccatccccagtgtctctcaacaacgtctcccccatcaacgcaatggggaactgtaacaatggcccagtcaccattccccagcgcattcaccacatggctgccagccacgtcaacatcactagcaatgtgttacggggctatgaacactgggatatggccgacaaactgacaagagaaaacaaagaattctttggtgatctggacacgctgatggggcctctgacccagcacagcagcatgaccaatcttgtccgctacgttcgccaaggactgtgttggctgcgcatcgatgcccacttgttgtagtgggtgttctcagatctctagcatcacgacccatcactctacctctaccagcgcactgatggtcactggtggaactccactcactggggaacgttctctttggttatgtttgtttttatgcttcttttgttatctgtaaaaaacagaagtcattgtaagttgacactacaacttaagggcagtgtacgttttattacttagtcattttttttcttttagcatttgatatgcatttctcagattccaccatctttttgtgctttatggaatgacagtccctacaatattgttttaagcccacactacccaaaacaaagaatgggaagcacttgtgataaagacaggctcctgagaaatgcaacaagtggtcttacatatacatgagaacttagacacaagggaccatcccccaaactctactcttatacccagaaaagaacatatttcagaatctgtcaaacttttgtgtatcccacagattcaatcttcaggtgagaattttcattgtcaaaacccactggttagatgttgtagcaacatcataaaatcaagagtatcaagaaaataaatgagcatagcaatgctactcttaaaaagatgctatgccacacaaccagaggactttcttgttagcatccctttcctgattccctattttgttaattttaatgataagaagaaagggtgacatttattttgacaagttttaggcatcagctggcatcagtgtttttcaactccattatttgaagtgtaaatcctcacctggggttctctgtgtgcaaagctgtccttttgaagaacagtttggttgatgcatgccttagtagccaaaatgctacactctagacttacaagtgggagttaagagaggtctggaaagtgtccaacaaggaattcacacctctgcctcctttgcaacaacaacatttacacagttggtaagtgggtccataactggcaggatttttaaattgtattttgctcaaatctatgggaacaaaagtcaaggtatcactacctagaagtaatgatatacagttttcttcctagtggcttgaaaatctggacttcctcaattattattcacattttctctcttataggttttctgttttctactttcttttttctcttatctgtgtttccctttcctttgtttggctcattaacttttgactgaattacaattactccttttattaaagtccatattattgtgaatcatttccatgaaaatttctaagaaaactccaaactctctaaatagtagctaacttttatttttttaaaatgagtcgtggggtagtgcttcaccttgagatgctttgaaagagccctaaacattgggaaccattcacctaatttggagacatttctcactggttgtgactacccccttatgatccttcacattcattttatgtccctaaacatcacaatgtaaatatcatttttgatgttccagctcaccagaagattcttacacttggggtaaacactatccatgcattacttactggtaattacctgctggtatataattccatgtagcctttaatatgctgggttatcaaattctgttcactgagttatgaccagataaataatagatatgcacatgaaagatgcaaacttgtgtgattattaaagccagccatgcaggtccatgatagaaacagcaggtgatgactctgcactctcattgtcaaggttagatatatccccagttgcaaaacagccagacttgagctgtgctctggtcatctttgagtttaaggccttttgttgtataaggctgtggaagttgtactccaatggctgaagccatgttgttaatatggctgatgggagcatccctgcagctgaacccagcactttttatgctcccactgtggttgagctttatgtttacagtctcagcaacaacacttatgcatccaaacactcacaaatgaaacctgaaagaatcttttctgagcctcttaaaagaggaaaatgatgataacattaaagactctgaacacccaaggttggtgtcacatataaaaattaagctgatgactttgcagtgactcaagttgtctctttatcatggtttaccaggtagagtgcctggctattactatataatgaagcccactggcttgacttgtaagttcaacctaaaccacaatcctagaccatcatggatttaggagtagattcttcttgaaatcccacatccagaaactagacattagaatgttgaggcagtttcccagagaaacaagcatattgcctcatggatgaaagacttgtagttctagtttcagtgacttgttatatctacttacatacaacagggaggcaagaggattctctgtcatctctggtgactgagtgtaaaatatgtgccaagtctgcagcacagtgaccaaatctgacaatcgagctctggatcaccacttgattatgtagtagactcatttataaagcagcttaggaactaattaaacatggaggatgaattaccttcctatcccttgagataagacatctttcagtttcatgattaaggattgttgctgttttatagttactctgttcatcacagtgtaaatggtgatgcgtgtcgtaggtgtgcagctatttgagggactaagggatggagatattctgtcaaatgaatctcttcagtataccagtttgtgggagggatatgagacatgtggatggcagtgagagatcgtgcctctagatcttgatggaggcttggtgagacacacttaaataagcacgtggaggttagaatagagggcagagtaaaaggaagctccatctgagcaagtacaccaaatgatctcagccctgcaacttgacccaggtagggccaccactacgccttcacttgtcacccaagctccaaccacagagagtttgacaagtttgtgttatgatgttggcttggctttgtatttttaattaactttggatttttagtggttttgtcatataactgtctgagtttggtaggtaggattactttgaaaagggtttactagtgtggtcctccgggtagaatttagctgtaagcatgttgttagccagcctgtagactgttaattacttaataatctcattgggaaaatactagtagttttatatttggatgacataattggaaaagcagattagctgctactacttttaaaagacttaaggtcgggatgcctttttttccatgtaaggaaatgaaaagaccaaaatcttcaggcaaaaagcaagttgcaaaattagaaaccattggctaaaaatgtgttttgttgagtttccaaatggatgaattttcatttggacattacatcactaaattcattagattttgtctgcattggaaagatactcttctagcatatctttcccaaagatatctaatttggattctgtttcatgcaaatttgcatcccggaggttgaagttggagtttgaggttggaaaatatctttgaaggcagaatcagttgagttgtgagggtgaagcctcacatacttctcaacagacatgataaaattcacctgcatgagttggcaggtgggagaaccaaactggatcactgggtaagactactcagtaaagcaatgaactgcttgcttagagaagcatcactatccccattgagaaaaatgtgtggcaagatgatacagctacacagtatcaaatgaatgggtcaattcagcacccccaaatttaattctgtggggaaaaattattgagccagttgtcagtgttctgttacatgactggcagactaaattcttcatcgttgttgttattgttgttgttgtttctcattttcactcgcacggccttattctcataattaaaatctaattcattttctctttagtgttagtagactccaacaacagaagtggcatctgtgtattcataatcagcatttaccctggcaggagactaatcagataggccggtctcagacattaatcctaccatctgatatttttggtgaaggaaaaagtattaattctctttccatcctcctcctcagaaatatagaagccctctttaccaaaatcatcacattttactctgtaatctaccagctaaaagaaaattgcattgtggggagggcagaaagggggtgggggtgggggcgggggggtggggggtggggaagccccacaaagccagattgcagttcttgcccctttttgcgtctgacatgagatgttaaagaattattcatagtgctcacattgggttaggggacactgaactgctttttagatccatgatcagtcatcattcttctaagagattggagctttgctgtttcattaactgtgcagtgtagactaatggtgtttaataaaaatcattcaaaatttcaaactcttttgccagtgacctcaattttgttggctctgtgatttgtatcagactttgaggagggaagggggaagtgaaggaagcctacgtccaggcccctgacaggatgctgcagtagcaagctcaagctcgcctgcctgccagcagttgctggtgagcagcagcatgcagaccagctgtgggaagcctcctgaagaatgccccagctgatgctttcagctgggaatagtttgttcctattggggaactcattgttctccagtctctgcagcaggaagccagctgtcatattcggagggaatttcagatgctttacctttttggttttgtcctgcatcactcatgtggctacgaaagtgtctctgagaatagagcccaatgtggtgacaatgggtagtcaaatgcaccccagatgctcaagccctgttgtggttctgcagtgtttatgaaattgggaggaaggagaccctggacagtaagcaaaattggagacactccaacgaggctaagttaatgccgtgttgcccagaacaagatctagcttctcatttggtcagcctagcatgcaaccagtggtgtgctggtaaaatgtttaacaaccagctcgctgagaatagaaagcacctggtttgcaccatttgccaatttccatggcataaatactaccactttagatgattttaagctaccaactgtgatgtcactgaacacatggttggaaagagatgcacgcagttggctcttgcaagcctgggcaaaaatgcttcaacacgccactggatgcagccagtcagagggttcatatttaatatatgtgttcatgtggacacacacagacacacacacacaaactcacccttacacacacacttcgatgactaaaacaattacatagttttaagatatgaatcaatgtgtgaatgtagaaagcttatgataaggccctagaggtatgggttgccctggaagcctaggttttaagcaggagaatagctgagaagaatgaagccctcctgagctgaaaggagagatggatcaatggagatggttccatcatctccttccatatctcacaggtaaaatgggcactcagaaaaccctcacgattgattttttaaaaagataagtgagtgttttttattttattattattgtcatcattattttgatttacaaatgctatttgtaacttttacatgtaactaggataaagtatttacgggaactctatggagaatagcacaatccagaatttactgtgtttttcttttatgtgacgtggaaactcagtaattctcccaccttcacattgttgttcataagaattttactttagttattagggaatctaagttttttgttaacatttgtttttagttaaaagtatctacttactgttttagctctgaactcaaaccagaatatctctgtatcaattgcatgactattcagaaacaataatccaaaccaaaataattctttttccacccagtacgaagaaaactaagctcagtaacaagaaggcataaactaaagtatataatgaggctttcattaaatacacacacacacacactcacacacacacacatacactttttaaatttttaaattaggcctccacacataaatcattttgaaagtagaatagaaaatctcaaagaattcattctcctggtcctgtgcatcttctgcagttaataagaggtttgtatctggaaagatggaagaacttgttctaaaatcttatttttcaaaaaaaaatttccattttctctctgggcctgtatccatggttgaatgttagccctggaggagatccatgtcttactcgctctttctggcccttctgtcttttgcctctgcaattctttttgtagctggcacgatagcagggactgggggtctatcctttcatggtattgctacaatatttgtccttactggaaaatggtaacatccgggtctgatttaattggcattacacttacacagggactctgagcacccccgtcaccacaccagacagtggaccagttttcacagctacaaagagctagaaatgtgtttaacatcatccagtgcatcccctaattcaaaaccatcctcactaatcaatcatattcacccataaatattacaaatgagattgattccatctcaagacaatttgtcaaatacttaattttcttcctggatgattctacttactggatattttagaaagagaaatgtctgagataaaatccctcacatttactcaatataacaaattactgtttctactcctattctgagtagtgcttctgaagattgtttgctgtagtgttgtctttgataaaatgaatgtcagtagtgagccttttagagataccatgctcagaaatcctctttgggatcagaagatacctaaaattctccccttttgcccacttggttagatgagtgatatattctttggatcctgcaaagaagagattggtttattttcttttctggtggtggtagtggttgtatctgtggctgtgatggttgttgttacttgtctctctctctctctggctctggcttttgctttcctgctagtgttctttctctttccaaacaaatagttaaattaaatgtgagcttctgaattgtacttgttcatactttcaaaacataacagattaataaaaatagatgtgtcctgatttaaaacatgccccctggaaaggcatgctgtattatgaaatcgtgataatataactgcattattacatggcagtataaatattagtctgttgaattcatttgtccaattgtataactttgtggagcagtgttttgacctttgatacataattctggagcaagtggagtggttgcaggcagatgagacagtgttatatcaggatttttcaatcaactttagttggaggcctggcaattacaaacatcttcagatgtttctgtaaccattataaatatgaaaaaaacctcttcaaaaaatttcccatagtacttcagtcaagactttttaggtttatcttttttttttcatttctccttttccttttccattatttttcgatgggggggttgttatcattgactgaagaaatattttgattgcaatggtctctctctctctccccctctctctctctctcctctattctttcctccttccctctgtccatcacccctcattaaaatattgaaatctggagtctttgataaatctgcattagaccaggctatatgctaggaatgaaatctgggcaaatatcgatgggttttcaaagaatgctccatgttcattgggccctttcacaccccacagtgataaatgaaaaggatagaggtagttttttcaaaagagcactttaataatatcctctgagacctaatgcagtttaacaaatgactccacctatttttccagtaggtaaattgactgagacttgcaaaatacccctgagagttgtcaggggtgtcttctgcctggtctatagcgtgtgtgtttgctttgtatctaacaggcacattcacgtctcgtgtactcatatgaagtatttcctaacattcccattagcctgtatataagaatcagaaagataatcccaacatgttgtaaatgaagatgtgactctataacctttctcttcttcctggaaaaaaaaggacattttcatgcatattttaaacagaaattttgtatatttaagtgtcatagaaaatatttattgagtaactgggacacaaatgggaatttaattgtcatcatatgctttgtgtgtggggatgcttaccaacaccatgtcgctggaccattgtggcaagccataactgcacaaagagtacacatcgtcagtgtgtgtgtgtgtgtgtgtgtgcgcgcacacacgtgcgtgtgtgtgtccctgcatgtgcaacatgtctagcttgctgtccttcatgggattttagctttcccttcttgaaaaacattattttacagttccaggaggccctggttacattactatatgaaggcagtgatttgaaatgaaaattcctttcctcttggaagctttggtcataatatcatggttcaattaaacggattccaccggactttgtgatgaaaaaggctctgttaaaatccaattgagtttccaagaggaaattgtagtaggtcaagatgcatgagagggaagatggaggccacctcaactggagaacatgagctgagttgagccctcagtgttgaagttgacttgctccaagctgcagtctaaaaccctggggcccgtgcctggcctatgctccctcccaagtaagtagaggagcagaaccatcaggaacagcctgcctggctcctatgaagaaaacttcctgacgtcctgtccccaaaggaagaccctttccccaagggcaccccaggtggccattaaattgtgatgatcattcagaaagtgcccccttggctttatgagaatccaattagtcttctgaaccaccttttcttgggtgcagatttccaacattcatgctcattgcagatccaccaactgtcactgttcttaacaagcatgctcgtcttgtcagaatttcagtaagttccaatttcctgtacagaccagggtaaactgttctaaaatcaatcaattaatgaaatgttatctggtttttaaaagctggtttcatgtgctttatgtgtataaaactatatctgcctgtgtggctttgcatttcaaatgtgtggcgcacaagcgttttgttggtgctttgttctcagtacagtaactctgtgtacaaacattttaatgtggttttgttgttttccaacaagatgtctctgtaaaaatgatattggctgagctggtgcgttggtttctctcatagaggcattaactatactgccaatgcattgaattatttaaaaatgcaaaataaaatttttatgaaaatctca

SEQ ID NO: 106056 - DNA, 8135 bp, Homo sapiens
  Payload ID: 789
  Gene Symbol: AFF3
  Gene Name: AF4/FMR2 family, member 3
  Uniprot ID: P51826
  ENST ID: ENST00000317233
  CDS Start-End: 237-3917
cgccagcgagaagagagctccacgctcagcctcagaagaaagacgttcaacgacttactggggagagaaagaaaaggaacgggagctgagagctgatcacctgcctttccagaccggagacgggcggcaagtttgaagtcgacacccagaggccagtttgtcccccttcccgcgcgcgggcggcccgagcctcggcggcggcggtagcggcggcggcgacgctgacacctcccaccatggacagcttcgacttagccctgctccaggaatgggacctcgagtcactgtgtgtctatgaaccagatagaaatgcattacggaggaaagaacgagaaagaagaaatcaagaaactcaacaggatgatggcacgtttaattctagttactctctcttcagtgagccctacaagactaacaagggggatgaactctccaaccggatccagaacactttaggcaattatgatgaaatgaaagactttttaactgatagatccaatcagagtcatctcgttggagttcccaaacctggggttcctcagactcctgtgaacaagatcgatgaacattttgttgcagattcaagagcccagaaccagccctcgtctatctgtagcactacaacttccacaccagcagctgtccccgtgcagcagagtaagagaggcactatgggctggcagaaggctgggcacccaccctctgacggccaacagagagcaacacaacagggctctctcaggaccttgcttggagatggtgttggcagacagcagcctcgggccaaacaagtgtgcaatgtggaggtgggccttcagacccaggagaggccacctgccatggcggccaagcacagcagcagcggacactgtgttcagaactttcctccatccctagcttcaaaacccagcctggtccagcagaaaccgaccgcgtatgtgaggccaatggacggccaagatcaggcccctgatgagtctcctaagctgaagtcgtcttcggaaaccagcgtgcactgcacatcatacaggggagtccctgccagcaagccggagcctgccagagccaaggccaagctctccaagttcagcatccccaagcagggggaggagagtagatctggagaaaccaacagctgtgttgaagaaataatccgggagatgacctggcttccaccactttctgctattcaagcacctggcaaagtggaaccaaccaaatttccatttccaaataaggactctcagcttgtatcctctggacacaataatccaaagaaaggtgatgcagagccagagagtccagacaatggcacatcgaatacatcaatgctggaagatgaccttaagctaagcagtgatgaagaggagaatgaacagcaggcagctcagagaacggctctccgcgctctctctgacagcgccgtggtccagcagcccaactgcagaacctcggtgccttccagcaagggcagcagcagcagcagcagcagcggcagcagcagctcctccagcgactcagagagcagctccggatctgactcggagaccgagagcagctccagcgagagtgagggcagcaagcccccccacttctccagccccgaggctgaaccggcatcctctaacaagtggcagctggataaatggctaaacaaagttaatccccacaagcctcctattctgatccaaaatgaaagccacgggtcagagagcaatcagtactacaacccggtgaaagaggacgtccaggactgtgggaaagtccccgacgtttgccagcccagcctgagagagaaggagatcaagagcacttgcaaggaggagcaaaggccaaggacagccaacaaggcccctgggagtaaaggcgtgaagcagaagtccccgcccgcggccgtggccgtggcggtgagcgcagccgccccgccacccgcagtgccctgtgcgcccgcggagaacgcgcccgcgcctgcccggaggtccgcgggcaagaagcccaccaggcgcaccgagaggacctcagccggggacggcgccaactgccaccggcccgaggagcccgcggccgcggacgcgctggggacgagcgtggtggtccccccggagcccaccaaaaccaggccctgtggcaacaacagagcgagccaccgcaaggagctgcgctcctccgtgacctgcgagaagcgccgcacgcgggggctaagcaggatcgtccccaaatccaaggagttcattgagacagagtcgtcatcttcatcctcctcctcggactccgacctggagtccgagcaggaggagtaccctctgtccaaagcacagaccgtggctgcctctgcctcctccgggaatgatcagaggctgaaggaggccgctgccaacgggggcagtggtcctagggcccctgtaggctccatcaacgccaggaccaccagtgacatcgccaaggagctggaggagcagttctacacactggtcccctttggccggaacgaacttctctcccctctaaaggacagtgatgagatcaggtctctctgggtcaaaatcgacctgaccctcctgtccaggatcccagaacacctgccccaggagccaggggtattgagcgcccctgccaccaaggactctgagagcgcaccgcccagccacacctcggacacacctgcagaaaaggctttgccaaaatccaagaggaaacgcaagtgtgacaacgaagacgactacagggagatcaagaagtcccagggagagaaagacagctcttcaagactggccacctccaccagtaatactttgtctgcaaaccactgcaacatgaacatcaacagtgtggcaataccaataaataaaaatgaaaaaatgcttcggtcgcccatctcacccctctctgatgcatctaaacacaaatacaccagcgaggacttaacttcttccagccgacctaatggcaacagtttgtttacttcagcctcttccagcaaaaagcctaaggccgacagccagctgcagcctcacggcggagacctcacgaaagcagctcacaacaattctgaaaacattcccctccacaagtcacggccgcagacgaagccgtggtctccaggctccaacggccacagggactgcaagaggcagaaacttgtcttcgatgatatgcctcgcagtgccgattattttatgcaagaagctaaacgaatgaagcataaagcagatgcaatggtggaaaagtttggaaaggctttgaactatgctgaagcagcattgtcgtttatcgagtgtggaaatgcaatggaacaaggccccatggaatccaaatctccttatacgatgtattcagaaacagtagagctcatcaggtatgctatgagactaaaaacccactcaggccccaatgccacaccagaagacaaacaactggctgcattatgttaccgatgcctggccctcctgtactggcggatgtttcgactcaaaagggaccacgctgtaaagtattcaaaagcactaatcgactatttcaagaactcatctaaagccgcccaagccccatctccgtggggggccagtggaaagagcactggaaccccatcccccatgtctcccaacccctctcccgccagctccgtggggtctcagggcagcctctccaacgccagcgccctgtccccgtcgaccatcgtcagcatcccacagcgcatccaccagatggcggccaaccacgtcagcatcaccaacagcatcctgcacagctacgactactgggagatggccgacaacctggccaaggaaaaccgagaattcttcaacgacctggatctgctcatggggccggtcaccctgcacagcagcatggagcacctggtccagtactcccaacagggcctgcactggctgcggaacagcgcccacctgtcatagggacctcaccctggggccagagtgggctctggtctccacagatggctcaacgtttttggacactgtgctactgaaactcccagccacagcatttatcagactgcggtgaacatttcctcagcattgaacaatgatcttttgcagggcatgtgtgtttgtatgtgtgggtatataagaagccgcctgtgtatgtgtgtaagatacacagctcttcagaacacaccttctttgtctagtttccataatcccaggctagacaaagtgatcagaggtttctgactagaggaagtacacacacacacacacacacacacacacaccgtacactcacacacaatcacagacacacactttctattccattccagtgctaaaccgtgacttcttagaaaattcaaccaaaatctcatgggttagttaaccaggtgcaatacagcacaccaaaagcttgactgccagtgaagatggacctgctcttatactgttgattactttcagtattaatatactattccccaattattttttgattggtatgtattaatgggtaattgaataatgaaaataagccaggtatttttgtgccggaagtttactagattgcatgttaccaaataccctgctcttcctctaattcccttcccccatctgactctattatcaactaaatgcattccaggcaaacagatggacactcacagcccttcccagccccacctccaagtagtatgcaaatggcactgagatttagcaaaaacgcggcgtctttgaaagttaacagacactaaggtagcagtgcctgtgtgttggagctcagttaggagttgaagttttctgcacctgtgataacaagcccaccagccacatgcatttcttcttcctgccactgtgactcggtggctgtagagccacatggcatttgtcagccaatctgtttcaagtcttttctttccaccaatagctttcttacagattttcttggctaaatgaggccattacctagattgtcccttcagtaggagcctgaatccttcgcttaccaggctgagagctatttgccatgataatgctgattctctcactcctcatgcagaatgtgcacctgcagccctttgatgcgttttgatttgggggcgatttttcaggctttgattagcaggctgcttgcaatgcagaagatcacagttcctttctggggcagcagcaaccagagcctcttcctgtgtcctgtgtgtctggtatgtttacaccttgctctgagtttttctcttgttttctttttttaattaagtttacattttagtttctttgacatcttgtttacagtttttgtctgatgttttttcttttgtagtgtcttatgccctagatttagtcatcttgttaaatatatttggatatgaaatcttgacgaaaagaaaataactcctgaaaaagagggtctatcttgccacacgttaaaaacaaaaataatgtccttgtggcctcttacttgataaagttgcaccaggacggtctgagaaaggcaggcggtgtaatatgtggtgcaatccattttttcaaggtgatgacggcacaaaatacttagactagatgctgatccataaacattcactgatattcttacaggttggtttgcagtgttaacatttttgttagcctgatctgtaggtgggaagtaagatcatcataattccttagctctgagcactgattcaaaattgtataaatgactgaacaacttagatgatttgaaattaattgaaaataagaagggcttgtggaatttgcatttggctttggccttcaagcatttggaaatattaagagaatttccattttacatgtctccaactggggtgcttcttacaaccctttcactttttttttgagacgagtttcgctctgttgcccaggctggagtgcagtggcacgatctcggctcactgcatcctctgcctcctgggttcaagtgattgtcccgcctcagcctcccaagtagctgggattacaggtgtgcactaccatgcccagctaatttttgtgtttttagtagagactgggtttcaccatgttggccaggctcgtctcaaactcctgacctcaggtgatctacccgcctccacctcccaaagtgttgtgattacaggcgtgagccaccacacccagccctttcactaatttttggcagagttcacaatcccatcctatgtcagaaacttgaacctaacttaagaaattttgagtcatttttttggaggactgaggctttgttctacctactcttgaagaatcctgatgaaatattcaaacacataaagggatggccctggaggtctatcctgcatacctggagagcttctctggtcctgcccaccttgaaagttgcagactttgttgtaacatctatgtgatgagcttccctgtgaagccccatttgacaggtgggccagcagtgttttatcagcactctgatggcccacatttcccaggaaaacttcttgaaacttaccgttgtgggcagtggtcagagcgtgtagttcttatgactgtcttgtttcatctgtggagcacgtgtggagcacgttggtacagcagtttctgtggggtttggcatgggtgattttggttagtaaccatcctccaattgttgcttgtgaaagtcattcataacttgttccttttacttagttttgttgttactgctgttgttgttggtttggttggttttgagaccgggtctggctctgtagcccaagctggaatgcggtggcgcgatcatggctccctgcagcctcaaactcctgggctcaagcaatcctcctgcctcagcctcccaagcagctgggaagataggcacgtgccaccacacccggctaattttttctttattttttttgtagagatgggggtctcactatgttgcccaggctggtctcaaactcctgggctcaagcgatcctttggcctcggcctcccaaagtgcatgagccaccatgcctggcctgtttagttttgtttcaagttgaaatacctttcttgtgttttctaattagaaaagtaatatctactcattgtaaaaactcaaacagtgcagaaatgtagaaagtagaaagtgtaagtccctggttgtcccttctgcctgagacaaccactgctcacagtttgatgtatatccttccagagactctcaaatttaagcaaataatttttattaccatgtctttttatttgaagacgtacatttgcctccaaagttcaacacaagttcaactgaccatatccttccatgacctgaatagatgctatcctttatcacgatgttcaattgcctttgaaagagagtagtccaggtatattcctgatcaaaatttggcatttttgatgatactactctacacagatcagactcatgtgcagaatcgtgcctggagagagaggtttggttaagacagagatttctggaaacattcaaattgcaaatggaaacttgaaacccacaatctaatgaggaatgtactggaaaaataatctgaagagttgacaaattgtgtactagattgaacacatggaatgcaatgcaatgagactttctgcactaaaacttatcctcatatgtacaacaatgatgtgtgtattatataacagtgatgtgtacatttctgacaccccatacataatatacacagtttgtataaatgcatacatttaaaaatatatatgtacaatacagctaacataaaactgtagtacgcctgaaggatattactagtgcctaatattgagtatgagtcactgcgtgttcgcatcaacttggaagtgcagtaattgttataaaattaatcagtgcagccaacattatttatgaatcacatctttgaaactgtgcagtagcatatacatatatatttttaaataacatttttcacagttttccagagttactgttgaaatctgcatcaccaaaaaaaaaaaaaagcaagatttttttaacaatgtagacactcttcagacccagtaatctgcgtgtgatttcctatttgtagattcccaagagactttagcagtcaccagccttaatgcatgtacaggatattattgtgacttaatttatctgcagtttttaatccatgtgaaattggaatttataaacggacttggattaaacatgtctgcctttctaaggttgcaaatgttacattaaatgatttatgttgt

SEQ ID NO: 106057 - DNA, 4342 bp, Homo sapiens
  Payload ID: 789
  Gene Symbol: AFF3
  Gene Name: AF4/FMR2 family, member 3
  Uniprot ID: P51826
  ENST ID: ENST00000409579
  CDS Start-End: 234-3989
aaatccgatctcaaataggaaagaagtctcattggccttttggtcttctacctgtgtcctgaattgagtttgttaatcctcattcggagctgatcacctgcctttccagaccggagacgggcggcaagtttgaagtcgacacccagaggccagtttgtcccccttcccgcgcgcgggcggcccgagcctcggcggcggcggtagcggcggcggcgacgctgacacctcccaccatggacagcttcgacttagccctgctccaggaatgggacctcgagtcactgtggggtgaagacatcttaaaccagaggaatgactctctagttgtggaatttcagtcatcagccagcagatgcaggagtgtctatgaaccagatagaaatgcattacggaggaaagaacgagaaagaagaaatcaagaaactcaacaggatgatggcacgtttaattctagttactctctcttcagtgagccctacaagactaacaagggggatgaactctccaaccggatccagaacactttaggcaattatgatgaaatgaaagactttttaactgatagatccaatcagagtcatctcgttggagttcccaaacctggggttcctcagactcctgtgaacaagatcgatgaacattttgttgcagattcaagagcccagaaccagccctcgtctatctgtagcactacaacttccacaccagcagctgtccccgtgcagcagagtaagagaggcactatgggctggcagaaggctgggcacccaccctctgacggccaacagagagcaacacaacagggctctctcaggaccttgcttggagatggtgttggcagacagcagcctcgggccaaacaagtgtgcaatgtggaggtgggccttcagacccaggagaggccacctgccatggcggccaagcacagcagcagcggacactgtgttcagaactttcctccatccctagcttcaaaacccagcctggtccagcagaaaccgaccgcgtatgtgaggccaatggacggccaagatcaggcccctgatgagtctcctaagctgaagtcgtcttcggaaaccagcgtgcactgcacatcatacaggggagtccctgccagcaagccggagcctgccagagccaaggccaagctctccaagttcagcatccccaagcagggggaggagagtagatctggagaaaccaacagctgtgttgaagaaataatccgggagatgacctggcttccaccactttctgctattcaagcacctggcaaagtggaaccaaccaaatttccatttccaaataaggactctcagcttgtatcctctggacacaataatccaaagaaaggtgatgcagagccagagagtccagacaatggcacatcgaatacatcaatgctggaagatgaccttaagctaagcagtgatgaagaggagaatgaacagcaggcagctcagagaacggctctccgcgctctctctgacagcgccgtggtccagcagcccaactgcagaacctcggtgccttccagcaagggcagcagcagcagcagcagcagcggcagcagcagctcctccagcgactcagagagcagctccggatctgactcggagaccgagagcagctccagcgagagtgagggcagcaagcccccccacttctccagccccgaggctgaaccggcatcctctaacaagtggcagctggataaatggctaaacaaagttaatccccacaagcctcctattctgatccaaaatgaaagccacgggtcagagagcaatcagtactacaacccggtgaaagaggacgtccaggactgtgggaaagtccccgacgtttgccagcccagcctgagagagaaggagatcaagagcacttgcaaggaggagcaaaggccaaggacagccaacaaggcccctgggagtaaaggcgtgaagcagaagtccccgcccgcggccgtggccgtggcggtgagcgcagccgccccgccacccgcagtgccctgtgcgcccgcggagaacgcgcccgcgcctgcccggaggtccgcgggcaagaagcccaccaggcgcaccgagaggacctcagccggggacggcgccaactgccaccggcccgaggagcccgcggccgcggacgcgctggggacgagcgtggtggtccccccggagcccaccaaaaccaggccctgtggcaacaacagagcgagccaccgcaaggagctgcgctcctccgtgacctgcgagaagcgccgcacgcgggggctaagcaggatcgtccccaaatccaaggagttcattgagacagagtcgtcatcttcatcctcctcctcggactccgacctggagtccgagcaggaggagtaccctctgtccaaagcacagaccgtggctgcctctgcctcctccgggaatgatcagaggctgaaggaggccgctgccaacgggggcagtggtcctagggcccctgtaggctccatcaacgccaggaccaccagtgacatcgccaaggagctggaggagcagttctacacactggtcccctttggccggaacgaacttctctcccctctaaaggacagtgatgagatcaggtctctctgggtcaaaatcgacctgaccctcctgtccaggatcccagaacacctgccccaggagccaggggtattgagcgcccctgccaccaaggactctgagagcgcaccgcccagccacacctcggacacacctgcagaaaaggctttgccaaaatccaagaggaaacgcaagtgtgacaacgaagacgactacagggagatcaagaagtcccagggagagaaagacagctcttcaagactggccacctccaccagtaatactttgtctgcaaaccactgcaacatgaacatcaacagtgtggcaataccaataaataaaaatgaaaaaatgcttcggtcgcccatctcacccctctctgatgcatctaaacacaaatacaccagcgaggacttaacttcttccagccgacctaatggcaacagtttgtttacttcagcctcttccagcaaaaagcctaaggccgacagccagctgcagcctcacggcggagacctcacgaaagcagctcacaacaattctgaaaacattcccctccacaagtcacggccgcagacgaagccgtggtctccaggctccaacggccacagggactgcaagaggcagaaacttgtcttcgatgatatgcctcgcagtgccgattattttatgcaagaagctaaacgaatgaagcataaagcagatgcaatggtggaaaagtttggaaaggctttgaactatgctgaagcagcattgtcgtttatcgagtgtggaaatgcaatggaacaaggccccatggaatccaaatctccttatacgatgtattcagaaacagtagagctcatcaggtatgctatgagactaaaaacccactcaggccccaatgccacaccagaagacaaacaactggctgcattatgttaccgatgcctggccctcctgtactggcggatgtttcgactcaaaagggaccacgctgtaaagtattcaaaagcactaatcgactatttcaagaactcatctaaagccgcccaagccccatctccgtggggggccagtggaaagagcactggaaccccatcccccatgtctcccaacccctctcccgccagctccgtggggtctcagggcagcctctccaacgccagcgccctgtccccgtcgaccatcgtcagcatcccacagcgcatccaccagatggcggccaaccacgtcagcatcaccaacagcatcctgcacagctacgactactgggagatggccgacaacctggccaaggaaaaccgagaattcttcaacgacctggatctgctcatggggccggtcaccctgcacagcagcatggagcacctggtccagtactcccaacagggcctgcactggctgcggaacagcgcccacctgtcatagggacctcaccctggggccagagtgggctctggtctccacagatggctcaacgtttttggacactgtgctactgaaactcccagccacagcatttatcagactgcggtgaacatttcctcagcattgaacaatgatcttttgcagggcatgtgtgtttgtatgtgtgggtatataagaagccgcctgtgtatgtgtgtaagatacacagctcttcagaacacaccttctttgtctagtttccataatcccaggctagacaaagtgatcagaggtttctgactagaggaagtacacacacacacacacacacacacacacaccgtacactcacacacaatcacagacacacactt

SEQ ID NO: 106058 - DNA, 9849 bp, Homo sapiens
  Payload ID: 789
  Gene Symbol: AFF3
  Gene Name: AF4/FMR2 family, member 3
  Uniprot ID: P51826
  ENST ID: ENST00000409236
  CDS Start-End: 114-3794
gagctcgctgctctctcttgagtgtgcctgcgcgcaagccggggagcggcgcgcgggcggcccgagcctcggcggcggcggtagcggcggcggcgacgctgacacctcccaccatggacagcttcgacttagccctgctccaggaatgggacctcgagtcactgtgtgtctatgaaccagatagaaatgcattacggaggaaagaacgagaaagaagaaatcaagaaactcaacaggatgatggcacgtttaattctagttactctctcttcagtgagccctacaagactaacaagggggatgaactctccaaccggatccagaacactttaggcaattatgatgaaatgaaagactttttaactgatagatccaatcagagtcatctcgttggagttcccaaacctggggttcctcagactcctgtgaacaagatcgatgaacattttgttgcagattcaagagcccagaaccagccctcgtctatctgtagcactacaacttccacaccagcagctgtccccgtgcagcagagtaagagaggcactatgggctggcagaaggctgggcacccaccctctgacggccaacagagagcaacacaacagggctctctcaggaccttgcttggagatggtgttggcagacagcagcctcgggccaaacaagtgtgcaatgtggaggtgggccttcagacccaggagaggccacctgccatggcggccaagcacagcagcagcggacactgtgttcagaactttcctccatccctagcttcaaaacccagcctggtccagcagaaaccgaccgcgtatgtgaggccaatggacggccaagatcaggcccctgatgagtctcctaagctgaagtcgtcttcggaaaccagcgtgcactgcacatcatacaggggagtccctgccagcaagccggagcctgccagagccaaggccaagctctccaagttcagcatccccaagcagggggaggagagtagatctggagaaaccaacagctgtgttgaagaaataatccgggagatgacctggcttccaccactttctgctattcaagcacctggcaaagtggaaccaaccaaatttccatttccaaataaggactctcagcttgtatcctctggacacaataatccaaagaaaggtgatgcagagccagagagtccagacaatggcacatcgaatacatcaatgctggaagatgaccttaagctaagcagtgatgaagaggagaatgaacagcaggcagctcagagaacggctctccgcgctctctctgacagcgccgtggtccagcagcccaactgcagaacctcggtgccttccagcaagggcagcagcagcagcagcagcagcggcagcagcagctcctccagcgactcagagagcagctccggatctgactcggagaccgagagcagctccagcgagagtgagggcagcaagcccccccacttctccagccccgaggctgaaccggcatcctctaacaagtggcagctggataaatggctaaacaaagttaatccccacaagcctcctattctgatccaaaatgaaagccacgggtcagagagcaatcagtactacaacccggtgaaagaggacgtccaggactgtgggaaagtccccgacgtttgccagcccagcctgagagagaaggagatcaagagcacttgcaaggaggagcaaaggccaaggacagccaacaaggcccctgggagtaaaggcgtgaagcagaagtccccgcccgcggccgtggccgtggcggtgagcgcagccgccccgccacccgcagtgccctgtgcgcccgcggagaacgcgcccgcgcctgcccggaggtccgcgggcaagaagcccaccaggcgcaccgagaggacctcagccggggacggcgccaactgccaccggcccgaggagcccgcggccgcggacgcgctggggacgagcgtggtggtccccccggagcccaccaaaaccaggccctgtggcaacaacagagcgagccaccgcaaggagctgcgctcctccgtgacctgcgagaagcgccgcacgcgggggctaagcaggatcgtccccaaatccaaggagttcattgagacagagtcgtcatcttcatcctcctcctcggactccgacctggagtccgagcaggaggagtaccctctgtccaaagcacagaccgtggctgcctctgcctcctccgggaatgatcagaggctgaaggaggccgctgccaacgggggcagtggtcctagggcccctgtaggctccatcaacgccaggaccaccagtgacatcgccaaggagctggaggagcagttctacacactggtcccctttggccggaacgaacttctctcccctctaaaggacagtgatgagatcaggtctctctgggtcaaaatcgacctgaccctcctgtccaggatcccagaacacctgccccaggagccaggggtattgagcgcccctgccaccaaggactctgagagcgcaccgcccagccacacctcggacacacctgcagaaaaggctttgccaaaatccaagaggaaacgcaagtgtgacaacgaagacgactacagggagatcaagaagtcccagggagagaaagacagctcttcaagactggccacctccaccagtaatactttgtctgcaaaccactgcaacatgaacatcaacagtgtggcaataccaataaataaaaatgaaaaaatgcttcggtcgcccatctcacccctctctgatgcatctaaacacaaatacaccagcgaggacttaacttcttccagccgacctaatggcaacagtttgtttacttcagcctcttccagcaaaaagcctaaggccgacagccagctgcagcctcacggcggagacctcacgaaagcagctcacaacaattctgaaaacattcccctccacaagtcacggccgcagacgaagccgtggtctccaggctccaacggccacagggactgcaagaggcagaaacttgtcttcgatgatatgcctcgcagtgccgattattttatgcaagaagctaaacgaatgaagcataaagcagatgcaatggtggaaaagtttggaaaggctttgaactatgctgaagcagcattgtcgtttatcgagtgtggaaatgcaatggaacaaggccccatggaatccaaatctccttatacgatgtattcagaaacagtagagctcatcaggtatgctatgagactaaaaacccactcaggccccaatgccacaccagaagacaaacaactggctgcattatgttaccgatgcctggccctcctgtactggcggatgtttcgactcaaaagggaccacgctgtaaagtattcaaaagcactaatcgactatttcaagaactcatctaaagccgcccaagccccatctccgtggggggccagtggaaagagcactggaaccccatcccccatgtctcccaacccctctcccgccagctccgtggggtctcagggcagcctctccaacgccagcgccctgtccccgtcgaccatcgtcagcatcccacagcgcatccaccagatggcggccaaccacgtcagcatcaccaacagcatcctgcacagctacgactactgggagatggccgacaacctggccaaggaaaaccgagaattcttcaacgacctggatctgctcatggggccggtcaccctgcacagcagcatggagcacctggtccagtactcccaacagggcctgcactggctgcggaacagcgcccacctgtcatagggacctcaccctggggccagagtgggctctggtctccacagatggctcaacgtttttggacactgtgctactgaaactcccagccacagcatttatcagactgcggtgaacatttcctcagcattgaacaatgatcttttgcagggcatgtgtgtttgtatgtgtgggtatataagaagccgcctgtgtatgtgtgtaagatacacagctcttcagaacacaccttctttgtctagtttccataatcccaggctagacaaagtgatcagaggtttctgactagaggaagtacacacacacacacacacacacacacacaccgtacactcacacacaatcacagacacacactttctattccattccagtgctaaaccgtgacttcttagaaaattcaaccaaaatctcatgggttagttaaccaggtgcaatacagcacaccaaaagcttgactgccagtgaagatggacctgctcttatactgttgattactttcagtattaatatactattccccaattattttttgattggtatgtattaatgggtaattgaataatgaaaataagccaggtatttttgtgccggaagtttactagattgcatgttaccaaataccctgctcttcctctaattcccttcccccatctgactctattatcaactaaatgcattccaggcaaacagatggacactcacagcccttcccagccccacctccaagtagtatgcaaatggcactgagatttagcaaaaacgcggcgtctttgaaagttaacagacactaaggtagcagtgcctgtgtgttggagctcagttaggagttgaagttttctgcacctgtgataacaagcccaccagccacatgcatttcttcttcctgccactgtgactcggtggctgtagagccacatggcatttgtcagccaatctgtttcaagtcttttctttccaccaatagctttcttacagattttcttggctaaatgaggccattacctagattgtcccttcagtaggagcctgaatccttcgcttaccaggctgagagctatttgccatgataatgctgattctctcactcctcatgcagaatgtgcacctgcagccctttgatgcgttttgatttgggggcgatttttcaggctttgattagcaggctgcttgcaatgcagaagatcacagttcctttctggggcagcagcaaccagagcctcttcctgtgtcctgtgtgtctggtatgtttacaccttgctctgagtttttctcttgttttctttttttaattaagtttacattttagtttctttgacatcttgtttacagtttttgtctgatgttttttcttttgtagtgtcttatgccctagatttagtcatcttgttaaatatatttggatatgaaatcttgacgaaaagaaaataactcctgaaaaagagggtctatcttgccacacgttaaaaacaaaaataatgtccttgtggcctcttacttgataaagttgcaccaggacggtctgagaaaggcaggcggtgtaatatgtggtgcaatccattttttcaaggtgatgacggcacaaaatacttagactagatgctgatccataaacattcactgatattcttacaggttggtttgcagtgttaacatttttgttagcctgatctgtaggtgggaagtaagatcatcataattccttagctctgagcactgattcaaaattgtataaatgactgaacaacttagatgatttgaaattaattgaaaataagaagggcttgtggaatttgcatttggctttggccttcaagcatttggaaatattaagagaatttccattttacatgtctccaactggggtgcttcttacaaccctttcactttttttttgagacgagtttcgctctgttgcccaggctggagtgcagtggcacgatctcggctcactgcatcctctgcctcctgggttcaagtgattgtcccgcctcagcctcccaagtagctgggattacaggtgtgcactaccatgcccagctaatttttgtgtttttagtagagactgggtttcaccatgttggccaggctcgtctcaaactcctgacctcaggtgatctacccgcctccacctcccaaagtgttgtgattacaggcgtgagccaccacacccagccctttcactaatttttggcagagttcacaatcccatcctatgtcagaaacttgaacctaacttaagaaattttgagtcatttttttggaggactgaggctttgttctacctactcttgaagaatcctgatgaaatattcaaacacataaagggatggccctggaggtctatcctgcatacctggagagcttctctggtcctgcccaccttgaaagttgcagactttgttgtaacatctatgtgatgagcttccctgtgaagccccatttgacaggtgggccagcagtgttttatcagcactctgatggcccacatttcccaggaaaacttcttgaaacttaccgttgtgggcagtggtcagagcgtgtagttcttatgactgtcttgtttcatctgtggagcacgtgtggagcacgttggtacagcagtttctgtggggtttggcatgggtgattttggttagtaaccatcctccaattgttgcttgtgaaagtcattcataacttgttccttttacttagttttgttgttactgctgttgttgttggtttggttggttttgagaccgggtctggctctgtagcccaagctggaatgcggtggcgcgatcatggctccctgcagcctcaaactcctgggctcaagcaatcctcctgcctcagcctcccaagcagctgggaagataggcacgtgccaccacacccggctaattttttctttattttttttgtagagatgggggtctcactatgttgcccaggctggtctcaaactcctgggctcaagcgatcctttggcctcggcctcccaaagtgcatgagccaccatgcctggcctgtttagttttgtttcaagttgaaatacctttcttgtgttttctaattagaaaagtaatatctactcattgtaaaaactcaaacagtgcagaaatgtagaaagtagaaagtgtaagtccctggttgtcccttctgcctgagacaaccactgctcacagtttgatgtatatccttccagagactctcaaatttaagcaaataatttttattaccatgtctttttatttgaagacgtacatttgcctccaaagttcaacacaagttcaactgaccatatccttccatgacctgaatagatgctatcctttatcacgatgttcaattgcctttgaaagagagtagtccaggtatattcctgatcaaaatttggcatttttgatgatactactctacacagatcagactcatgtgcagaatcgtgcctggagagagaggtttggttaagacagagatttctggaaacattcaaattgcaaatggaaacttgaaacccacaatctaatgaggaatgtactggaaaaataatctgaagagttgacaaattgtgtactagattgaacacatggaatgcaatgcaatgagactttctgcactaaaacttatcctcatatgtacaacaatgatgtgtgtattatataacagtgatgtgtacatttctgacaccccatacataatatacacagtttgtataaatgcatacatttaaaaatatatatgtacaatacagctaacataaaactgtagtacgcctgaaggatattactagtgcctaatattgagtatgagtcactgcgtgttcgcatcaacttggaagtgcagtaattgttataaaattaatcagtgcagccaacattatttatgaatcacatctttgaaactgtgcagtagcatatacatatatatttttaaataacatttttcacagttttccagagttactgttgaaatctgcatcaccaaaaaaaaaaaaaagcaagatttttttaacaatgtagacactcttcagacccagtaatctgcgtgtgatttcctatttgtagattcccaagagactttagcagtcaccagccttaatgcatgtacaggatattattgtgacttaatttatctgcagtttttaatccatgtgaaattggaatttataaacggacttggattaaacatgtctgcctttctaaggttgcaaatgttacattaaatgatttatgttgtaaatgagagaagttgagttgtacgtaaaagacatccaccaatttctgtgaatatttttacacggaaacttgagaatcaaaatacgttcaagtcagttgttctggctcccagtttataatctcgaaaagcaatctttttgtttcataaatggcttaaatgtagctcccacagattatcagtatgaagtctgacatttttcatggaaaagaagtatgtttttcttcattataactatagtttactatttgtctttgctatttcctgatacatacacatacgcacacacgcgcgcacatgcatgcacgtatgcacatgcacgctcccagtgtcccagtgaaggctcaacaggaagcttgagaaggtcatctcaatggccacagggttcctgttcaaccagtagccctgggatgccgctttgcttgtcattctttagtgtcacaagttagttccctgacttgtgtgcagtcagggaactgcacacaactgaaaccaacatggtggaatcatgtttgcaatatttggttgagtaaaataagataattttgaactaaagaagacggaggcattagaccagtggcttgacatgaagcatcccctatgtgggagggtaagtttgttaacttcatttttagtcttatctccaacccttttccttatcctcctccccaaactaaagaagcagaaacagcaacaaaagcaaaaccatcccttcacctgatccagcccatgtccttagattcaaatatcctttgtctttttcccattataccatctgacataactcactcgtgtctagagagaaaaatgcagaaagggtttgtttgcagatgggcagttcagttgagtcctcattaaccaggcagaggggtgcagaagaagcctgactcagggtcaccatggagaactcctcatcccagagatgggtgggacaggaacttggctttgcttcaccaaccactgagcttgatactctttcagaggtggtttgtgctaagaaacacccagcagtctttcaagaacgttctcttctgtagctttgcctgctacacagctgaagtctgtccctataagaattatatttgtaaaaagtaatacattttcgaagaaacccggatcaagtggaatcttgaaagtttttttaatgaaaggggaaaaacaacctgaccacataaactgcacttccaaccatttggaaccagagtttatgtcctcattttcccattctcagaagagcacagtttttcaatattacaacttcctggcaaatagcacaagaaatgttcagacttgagatttgtgttccctttgtccagattattctgtatatgtcaccaaaggggttaacttgtttgcttggcatgaggaaaattataaactccgttctcaaactaattacatctgcccacggttttggtttttattattttaattggcactccgaggcagcagggggtaaattttgtgttggctgcaaggggatttaggttcacagctcttactcacagtaatgggaatcaagggattaaatctctgtgtgttactttgaaaatccacctcttacagccaattttatagacattgatctgagggttgaattcagggcactaattgccagtcagtacaagggtcagcatttgtgttgaagcaccaggggtattgatgtagcctgaaaagctgaatcagggacttgggttttgttttgttttgttttttttacccatttttaaaataggaaagctcatccagaaatacttggatctagacatgatataacatagcaccaatgtttaggatttttagagtgctgttgggtaattaaaataatatcaatgttcta

SEQ ID NO: 106059 - DNA, 591 bp, Homo sapiens
  Payload ID: 789
  Gene Symbol: AFF3
  Gene Name: AF4/FMR2 family, member 3
  ENST ID: ENST00000440445
  CDS Start-End: 125-591
ggtgagaatccggagctgtggccaagaggtcaggagagtcagggggccttggaggggcttccggttctaggccaactgtggagaagcagaggtagggccctgatggagacatgcgcttctcagcatgtctaaaaaactgatcacctgcctttccagaccggagacgggcggcaagtttgaagtcgacacccagaggccagtttgtcccccttcccgcgcgcgggcggcccgagcctcggcggcggcggtagcggcggcggcgacgctgacacctcccaccatggacagcttcgacttagccctgctccaggaatgggacctcgagtcactgtggggtgaagacatcttaaaccagaggaatgactctctagttgtggaatttcagtcatcagccagcagatgcaggagtgtctatgaaccagatagaaatgcattacggaggaaagaacgagaaagaagaaatcaagaaactcaacaggatgatggcacgtttaattctagttactctctcttcagtgagccctacaagactaacaagggggatgaactctccaaccggatccagaacactttaggcaattatgatgaaat

SEQ ID NO: 106060 - DNA, 545 bp, Homo sapiens
  Payload ID: 789
  Gene Symbol: AFF3
  Gene Name: AF4/FMR2 family, member 3
  ENST ID: ENST00000416492
  CDS Start-End: 248-545
agaaagctcgccagcgagaagagagctccacgctcagcctcagaagaaagacgttcaacgacttactggggagagaaagaaaaggaacgggagctgagagaaagtttcacacatatgatttagaccttacgatcagccattgtttacatcgggaagcatcaatccggagtaactggcaagcagcgcgcgggcggcccgagcctcggcggcggcggtagcggcggcggcgacgctgacacctcccaccatggacagcttcgacttagccctgctccaggaatgggacctcgagtcactgtgtgtctatgaaccagatagaaatgcattacggaggaaagaacgagaaagaagaaatcaagaaactcaacaggatgatggcacgtttaattctagttactctctcttcagtgagccctacaagactaacaagggggatgaactctccaaccggatccagaacactttaggcaattatgatgaaatgaaagactttttaactgatagatccaatcagagtcatctcgttggagttcccaaacctgggg

SEQ ID NO: 106061 - DNA, 702 bp, Homo sapiens
  Payload ID: 789
  Gene Symbol: AFF3
  Gene Name: AF4/FMR2 family, member 3
  ENST ID: ENST00000423966
  CDS Start-End: 237-702
cgccagcgagaagagagctccacgctcagcctcagaagaaagacgttcaacgacttactggggagagaaagaaaaggaacgggagctgagagctgatcacctgcctttccagaccggagacgggcggcaagtttgaagtcgacacccagaggccagtttgtcccccttcccgcgcgcgggcggcccgagcctcggcggcggcggtagcggcggcggcgacgctgacacctcccaccatggacagcttcgacttagccctgctccaggaatgggacctcgagtcactgtgtgtctatgaaccagatagaaatgcattacggaggaaagaacgagaaagaagaaatcaagaaactcaacaggatgatggcacgtttaattctagttactctctcttcagtgagccctacaagactaacaagggggatgaactctccaaccggatccagaacactttaggcaattatgatgaaatgaaagactttttaactgatagatccaatcagagtcatctcgttggagttcccaaacctggggttcctcagactcctgtgaacaagatcgatgaacattttgttgcagattcaagagcccagaaccagccctcgtctatctgtagcactacaacttccacaccagcagctgtccccgtgcagcagagtaagagaggcactatgggctggcagaaggctgggcacccaccct

SEQ ID NO: 106062 - DNA, 543 bp, Homo sapiens
  Payload ID: 789
  Gene Symbol: AFF3
  Gene Name: AF4/FMR2 family, member 3
  ENST ID: ENST00000441400
  CDS Start-End: 158-543
aaaccgcaacggagagcaggtccgggtggaagaggtttcctccgcgccgccgctttatttcgctgaacttgcgggctccagagaccttaaacgcgcgcgggcggcccgagcctcggcggcggcggtagcggcggcggcgacgctgacacctcccaccatggacagcttcgacttagccctgctccaggaatgggacctcgagtcactgtgtgtctatgaaccagatagaaatgcattacggaggaaagaacgagaaagaagaaatcaagaaactcaacaggatgatggcacgtttaattctagttactctctcttcagtgagccctacaagactaacaagggggatgaactctccaaccggatccagaacactttaggcaattatgatgaaatgaaagactttttaactgatagatccaatcagagtcatctcgttggagttcccaaacctggggttcctcagactcctgtgaacaagatcgatgaacattttgttgcagattcaagagcccagaaccagccctcgtctatctgtagcactac

SEQ ID NO: 106063 - DNA, 559 bp, Homo sapiens
  Payload ID: 789
  Gene Symbol: AFF3
  Gene Name: AF4/FMR2 family, member 3
  ENST ID: ENST00000432037
  CDS Start-End: 77-559
ctttcgttgcagcgcgcgggcggcccgagcctcggcggcggcggtagcggcggcggcgacgctgacacctcccaccatggacagcttcgacttagccctgctccaggaatgggacctcgagtcactgtgtgtctatgaaccagatagaaatgcattacggaggaaagaacgagaaagaagaaatcaagaaactcaacaggatgatggcacgtttaattctagttactctctcttcagtgagccctacaagactaacaagggggatgaactctccaaccggatccagaacactttaggcaattatgatgaaatgaaagactttttaactgatagatccaatcagagtcatctcgttggagttcccaaacctggggttcctcagactcctgtgaacaagatcgatgaacattttgttgcagattcaagagcccagaaccagccctcgtctatctgtagcactacaacttccacaccagcagctgtccccgtgcagcagagtaagagaggcactatgggctggcagaaggctgggcacccaccctctgacggccaacagaga

SEQ ID NO: 106064 - DNA, 574 bp, Homo sapiens
  Payload ID: 789
  Gene Symbol: AFF3
  Gene Name: AF4/FMR2 family, member 3
  ENST ID: ENST00000415384
  CDS Start-End: 26-574
attcggaggtgggtgaggtgagaggatgactcttcggcttgacgctggagggatcccgtcacttgcacccagggtttacatttctggcagccccagtcagcggttcttgcccagaaaaaggaacaaaggggagagtgctggaagggactcccttttggcggggagtgcgaggtttggttcgcgtggtgaggcacaactgcagggctctgagctgctctctaggaattctggggaatccctggtgagaatccggagctgtggccaagagctgatcacctgcctttccagaccggagacgggcggcaagtttgaagtcgacacccagaggccagtttgtcccccttcccgcgcgcgggcggcccgagcctcggcggcggcggtagcggcggcggcgacgctgacacctcccaccatggacagcttcgacttagccctgctccaggaatgggacctcgagtcactgtggggtgaagacatcttaaaccagaggaatgactctctagttgtggaatttcagtcatcagccagcagatgcaggagtgtctatgaaccagatagaaatgcattacggagg

SEQ ID NO: 106065 - DNA, 551 bp, Homo sapiens
  Payload ID: 789
  Gene Symbol: AFF3
  Gene Name: AF4/FMR2 family, member 3
  ENST ID: ENST00000424600
  CDS Start-End: 210-551
aaacggtttgtttggggcgctgctgcgggcggcacagctcactctccccgcgcctgggcggccggggaattcccccgcacccacccgggtccgccgcccgcgggagcgcccagcagggtcaagtggattctgggccgcgggagaacgcgcgggcggcccgagcctcggcggcggcggtagcggcggcggcgacgctgacacctcccaccatggacagcttcgacttagccctgctccaggaatgggacctcgagtcactgtgtgtctatgaaccagatagaaatgcattacggaggaaagaacgagaaagaagaaatcaagaaactcaacaggatgatggcacgtttaattctagttactctctcttcagtgagccctacaagactaacaagggggatgaactctccaaccggatccagaacactttaggcaattatgatgaaatgaaagactttttaactgatagatccaatcagagtcatctcgttggagttcccaaacctggggttcctcagactcctgtgaacaagatcgatgaacattttgttgca

SEQ ID NO: 106066 - DNA, 730 bp, Homo sapiens
  Payload ID: 789
  Gene Symbol: AFF3
  Gene Name: AF4/FMR2 family, member 3
  ENST ID: ENST00000430789
  CDS Start-End: 1-538
agcttcaaaacccagcctggtccagcagaaaccgaccgcgtatgtgaggccaatggacggccaagatcaggcccctgatgagtctcctaagctgaagtcgtcttcggaaaccagcgtgcactgcacatcatacaggggagtccctgccagcaagccggagcctgccagagccaaggccaagctctccaagttcagcatccccaagcagggggaggagagtagatctggagaaaccaacagctgtgttgaagaaataatccgggagatgacctggcttccaccactttctgctattcaagcacctggcaaagtggaaccaaccaaatttccatttccaaataaggactctcagcttgtatcctctggacacaataatccaaagaaaggtgatgcagagccagagagtccagacaatggcacatcgaatacatcaatgctggaagatgaccttaagctaagcagtgatgaagaggagaatgaacagcaggcagctcagagaacggctctccgcgctctctctgacagccttagctggtagctgcttccttctgaaatgccctcctctgtctcagctccactgaccattgaaaccctgtgttctctgctacgtcacttcttctacaagacgtgccttgcttccccttcaccttccgccatgattgtaagtgtcctgaggcctccccagccatgtggaactgtgagtcaattaaatttgtttctttataaatta

SEQ ID NO: 106067 - DNA, 528 bp, Homo sapiens
  Payload ID: 789
  Gene Symbol: AFF3
  Gene Name: AF4/FMR2 family, member 3
  ENST ID: ENST00000427118
  CDS Start-End: 476-528
attcggaggtgggtgaggtgagaggatgactcttcggcttgacgctggagggatcccgtcacttgcacccagggtttacatttctggcagccccagtcagcggttcttgcccagaaaaaggaacaaaggggagagtgctggaagggactcccttttggcggggagtgcgaggtttggttcgcgtggtgaggcacaactgcagggctctgagctgctctctaggaattctggggaatccctggtgagaatccggagctgtggccaagaggtcaggagagtcagggggccttggaggggcttccggttctaggccaactgtggagaagcagagctgatcacctgcctttccagaccggagacgggcggcaagtttgaagtcgacacccagaggccagtttgtcccccttcccgcgcgcgggcggcccgagcctcggcggcggcggtagcggcggcggcgacgctgacacctcccaccatggacagcttcgacttagccctgctccaggaatgggacctcgagtcactgtg

SEQ ID NO: 106068 - DNA, 555 bp, Homo sapiens
  Payload ID: 789
  Gene Symbol: AFF3
  Gene Name: AF4/FMR2 family, member 3
  ENST ID: ENST00000445815
  CDS Start-End: 1-555
ggccacagggactgcaagaggcagaaacttgtcttcgatgatatgcctcgcagtgccgattattttatgcaagaagctaaacgaatgaagcataaagcagatgcaatggtggaaaagtttggaaaggctttgaactatgctgaagcagcattgtcgtttatcgagtgtggaaatgcaatggaacaaggccccatggaatccaaatctccttatacgatgtattcagaaacagtagagctcatcaggtatgctatgagactaaaaacccactcaggccccaatgccacaccagaagacaaacaactggctgcattatgttaccgatgcctggccctcctgtactggcggatgtttcgactcaaaagggaccacgctgtaaagtattcaaaagcactaatcgactatttcaagaactcatctaaagccgcccaagccccatctccgtggggggccagtggaaactccgtggggtctcagggcagcctctccaacgccagcgccctgtccccgtcgaccatcgtcagcatcccacagcgcatccaccagatggcggcc

SEQ ID NO: 106069 - DNA, 9552 bp, Homo sapiens
  Payload ID: 790
  Gene Symbol: AFF4
  Gene Name: AF4/FMR2 family, member 4
  Uniprot ID: Q9UHB7
  ENST ID: ENST00000265343
  CDS Start-End: 381-3872
gtcagtcacagccctggctgcaggagtccagctgccgtcgccgccgccagcggacggggcggggatcctggtgccaggtcttcgttaacccgcccccgccgcctcagtcagctgtcccagcccgggcccgaccgtcatggagcggtgcggggcctacgcctgttccgtgtgaggcgcatcgctgccgccgccgccgacgccgccttcgtttgtcgaggcctccggaacccccgccgcctcccggagcccctcgcccttggcagcctgtcaccgccccctgggcgggctcgaatgcgcgtccggtgaaggtgcaggcccggcgccgccactgccgcagccaggagatggttcgggcctagcggagccgggactggagcaacatgaaccgtgaagaccggaatgtgctgcgtatgaaagaacgggaaaggcggaatcaggaaattcagcagggcgaagacgccttcccacctagctctcctctctttgcagagccatacaaagttactagcaaagaagataagttatcaagtcgtattcagagtatgcttggaaactacgatgaaatgaaggatttcataggagacagatctataccaaagcttgttgcaattcccaagcctacagtaccaccatcagcagatgaaaaatctaacccaaatttctttgaacagagacatggaggctctcatcagagtagcaaatggactccagtaggacccgcacccagcacttctcagtctcagaaacggtcctcaggcttacagagtggacatagtagccagcggaccagcgcaggtagcagtagtggcactaacagtagtggtcagaggcacgaccgtgagtcatataacaatagtgggagcagtagccggaaaaaaggccagcatggatcagaacactccaaatcacgttcttccagccctggaaaaccccaggctgtttcttcattaaactctagtcattccaggtctcatgggaatgatcaccatagcaaggaacatcaacgctccaaatcacctcgggaccctgatgcaaactgggattctccttcccgtgtacctttttcaagtgggcagcactcaactcaatctttcccaccctcattgatgtcaaagtccaattcaatgttacagaaacccactgcctatgtgcggcccatggacggacaggagtccatggaaccaaagctgtcctctgagcactacagcagccaatcccatggcaacagcatgactgagctgaagcccagcagcaaagcacatctcaccaagctgaaaataccttcccaaccactggatgcatcagcttctggtgatgtgagctgtgtggatgaaatcctaaaagagatgacgcattcatggcctccccctctaacggctattcatacaccatgcaaaacagaaccttccaaatttccttttccaactaaggagtctcagcagtccaattttggcactggagaacaaaaaagatataatccttctaaaacttcaaatgggcaccagtctaaatctatgttaaaagatgacttaaaactaagcagcagtgaagacagtgatggggaacaggattgtgataagacaatgccgaggagtacaccaggaagtaactctgaaccttcacaccataatagtgaaggagcagataactccagggatgattctagtagccacagtggatctgaaagcagctctggatctgactcagagagtgaaagtagttccagtgacagtgaggcaaatgagccatcccagagtgcatctcccgagcctgaacccccgccaacaaacaaatggcaacttgataattggctgaataaagtgaacccacataaagtgtcacccgcctcttcagtggacagtaacatcccatcatctcaaggctacaaaaaggaaggccgagagcagggcactgggaatagctacactgatacaagtggacctaaagaaacgagttccgctactccgggacgagactccaaaaccatccaaaagggatcagaaagtgggcgtgggaggcagaaatctcctgcacagagtgacagcacaacacagagaagaactgtaggcaaaaaacaacccaaaaaggctgagaaggcagctgctgaagagcctcgtggaggcctgaagatagaaagtgaaacccctgtagacttggctagcagcatgccctccagcagacacaaagcagccaccaaaggctcaaggaaacccaatataaagaaggagtctaagtcttcccctcgacctacagcagagaaaaagaaatataagtcaacaagtaaatcttcccagaaatcaagggaaatcatagaaacagatacctcatcctcagattcagatgaaagtgagagccttcctccttcctcacaaactcctaagtaccccgagagcaataggactcctgttaaaccctcctcagtggaggaagaagatagcttttttcggcaacgaatgttctctcctatggaagagaaggaacttctttcacccctcagtgagcctgatgacaggtacccacttattgtgaagattgacctgaatcttttgactagaataccaggaaagccttacaaagaaacagagccgcccaagggggaaaagaaaaatgtgccagaaaagcacacgagagaggctcagaaacaagcctcagaaaaagtttccaacaaaggcaagaggaagcataagaatgaagatgataaccgagccagtgagagcaagaaacccaaaacggaggacaagaattcagcaggccataagccatccagcaacagagagtcatctaagcagagtgctgcaaaagaaaaggatttgttgccttctcccgctgggcctgttccttcaaaagatccaaaaacagagcatggctctcggaagaggactattagtcagtcttcttccttaaagtcaagcagtaacagcaacaaggagacgagtggcagcagcaaaaacagttcctccacatcaaagcagaagaagaccgaagggaagacttccagtagctccaaggaggttaaggaaaaggctccaagtagctcctctaactgtcctccatctgcaccaactcttgattcttctaagcctcggagaacaaagcttgtctttgatgacagaaattattcagcagaccattatttacaagaagcaaaaaagctaaagcacaatgcagatgcattgtctgataggtttgagaaagctgtatactatcttgatgctgtggtatctttcattgaatgtgggaatgcattagagaagaatgctcaggaatccaaatccccattccctatgtattcagagacggtggatctcatcaaatacactatgaagctaaagaattacttggcaccagatgctacagctgcagataaacgactcacagtactttgcctgcgatgcgagtctttgctgtacctgaggctgttcaaactgaagaaggaaaatgctctgaagtactcaaagacactgacagagcacctgaagaattcttataataattctcaagcaccatcgcctggcttgggaagcaaagctgtggggatgccttcccctgtttctccaaagctgtcaccaggcaattcaggaaattattcatctggggccagtagtgcttctgcaagtggttcttcagtgaccattccacagaagatccaccagatggcagccagctatgttcaggtcacatccaacttcctctatgccaccgaaatttgggaccaagctgaacagctttccaaagagcaaaaagaattctttgctgaactggataaagtaatgggccctctcatctttaatgcaagcatcatgacagatctagttcgttatacccggcagggactgcactggcttcgccaggatgccaagttgatatcttgaactgaacacattctcgttgcctctgattttctccacaacactgtgtcacatcacgaaggaaaactgccataacataccacctagtcgacactaagaatgaggaatagttttctcctcgttggttcatgtgttgttgtttttgataatccaaagcgatcatgtcagttggccctttaatatttccaatgtgaaagattatttaaatgcttttaaatctgcagcacattgataagatggtttccgtgagctatgataagattgaaattccagttgcaattcataactaatgaattgaaattttatttattttaatttttttaagttcccagattggggctagtttaagacttagttatttctgcctataaatttactctgttgaatatttagcataaatttaatgtagacatttttatttatataccttgggagctttattacctaatatctttttgtggtagctgttctaagagtaagaattggttcgtctaaaataaggacatattctttctacacctgctacctgacctgatatttgaaatcttaactccaattttattattgtggaatttacagttagtattaaggatattcttctacacatgaaaaaatcacttaaatatgagaaaatggcattctacatgtatgtactatgaaatgtgtctgatttggtatgcattatttcaaaaactgtgaatgtgtgttaataacactacagcaatcacacagtgactatagcttgcatttaatgcattacaaaagagggaggacaaactttctagaagaagcatttcatgttgaagggtttcataaaaggacaatcctgaacgttacggattttattaaaaccatatgttattttttgttgctaatcatttgacacttaatcgaaacagaataagttactgtggaaaaaaggatgatccaactcctgaggattgccgcctgtgtgtctttaattgattatctttgatagttagagttatttttcagatttttccccctcatactggattgtgatgctctgatatgagcatgcaatgactgatacagaaataggctggagcttcggtgtgtgcttttgctatacagcttacagttctaatgcctgatgtagagatgatgaatttctcctttttaaacctatcttctgtttactccttttgcattatgaaggccctcttcaatgatgtatgtttctgatggaatcagaaaatttcacactagaaaagtgtacctaacttgattcagtgtgagctcttgggacagggagtggagccaggggtagagcttaaagaagctggctctgtaagagttgtatatcaaagtaccttttgctacaaggtgcatatagaagtctaagataagaaatgtaccctctatactttatttttcatgcccctatcatgtttggtgtgccttaaatcttacctttaaatgaagactctatggattgtttacaaatgaagttttacactaggaccagatcgtccatacatgattggtcttctacaataataatgttcaattctttcattttaaatctttctttagggtcatataaagattagttctttcagaaaagctattgctttggtacatgacttagtctaaccagttgggtaatgctgctttgaaaaatagtttgtccctctccccattccaaaaatgaatccattcagtcagaaaaaaagattatcctactatttgtagatgattgctaaggcttgaaataggaaaggggaaagaagggatagaaaagtttcaagtccagtagtgcagtgaatcctttgtgtttgagacttttttacacttatttctgaagttagtgaactttcattgtccctgtggcctcatatttatagagcttcttaactgttttgtacctcagattgtttttagatgtcattgaagattgagatgtacaaattatgttgaatttaacctgtttctcttggagaaattgcctctgatatctttctaacttaatcttagtgtgttctaggaacagttttccataagaggacaacttctcaatgatcatgatagttatttagtaagaaataatggttgttaatcaaatacatgttatgtcttgtccttctctgatttttctgacttggattccttaatttgcagtgatgtcttagaaatggaaaaagtatcctctgggctttcagactttcagcaacaacagccagtgggatacctctgagttcttgtgttctagtctcttgtatgtcctgaaaggcagcaggagcatttttggggtcacactgatattttgttaaagcagagtttcctgcatggtttatggtgctgctctaatattttctctttaaaactgtgtcaatttttggagaatgaatttttcaaccttttcattgtggaggatttttcccacaaggtagtaatgggcaatggatcaaaatcctatcataaatgattgaattttcaatgtcatagtgtgtggaaatactactccctttcctccatgtctatcttcttagatgttctgtctttgtcatcatctgctccagcacatactttggactcctttacaggtgaccttcccccctccctcctcaataggtgtcctcagtgttttctaagcatttaaaactgaatttgacaagtggctaaaaacttagtctgagacttgtacttagtatatggttaattatagaaacaacaactattttaaacagttactctgttgactgctctttatgactacacttgtatgccaggaggcagcagcctatacaccattagactctttacaagcaaccaacgaaccaattgcagtggttgcagttgtcacagtagtcttgcctgggccagactgggctgggctgtgggaagcattccccttcaggggagtttccacagctcagcccaggctccagtctggctagagagcatccagcccattccttgcctcagtgccacctttttctgggcaagtagccaagaagtgactttatatgcagtgagtacttcagataaacttacagctacagctgccgaagagtggagaaggttgaccaccatttatttaattctctagtgtaaaaacaattgagagcagtgtgcgtgagcccacagacacctgtgtttctgggagctctggcagtggcggattcataggcacttgggctgcactttgaatgacacacttggctttattagattcactagtttttaaaaaattgttgttcgtttcttttcattaaaggtttaatcagacagatcagacagcataattttgtatttaatgacagaaacgttggtacatttcttcatgaatgagcttgcattctgaagcaagagcctacaaaaggcacttgttataaatgaaagttctggctctagaggccagtactctggagtttcagagcagccagtgattgttccagtcagtgatgcctagttatatagaggaggagtacactgtgcactcttctaggtgtaagggtatgcaactttggatcttaaaattctgtacacatacacactttatatatatgtatgtatgtatgaaaacatgaaattagtttgtcaaatatgtgtgtgtttagtattttagcttagtgcaactatttccacattatttattaaattgatctaagacactttcttgttgacaccttgaatattaatgttcaagggtgcaatgtgtattcctttagattgttaaagcttaattactatgatttgtagtaaattaacttttaaaatgtatttgagcccttctgtagtgtcgtagggctcttacagggtgggaaagattttaattttccagttgctaattgaacagtatggcctcattatatattttgatttataggagtttgtgtctgggtcccaggaacatctactggggatgactgttaggcagcttgtgatgatgttttttaaaaaacctaagtaacttggggagacagagcatttcaaacccatatagacacctatcatacctgtatatcccctaatacatggaacataaatttcatttcagctttatgcattaatgtattgaagaggcaggctttttttccagtaataatactgtacatctaaggttgctattcagtaaaactaatagaagagataattattgaataccttggaatatgtagtgagaagaggccaaatttttcatgtttgtgagcatgtctttcagatactcgctaatggagaaattcactttagacctctagaccccaaaaccaagttagcaagtgacaaaaagtaaattattaatagtctgtaaagtggatgctggtcttacaaagctcctattcacatgaaccctatggttaattagaaagaacttgctgtctccagaaaagggaatggaaataataactatgtatcttcttttcatgtaatttggtcacagaataaggtattcaagttaagtctaatccaagtcttagagatctttaagtatcctaaaatagcagcctaagtagtcatcatgtaaagaagttgactttcaggaatgtcagcattgacctctccttgccactgttactcagctaaacataacttgccattcttaaaaataaaaaagctcccacccagaaactctagtgatactcagttttgacctcttactgcttccatgtgggacttcttttcagcttttaaccattggaattttctacctgctatgttcctctctggaaaatatcaatttggaaatgctgcctttcaaatcaatgccatgatcatccatattgttgagtttgttgttggtgttccagaagtgtccccattttacaactttatgcacacacctggcaaatcattaacatgagcattcaacagtactgggatgggtggggtgggggtagggggctcaccaacagaactggccagttgacattgcctgaaaaggcaccacctttaagggccagttgtggggttggtaagcacagttatgaaaatttctatctagcctccgttttgaatggttttaagaaattttgtatatggaggatggaaatgcttatatatttattgaaaatccttttatttgaaattaaaattatttggtatataattgtttgatatttggggagggttttggaggggagataatgtcactgataaattaaaagcctgttgattttgcagaaaggtactgttagtgactgataaggatgcctttgttttgtacatgaaccaaatctttgttttacatttcttttatccaaaatatttaggcatctgacattttcaaccagaatttcaattatatactgtgatttttatttgttgcaatacattacaatttcagaggtactttggggctcaaaagctaggatttctaagtcagtatgtgcatttcacacgataaagctgttaatggtgagcaaagtattatatactaactagatttttccacatctgtatagtatattatatgtattttgtggtattgagagtatagaaagtttagagtgtcaaacatgcgtttaatgtgtatttttaaacaaatttatggcaattaaaatatttggagacaagggtatcacatttcaatttgtaaagatctttttaactctactgtgtcattaagatgctttgtacaatgccaaaccatagttggagaaactaagtttaataaatatcaaatagattttctgtattaaagttactgaacactgta

SEQ ID NO: 106070 - DNA, 3348 bp, Homo sapiens
  Payload ID: 790
  Gene Symbol: AFF4
  Gene Name: AF4/FMR2 family, member 4
  Uniprot ID: Q9UHB7
  ENST ID: ENST00000378595
  CDS Start-End: 365-3067
gctgcaggagtccagctgccgtcgccgccgccagcggacggggcggggatcctggtgccaggtcttcgttaacccgcccccgccgcctcagtcagctgtcccagcccgggcccgaccgtcatggagcggtgcggggcctacgcctgttccgtgtgaggcgcatcgctgccgccgccgccgacgccgccttcgtttgtcgaggcctccggaacccccgccgcctcccggagcccctcgcccttggcagcctgtcaccgccccctgggcgggctcgaatgcgcgtccggtgaaggtgcaggcccggcgccgccactgccgcagccaggagatggttcgggcctagcggagccgggactggagcaacatgaaccgtgaagaccggaatgtgctgcgtatgaaagaacgggaaaggcggaatcaggaaattcagcagggcgaagacgccttcccacctagctctcctctctttgcagagccatacaaagttactagcaaagaagataagttatcaagtcgtattcagagtatgcttggaaactacgatgaaatgaaggatttcataggagacagatctataccaaagcttgttgcaattcccaagcctacagtaccaccatcagcagatgaaaaatctaacccaaatttctttgaacagagacatggaggctctcatcagagtagcaaatggactccagtaggacccgcacccagcacttctcagtctcagaaacggtcctcaggcttacagagtggacatagtagccagcggaccagcgcaggtagcagtagtggcactaacagtagtggtcagaggcacgaccgtgagtcatataacaatagtgggagcagtagccggaaaaaaggccagcatggatcagaacactccaaatcacgttcttccagccctggaaaaccccaggctgtttcttcattaaactctagtcattccaggtctcatgggaatgatcaccatagcaaggaacatcaacgctccaaatcacctcgggaccctgatgcaaactgggattctccttcccgtgtacctttttcaagtgggcagcactcaactcaatctttcccaccctcattgatgtcaaagtccaattcaatgttacagaaacccactgcctatgtgcggcccatggacggacaggagtccatggaaccaaagctgtcctctgagcactacagcagccaatcccatggcaacagcatgactgagctgaagcccagcagcaaagcacatctcaccaagctgaaaataccttcccaaccactggatgcatcagcttctggtgatgtgagctgtgtggatgaaatcctaaaagagatgacgcattcatggcctccccctctaacggctattcatacaccatgcaaaacagaaccttccaaatttccttttccaactaaggagtctcagcagtccaattttggcactggagaacaaaaaagatataatccttctaaaacttcaaatgggcaccagtctaaatctatgttaaaagatgacttaaaactaagcagcagtgaagacagtgatggggaacaggattgtgataagacaatgccgaggagtacaccaggaagtaactctgaaccttcacaccataatagtgaaggagcagataactccagggatgattctagtagccacagtggatctgaaagcagctctggatctgactcagagagtgaaagtagttccagtgacagtgaggcaaatgagccatcccagagtgcatctcccgagcctgaacccccgccaacaaacaaatggcaacttgataattggctgaataaagtgaacccacataaagtgtcacccgcctcttcagtggacagtaacatcccatcatctcaaggctacaaaaaggaaggccgagagcagggcactgggaatagctacactgatacaagtggacctaaagaaacgagttccgctactccgggacgagactccaaaaccatccaaaagggatcagaaagtgggcgtgggaggcagaaatctcctgcacagagtgacagcacaacacagagaagaactgtaggcaaaaaacaacccaaaaaggctgagaaggcagctgctgaagagcctcgtggaggcctgaagatagaaagtgaaacccctgtagacttggctagcagcatgccctccagcagacacaaagcagccaccaaaggctcaaggaaacccaatataaagaaggagtctaagtcttcccctcgacctacagcagagaaaaagaaatataagtcaacaagtaaatcttcccagaaatcaagggaaatcatagaaacagatacctcatcctcagattcagatgaaagtgagagccttcctccttcctcacaaactcctaagtaccccgagagcaataggactcctgttaaaccctcctcagtggaggaagaagatagcttttttcggcaacgaatgttctctcctatggaagagaaggaacttctttcacccctcagtgagcctgatgacaggtacccacttattgtgaagattgacctgaatcttttgactagaataccaggaaagccttacaaagaaacagagccgcccaagggggaaaagaaaaatgtgccagaaaagcacacgagagaggctcagaaacaagcctcagaaaaagtttccaacaaaggcaagaggaagcataagaatgaagatgataaccgagccagtgagagcaagaaacccaaaacggaggacaagaattcagcaggccataagccatccagcaacagagagtcatctaagcagagtgctgcaaaagaaaaggatttgttgccttctcccgctgggcctgttccttcaaaagatccaaaaacagagcatggctctcggaagaggactattagtcagtcttcttccttaaagtcaagcagtaacagcaacaaggagacgagtggcagcagcaaaaacagttcctccacatcaaagcagaagaagaccgaagggaagacttccagtagctccaaggaggttaaggtaaagtgttgggggcctggggcttttgaaaatcattcaacttgccatgtgacttttccagggtgacactgtgctttgaaattattgtaacatctcagtaaatatataggcctatgtcttttaccctctatatgtaataatcctgataaatgaatacagtgatataagactgtgaaggtggtaagtcagctggtcacatacatattgaaagaaaaacccttgggtacagtggctcatacctgtagtcccagctatttgggaggctaagatggaaggatcatttgaggaatttgagtccagcctgggcaatgtggtgagaccctgtctgtaaaagaactttaaaattt

SEQ ID NO: 106071 - DNA, 541 bp, Homo sapiens
  Payload ID: 790
  Gene Symbol: AFF4
  Gene Name: AF4/FMR2 family, member 4
  ENST ID: ENST00000421773
  CDS Start-End: 97-541
ggaatctagagcaacagcaaagctgaggtcaaactaccgtaaggatggacaccaaggaagctgtgtttgggacaaaaagaaatcaagataagcaacatgaaccgtgaagaccggaatgtgctgcgtatgaaagaacgggaaaggcggaatcaggaaattcagcagggcgaagacgccttcccacctagctctcctctctttgcagagccatacaaagttactagcaaagaagataagttatcaagtcgtattcagagtatgcttggaaactacgatgaaatgaaggatttcataggagacagatctataccaaagcttgttgcaattcccaagcctacagtaccaccatcagcagatgaaaaatctaacccaaatttctttgaacagagacatggaggctctcatcagagtagcaaatggactccagtaggacccgcacccagcacttctcagtctcagaaacggtcctcaggcttacagagtggacatagtagccagcggaccagcgcaggtagcagtagtggcactaacagtagtggtc

SEQ ID NO: 106072 - DNA, 513 bp, Homo sapiens
  Payload ID: 790
  Gene Symbol: AFF4
  Gene Name: AF4/FMR2 family, member 4
  ENST ID: ENST00000425658
  CDS Start-End: 1-513
gcagccaatcccatggcaacagcatgactgagctgaagcccagcagcaaagcacatctcaccaagctgaaaataccttcccaaccactggatgcatcagcttctggtgatgtgagctgtgtggatgaaatcctaaaagagtctcagcagtccaattttggcactggagaacaaaaaagatataatccttctaaaacttcaaatgggcaccagtctaaatctatgttaaaagatgacttaaaactaagcagcagtgaagacagtgatggggaacaggattgtgataagacaatgccgaggagtacaccaggaagtaactctgaaccttcacaccataatagtgaaggagcagataactccagggatgattctagtagccacagtggatctgaaagcagctctggatctgactcagagagtgaaagtagttccagtgacagtgaggcaaatgagccatcccagagtgcatctcccgagcctgaacccccgccaacaaacaaatggcaacttgata

SEQ ID NO: 106073 - DNA, 2059 bp, Homo sapiens
  Payload ID: 791
  Gene Symbol: AFM
  Gene Name: afamin
  Uniprot ID: P43652
  ENST ID: ENST00000226355
  CDS Start-End: 94-1893
gttacttttttactgataatgtgaaagaatgatataaaaacttgattttcctcaacaacattactttcttttgtaaatgtggtttctacaaagatgaaactactaaaacttacaggttttatttttttcttgttttttttgactgaatccctaaccctgcccacacaacctcgggatatagagaacttcaatagtactcaaaaatttatagaagataatattgaatacatcaccatcattgcatttgctcagtatgttcaggaagcaacctttgaagaaatggaaaagctggtgaaagacatggtagaatacaaagacagatgtatggctgacaagacgctcccagagtgttcaaaattacctaataatgttttacaggaaaaaatatgtgctatggaggggctgccacaaaagcataatttctcacactgctgcagtaaggttgatgctcaaagaagactctgtttcttctataacaagaaatctgatgtgggatttctgcctcctttccctaccctggatcccgaagagaaatgccaggcttatgaaagtaacagagaatcccttttaaatcactttttatatgaagttgccagaaggaacccatttgtcttcgcccctacacttctaactgttgctgttcattttgaggaggtggccaaatcatgttgtgaagaacaaaacaaagtcaactgccttcaaacaagggcaatacctgtcacacaatatttaaaagcattttcttcttatcaaaaacatgtctgtggggcacttttgaaatttggaaccaaagttgtacactttatatatattgcgatactcagtcaaaaattccccaagattgaatttaaggagcttatttctcttgtagaagatgtttcttccaactatgatggatgctgtgaaggggatgttgtgcagtgcatccgtgacacgagcaaggttatgaaccatatttgttcaaaacaagattctatctccagcaaaatcaaagagtgctgtgaaaagaaaataccagagcgcggccagtgcataattaactcaaacaaagatgatagaccaaaggatttatctctaagagaaggaaaatttactgacagtgaaaatgtgtgtcaagaacgagatgctgacccagacaccttctttgcgaagtttacttttgaatactcaaggagacatccagacctgtctataccagagcttttaagaattgttcaaatatacaaagatctcctgagaaattgctgcaacacagaaaaccctccaggttgttaccgttacgcggaagacaaattcaatgagacaactgagaaaagcctcaagatggtacaacaagaatgtaaacatttccagaatttggggaaggatggtttgaaataccattacctcatcaggctcacgaagatagctccccaactctccactgaagaactggtgtctcttggcgagaaaatggtgacagctttcactacttgctgtacgctaagtgaagagtttgcctgtgttgataatttggcagatttagtttttggagagttatgtggagtaaatgaaaatcgaactatcaaccctgctgtggaccactgctgtaaaacaaactttgccttcagaaggccctgctttgagagtttgaaagctgataaaacatatgtgcctccacctttctctcaagatttatttacctttcacgcagacatgtgtcaatctcagaatgaggagcttcagaggaagacagacaggtttcttgtcaacttagtgaagctgaagcatgaactcacagatgaagagctgcagtctttgtttacaaatttcgcaaatgtagtggataagtgctgcaaagcagagagtcctgaagtctgctttaatgaagagagtccaaaaattggcaactgaagccagctgctggagatatgtaaagaaaaaagcaccaaagggaaggcttcctatctgtgtggtgatgaatcgcatttcctgagaacaaaataaaaggatttttctgtaactgtcacctgaaataatacattgcagcaagcaataaacacaacattttgtaaagtta

SEQ ID NO: 106074 - DNA, 3247 bp, Homo sapiens
  Payload ID: 792
  Gene Symbol: AFG3L2
  Gene Name: AFG3-like AAA ATPase 2
  Uniprot ID: Q9Y4W6
  ENST ID: ENST00000269143
  CDS Start-End: 233-2626
gcactggcggaggtcgcggcgggcctcggagaggagacgccgacgtcagcgcgccggggcggggctggcggcaggagacgccgcgttgagagcttgggctcctccgtgagccgccggcgcgcttcgctgcctggcggcctttccccgagccgagcccgcttcccgaggccgccagtcgtcgcctgcccgcgcctgcgcagcgtcccgggccgagagggccacggcggcggccatggcgcaccgctgtttgcggctgtggggccggggcggctgctggccccgcggcctacagcagctcctcgtgcctggcggcgtgggcccgggcgagcagccctgcctccggacgctttaccgatttgttacaactcaagcaagggccagcagaaattctcttttgacagatataattgctgcttatcaaagattctgttctcgacccccaaaaggatttgaaaaatactttcctaatggaaaaaatggaaaaaaagctagtgaacctaaagaagttatgggagagaaaaaagaatcaaagccagctgctaccacacgctcttctggaggaggaggtggtggcggtggaaaacgaggtggcaagaaagatgattctcactggtggtccaggtttcagaagggtgacattccatgggacgacaaggatttcaggatgttcttcctctggactgctctgttctggggtggagtcatgttttacttgctgctcaagagatccgggagagaaatcacttggaaggactttgtcaataactatctttcaaaaggagtagtagacagattggaagtcgtcaacaagcgttttgttcgagtgacctttacaccaggaaaaactcctgttgatgggcaatacgtttggtttaatattggcagtgtggacacctttgaacggaatctggaaactttacagcaggaattgggcatagaaggagaaaatcgggtgcctgttgtctacattgctgaaagtgatggctcttttctgctgagcatgctgcctacggtgctcatcatcgccttcttgctctacaccatcagaagagggcctgctggcattggccggacaggccgagggatgggcggactcttcagtgtcggagaaaccactgccaaggtcttaaaggatgaaattgatgtgaagttcaaagatgtggctggctgtgaggaggccaagctagagatcatggaatttgtgaatttcttgaaaaacccaaagcagtatcaagacctaggagcaaaaatcccaaagggtgccattctcactggtcctccaggcactgggaagacgctgctagctaaggccacagccggagaagccaatgtccccttcatcaccgttagtggatctgagtttttggagatgttcgttggtgtgggccctgctagagtccgagacttatttgcccttgctcggaagaatgccccttgcatcctcttcatcgatgaaatcgatgcggtgggaaggaagagaggaagaggcaactttggagggcagagtgagcaggagaacacactcaaccagctgctggtggagatggatggttttaatacaacaacaaatgtcgtcattttggccggcaccaatcgaccagatatcctggaccccgcgctgcttaggccggggcgtttcgacaggcagatctttattggaccaccagacataaaaggaagagcttctattttcaaagttcatctccgaccgctaaaactggacagtaccctggagaaggataaattggcaagaaaactggcatctttaactccagggttttcaggtgctgatgttgctaatgtctgtaatgaagctgcgttgattgctgcaaggcatctgtcagattccataaatcagaaacactttgaacaggcaattgaacgagtgattggtggcttagagaagaaaacgcaggttctgcagcctgaggagaagaagactgtggcataccacgaagcaggccatgcggttgccggctggtatctggagcacgcagacccgcttttaaaggtatccatcatcccacgtggcaaaggactaggttatgctcagtatttaccaaaagaacaatacctctataccaaagagcagctcttggataggatgtgtatgactttaggtggtcgagtctctgaagaaatcttctttggaagaattacaactggtgctcaagatgacttgagaaaagtaactcagagtgcatatgcccaaattgttcagtttggcatgaatgaaaaggttgggcaaatctcctttgacctcccacgtcagggggacatggtattggagaaaccttacagtgaagccactgcaagattgatagatgatgaagtacgaatacttattaatgatgcttataaaagaacagtagctcttctcacagaaaagaaagctgacgtggagaaggttgctcttctgttgttagaaaaagaagtattagataagaatgatatggttgaacttttgggccccagaccatttgcggaaaaatctacctatgaagaatttgtggaaggcactggcagcttggatgaggacacctcacttccagaaggccttaaggactggaacaaggagcgggaaaaggagaaagaggagcccccgggtgagaaagttgccaactagaggcccagagggaggccatctcagtctgtccactgtggtttcagctggtgcattatttcagctgtggctttcagaagaatgggaatgctgcgctgattttagccagccactggcccagctgaaatgatggggaaaggagtccttagtcctttcagcctcagaggtcacagtgggtggcaggtgactttccggaggccttgagggaaatgcacactgtcccatagcctcattgggctcccagacgtgctggaaaggttgagcccagagtggccgaggctggaccctgtggcaccaagtggggtcggctgaccgtgtggcagggatcgttgcactggactcttggcgtgtgggaagggatgctttctctttgtcgcccactcttcattcctgtttctcctcagttcccctgtgcagatgggctgtgaaattaaattggagtcttgataagaacattttaatttgacttaatattttaaagattgaatccagatcacttgttgctgtcttaatggaatggttttctacaggagctgtaacatacttaaaaatatgaatgtattatgtaaatatggcttctttacataaaaaataaaatgtcaacactgtacttttctgaacaca

SEQ ID NO: 106075 - DNA, 627 bp, Homo sapiens
  Payload ID: 792
  Gene Symbol: AFG3L2
  Gene Name: AFG3-like AAA ATPase 2
  ENST ID: ENST00000590811
  CDS Start-End: 1-627
cgtgggcccgggcgagcagccctgcctccggacgggtgacattccatgggacgacaaggatttcaggatgttcttcctctggactgctctgttctggggtggagtcatgttttacttgctgctcaagagatccgggagagaaatcacttggaaggactttgtcaataactatctttcaaaaggagtagtagacagattggaagtcgtcaacaagcgttttgttcgagtgacctttacaccaggaaaaactcctgttgatgggcaatacgtttggtttaatattggcagtgtggacacctttgaacggaatctggaaactttacagcaggaattgggcatagaaggagaaaatcgggtgcctgttgtctacattgctgaaagtgatggctcttttctgctgagcatgctgcctacggtgctcatcatcgccttcttgctctacaccatcagaagagggcctgctggcattggccggacaggccgagggatgggcggactcttcagtgtcggagaaaccactgccaaggtcttaaaggatgaaattgatgtgaagttcaaagatgtggctggctgtgaggaggccaagctagagatcatggaatttgtgaatttcttgaaaaacccaaa

SEQ ID NO: 106076 - DNA, 4113 bp, Homo sapiens
  Payload ID: 793
  Gene Symbol: AFTPH
  Gene Name: aftiphilin
  Uniprot ID: Q6ULP2
  ENST ID: ENST00000238855
  CDS Start-End: 341-3151
gtgtcggcggcagcggttcccccgctgcatgatgggagagtgtgtggagtgggcggggggtctccgcggaggaggtggaggaggcggcggcggcggcggaagagggcggagggtagtgggatgggggtcccgcggcagcggtgaaactccgggtgggcgtccatggtgctgctgcgctgacagggctgtgagcagccggccttccgctctcaccagttccgcgtcggaatagacggtccttccccggggagtcagttcctccccgggcccctgagccatgcccatcgcagccgccccgaaggagccaggtgtaaattaattatttgaaagcaactgaacaatggagccagacatcattcgaatgtactcttcatccccaccaccattagacaatggagcagaggatgatgatgatgatgaatttggggaatttggtgggttttcagaagttagcccttctggtgtagggtttgttgatttcgatacaccagattatactcgtcccaaggaagagtttgtaccttcaaaccattttatgccaattcatgaattctcagaaaatgtagatagccttacaagctttaagtccattaaaaatggtaatgataaggacatcactgctgaactttctgctcctgtgaaaggacagtctgatgttttactttctaccaccagcaaagaaataatttcatctgaaatgttagctacttccattgatggcatggaaagaccaggaaatttaaataaagtagtggagcagagacagaatgttggaacacttgaaagtttctctccaggagattttagaactaatatgaatgttgttcatcaaaacaagcagttagagagctgcaatggtgaaaagcctccttgtctggagattctaacaaatgggtttgcagtgttggaaactgtaaatcctcagggaacagatgatctggacaatgtagctgattcaaagggacggaagcctcttagcactcatagcactgagtataatttagactctgtacctagtcctgctgaggaatttgcagattttgccacattttccaaaaaggaaaggatacaattagaagaaatagaatgtgcagttttaaatgatagagaagcactaaccattcgggaaaacaataaaattaatagagtcaatgaactgaattctgtaaaagaagtggctttgggtagaagcttggataacaaaggagacactgatggagaggatcaggtttgtgtttcagaaataagcatagtgactaacagaggtttcagtgttgaaaaacaaggccttccaacactgcaacaggatgaatttttacagtcaggtgttcagtcaaaggcttggagtttggtagactcagctgataattcagaagccattaggagagaacaatgtaaaactgaagaaaaacttgacttacttacttctaaatgtgctcacctatgcatggattctgttaaaacttctgatgatgaagttggttctcccaaagaagaaagtagaaagtttactaatttccaaagcccaaacattgaccccacagaagaaaatgatttggatgattctttaagtgtaaaaaatggtgatagtagtaatgactttgtgacttgcaatgatatcaatgaagatgattttggtgattttggtgactttggctctgccagtggctcaactccaccttttgttactggtactcaagattcaatgagtgatgccacttttgaagagtcttcagagcactttccacattttagtgaaccaggtgatgactttggagaatttggggatataaatgctgtttcttgccaagaggagacaatattaacaaagtcagacctaaaacagacttctgataatttatcagaagaatgtcaattggcaagaaaatctagtggaacaggcactgaacctgttgcaaaacttaaaaatgggcaagaaggtgagattggacattttgattctgtgccaaatattcaggatgactgcaatggttttcaagactctgatgattttgcagacttcagttcagctggtcctagccaagttgtagattggaatgcttttgaggatgaacaaaaagatagttgttcttgggctgcttttggagaccagcaggctactgaatctcatcatcgaaaggaagcctggcagtcacataggacagatgaaaatattgatactccaggaacccccaaaacgcacagtgtaccttcagcaacttccaaaggagcagttgctagtggccatttacaggaatcagccacttcagttcagacagctttattaaaccgcctggagcgaattttcgaagcatgttttccttccatacttgtccctgatgctgaagaggaagttacttccctgaagcacttgctggaaacaagcactttgccaataaaaacgagagaggccttacctgaaagtggggaattgctagatgtgtggactgagctacaggatatccatgatgcacatggcttgagataccagtggggcggctcccatagcaacaagaagcttttgtcctccttgggaatagacacccgaaacattctcttcacgggcaataagaagcagcctgttatagtgcccatgtatgcagcaggattgggtatgttagagcccaccaaggaaccactgaaaccactttctgctgcagaaaaaatagcttccatcggtcagacagccaccatgtcaccagatatgaacacatgtacatctgatcagttccaggagtctctaccacccgtccagtttgactggagtagcagtggccttactaaccctttagatgctagtggaggttccactcttctgaaccttgatttctttgggcccgtggatgacagtagctctagcagcagcaccacaatcccaggtgtggatccggagttgtatgagttaacaacttctaagctggaaatctccacctcaagcctcaaagtgactgatgcatttgcaagactcatgtctacagtagagaagacaagcacatctaccaggaaaccgaaaagagaagagcacctaagtgaagaagctatcaaggtgatcgctggccttcctgacttaacattcatgcatgccaaggtgttgatgttcccagccacgttaacaccttccacaagctctcaagaaaaagcagacggataactgatgtgaattggacagtttctattgcttttccttttttccatcccttccctaccatcaaaagcatacctgctctaattaaaaaaaaaaaaaaaaaaaattcaagttcagctgatttgttggtaagccgcactagaaaggtatacatagtaatgtatatttatttacatactgaagtcctaaatttatattagaaaaatgtaaataatcgggggtaaacatttttgaagatttattctttttgtgttgctggggtgtatacatttatgtctttgtgaaatacactggtggtgtccttcttacaaaacttttgaaataaaaaaaaaactcaaatcttcactgtctgtgaaatccccttcagtcttttcagattgcattgactgtcctcttgatttttcatattacatgtcaaattacttttgctatcataaataagctccaaagtcccccatttaatttttttttaattttgtgtatgatgggtttcagatctggcttttgttaacattttggggcttttttaatcttttcaatctggcgtattgctgtttgaccttttgcaaggtacttaattgctcttttgttatagggtatggatcattgtcagaacttgattggaggggtttaaagagattgtgtctgtttaaaatcagtatgattcagagaaggaccaaattatatgaatgtcttacaatggaatttacttgttactgatttttttgttctattgtaccactattttttgaggattttgcacagtgtaaaatgacataatcatagattgctatggtttaggctgtatatacagtgaaaactatgggttttaaatgtttggggaaattcctatggaaaaaagagagacatgtagaagaacctctaacaaggttaatgtgcatgcccaaggtcttttgaaatttcagtgtgtaaatttccttttagcttatacaaaaataaaataattt

SEQ ID NO: 106077 - DNA, 4040 bp, Homo sapiens
  Payload ID: 793
  Gene Symbol: AFTPH
  Gene Name: aftiphilin
  Uniprot ID: Q6ULP2
  ENST ID: ENST00000238856
  CDS Start-End: 341-3070
gtgtcggcggcagcggttcccccgctgcatgatgggagagtgtgtggagtgggcggggggtctccgcggaggaggtggaggaggcggcggcggcggcggaagagggcggagggtagtgggatgggggtcccgcggcagcggtgaaactccgggtgggcgtccatggtgctgctgcgctgacagggctgtgagcagccggccttccgctctcaccagttccgcgtcggaatagacggtccttccccggggagtcagttcctccccgggcccctgagccatgcccatcgcagccgccccgaaggagccaggtgtaaattaattatttgaaagcaactgaacaatggagccagacatcattcgaatgtactcttcatccccaccaccattagacaatggagcagaggatgatgatgatgatgaatttggggaatttggtgggttttcagaagttagcccttctggtgtagggtttgttgatttcgatacaccagattatactcgtcccaaggaagagtttgtaccttcaaaccattttatgccaattcatgaattctcagaaaatgtagatagccttacaagctttaagtccattaaaaatggtaatgataaggacatcactgctgaactttctgctcctgtgaaaggacagtctgatgttttactttctaccaccagcaaagaaataatttcatctgaaatgttagctacttccattgatggcatggaaagaccaggaaatttaaataaagtagtggagcagagacagaatgttggaacacttgaaagtttctctccaggagattttagaactaatatgaatgttgttcatcaaaacaagcagttagagagctgcaatggtgaaaagcctccttgtctggagattctaacaaatgggtttgcagtgttggaaactgtaaatcctcagggaacagatgatctggacaatgtagctgattcaaagggacggaagcctcttagcactcatagcactgagtataatttagactctgtacctagtcctgctgaggaatttgcagattttgccacattttccaaaaaggaaaggatacaattagaagaaatagaatgtgcagttttaaatgatagagaagcactaaccattcgggaaaacaataaaattaatagagtcaatgaactgaattctgtaaaagaagtggctttgggtagaagcttggataacaaaggagacactgatggagaggatcaggtttgtgtttcagaaataagcatagtgactaacagaggtttcagtgttgaaaaacaaggccttccaacactgcaacaggatgaatttttacagtcaggtgttcagtcaaaggcttggagtttggtagactcagctgataattcagaagccattaggagagaacaatgtaaaactgaagaaaaacttgacttacttacttctaaatgtgctcacctatgcatggattctgttaaaacttctgatgatgaagttggttctcccaaagaagaaagtagaaagtttactaatttccaaagcccaaacattgaccccacagaagaaaatgatttggatgattctttaagtgtaaaaaatggtgatagtagtaatgactttgtgacttgcaatgatatcaatgaagatgattttggtgattttggtgactttggctctgccagtggctcaactccaccttttgttactggtactcaagattcaatgagtgatgccacttttgaagagtcttcagagcactttccacattttagtgaaccaggtgatgactttggagaatttggggatataaatgctgtttcttgccaagaggagacaatattaacaaagtcagacctaaaacagacttctgataatttatcagaagaatgtcaattggcaagaaaatctagtggaacaggcactgaacctgttgcaaaacttaaaaatgggcaagaaggtgagattggacattttgattctgtgccaaatattcaggatgactgcaatggttttcaagactctgatgattttgcagacttcagttcagctggtcctagccaagttgtagattggaatgcttttgaggatgaacaaaaagatagttgttcttgggctgcttttggagaccagcaggctactgaatctcatcatcgaaaggaagcctggcagtcacataggacagatgaaaatattgatactccaggaacccccaaaacgcacagtgtaccttcagcaacttccaaaggagcagttgctagtggccatttacaggaatcagccacttcagttcagacagctttattaaaccgcctggagcgaattttcgaagcatgttttccttccatacttgtccctgatgctgaagaggaagttacttccctgaagcacttgctggaaacaagcactttgccaataaaaacgagagaggccttacctgaaagtggggaattgctagatgtgtggactgagctacaggatatccatgatgcacatggcttgagataccagtggggcggctcccatagcaacaagaagcttttgtcctccttgggaatagacacccgaaacattctcttcacgggcaataagaagcagcctgttatagtgcccatgtatgcagcaggattgggtatgttagagcccaccaaggaaccactgaaaccactttctgctgcagaaaaaatagcttccatcggtcagacagccaccatgtcaccagatatgaacacatgtacatctgatcagttccaggagtctctaccacccgtccagtttgactggagtagcagtggccttactaaccctttagatggtgtggatccggagttgtatgagttaacaacttctaagctggaaatctccacctcaagcctcaaagtgactgatgcatttgcaagactcatgtctacagtagagaagacaagcacatctaccagtaggaaaccgaaaagagaagagcacctaagtgaagaagctatcaaggtgatcgctggccttcctgacttaacattcatgcatgccaaggtgttgatgttcccagccacgttaacaccttccacaagctctcaagaaaaagcagacggataactgatgtgaattggacagtttctattgcttttccttttttccatcccttccctaccatcaaaagcatacctgctctaattaaaaaaaaaaaaaaaaaaaattcaagttcagctgatttgttggtaagccgcactagaaaggtatacatagtaatgtatatttatttacatactgaagtcctaaatttatattagaaaaatgtaaataatcgggggtaaacatttttgaagatttattctttttgtgttgctggggtgtatacatttatgtctttgtgaaatacactggtggtgtccttcttacaaaacttttgaaataaaaaaaaaactcaaatcttcactgtctgtgaaatccccttcagtcttttcagattgcattgactgtcctcttgatttttcatattacatgtcaaattacttttgctatcataaataagctccaaagtcccccatttaatttttttttaattttgtgtatgatgggtttcagatctggcttttgttaacattttggggcttttttaatcttttcaatctggcgtattgctgtttgaccttttgcaaggtacttaattgctcttttgttatagggtatggatcattgtcagaacttgattggaggggtttaaagagattgtgtctgtttaaaatcagtatgattcagagaaggaccaaattatatgaatgtcttacaatggaatttacttgttactgatttttttgttctattgtaccactattttttgaggattttgcacagtgtaaaatgacataatcatagattgctatggtttaggctgtatatacagtgaaaactatgggttttaaatgtttggggaaattcctatggaaaaaagagagacatgtagaagaacctctaacaaggttaatgtgcatgcccaaggtcttttgaaatttcagtgtgtaaatttccttttagcttatacaaaaataaaataatttaaaagaaa

SEQ ID NO: 106078 - DNA, 1874 bp, Homo sapiens
  Payload ID: 793
  Gene Symbol: AFTPH
  Gene Name: aftiphilin
  ENST ID: ENST00000409183
  CDS Start-End: 1-1777
cattaggagagaacaatgtaaaactgaagaaaaacttgacttacttacttctaaatgtgctcacctatgcatggattctgttaaaacttctgatgatgaagttggttctcccaaagaagaaagtagaaagtttactaatttccaaagcccaaacattgaccccacagaagaaaatgatttggatgattctttaagtgtaaaaaatggtgatagtagtaatgactttgtgacttgcaatgatatcaatgaagatgattttggtgattttggtgactttggctctgccagtggctcaactccaccttttgttactggtactcaagattcaatgagtgatgccacttttgaagagtcttcagagcactttccacattttagtgaaccaggtgatgactttggagaatttggggatataaatgctgtttcttgccaagaggagacaatattaacaaagtcagacctaaaacagacttctgataatttatcagaagaatgtcaattggcaagaaaatctagtggaacaggcactgaacctgttgcaaaacttaaaaatgggcaagaaggtgagattggacattttgattctgtgccaaatattcaggatgactgcaatggttttcaagactctgatgattttgcagacttcagttcagctggtcctagccaagttgtagattggaatgcttttgaggatgaacaaaaagatagttgttcttgggctgcttttggagaccagcaggctactgaatctcatcatcgaaaggaagcctggcagtcacataggacagatgaaaatattgatactccaggaacccccaaaacgcacagtgtaccttcagcaacttccaaaggagcagttgctagtggccatttacaggaatcagccacttcagttcagacagctttattaaaccgcctggagcgaattttcgaagcatgttttccttccatacttgtccctgatgctgaagaggaagttacttccctgaagcacttgctggaaacaagcactttgccaataaaaacgagagaggccttacctgaaagtggggaattgctagatgtgtggactgagctacaggatatccatgatgcacatggcttgagataccagtggggcggctcccatagcaacaagaagcttttgtcctccttgggaatagacacccgaaacattctcttcacgggcaataagaagcagcctgttatagtgcccatgtatgcagcaggattgggtatgttagagcccaccaaggaaccactgaaaccactttctgctgcagaaaaaatagcttccatcggtcagacagccaccatgtcaccagatatgaacacatgtacatctgatcagttccaggagtctctaccacccgtccagtttgactggagtagcagtggccttactaaccctttagatgctagtggaggttccactcttctgaaccttgatttctttgggcccgtggatgacagtagctctagcagcagcaccacaatcccaggtgtggatccggagttgtatgagttaacaacttctaagctggaaatctccacctcaagcctcaaagtgactgatgcatttgcaagactcatgtctacagtagagaagacaagcacatctaccagtaggaaaccgaaaagagaagagcacctaagtgaagaagctatcaaggtgatcgctggccttcctgacttaacattcatgcatgccaaggtgttgatgttcccagccacgttaacaccttccacaagctctcaagaaaaagcagacggataactgatgtgaattggacagtttctattgcttttccttttttccatcccttccctaccatcaaaagcatacctgctctaattaaaaaaaaaaaaaaaaa

SEQ ID NO: 106079 - DNA, 2811 bp, Homo sapiens
  Payload ID: 793
  Gene Symbol: AFTPH
  Gene Name: aftiphilin
  Uniprot ID: Q6ULP2
  ENST ID: ENST00000409933
  CDS Start-End: 1-2811
atggagccagacatcattcgaatgtactcttcatccccaccaccattagacaatggagcagaggatgatgatgatgatgaatttggggaatttggtgggttttcagaagttagcccttctggtgtagggtttgttgatttcgatacaccagattatactcgtcccaaggaagagtttgtaccttcaaaccattttatgccaattcatgaattctcagaaaatgtagatagccttacaagctttaagtccattaaaaatggtaatgataaggacatcactgctgaactttctgctcctgtgaaaggacagtctgatgttttactttctaccaccagcaaagaaataatttcatctgaaatgttagctacttccattgatggcatggaaagaccaggaaatttaaataaagtagtggagcagagacagaatgttggaacacttgaaagtttctctccaggagattttagaactaatatgaatgttgttcatcaaaacaagcagttagagagctgcaatggtgaaaagcctccttgtctggagattctaacaaatgggtttgcagtgttggaaactgtaaatcctcagggaacagatgatctggacaatgtagctgattcaaagggacggaagcctcttagcactcatagcactgagtataatttagactctgtacctagtcctgctgaggaatttgcagattttgccacattttccaaaaaggaaaggatacaattagaagaaatagaatgtgcagttttaaatgatagagaagcactaaccattcgggaaaacaataaaattaatagagtcaatgaactgaattctgtaaaagaagtggctttgggtagaagcttggataacaaaggagacactgatggagaggatcaggtttgtgtttcagaaataagcatagtgactaacagaggtttcagtgttgaaaaacaaggccttccaacactgcaacaggatgaatttttacagtcaggtgttcagtcaaaggcttggagtttggtagactcagctgataattcagaagccattaggagagaacaatgtaaaactgaagaaaaacttgacttacttacttctaaatgtgctcacctatgcatggattctgttaaaacttctgatgatgaagttggttctcccaaagaagaaagtagaaagtttactaatttccaaagcccaaacattgaccccacagaagaaaatgatttggatgattctttaagtgtaaaaaatggtgatagtagtaatgactttgtgacttgcaatgatatcaatgaagatgattttggtgattttggtgactttggctctgccagtggctcaactccaccttttgttactggtactcaagattcaatgagtgatgccacttttgaagagtcttcagagcactttccacattttagtgaaccaggtgatgactttggagaatttggggatataaatgctgtttcttgccaagaggagacaatattaacaaagtcagacctaaaacagacttctgataatttatcagaagaatgtcaattggcaagaaaatctagtggaacaggcactgaacctgttgcaaaacttaaaaatgggcaagaaggtgagattggacattttgattctgtgccaaatattcaggatgactgcaatggttttcaagactctgatgattttgcagacttcagttcagctggtcctagccaagttgtagattggaatgcttttgaggatgaacaaaaagatagttgttcttgggctgcttttggagaccagcaggctactgaatctcatcatcgaaaggaagcctggcagtcacataggacagatgaaaatattgatactccaggaacccccaaaacgcacagtgtaccttcagcaacttccaaaggagcagttgctagtggccatttacaggaatcagccacttcagttcagacagctttattaaaccgcctggagcgaattttcgaagcatgttttccttccatacttgtccctgatgctgaagaggaagttacttccctgaagcacttgctggaaacaagcactttgccaataaaaacgagagaggccttacctgaaagtggggaattgctagatgtgtggactgagctacaggatatccatgatgcacatggcttgagataccagtggggcggctcccatagcaacaagaagcttttgtcctccttgggaatagacacccgaaacattctcttcacgggcaataagaagcagcctgttatagtgcccatgtatgcagcaggattgggtatgttagagcccaccaaggaaccactgaaaccactttctgctgcagaaaaaatagcttccatcggtcagacagccaccatgtcaccagatatgaacacatgtacatctgatcagttccaggagtctctaccacccgtccagtttgactggagtagcagtggccttactaaccctttagatgctagtggaggttccactcttctgaaccttgatttctttgggcccgtggatgacagtagctctagcagcagcaccacaatcccaggtgtggatccggagttgtatgagttaacaacttctaagctggaaatctccacctcaagcctcaaagtgactgatgcatttgcaagactcatgtctacagtagagaagacaagcacatctaccaggaaaccgaaaagagaagagcacctaagtgaagaagctatcaaggtgatcgctggccttcctgacttaacattcatgcatgccaaggtgttgatgttcccagccacgttaacaccttccacaagctctcaagaaaaagcagacggataa

SEQ ID NO: 106080 - DNA, 1525 bp, Homo sapiens
  Payload ID: 793
  Gene Symbol: AFTPH
  Gene Name: aftiphilin
  ENST ID: ENST00000422803
  CDS Start-End: 86-502
caacaagaagcttttgtcctccttgggaatagacacccgaaacattctcttcacgggcaataagaagcagcctgttatagtgcccatgtatgcagcaggattgggtatgttagagcccaccaaggaaccactgaaaccactttctgctgcagaaaaaatagcttccatcggtcagacagccaccatgtcaccagatatgaacacatgtacatctgatcagttccaggagtctctaccacccgtccagtttgactggagtagcagtggccttactaaccctttagatggtgtggatccggagttgtatgagttaacaacttctaagctggaaatctccacctcaagcctcaaagtgactgatgcatttgcaagactcatgtctacagtagagaagacaagcacatctaccaggaaaccgaaaagagaagagcacctaagtgaagaagctatcaaggtgatcgctggccttcctgacttaacattcatgcatgccaaggtgtgatgttcccagccacgttaacaccttccacaagctctcaagaaaaagcagacggataactgatgtgaattggacagtttctattgcttttccttttttccatcccttccctaccatcaaaagcatacctgctctaattaaaaaaaaaaaaaaaaaaaattcaagttcagctgatttgttggtaagccgcactagaaaggtatacatagtaatgtatatttatttacatactgaagtcctaaatttatattagaaaaatgtaaataatcgggggtaaacatttttgaagatttattctttttgtgttgctggggtgtatacatttatgtctttgtgaaatacactggtggtgtccttcttacaaaacttttgaaataaaaaaaaaactcaaatcttcactgtctgtgaaatccccttcagtcttttcagattgcattgactgtcctcttgatttttcatattacatgtcaaattacttttgctatcataaataagctccaaagtcccccatttaatttttttttaattttgtgtatgatgggtttcagatctggcttttgttaacattttggggcttttttaatcttttcaatctggcgtattgctgtttgaccttttgcaaggtacttaattgctcttttgttatagggtatggatcattgtcagaacttgattggaggggtttaaagagattgtgtctgtttaaaatcagtatgattcagagaaggaccaaattatatgaatgtcttacaatggaatttacttgttactgatttttttgttctattgtaccactattttttgaggattttgcacagtgtaaaatgacataatcatagattgctatggtttaggctgtatatacagtgaaaactatgggttttaaatgtttggggaaattcctatggaaaaaagagagacatgtagaagaacctctaacaaggttaatgtgcatgcccaaggtcttttgaaatttcagtgtgtaaatttccttttagcttatacaaaaataaaataatttaaaag

SEQ ID NO: 106081 - DNA, 793 bp, Homo sapiens
  Payload ID: 793
  Gene Symbol: AFTPH
  Gene Name: aftiphilin
  ENST ID: ENST00000487769
  CDS Start-End: 1-684
tttccacattttagtgaaccaggtgatgactttggagaatttggggatataaatgctgtttcttgccaagaggagacaatattaacaaagtcagacctaaaacagacttctgataatttatcagaagaatgtcaattggcaagaaaatctagtggaacaggcactgaacctgttgcaaaacttaaaaatgggcaagaaggtgagattggacattttgattctgtgccaaatattcaggatgactgcaatggttttcaagactctgatgattttgcagacttcagttcagctggtcctagccaagttgtagattggaatgcttttgaggatgaacaaaaagatagttgttcttgggctgcttttggagaccagcaggctactgaatctcatcatcgaaaggaagcctggcagtcacataggacagatgaaaatattgatactccaggaacccccaaaacgcacagtgtaccttcagcaacttccaaaggagcagttgctagtggccatttacaggaatcagccacttcagttcagggtatgttagagcccaccaaggaaccactgaaaccactttctgctgcagaaaaaatagcttccatcggtcagacagccaccatgtcaccagatatgaacacatgtacatctgatcagttccaggtgtggatccggagttgtatgagttaacaacttctaagctggaaatctccacctcaagcctcaaagtgactgatgcatttgcaagactcatgtctacagtagagaagacaagcacatctaccagtaggaaaccgaa

SEQ ID NO: 106082 - DNA, 818 bp, Homo sapiens
  Payload ID: 794
  Gene Symbol: ARMS2
  Gene Name: age-related maculopathy susceptibility 2
  Uniprot ID: P0C7Q2
  ENST ID: ENST00000528446
  CDS Start-End: 76-399
ctggctgagtgagatggcagctggcttggcaaggggacagcacctttgtcaccacattatgtccctgtaccctacatgctgcgcctatacccaggaccgatggtaactgaggcggaggggaaaggagggcctgagatggcaagtctgtcctcctcggtggttcctgtgtccttcatttccactctgcgagagtctgtgctggaccctggagttggtggagaaggagccagtgacaagcagaggagcaaactgtctttatcacactccatgatcccagctgctaaaatccacactgagctctgcttaccagccttcttctctcctgctggaacccagaggaggttccagcagcctcagcaccacctgacactgtctatcatccacactgcagcaaggtgattctgccaaaacatatctccttaaaagccaactggagcttctcatcagcatcaatgtgaagccaaaaatccttaggaggacagagggagtccctcacaacctagactggtccccttccctccagctgcctcaactgtccacaggactctcttcccacctgcggccacactgtgcaacctggaatttccccacctgggcggactcatcacgtcatcaccaattggatgcatcttctgctctgtgcagctggtgaaatctttctcaacccttgagatgcagcccaatcttctcctaacatctggattcctctctgtcactgcattccctcctgtcatcctgcctttgttttcttgccctcctttctctcccgggtgataggcattaactaaaattaaataaaaattcagatcatccttgca

SEQ ID NO: 106083 - DNA, 7526 bp, Homo sapiens
  Payload ID: 795
  Gene Symbol: ACAN
  Gene Name: aggrecan
  ENST ID: ENST00000352105
  CDS Start-End: 59-7354
gccaggtgtgtgggactgaagttcttggagaagggagtccaactcttcaaggtgaactatgaccactttactctgggttttcgtgactctgagggtcatcactgcagctgtcactgtagaaacttcagaccatgacaactcgctgagtgtcagcatcccccaaccgtccccgctgagggtcctcctggggacctccctcaccatcccctgctatttcatcgaccccatgcaccctgtgaccaccgccccttctaccgccccactggccccaagaatcaagtggagccgtgtgtccaaggagaaggaggtagtgctgctggtggccactgaagggcgcgtgcgggtcaacagtgcctatcaggacaaggtctcactgcccaactacccggccatccccagtgacgccaccttggaagtccagagcctgcgctccaatgactctggggtctaccgctgcgaggtgatgcatggcatcgaggacagcgaggccaccctggaagtcgtggtgaaaggcatcgtgttccattacagagccatctctacacgctacaccctcgactttgacagggcgcagcgggcctgcctgcagaacagtgccatcattgccacgcctgagcagctgcaggccgcctacgaagacggcttccaccagtgtgacgccggctggctggctgaccagactgtcagataccccatccacactccccgggaaggctgctatggagacaaggatgagtttcctggtgtgaggacgtatggcatccgagacaccaacgagacctatgatgtgtactgcttcgccgaggagatggagggtgaggtcttttatgcaacatctccagagaagttcaccttccaggaagcagccaatgagtgccggcggctgggtgcccggctggccaccacgggccagctctacctggcctggcaggctggcatggacatgtgcagcgccggctggctggccgaccgcagcgtgcgctaccccatctccaaggcccggcccaactgcggtggcaacctcctgggcgtgaggaccgtctacgtgcatgccaaccagacgggctaccccgacccctcatcccgctacgacgccatctgctacacaggtgaagactttgtggacatcccagaaaacttctttggagtggggggtgaggaggacatcaccgtccagacagtgacctggcctgacatggagctgccactgcctcgaaacatcactgagggtgaagcccgaggcagcgtgatccttaccgtaaagcccatcttcgaggtctcccccagtcccctggaacccgaggagcccttcacgtttgcccctgaaataggggccactgccttcgctgaggttgagaatgagactggagaggccaccaggccctggggctttcccacacctggcctgggccctgccacggcattcaccagtgaggacctcgtcgtgcaggtgaccgctgtccctgggcagccgcatttgccagggggggtcgtcttccactaccgcccgggacccacccgctactcgctgacctttgaggaggcacagcaggcctgcctgcgcacgggggcggtcattgcctcgccggagcagctccaggccgcctacgaagcaggctatgagcagtgtgacgccggctggctgcgggaccagaccgtcagataccccattgtgagcccccggaccccatgcgtgggtgacaaggacagcagcccaggggtcaggacctatggcgtgcgcccatcaacagagacctacgatgtctactgctttgtagacagacttgagggggaggtgttcttcgccacacgccttgagcagttcaccttccaggaagcactggagttctgtgaatctcacaatgctacgctggccaccacgggccagctctacgccgcctggagccgcggcctggacaagtgctatgccggctggctggccgacggcagcctccgctaccccatcgtcaccccaaggcctgcctgcggtggggacaagccaggcgtgagaacggtctacctctaccctaaccagacgggcctcccagacccactgtcccggcaccatgccttctgcttccgaggcatttcagcggttccttctccaggagaagaagagggtggcacacccacatcaccctctggtgtggaggagtggatcgtgacccaagtggttcctggtgtggctgctgtccccgtagaagaggagacaactgctgtaccctcaggggagactactgccatcctagagttcaccaccgagccagaaaaccagacagaatgggaaccagcctataccccagtgggcacatccccgctgccagggatccttcctacttggcctcccactggcgcagcaacagaggaaagtacagaaggcccttctgcaactgaagtgccctctgcctcagaggaaccatccccctcagaggtgccattcccctcagaggagccatccccctcagaggaaccattcccctcagtgaggccattcccctcagtggagctgttcccctcagaggagccattcccctccaaggagccatccccctcagaggaaccatcagcctcggaagagccgtatacaccttcaccccccgtgcccagctggactgagctgcccagctctggggaggaatctggggcccctgatgtcagtggtgacttcacaggcagtggagatgtttcaggacaccttgacttcagtgggcagctgtcaggggacagggcaagtggactgccctctggagacctggactccagtggtcttacttccacagtgggctcaggcctgcctgtggaaagtggactaccctcaggggatgaagagagaattgagtggcccagcactcctacggttggtgaactgccctctggagctgagatcctagagggctctgcctctggagttggggatctcagtggacttccttctggagaagttctagagacctctgcctctggagtaggagacctcagtgggcttccttctggagaagttctagagaccactgcccctggagtagaggacatcagcgggcttccttctggagaagttctagagaccactgcccctggagtagaggacatcagcgggcttccttctggagaagttctagagaccactgcccctggagtagaggacatcagcgggcttccttctggagaagttctagagaccactgcccctggagtagaggacatcagcgggcttccttctggagaagttctagagaccactgcccctggagtagaggacatcagcgggcttccttctggagaagttctagagaccactgcccctggagtagaggacatcagcgggcttccttctggagaagttctagagaccgctgcccctggagtagaggacatcagcgggcttccttctggagaagttctagagaccgctgcccctggagtagaggacatcagcgggcttccttctggagaagttctagagaccgctgcccctggagtagaggacatcagcgggcttccttctggagaagttctagagaccgctgcccctggagtagaggacatcagcgggcttccttctggagaagttctagagaccgctgcccctggagtagaggacatcagcgggcttccttctggagaagttctagagaccgctgcccctggagtagaggacatcagcgggcttccttctggagaagttctagagaccgctgcccctggagtagaggacatcagcgggcttccttctggagaagttctagagactgctgcccctggagtagaggacatcagcgggcttccttctggagaagttctagagactgctgcccctggagtagaggacatcagcgggcttccttctggagaagttctagagactgctgcccctggagtagaggacatcagcgggcttccttctggagaagttctagagactgctgcccctggagtagaggacatcagcgggcttccttctggagaagttctagagactgctgcccctggagtagaggacatcagcgggcttccttctggagaagttctagagactgctgcccctggagtagaggacatcagcgggcttccttctggagaagttctagagactgctgcccctggagtagaggacatcagcgggcttccttctggagaagttctagagactgctgcccctggagtagaggacatcagcgggcttccttctggagaagttctagagactgctgcccctggagtagaggacatcagcgggcttccttctggagaagttctagagactactgcccctggagtagaggagatcagcgggcttccttctggagaagttctagagactactgcccctggagtagatgagatcagtgggcttccttctggagaagttctagagactactgcccctggagtagaggagatcagcgggcttccttctggagaagttctagagacttctacctctgcggtaggggacctcagtggacttccttctggaggagaagttctagagatttctgtctctggagtagaggacatcagtgggcttccttctggagaggttgtagagacttctgcctctggaatagaggatgtcagtgaacttccttcaggagaaggtctagagacctctgcttctggagtagaggacctcagcaggctcccttctggagaagaagttctagagatttctgcctctggatttggggacctcagtggacttccttctggaggagaaggtctagagacctctgcttctgaagtagggactgacctcagtgggcttccttctggaagggagggtctagagacttcagcttctggagctgaggacctcagtgggttgccttctggaaaagaagacttggtggggtcagcttctggagacttggacttgggcaaactgccttctggaactctaggaagtgggcaagctccagaaacaagtggtcttccctctggatttagtggtgagtattctggggtggaccttggaagtggcccaccctctggcctgcctgactttagtggacttccatctggattcccaactgtttccctagtggattctacattggtggaagtggtcacagcctccactgcaagtgaactggaagggaggggaaccattggcatcagtggtgcaggagaaatatctggactgccctccagtgagctggacattagtgggagagctagtggactcccttcaggaactgaactcagtggccaagcatctgggtctcctgatgtcagtggggaaatacctggactctttggtgtcagtggacagccatcagggtttcctgacactagtggggaaacatctggagtgactgagcttagcgggctgtcctctggacaaccaggtattagtggagaagcatctggagttctttatggcactagtcaaccctttggcataactgatctgagtggagaaacatctggggtccctgatctcagtgggcagccttcagggttaccagggttcagtggggcaacatcaggagtccctgacctggtttctggtaccacgagtggcagcggtgaatcttctgggattacatttgtggacaccagtttggttgaagtggcccctactacatttaaagaagaagaaggcttagggtctgtggaactcagtggcctcccttccggagaggcagatctgtcaggcaaatctgggatggtggatgtcagtggacagttttctggaacagtcgattccagtgggtttacatcccagactccggaattcagtggcctaccaagtggcatagctgaggtcagtggagaatcctccagagctgagattgggagcagcctgccctcgggagcatattatggcagtggaactccatctagtttccccactgtctctcttgtagacagaactttggtggaatctgtaacccaggctccaacagcccaagaggcaggagaagggccttctggcattttagaactcagtggtgctcattctggagcaccagacatgtctggggagcattctggatttctggacctaagtgggctgcagtccgggctgatagagcccagcggagagccaccaggtactccatattttagtggggattttgccagcaccaccaatgtaagtggagaatcctctgtagccatgggcaccagtggagaggcctcaggacttccagaagttactttaatcacttctgagttcgtggagggtgttactgaaccaactatttctcaggaactaggccaaaggccccctgtgacacacacaccccagctttttgagtccagtggaaaagtctccacagctggggacattagtggagctaccccagtgctccctgggtctggagtagaagtatcatcagtcccagaatctagcagtgagacgtccgcctatcctgaagctgggttcggggcatctgccgcccctgaggccagcagagaagattctgggtcccctgatctgagtgaaaccacctctgcattccacgaagctaaccttgagagatcctctggcctaggagtgagcggcagcactttgacatttcaagaaggcgaggcgtccgctgccccagaagtgagtggagaatccaccaccaccagtgatgtggggacagaggcaccaggcttgccttcagccactcccacggcttctggagacaggactgaaatcagcggagacctgtctggtcacacctcgcagctgggcgttgtcatcagcaccagcatcccagagtctgagtggacccagcagacccagcgccctgcagagacgcatctagaaattgagtcctcaagcctcctgtactcaggagaagagactcacacagtcgaaacagccacctccccaacagatgcttccatcccagcttctccggaatggaaacgtgaatcagaatcaactgctgcagaccaggaggtatgtgaggagggctggaacaagtaccagggccactgttaccgccacttcccggaccgcgagacctgggtggatgctgagcgccggtgtcgggagcagcagtcacacctgagcagcatcgtcacccccgaggagcaggagtttgtcaacaacaatgcccaagactaccagtggatcggcctgaacgacaggaccatcgaaggggacttccgctggtcagatggacaccccatgcaatttgagaactggcgccccaaccagcctgacaacttttttgccgctggagaggactgtgtggtgatgatctggcacgagaagggcgagtggaatgatgttccctgcaattaccacctccccttcacgtgtaaaaagggcacagccaccacctacaaacgcagactacagaagcggagctcacggcaccctcggaggagccgccccagcacagcccactgagaagagcttccaggacgcacccaggacgctgagcccaggagcctgccaggctgacgtgcatcccacccagacggtgtcctcttcttgtcgctttttgtcatataaggaatcccattaaagaaggaaaaaaataaatcccacatttgtgtatgcacccactcacccctccaaa

SEQ ID NO: 106084 - DNA, 8840 bp, Homo sapiens
  Payload ID: 795
  Gene Symbol: ACAN
  Gene Name: aggrecan
  ENST ID: ENST00000439576
  CDS Start-End: 375-7967
cacctacctccccgccgctccagagggggctcgcagagctgaggacgcgcgcagcgctgctcaaggtctctctctctcagcaccctcgccggccggcgtctgacgcgggtgccagggtctccgggcacctttcagtgtccattccctcagccagccaggactccgcaacccagcagttgccgctgcggccacagcccgaggggacctgcggacaggacgccggcaggaggaggggtgcgcagcgcccgcgcagagcgtctccctcgctacgcagcgagacccgggcctcccggccccaggagcccccagctgcctcgccaggtgtgtgggactgaagttcttggagaagggagtccaactcttcaaggtgaactatgaccactttactctgggttttcgtgactctgagggtcatcactgcagctgtcactgtagaaacttcagaccatgacaactcgctgagtgtcagcatcccccaaccgtccccgctgagggtcctcctggggacctccctcaccatcccctgctatttcatcgaccccatgcaccctgtgaccaccgccccttctaccgccccactggccccaagaatcaagtggagccgtgtgtccaaggagaaggaggtagtgctgctggtggccactgaagggcgcgtgcgggtcaacagtgcctatcaggacaaggtctcactgcccaactacccggccatccccagtgacgccaccttggaagtccagagcctgcgctccaatgactctggggtctaccgctgcgaggtgatgcatggcatcgaggacagcgaggccaccctggaagtcgtggtgaaaggcatcgtgttccattacagagccatctctacacgctacaccctcgactttgacagggcgcagcgggcctgcctgcagaacagtgccatcattgccacgcctgagcagctgcaggccgcctacgaagacggcttccaccagtgtgacgccggctggctggctgaccagactgtcagataccccatccacactccccgggaaggctgctatggagacaaggatgagtttcctggtgtgaggacgtatggcatccgagacaccaacgagacctatgatgtgtactgcttcgccgaggagatggagggtgaggtcttttatgcaacatctccagagaagttcaccttccaggaagcagccaatgagtgccggcggctgggtgcccggctggccaccacgggccagctctacctggcctggcaggctggcatggacatgtgcagcgccggctggctggccgaccgcagcgtgcgctaccccatctccaaggcccggcccaactgcggtggcaacctcctgggcgtgaggaccgtctacgtgcatgccaaccagacgggctaccccgacccctcatcccgctacgacgccatctgctacacaggtgaagactttgtggacatcccagaaaacttctttggagtggggggtgaggaggacatcaccgtccagacagtgacctggcctgacatggagctgccactgcctcgaaacatcactgagggtgaagcccgaggcagcgtgatccttaccgtaaagcccatcttcgaggtctcccccagtcccctggaacccgaggagcccttcacgtttgcccctgaaataggggccactgccttcgctgaggttgagaatgagactggagaggccaccaggccctggggctttcccacacctggcctgggccctgccacggcattcaccagtgaggacctcgtcgtgcaggtgaccgctgtccctgggcagccgcatttgccagggggggtcgtcttccactaccgcccgggacccacccgctactcgctgacctttgaggaggcacagcaggcctgcctgcgcacgggggcggtcattgcctcgccggagcagctccaggccgcctacgaagcaggctatgagcagtgtgacgccggctggctgcgggaccagaccgtcagataccccattgtgagcccccggaccccatgcgtgggtgacaaggacagcagcccaggggtcaggacctatggcgtgcgcccatcaacagagacctacgatgtctactgctttgtagacagacttgagggggaggtgttcttcgccacacgccttgagcagttcaccttccaggaagcactggagttctgtgaatctcacaatgctacgctggccaccacgggccagctctacgccgcctggagccgcggcctggacaagtgctatgccggctggctggccgacggcagcctccgctaccccatcgtcaccccaaggcctgcctgcggtggggacaagccaggcgtgagaacggtctacctctaccctaaccagacgggcctcccagacccactgtcccggcaccatgccttctgcttccgaggcatttcagcggttccttctccaggagaagaagagggtggcacacccacatcaccctctggtgtggaggagtggatcgtgacccaagtggttcctggtgtggctgctgtccccgtagaagaggagacaactgctgtaccctcaggggagactactgccatcctagagttcaccaccgagccagaaaaccagacagaatgggaaccagcctataccccagtgggcacatccccgctgccagggatccttcctacttggcctcccactggcgcagcaacagaggaaagtacagaaggcccttctgcaactgaagtgccctctgcctcagaggaaccatccccctcagaggtgccattcccctcagaggagccatccccctcagaggaaccattcccctcagtgaggccattcccctcagtggagctgttcccctcagaggagccattcccctccaaggagccatccccctcagaggaaccatcagcctcggaagagccgtatacaccttcaccccccgtgcccagctggactgagctgcccagctctggggaggaatctggggcccctgatgtcagtggtgacttcacaggcagtggagatgtttcaggacaccttgacttcagtgggcagctgtcaggggacagggcaagtggactgccctctggagacctggactccagtggtcttacttccacagtgggctcaggcctgcctgtggaaagtggactaccctcaggggatgaagagagaattgagtggcccagcactcctacggttggtgaactgccctctggagctgagatcctagagggctctgcctctggagttggggatctcagtggacttccttctggagaagttctagagacctctgcctctggagtaggagacctcagtgggcttccttctggagaagttctagagaccactgcccctggagtagaggacatcagcgggcttccttctggagaagttctagagaccactgcccctggagtagaggacatcagcgggcttccttctggagaagttctagagaccactgcccctggagtagaggacatcagcgggcttccttctggagaagttctagagaccactgcccctggagtagaggacatcagcgggcttccttctggagaagttctagagaccactgcccctggagtagaggacatcagcgggcttccttctggagaagttctagagaccactgcccctggagtagaggacatcagcgggcttccttctggagaagttctagagaccgctgcccctggagtagaggacatcagcgggcttccttctggagaagttctagagaccgctgcccctggagtagaggacatcagcgggcttccttctggagaagttctagagaccgctgcccctggagtagaggacatcagcgggcttccttctggagaagttctagagaccgctgcccctggagtagaggacatcagcgggcttccttctggagaagttctagagaccgctgcccctggagtagaggacatcagcgggcttccttctggagaagttctagagaccgctgcccctggagtagaggacatcagcgggcttccttctggagaagttctagagaccgctgcccctggagtagaggacatcagcgggcttccttctggagaagttctagagactgctgcccctggagtagaggacatcagcgggcttccttctggagaagttctagagactgctgcccctggagtagaggacatcagcgggcttccttctggagaagttctagagactgctgcccctggagtagaggacatcagcgggcttccttctggagaagttctagagactgctgcccctggagtagaggacatcagcgggcttccttctggagaagttctagagactgctgcccctggagtagaggacatcagcgggcttccttctggagaagttctagagactgctgcccctggagtagaggacatcagcgggcttccttctggagaagttctagagactgctgcccctggagtagaggacatcagcgggcttccttctggagaagttctagagactgctgcccctggagtagaggacatcagcgggcttccttctggagaagttctagagactgctgcccctggagtagaggacatcagcgggcttccttctggagaagttctagagactactgcccctggagtagaggagatcagcgggcttccttctggagaagttctagagactactgcccctggagtagatgagatcagtgggcttccttctggagaagttctagagactactgcccctggagtagaggagatcagcgggcttccttctggagaagttctagagacttctacctctgcggtaggggacctcagtggacttccttctggaggagaagttctagagatttctgtctctggagtagaggacatcagtgggcttccttctggagaggttgtagagacttctgcctctggaatagaggatgtcagtgaacttccttcaggagaaggtctagagacctctgcttctggagtagaggacctcagcaggctcccttctggagaagaagttctagagatttctgcctctggatttggggacctcagtggacttccttctggaggagaaggtctagagacctctgcttctgaagtagggactgacctcagtgggcttccttctggaagggagggtctagagacttcagcttctggagctgaggacctcagtgggttgccttctggaaaagaagacttggtggggtcagcttctggagacttggacttgggcaaactgccttctggaactctaggaagtgggcaagctccagaaacaagtggtcttccctctggatttagtggtgagtattctggggtggaccttggaagtggcccaccctctggcctgcctgactttagtggacttccatctggattcccaactgtttccctagtggattctacattggtggaagtggtcacagcctccactgcaagtgaactggaagggaggggaaccattggcatcagtggtgcaggagaaatatctggactgccctccagtgagctggacattagtgggagagctagtggactcccttcaggaactgaactcagtggccaagcatctgggtctcctgatgtcagtggggaaatacctggactctttggtgtcagtggacagccatcagggtttcctgacactagtggggaaacatctggagtgactgagcttagcgggctgtcctctggacaaccaggtattagtggagaagcatctggagttctttatggcactagtcaaccctttggcataactgatctgagtggagaaacatctggggtccctgatctcagtgggcagccttcagggttaccagggttcagtggggcaacatcaggagtccctgacctggtttctggtaccacgagtggcagcggtgaatcttctgggattacatttgtggacaccagtttggttgaagtggcccctactacatttaaagaagaagaaggcttagggtctgtggaactcagtggcctcccttccggagaggcagatctgtcaggcaaatctgggatggtggatgtcagtggacagttttctggaacagtcgattccagtgggtttacatcccagactccggaattcagtggcctaccaagtggcatagctgaggtcagtggagaatcctccagagctgagattgggagcagcctgccctcgggagcatattatggcagtggaactccatctagtttccccactgtctctcttgtagacagaactttggtggaatctgtaacccaggctccaacagcccaagaggcaggagaagggccttctggcattttagaactcagtggtgctcattctggagcaccagacatgtctggggagcattctggatttctggacctaagtgggctgcagtccgggctgatagagcccagcggagagccaccaggtactccatattttagtggggattttgccagcaccaccaatgtaagtggagaatcctctgtagccatgggcaccagtggagaggcctcaggacttccagaagttactttaatcacttctgagttcgtggagggtgttactgaaccaactatttctcaggaactaggccaaaggccccctgtgacacacacaccccagctttttgagtccagtggaaaagtctccacagctggggacattagtggagctaccccagtgctccctgggtctggagtagaagtatcatcagtcccagaatctagcagtgagacgtccgcctatcctgaagctgggttcggggcatctgccgcccctgaggccagcagagaagattctgggtcccctgatctgagtgaaaccacctctgcattccacgaagctaaccttgagagatcctctggcctaggagtgagcggcagcactttgacatttcaagaaggcgaggcgtccgctgccccagaagtgagtggagaatccaccaccaccagtgatgtggggacagaggcaccaggcttgccttcagccactcccacggcttctggagacaggactgaaatcagcggagacctgtctggtcacacctcgcagctgggcgttgtcatcagcaccagcatcccagagtctgagtggacccagcagacccagcgccctgcagagacgcatctagaaattgagtcctcaagcctcctgtactcaggagaagagactcacacagtcgaaacagccacctccccaacagatgcttccatcccagcttctccggaatggaaacgtgaatcagaatcaactgctgcagcccccgccaggtcctgtgcagaggagccctgtggagctgggacctgcaaggagacagagggacacgtcatatgcctgtgcccccctggctacactggcgagcactgtaacatagaccaggaggtatgtgaggagggctggaacaagtaccagggccactgttaccgccacttcccggaccgcgagacctgggtggatgctgagcgccggtgtcgggagcagcagtcacacctgagcagcatcgtcacccccgaggagcaggagtttgtcaacaacaatgcccaagactaccagtggatcggcctgaacgacaggaccatcgaaggggacttccgctggtcagatggacaccccatgcaatttgagaactggcgccccaaccagcctgacaacttttttgccgctggagaggactgtgtggtgatgatctggcacgagaagggcgagtggaatgatgttccctgcaattaccacctccccttcacgtgtaaaaagggcacagtggcctgcggagagccccctgtggtggagcatgccaggaccttcgggcagaagaaggaccggtatgagatcaattccctggtgcggtaccagtgcacagaggggtttgtccagcgccacatgcccaccatccggtgccagcccagcgggcactgggaggagcctcagatcacctgcacagaccccaccacctacaaacgcagactacagaagcggagctcacggcaccctcggaggagccgccccagcacagcccactgagaagagcttccaggacgcacccaggacgctgagcccaggagcctgccaggctgacgtgcatcccacccagacggtgtcctcttcttgtcgctttttgtcatataaggaatcccattaaagaaggaaaaaaataaatcccacatttgtgtatgcacccactcacccctccaaatcagcaaaaccgcatctaatttgtccgccgaatgccaaagcaaagcaaacttattataacccttggactgagtttagagacatttcttcaatttcccatcgtgcctttccagggaccagtgcagggacagggggagaaggggaggggttaagttaaataaagaagattatttttgtttcctgactttatccaagagcagtgcaatcgttggttatttcacctccagggagagctagggaggagggaggagggctccaaaggagctggaaggagcagaggcctgagagcaggaagaactcggaaccgcagctgaatgtattggatgagaaggagccaggagggctacaccatctgtatgagggaaaagccttgggggagaggggtgggttcctgcctcctgccgagggtaagccggcaggagagagccatcagagggacctccgctgcctgggagttgggttccctccaagggtccctctttcagtgtcctctctctcacctgggtctgccaccctaacaggtggcaactcggcagggctgctgggggcacttcctgcccagtggggggtgccgcccaaccttctcccctccccacccccgcccccgggaccgtgcaggcaccagggttccgtgcacctatttatatttttgaaaactgaagattataatattataataataataaagacattggaagagat

SEQ ID NO: 106085 - DNA, 712 bp, Homo sapiens
  Payload ID: 795
  Gene Symbol: ACAN
  Gene Name: aggrecan
  ENST ID: ENST00000558704
  CDS Start-End: 1-470
agtggaatgatgttccctgcaattaccacctccccttcacgtgtaaaaagggcacagtggcctgcggagagccccctgtggtggagcatgccaggaccttcgggcagaagaaggaccggtatgagatcaattccctggtgcggtaccagtgcacagaggggtttgtccagcgccacatgcccaccatccggtgccagcccagcgggcactgggaggagcctcagatcacctgcacagaccgtgagcatcaccccggccatctcgctgagcacaggccaccacctacaaacgcagactacagaagcggagctcacggcaccctcggaggagccgccccagcacagcccactgagaagagcttccaggacgcacccaggacgctgagcccaggagcctgccaggctgacgtgcatcccacccagacggtgtcctcttcttgtcgctttttgtcatataaggaatcccattaaagaaggaaaaaaataaatcccacatttgtgtatgcacccactcacccctccaaatcagcaaaaccgcatctaatttgtccgccgaatgccaaagcaaagcaaacttattataacccttggactgagtttagagacatttcttcaatttcccatcgtgcctttccagggaccagtgcagggacagggggagaaggggaggggttaagttaaataaagaagattatttttgtttcctgacttta

SEQ ID NO: 106086 - DNA, 4159 bp, Homo sapiens
  Payload ID: 795
  Gene Symbol: ACAN
  Gene Name: aggrecan
  ENST ID: ENST00000558207
  CDS Start-End: 344-2509
cgcagagctgaggacgcgcgcagcgctgctcaaggtctctctctctcagcaccctcgccggccggcgtctgacgcgggtgccagggtctccgggcacctttcagtgtccattccctcagccagccaggactccgcaacccagcagttgccgctgcggccacagcccgaggggacctgcggacaggacgccggcaggaggaggggtgcgcagcgcccgcgcagagcgtctccctcgctacgcagcgagacccgggcctcccggccccaggagcccccagctgcctcgccaggtgtgtgggactgaagttcttggagaagggagtccaactcttcaaggtgaactatgaccactttactctgggttttcgtgactctgagggtcatcactgcagctgtcactgtagaaacttcagaccatgacaactcgctgagtgtcagcatcccccaaccgtccccgctgagggtcctcctggggacctccctcaccatcccctgctatttcatcgaccccatgcaccctgtgaccaccgccccttctaccgccccactggccccaagaatcaagtggagccgtgtgtccaaggagaaggaggtagtgctgctggtggccactgaagggcgcgtgcgggtcaacagtgcctatcaggacaaggtctcactgcccaactacccggccatccccagtgacgccaccttggaagtccagagcctgcgctccaatgactctggggtctaccgctgcgaggtgatgcatggcatcgaggacagcgaggccaccctggaagtcgtggtgaaaggcatcgtgttccattacagagccatctctacacgctacaccctcgactttgacagggcgcagcgggcctgcctgcagaacagtgccatcattgccacgcctgagcagctgcaggccgcctacgaagacggcttccaccagtgtgacgccggctggctggctgaccagactgtcagataccccatccacactccccgggaaggctgctatggagacaaggatgagtttcctggtgtgaggacgtatggcatccgagacaccaacgagacctatgatgtgtactgcttcgccgaggagatggagggtgaggtcttttatgcaacatctccagagaagttcaccttccaggaagcagccaatgagtgccggcggctgggtgcccggctggccaccacgggccagctctacctggcctggcaggctggcatggacatgtgcagcgccggctggctggccgaccgcagcgtgcgctaccccatctccaaggcccggcccaactgcggtggcaacctcctgggcgtgaggaccgtctacgtgcatgccaaccagacgggctaccccgacccctcatcccgctacgacgccatctgctacacaggtgaagactttgtggacatcccagaaaacttctttggagtggggggtgaggaggacatcaccgtccagacagtgacctggcctgacatggagctgccactgcctcgaaacatcactgagggtgaagcccgaggcagcgtgatccttaccgtaaagcccatcttcgaggtctcccccagtcccctggaacccgaggagcccttcacgtttgcccctgaaataggggccactgccttcgctgaggttgagaatgagactggagaggccaccaggccctggggctttcccacacctggcctgggccctgccacggcattcaccagtgaggacctcgtcgtgcaggtgaccgctgtccctgggcagccgcatttgccagggggggtcgtcttccactaccgcccgggacccacccgctactcgctgacctttgaggaggcacagcaggcctgcctgcgcacgggggcggtcattgcctcgccggagcagctccaggccgcctacgaagcaggctatgagcagtgtgacgccggctggctgcgggaccagaccgtcagataccccattgtgagcccccggaccccatgcgtgggtgacaaggacagcagcccaggggtcaggacctatggcgtgcgcccatcaacagagacctacgatgtctactgctttgtagacagacttgagggggaggtgttcttcgccacacgccttgagcagttcaccttccaggaagcactggagttctgtgaatctcacaatgctacgctggccaccacgggccagctctacgccgcctggagccgcggcctggacaagtgctatgccggctggctggccgacggcagcctccgctaccccatcgtcaccccaaggcctgcctgcggtggggacaagccaggcgtgagaacggtctacctctaccctaaccagacgggcctcccagacccactgtcccggcaccatgccttctgcttccgaggtatgcagcctcacttcggctccaacagccccttttgtctggagaggaccccactgggttcaccggatcctgccaccacccagtatcccatccatcagagcaagaaaatgtcagtccctctggggcagagccagctctgaaaccagcacaacgcaggctttgaccccaaggcaaggtcatccttctaaagttccccagagacaagtagagataaataagaacttgagctggtatttatgtctactagaaatgaagcagacctgaatttgagttatggctctgctacttaatagctgtgtgaaaatggagatataatggttcctacttcagagagagctgcaagaattaattaagtgcacgtggtgcccttggcatagtgcctgggacacagtaaatgctcaataaatgttagctttatttcatatacatatctatatgtaaagctgtaatatatagctttattttgtacaacctgtaatttgtacactcttgtcaaattctctcctgcttgcaaatatttttgtgatgagtttagtcaaattattctattattcttcactaagcactggtggttcaagtttttcgttgacctatgctatggatatgctaccatttcaaccatcactccccactggacttctgagagtgatgtcatcaagcaatatagtaagcatggccagggcatagccacggaattgctgggctctggatgagttcctgcagagtccatggagggtctgggtgcatggaccagaatgtagattgtaataacagcctgtgccatgttttatagtttacatcaaaactgagtgtctttgcaacttcctgtgaatctagaattattctcaaataaacttaaggggaaaaaacttgagtgtccccaagtttcccagacatccagggtcaccttttaaaacccaattcaaggccaggagcagtggcttacgcctgtaatcccagcactttgggaggccaaggcaggcagatcacttgaggttaggagttcgagatcagcctggccaacatggtgaaaccctgtctctactaaaaaaaagtgcaaaaattagcctagtttggtggtgtgtacctgtaatcccagctactagggaggctgaggcaggagaatcacctcaacccaggaggcggaggttgcagtgagccgagattattctgctctactccagcctgggcagcagagcaagactctgtctcaaaaaaaaaaaaaaaaaattcaaagttcagccagcctcaataagtcaagtccaattctctcccagaggctttgatgaggctcttgtcccagtgccccttccctgctctgggaagcagaaaccaagccagttaacctcccagaaatttcccagccatgctgcccccagcctcccacccctgaccctccgtgaactcagccttgtgtattatcctgcacagttcagcttccttgctgaccaagcccactgctggtttcccccacaccagtacagttacccccagcccatgaatcctgccttcacgctttcaaatgccgagatggtttcatggaattgagtaccatcctcctatttttggtcgtgacacacttggaacataatccctgtcccccaaggttgttcagtagttgagagcgtggagtctggtaccagatgcttaaattcaaagactagatctgacatttgtaagccattgactctgggcaaatcatgtaactctgtgcctcagtttccccatctgtaaaatgagataatcatatctctctcataaagctgttgtgagataaagtgattttagat

SEQ ID NO: 106087 - DNA, 7593 bp, Homo sapiens
  Payload ID: 795
  Gene Symbol: ACAN
  Gene Name: aggrecan
  ENST ID: ENST00000561243
  CDS Start-End: 1-7593
atgaccactttactctgggttttcgtgactctgagggtcatcactgcagctgtcactgtagaaacttcagaccatgacaactcgctgagtgtcagcatcccccaaccgtccccgctgagggtcctcctggggacctccctcaccatcccctgctatttcatcgaccccatgcaccctgtgaccaccgccccttctaccgccccactggccccaagaatcaagtggagccgtgtgtccaaggagaaggaggtagtgctgctggtggccactgaagggcgcgtgcgggtcaacagtgcctatcaggacaaggtctcactgcccaactacccggccatccccagtgacgccaccttggaagtccagagcctgcgctccaatgactctggggtctaccgctgcgaggtgatgcatggcatcgaggacagcgaggccaccctggaagtcgtggtgaaaggcatcgtgttccattacagagccatctctacacgctacaccctcgactttgacagggcgcagcgggcctgcctgcagaacagtgccatcattgccacgcctgagcagctgcaggccgcctacgaagacggcttccaccagtgtgacgccggctggctggctgaccagactgtcagataccccatccacactccccgggaaggctgctatggagacaaggatgagtttcctggtgtgaggacgtatggcatccgagacaccaacgagacctatgatgtgtactgcttcgccgaggagatggagggtgaggtcttttatgcaacatctccagagaagttcaccttccaggaagcagccaatgagtgccggcggctgggtgcccggctggccaccacgggccagctctacctggcctggcaggctggcatggacatgtgcagcgccggctggctggccgaccgcagcgtgcgctaccccatctccaaggcccggcccaactgcggtggcaacctcctgggcgtgaggaccgtctacgtgcatgccaaccagacgggctaccccgacccctcatcccgctacgacgccatctgctacacaggtgaagactttgtggacatcccagaaaacttctttggagtggggggtgaggaggacatcaccgtccagacagtgacctggcctgacatggagctgccactgcctcgaaacatcactgagggtgaagcccgaggcagcgtgatccttaccgtaaagcccatcttcgaggtctcccccagtcccctggaacccgaggagcccttcacgtttgcccctgaaataggggccactgccttcgctgaggttgagaatgagactggagaggccaccaggccctggggctttcccacacctggcctgggccctgccacggcattcaccagtgaggacctcgtcgtgcaggtgaccgctgtccctgggcagccgcatttgccagggggggtcgtcttccactaccgcccgggacccacccgctactcgctgacctttgaggaggcacagcaggcctgcctgcgcacgggggcggtcattgcctcgccggagcagctccaggccgcctacgaagcaggctatgagcagtgtgacgccggctggctgcgggaccagaccgtcagataccccattgtgagcccccggaccccatgcgtgggtgacaaggacagcagcccaggggtcaggacctatggcgtgcgcccatcaacagagacctacgatgtctactgctttgtagacagacttgagggggaggtgttcttcgccacacgccttgagcagttcaccttccaggaagcactggagttctgtgaatctcacaatgctacgctggccaccacgggccagctctacgccgcctggagccgcggcctggacaagtgctatgccggctggctggccgacggcagcctccgctaccccatcgtcaccccaaggcctgcctgcggtggggacaagccaggcgtgagaacggtctacctctaccctaaccagacgggcctcccagacccactgtcccggcaccatgccttctgcttccgaggcatttcagcggttccttctccaggagaagaagagggtggcacacccacatcaccctctggtgtggaggagtggatcgtgacccaagtggttcctggtgtggctgctgtccccgtagaagaggagacaactgctgtaccctcaggggagactactgccatcctagagttcaccaccgagccagaaaaccagacagaatgggaaccagcctataccccagtgggcacatccccgctgccagggatccttcctacttggcctcccactggcgcagcaacagaggaaagtacagaaggcccttctgcaactgaagtgccctctgcctcagaggaaccatccccctcagaggtgccattcccctcagaggagccatccccctcagaggaaccattcccctcagtgaggccattcccctcagtggagctgttcccctcagaggagccattcccctccaaggagccatccccctcagaggaaccatcagcctcggaagagccgtatacaccttcaccccccgtgcccagctggactgagctgcccagctctggggaggaatctggggcccctgatgtcagtggtgacttcacaggcagtggagatgtttcaggacaccttgacttcagtgggcagctgtcaggggacagggcaagtggactgccctctggagacctggactccagtggtcttacttccacagtgggctcaggcctgcctgtggaaagtggactaccctcaggggatgaagagagaattgagtggcccagcactcctacggttggtgaactgccctctggagctgagatcctagagggctctgcctctggagttggggatctcagtggacttccttctggagaagttctagagacctctgcctctggagtaggagacctcagtgggcttccttctggagaagttctagagaccactgcccctggagtagaggacatcagcgggcttccttctggagaagttctagagaccactgcccctggagtagaggacatcagcgggcttccttctggagaagttctagagaccactgcccctggagtagaggacatcagcgggcttccttctggagaagttctagagaccactgcccctggagtagaggacatcagcgggcttccttctggagaagttctagagaccactgcccctggagtagaggacatcagcgggcttccttctggagaagttctagagaccactgcccctggagtagaggacatcagcgggcttccttctggagaagttctagagaccgctgcccctggagtagaggacatcagcgggcttccttctggagaagttctagagaccgctgcccctggagtagaggacatcagcgggcttccttctggagaagttctagagaccgctgcccctggagtagaggacatcagcgggcttccttctggagaagttctagagaccgctgcccctggagtagaggacatcagcgggcttccttctggagaagttctagagaccgctgcccctggagtagaggacatcagcgggcttccttctggagaagttctagagaccgctgcccctggagtagaggacatcagcgggcttccttctggagaagttctagagaccgctgcccctggagtagaggacatcagcgggcttccttctggagaagttctagagactgctgcccctggagtagaggacatcagcgggcttccttctggagaagttctagagactgctgcccctggagtagaggacatcagcgggcttccttctggagaagttctagagactgctgcccctggagtagaggacatcagcgggcttccttctggagaagttctagagactgctgcccctggagtagaggacatcagcgggcttccttctggagaagttctagagactgctgcccctggagtagaggacatcagcgggcttccttctggagaagttctagagactgctgcccctggagtagaggacatcagcgggcttccttctggagaagttctagagactgctgcccctggagtagaggacatcagcgggcttccttctggagaagttctagagactgctgcccctggagtagaggacatcagcgggcttccttctggagaagttctagagactgctgcccctggagtagaggacatcagcgggcttccttctggagaagttctagagactactgcccctggagtagaggagatcagcgggcttccttctggagaagttctagagactactgcccctggagtagatgagatcagtgggcttccttctggagaagttctagagactactgcccctggagtagaggagatcagcgggcttccttctggagaagttctagagacttctacctctgcggtaggggacctcagtggacttccttctggaggagaagttctagagatttctgtctctggagtagaggacatcagtgggcttccttctggagaggttgtagagacttctgcctctggaatagaggatgtcagtgaacttccttcaggagaaggtctagagacctctgcttctggagtagaggacctcagcaggctcccttctggagaagaagttctagagatttctgcctctggatttggggacctcagtggacttccttctggaggagaaggtctagagacctctgcttctgaagtagggactgacctcagtgggcttccttctggaagggagggtctagagacttcagcttctggagctgaggacctcagtgggttgccttctggaaaagaagacttggtggggtcagcttctggagacttggacttgggcaaactgccttctggaactctaggaagtgggcaagctccagaaacaagtggtcttccctctggatttagtggtgagtattctggggtggaccttggaagtggcccaccctctggcctgcctgactttagtggacttccatctggattcccaactgtttccctagtggattctacattggtggaagtggtcacagcctccactgcaagtgaactggaagggaggggaaccattggcatcagtggtgcaggagaaatatctggactgccctccagtgagctggacattagtgggagagctagtggactcccttcaggaactgaactcagtggccaagcatctgggtctcctgatgtcagtggggaaatacctggactctttggtgtcagtggacagccatcagggtttcctgacactagtggggaaacatctggagtgactgagcttagcgggctgtcctctggacaaccaggtattagtggagaagcatctggagttctttatggcactagtcaaccctttggcataactgatctgagtggagaaacatctggggtccctgatctcagtgggcagccttcagggttaccagggttcagtggggcaacatcaggagtccctgacctggtttctggtaccacgagtggcagcggtgaatcttctgggattacatttgtggacaccagtttggttgaagtggcccctactacatttaaagaagaagaaggcttagggtctgtggaactcagtggcctcccttccggagaggcagatctgtcaggcaaatctgggatggtggatgtcagtggacagttttctggaacagtcgattccagtgggtttacatcccagactccggaattcagtggcctaccaagtggcatagctgaggtcagtggagaatcctccagagctgagattgggagcagcctgccctcgggagcatattatggcagtggaactccatctagtttccccactgtctctcttgtagacagaactttggtggaatctgtaacccaggctccaacagcccaagaggcaggagaagggccttctggcattttagaactcagtggtgctcattctggagcaccagacatgtctggggagcattctggatttctggacctaagtgggctgcagtccgggctgatagagcccagcggagagccaccaggtactccatattttagtggggattttgccagcaccaccaatgtaagtggagaatcctctgtagccatgggcaccagtggagaggcctcaggacttccagaagttactttaatcacttctgagttcgtggagggtgttactgaaccaactatttctcaggaactaggccaaaggccccctgtgacacacacaccccagctttttgagtccagtggaaaagtctccacagctggggacattagtggagctaccccagtgctccctgggtctggagtagaagtatcatcagtcccagaatctagcagtgagacgtccgcctatcctgaagctgggttcggggcatctgccgcccctgaggccagcagagaagattctgggtcccctgatctgagtgaaaccacctctgcattccacgaagctaaccttgagagatcctctggcctaggagtgagcggcagcactttgacatttcaagaaggcgaggcgtccgctgccccagaagtgagtggagaatccaccaccaccagtgatgtggggacagaggcaccaggcttgccttcagccactcccacggcttctggagacaggactgaaatcagcggagacctgtctggtcacacctcgcagctgggcgttgtcatcagcaccagcatcccagagtctgagtggacccagcagacccagcgccctgcagagacgcatctagaaattgagtcctcaagcctcctgtactcaggagaagagactcacacagtcgaaacagccacctccccaacagatgcttccatcccagcttctccggaatggaaacgtgaatcagaatcaactgctgcagcccccgccaggtcctgtgcagaggagccctgtggagctgggacctgcaaggagacagagggacacgtcatatgcctgtgcccccctggctacactggcgagcactgtaacatagaccaggaggtatgtgaggagggctggaacaagtaccagggccactgttaccgccacttcccggaccgcgagacctgggtggatgctgagcgccggtgtcgggagcagcagtcacacctgagcagcatcgtcacccccgaggagcaggagtttgtcaacaacaatgcccaagactaccagtggatcggcctgaacgacaggaccatcgaaggggacttccgctggtcagatggacaccccatgcaatttgagaactggcgccccaaccagcctgacaacttttttgccgctggagaggactgtgtggtgatgatctggcacgagaagggcgagtggaatgatgttccctgcaattaccacctccccttcacgtgtaaaaagggcacagtggcctgcggagagccccctgtggtggagcatgccaggaccttcgggcagaagaaggaccggtatgagatcaattccctggtgcggtaccagtgcacagaggggtttgtccagcgccacatgcccaccatccggtgccagcccagcgggcactgggaggagcctcagatcacctgcacagaccccaccacctacaaacgcagactacagaagcggagctcacggcaccctcggaggagccgccccagcacagcccactga

SEQ ID NO: 106088 - DNA, 7628 bp, Homo sapiens
  Payload ID: 795
  Gene Symbol: ACAN
  Gene Name: aggrecan
  ENST ID: ENST00000559004
  CDS Start-End: 59-7537
gccaggtgtgtgggactgaagttcttggagaagggagtccaactcttcaaggtgaactatgaccactttactctgggttttcgtgactctgagggtcatcactgcagctgtcactgtagaaacttcagaccatgacaactcgctgagtgtcagcatcccccaaccgtccccgctgagggtcctcctggggacctccctcaccatcccctgctatttcatcgaccccatgcaccctgtgaccaccgccccttctaccgccccactggccccaagaatcaagtggagccgtgtgtccaaggagaaggaggtagtgctgctggtggccactgaagggcgcgtgcgggtcaacagtgcctatcaggacaaggtctcactgcccaactacccggccatccccagtgacgccaccttggaagtccagagcctgcgctccaatgactctggggtctaccgctgcgaggtgatgcatggcatcgaggacagcgaggccaccctggaagtcgtggtgaaaggcatcgtgttccattacagagccatctctacacgctacaccctcgactttgacagggcgcagcgggcctgcctgcagaacagtgccatcattgccacgcctgagcagctgcaggccgcctacgaagacggcttccaccagtgtgacgccggctggctggctgaccagactgtcagataccccatccacactccccgggaaggctgctatggagacaaggatgagtttcctggtgtgaggacgtatggcatccgagacaccaacgagacctatgatgtgtactgcttcgccgaggagatggagggtgaggtcttttatgcaacatctccagagaagttcaccttccaggaagcagccaatgagtgccggcggctgggtgcccggctggccaccacgggccagctctacctggcctggcaggctggcatggacatgtgcagcgccggctggctggccgaccgcagcgtgcgctaccccatctccaaggcccggcccaactgcggtggcaacctcctgggcgtgaggaccgtctacgtgcatgccaaccagacgggctaccccgacccctcatcccgctacgacgccatctgctacacaggtgaagactttgtggacatcccagaaaacttctttggagtggggggtgaggaggacatcaccgtccagacagtgacctggcctgacatggagctgccactgcctcgaaacatcactgagggtgaagcccgaggcagcgtgatccttaccgtaaagcccatcttcgaggtctcccccagtcccctggaacccgaggagcccttcacgtttgcccctgaaataggggccactgccttcgctgaggttgagaatgagactggagaggccaccaggccctggggctttcccacacctggcctgggccctgccacggcattcaccagtgaggacctcgtcgtgcaggtgaccgctgtccctgggcagccgcatttgccagggggggtcgtcttccactaccgcccgggacccacccgctactcgctgacctttgaggaggcacagcaggcctgcctgcgcacgggggcggtcattgcctcgccggagcagctccaggccgcctacgaagcaggctatgagcagtgtgacgccggctggctgcgggaccagaccgtcagataccccattgtgagcccccggaccccatgcgtgggtgacaaggacagcagcccaggggtcaggacctatggcgtgcgcccatcaacagagacctacgatgtctactgctttgtagacagacttgagggggaggtgttcttcgccacacgccttgagcagttcaccttccaggaagcactggagttctgtgaatctcacaatgctacgctggccaccacgggccagctctacgccgcctggagccgcggcctggacaagtgctatgccggctggctggccgacggcagcctccgctaccccatcgtcaccccaaggcctgcctgcggtggggacaagccaggcgtgagaacggtctacctctaccctaaccagacgggcctcccagacccactgtcccggcaccatgccttctgcttccgaggcatttcagcggttccttctccaggagaagaagagggtggcacacccacatcaccctctggtgtggaggagtggatcgtgacccaagtggttcctggtgtggctgctgtccccgtagaagaggagacaactgctgtaccctcaggggagactactgccatcctagagttcaccaccgagccagaaaaccagacagaatgggaaccagcctataccccagtgggcacatccccgctgccagggatccttcctacttggcctcccactggcgcagcaacagaggaaagtacagaaggcccttctgcaactgaagtgccctctgcctcagaggaaccatccccctcagaggtgccattcccctcagaggagccatccccctcagaggaaccattcccctcagtgaggccattcccctcagtggagctgttcccctcagaggagccattcccctccaaggagccatccccctcagaggaaccatcagcctcggaagagccgtatacaccttcaccccccgtgcccagctggactgagctgcccagctctggggaggaatctggggcccctgatgtcagtggtgacttcacaggcagtggagatgtttcaggacaccttgacttcagtgggcagctgtcaggggacagggcaagtggactgccctctggagacctggactccagtggtcttacttccacagtgggctcaggcctgcctgtggaaagtggactaccctcaggggatgaagagagaattgagtggcccagcactcctacggttggtgaactgccctctggagctgagatcctagagggctctgcctctggagttggggatctcagtggacttccttctggagaagttctagagacctctgcctctggagtaggagacctcagtgggcttccttctggagaagttctagagaccactgcccctggagtagaggacatcagcgggcttccttctggagaagttctagagaccactgcccctggagtagaggacatcagcgggcttccttctggagaagttctagagaccactgcccctggagtagaggacatcagcgggcttccttctggagaagttctagagaccactgcccctggagtagaggacatcagcgggcttccttctggagaagttctagagaccactgcccctggagtagaggacatcagcgggcttccttctggagaagttctagagaccactgcccctggagtagaggacatcagcgggcttccttctggagaagttctagagaccgctgcccctggagtagaggacatcagcgggcttccttctggagaagttctagagaccgctgcccctggagtagaggacatcagcgggcttccttctggagaagttctagagaccgctgcccctggagtagaggacatcagcgggcttccttctggagaagttctagagaccgctgcccctggagtagaggacatcagcgggcttccttctggagaagttctagagaccgctgcccctggagtagaggacatcagcgggcttccttctggagaagttctagagaccgctgcccctggagtagaggacatcagcgggcttccttctggagaagttctagagaccgctgcccctggagtagaggacatcagcgggcttccttctggagaagttctagagactgctgcccctggagtagaggacatcagcgggcttccttctggagaagttctagagactgctgcccctggagtagaggacatcagcgggcttccttctggagaagttctagagactgctgcccctggagtagaggacatcagcgggcttccttctggagaagttctagagactgctgcccctggagtagaggacatcagcgggcttccttctggagaagttctagagactgctgcccctggagtagaggacatcagcgggcttccttctggagaagttctagagactgctgcccctggagtagaggacatcagcgggcttccttctggagaagttctagagactgctgcccctggagtagaggacatcagcgggcttccttctggagaagttctagagactgctgcccctggagtagaggacatcagcgggcttccttctggagaagttctagagactgctgcccctggagtagaggacatcagcgggcttccttctggagaagttctagagactactgcccctggagtagaggagatcagcgggcttccttctggagaagttctagagactactgcccctggagtagatgagatcagtgggcttccttctggagaagttctagagactactgcccctggagtagaggagatcagcgggcttccttctggagaagttctagagacttctacctctgcggtaggggacctcagtggacttccttctggaggagaagttctagagatttctgtctctggagtagaggacatcagtgggcttccttctggagaggttgtagagacttctgcctctggaatagaggatgtcagtgaacttccttcaggagaaggtctagagacctctgcttctggagtagaggacctcagcaggctcccttctggagaagaagttctagagatttctgcctctggatttggggacctcagtggacttccttctggaggagaaggtctagagacctctgcttctgaagtagggactgacctcagtgggcttccttctggaagggagggtctagagacttcagcttctggagctgaggacctcagtgggttgccttctggaaaagaagacttggtggggtcagcttctggagacttggacttgggcaaactgccttctggaactctaggaagtgggcaagctccagaaacaagtggtcttccctctggatttagtggtgagtattctggggtggaccttggaagtggcccaccctctggcctgcctgactttagtggacttccatctggattcccaactgtttccctagtggattctacattggtggaagtggtcacagcctccactgcaagtgaactggaagggaggggaaccattggcatcagtggtgcaggagaaatatctggactgccctccagtgagctggacattagtgggagagctagtggactcccttcaggaactgaactcagtggccaagcatctgggtctcctgatgtcagtggggaaatacctggactctttggtgtcagtggacagccatcagggtttcctgacactagtggggaaacatctggagtgactgagcttagcgggctgtcctctggacaaccaggtattagtggagaagcatctggagttctttatggcactagtcaaccctttggcataactgatctgagtggagaaacatctggggtccctgatctcagtgggcagccttcagggttaccagggttcagtggggcaacatcaggagtccctgacctggtttctggtaccacgagtggcagcggtgaatcttctgggattacatttgtggacaccagtttggttgaagtggcccctactacatttaaagaagaagaaggcttagggtctgtggaactcagtggcctcccttccggagaggcagatctgtcaggcaaatctgggatggtggatgtcagtggacagttttctggaacagtcgattccagtgggtttacatcccagactccggaattcagtggcctaccaagtggcatagctgaggtcagtggagaatcctccagagctgagattgggagcagcctgccctcgggagcatattatggcagtggaactccatctagtttccccactgtctctcttgtagacagaactttggtggaatctgtaacccaggctccaacagcccaagaggcaggagaagggccttctggcattttagaactcagtggtgctcattctggagcaccagacatgtctggggagcattctggatttctggacctaagtgggctgcagtccgggctgatagagcccagcggagagccaccaggtactccatattttagtggggattttgccagcaccaccaatgtaagtggagaatcctctgtagccatgggcaccagtggagaggcctcaggacttccagaagttactttaatcacttctgagttcgtggagggtgttactgaaccaactatttctcaggaactaggccaaaggccccctgtgacacacacaccccagctttttgagtccagtggaaaagtctccacagctggggacattagtggagctaccccagtgctccctgggtctggagtagaagtatcatcagtcccagaatctagcagtgagacgtccgcctatcctgaagctgggttcggggcatctgccgcccctgaggccagcagagaagattctgggtcccctgatctgagtgaaaccacctctgcattccacgaagctaaccttgagagatcctctggcctaggagtgagcggcagcactttgacatttcaagaaggcgaggcgtccgctgccccagaagtgagtggagaatccaccaccaccagtgatgtggggacagaggcaccaggcttgccttcagccactcccacggcttctggagacaggactgaaatcagcggagacctgtctggtcacacctcgcagctgggcgttgtcatcagcaccagcatcccagagtctgagtggacccagcagacccagcgccctgcagagacgcatctagaaattgagtcctcaagcctcctgtactcaggagaagagactcacacagtcgaaacagccacctccccaacagatgcttccatcccagcttctccggaatggaaacgtgaatcagaatcaactgctgcagaccaggaggtatgtgaggagggctggaacaagtaccagggccactgttaccgccacttcccggaccgcgagacctgggtggatgctgagcgccggtgtcgggagcagcagtcacacctgagcagcatcgtcacccccgaggagcaggagtttgtcaacaacaatgcccaagactaccagtggatcggcctgaacgacaggaccatcgaaggggacttccgctggtcagatggacaccccatgcaatttgagaactggcgccccaaccagcctgacaacttttttgccgctggagaggactgtgtggtgatgatctggcacgagaagggcgagtggaatgatgttccctgcaattaccacctccccttcacgtgtaaaaagggcacagtggcctgcggagagccccctgtggtggagcatgccaggaccttcgggcagaagaaggaccggtatgagatcaattccctggtgcggtaccagtgcacagaggggtttgtccagcgccacatgcccaccatccggtgccagcccagcgggcactgggaggagcctcagatcacctgcacagaccccaccacctacaaacgcagactacagaagcggagctcacggcaccctcggaggagccgccccagcacagcccactgagaagagcttccaggacgcacccaggacgctgagcccaggagcctgccaggctgacgtgcatcccacccagacggtgtcctcttcttgtcgc

SEQ ID NO: 106089 - DNA, 679 bp, Homo sapiens
  Payload ID: 795
  Gene Symbol: ACAN
  Gene Name: aggrecan
  ENST ID: ENST00000560601
  CDS Start-End: 1-679
ccccagaagtgagtggagaatccaccaccaccagtgatgtggggacagaggcaccaggcttgccttcagccactcccacggcttctggagacaggactgaaatcagcggagacctgtctggtcacacctcgcagctgggcgttgtcatcagcaccagcatcccagagtctgagtggacccagcagacccagcgccctgcagagacgcatctagaaattgagtcctcaagcctcctgtactcaggagaagagactcacacagtcgaaacagccacctccccaacagatgcttccatcccagcttctccggaatggaaacgtgaatcagaatcaactgctgcagcccccgccaggtcctgtgcagaggagccctgtggagctgggacctgcaaggagacagagggacacgtcatatgcctgtgcccccctggctacactggcgagcactgtaacatagacattgatgagtgcctctcaagcccttgtctgaatggagccacctgcgtggatgccatcgactctttcacatgcttatgccttcccagctacgaaggggacctgtgtgagattgaccaggaggtatgtgaggagggctggaacaagtaccagggccactgttaccgccacttcccggaccgcgagacctgggtggatgctgagcgccggtgtcgggagcagca

SEQ ID NO: 106090 - DNA, 8669 bp, Homo sapiens
  Payload ID: 795
  Gene Symbol: ACAN
  Gene Name: aggrecan
  ENST ID: ENST00000617301
  CDS Start-End: 375-7796
cacctacctccccgccgctccagagggggctcgcagagctgaggacgcgcgcagcgctgctcaaggtctctctctctcagcaccctcgccggccggcgtctgacgcgggtgccagggtctccgggcacctttcagtgtccattccctcagccagccaggactccgcaacccagcagttgccgctgcggccacagcccgaggggacctgcggacaggacgccggcaggaggaggggtgcgcagcgcccgcgcagagcgtctccctcgctacgcagcgagacccgggcctcccggccccaggagcccccagctgcctcgccaggtgtgtgggactgaagttcttggagaagggagtccaactcttcaaggtgaactatgaccactttactctgggttttcgtgactctgagggtcatcactgcagctgtcactgtagaaacttcagaccatgacaactcgctgagtgtcagcatcccccaaccgtccccgctgagggtcctcctggggacctccctcaccatcccctgctatttcatcgaccccatgcaccctgtgaccaccgccccttctaccgccccactggccccaagaatcaagtggagccgtgtgtccaaggagaaggaggtagtgctgctggtggccactgaagggcgcgtgcgggtcaacagtgcctatcaggacaaggtctcactgcccaactacccggccatccccagtgacgccaccttggaagtccagagcctgcgctccaatgactctggggtctaccgctgcgaggtgatgcatggcatcgaggacagcgaggccaccctggaagtcgtggtgaaaggcatcgtgttccattacagagccatctctacacgctacaccctcgactttgacagggcgcagcgggcctgcctgcagaacagtgccatcattgccacgcctgagcagctgcaggccgcctacgaagacggcttccaccagtgtgacgccggctggctggctgaccagactgtcagataccccatccacactccccgggaaggctgctatggagacaaggatgagtttcctggtgtgaggacgtatggcatccgagacaccaacgagacctatgatgtgtactgcttcgccgaggagatggagggtgaggtcttttatgcaacatctccagagaagttcaccttccaggaagcagccaatgagtgccggcggctgggtgcccggctggccaccacgggccagctctacctggcctggcaggctggcatggacatgtgcagcgccggctggctggccgaccgcagcgtgcgctaccccatctccaaggcccggcccaactgcggtggcaacctcctgggcgtgaggaccgtctacgtgcatgccaaccagacgggctaccccgacccctcatcccgctacgacgccatctgctacacaggtgaagactttgtggacatcccagaaaacttctttggagtggggggtgaggaggacatcaccgtccagacagtgacctggcctgacatggagctgccactgcctcgaaacatcactgagggtgaagcccgaggcagcgtgatccttaccgtaaagcccatcttcgaggtctcccccagtcccctggaacccgaggagcccttcacgtttgcccctgaaataggggccactgccttcgctgaggttgagaatgagactggagaggccaccaggccctggggctttcccacacctggcctgggccctgccacggcattcaccagtgaggacctcgtcgtgcaggtgaccgctgtccctgggcagccgcatttgccagggggggtcgtcttccactaccgcccgggacccacccgctactcgctgacctttgaggaggcacagcaggcctgcctgcgcacgggggcggtcattgcctcgccggagcagctccaggccgcctacgaagcaggctatgagcagtgtgacgccggctggctgcgggaccagaccgtcagataccccattgtgagcccccggaccccatgcgtgggtgacaaggacagcagcccaggggtcaggacctatggcgtgcgcccatcaacagagacctacgatgtctactgctttgtagacagacttgagggggaggtgttcttcgccacacgccttgagcagttcaccttccaggaagcactggagttctgtgaatctcacaatgctacgctggccaccacgggccagctctacgccgcctggagccgcggcctggacaagtgctatgccggctggctggccgacggcagcctccgctaccccatcgtcaccccaaggcctgcctgcggtggggacaagccaggcgtgagaacggtctacctctaccctaaccagacgggcctcccagacccactgtcccggcaccatgccttctgcttccgaggcatttcagcggttccttctccaggagaagaagagggtggcacacccacatcaccctctggtgtggaggagtggatcgtgacccaagtggttcctggtgtggctgctgtccccgtagaagaggagacaactgctgtaccctcaggggagactactgccatcctagagttcaccaccgagccagaaaaccagacagaatgggaaccagcctataccccagtgggcacatccccgctgccagggatccttcctacttggcctcccactggcgcagcaacagaggaaagtacagaaggcccttctgcaactgaagtgccctctgcctcagaggaaccatccccctcagaggtgccattcccctcagaggagccatccccctcagaggaaccattcccctcagtgaggccattcccctcagtggagctgttcccctcagaggagccattcccctccaaggagccatccccctcagaggaaccatcagcctcggaagagccgtatacaccttcaccccccgtgcccagctggactgagctgcccagctctggggaggaatctggggcccctgatgtcagtggtgacttcacaggcagtggagatgtttcaggacaccttgacttcagtgggcagctgtcaggggacagggcaagtggactgccctctggagacctggactccagtggtcttacttccacagtgggctcaggcctgcctgtggaaagtggactaccctcaggggatgaagagagaattgagtggcccagcactcctacggttggtgaactgccctctggagctgagatcctagagggctctgcctctggagttggggatctcagtggacttccttctggagaagttctagagacctctgcctctggagtaggagacctcagtgggcttccttctggagaagttctagagaccactgcccctggagtagaggacatcagcgggcttccttctggagaagttctagagaccactgcccctggagtagaggacatcagcgggcttccttctggagaagttctagagaccactgcccctggagtagaggacatcagcgggcttccttctggagaagttctagagaccactgcccctggagtagaggacatcagcgggcttccttctggagaagttctagagaccactgcccctggagtagaggacatcagcgggcttccttctggagaagttctagagaccgctgcccctggagtagaggacatcagcgggcttccttctggagaagttctagagaccgctgcccctggagtagaggacatcagcgggcttccttctggagaagttctagagaccgctgcccctggagtagaggacatcagcgggcttccttctggagaagttctagagaccgctgcccctggagtagaggacatcagcgggcttccttctggagaagttctagagaccgctgcccctggagtagaggacatcagcgggcttccttctggagaagttctagagaccgctgcccctggagtagaggacatcagcgggcttccttctggagaagttctagagaccgctgcccctggagtagaggacatcagcgggcttccttctggagaagttctagagactgctgcccctggagtagaggacatcagcgggcttccttctggagaagttctagagactgctgcccctggagtagaggacatcagcgggcttccttctggagaagttctagagactgctgcccctggagtagaggacatcagcgggcttccttctggagaagttctagagactgctgcccctggagtagaggacatcagcgggcttccttctggagaagttctagagactgctgcccctggagtagaggacatcagcgggcttccttctggagaagttctagagactgctgcccctggagtagaggacatcagcgggcttccttctggagaagttctagagactgctgcccctggagtagaggacatcagcgggcttccttctggagaagttctagagactgctgcccctggagtagaggacatcagcgggcttccttctggagaagttctagagactgctgcccctggagtagaggacatcagcgggcttccttctggagaagttctagagactactgcccctggagtagaggagatcagcgggcttccttctggagaagttctagagactactgcccctggagtagatgagatcagtgggcttccttctggagaagttctagagactactgcccctggagtagaggagatcagcgggcttccttctggagaagttctagagacttctacctctgcggtaggggacctcagtggacttccttctggaggagaagttctagagatttctgtctctggagtagaggacatcagtgggcttccttctggagaggttgtagagacttctgcctctggaatagaggatgtcagtgaacttccttcaggagaaggtctagagacctctgcttctggagtagaggacctcagcaggctcccttctggagaagaagttctagagatttctgcctctggatttggggacctcagtggacttccttctggaggagaaggtctagagacctctgcttctgaagtagggactgacctcagtgggcttccttctggaagggagggtctagagacttcagcttctggagctgaggacctcagtgggttgccttctggaaaagaagacttggtggggtcagcttctggagacttggacttgggcaaactgccttctggaactctaggaagtgggcaagctccagaaacaagtggtcttccctctggatttagtggtgagtattctggggtggaccttggaagtggcccaccctctggcctgcctgactttagtggacttccatctggattcccaactgtttccctagtggattctacattggtggaagtggtcacagcctccactgcaagtgaactggaagggaggggaaccattggcatcagtggtgcaggagaaatatctggactgccctccagtgagctggacattagtgggagagctagtggactcccttcaggaactgaactcagtggccaagcatctgggtctcctgatgtcagtggggaaatacctggactctttggtgtcagtggacagccatcagggtttcctgacactagtggggaaacatctggagtgactgagcttagcgggctgtcctctggacaaccaggtattagtggagaagcatctggagttctttatggcactagtcaaccctttggcataactgatctgagtggagaaacatctggggtccctgatctcagtgggcagccttcagggttaccagggttcagtggggcaacatcaggagtccctgacctggtttctggtaccacgagtggcagcggtgaatcttctgggattacatttgtggacaccagtttggttgaagtggcccctactacatttaaagaagaagaaggcttagggtctgtggaactcagtggcctcccttccggagaggcagatctgtcaggcaaatctgggatggtggatgtcagtggacagttttctggaacagtcgattccagtgggtttacatcccagactccggaattcagtggcctaccaagtggcatagctgaggtcagtggagaatcctccagagctgagattgggagcagcctgccctcgggagcatattatggcagtggaactccatctagtttccccactgtctctcttgtagacagaactttggtggaatctgtaacccaggctccaacagcccaagaggcaggagaagggccttctggcattttagaactcagtggtgctcattctggagcaccagacatgtctggggagcattctggatttctggacctaagtgggctgcagtccgggctgatagagcccagcggagagccaccaggtactccatattttagtggggattttgccagcaccaccaatgtaagtggagaatcctctgtagccatgggcaccagtggagaggcctcaggacttccagaagttactttaatcacttctgagttcgtggagggtgttactgaaccaactatttctcaggaactaggccaaaggccccctgtgacacacacaccccagctttttgagtccagtggaaaagtctccacagctggggacattagtggagctaccccagtgctccctgggtctggagtagaagtatcatcagtcccagaatctagcagtgagacgtccgcctatcctgaagctgggttcggggcatctgccgcccctgaggccagcagagaagattctgggtcccctgatctgagtgaaaccacctctgcattccacgaagctaaccttgagagatcctctggcctaggagtgagcggcagcactttgacatttcaagaaggcgaggcgtccgctgccccagaagtgagtggagaatccaccaccaccagtgatgtggggacagaggcaccaggcttgccttcagccactcccacggcttctggagacaggactgaaatcagcggagacctgtctggtcacacctcgcagctgggcgttgtcatcagcaccagcatcccagagtctgagtggacccagcagacccagcgccctgcagagacgcatctagaaattgagtcctcaagcctcctgtactcaggagaagagactcacacagtcgaaacagccacctccccaacagatgcttccatcccagcttctccggaatggaaacgtgaatcagaatcaactgctgcagaccaggaggtatgtgaggagggctggaacaagtaccagggccactgttaccgccacttcccggaccgcgagacctgggtggatgctgagcgccggtgtcgggagcagcagtcacacctgagcagcatcgtcacccccgaggagcaggagtttgtcaacaacaatgcccaagactaccagtggatcggcctgaacgacaggaccatcgaaggggacttccgctggtcagatggacaccccatgcaatttgagaactggcgccccaaccagcctgacaacttttttgccgctggagaggactgtgtggtgatgatctggcacgagaagggcgagtggaatgatgttccctgcaattaccacctccccttcacgtgtaaaaagggcacagtggcctgcggagagccccctgtggtggagcatgccaggaccttcgggcagaagaaggaccggtatgagatcaattccctggtgcggtaccagtgcacagaggggtttgtccagcgccacatgcccaccatccggtgccagcccagcgggcactgggaggagcctcagatcacctgcacagaccccaccacctacaaacgcagactacagaagcggagctcacggcaccctcggaggagccgccccagcacagcccactgagaagagcttccaggacgcacccaggacgctgagcccaggagcctgccaggctgacgtgcatcccacccagacggtgtcctcttcttgtcgctttttgtcatataaggaatcccattaaagaaggaaaaaaataaatcccacatttgtgtatgcacccactcacccctccaaatcagcaaaaccgcatctaatttgtccgccgaatgccaaagcaaagcaaacttattataacccttggactgagtttagagacatttcttcaatttcccatcgtgcctttccagggaccagtgcagggacagggggagaaggggaggggttaagttaaataaagaagattatttttgtttcctgactttatccaagagcagtgcaatcgttggttatttcacctccagggagagctagggaggagggaggagggctccaaaggagctggaaggagcagaggcctgagagcaggaagaactcggaaccgcagctgaatgtattggatgagaaggagccaggagggctacaccatctgtatgagggaaaagccttgggggagaggggtgggttcctgcctcctgccgagggtaagccggcaggagagagccatcagagggacctccgctgcctgggagttgggttccctccaagggtccctctttcagtgtcctctctctcacctgggtctgccaccctaacaggtggcaactcggcagggctgctgggggcacttcctgcccagtggggggtgccgcccaaccttctcccctccccacccccgcccccgggaccgtgcaggcaccagggttccgtgcacctatttatatttttgaaaactgaagattataatattataataataataaagacattggaagagat

SEQ ID NO: 106091 - DNA, 2500 bp, Homo sapiens
  Payload ID: 796
  Gene Symbol: AGMAT
  Gene Name: agmatine ureohydrolase (agmatinase)
  Uniprot ID: Q9BSE5
  ENST ID: ENST00000375826
  CDS Start-End: 144-1202
cttgatcctagggcgcccctgacctttgagccggctcgggttccggctctggcgcgtgcacactcgcctcgccgttcgggaccagccagatcgcggcggcctcgcgggcggtttggtcggtgaggtcttggccgcgcgcggcaatgctgaggctgctggcgtccgggtgcgcccggggcccggggcccggcgtgggcgcgcgtcctgccgcagggctctttcatccggggcgccgccagagccgccaggcttccgacgcgccccggaaccagccccccagccccgagttcgtggcccggccggtgggcgtctgctccatgatgcgcctgccggtgcagacctcccccgaggggctggacgctgccttcatcggggtgcccctggatactgggacctccaaccggcctggggcgagattcggacctcgccgcatccgggaagaatcagtgatgcttgggacagtcaatcctagcacgggggccctccccttccagtccctcatggttgcagacctaggcgatgtgaatgtcaatctttacaaccttcaggacagctgccggcgaattcaagaggcctatgagaaaattgtagcagctggctgtattcctctgaccttgggtggagatcacacaatcacatatcccatattgcaagcgatggcaaaaaagcatggcccagtggggctgctgcacgtggatgcgcacacggacacgaccgacaaggccctaggagagaagctctaccacggggcgcccttccgccggtgtgtggatgagggtctcctggactgtaagcgtgtggtgcagattggcatccggggctcttccacgaccttggatccctacagatacaaccggagccagggcttccgggtagtcctggctgaagactgctggatgaagtcgctggttcctctgatgggggaagtcaggcagcagatgggaggcaaacccatttatatcagctttgatattgacgctctggatcctgcctatgcgccagggacagggacacctgaaattgctggtctcactcctagtcaggctctggagatcatcaggggttgtcaaggcctgaacgtgatgggctgtgatcttgtcgaagtttcaccaccgtatgatctttctgggaacacagccctgctggcggctaacctgctgtttgagatgctatgtgctctccccaaagtgacaaccgtctgagtcttgtgctcttcaagacaaaacagattgcgtcgctgacaagttctcaagaagaacttatgagtaagcagtctgagaactaaagagtttatgccaagaaaactttctgctgaaagtgtcattgctggctgtgaagtcgggataatcagtagaattctcacccaaacagcaacatttctaaggaacttggattaattgggggaaaaaaaaaggagtacttgtactgctttgattttttttcctttgatgaaagatggaggataaaggggaagtgaggagaatttctttcaagattatctaaacattagaaacatgacatttaaaaaaactatgaaataatactgtataagcattccatatttctatatcttccttttaaacatttttttttttgagatagagttttgcttgtcacccaggctggagtgcaatggcatgatctcggttcattgcaacctccgcctcccgagttcaatcgattctcctgcctcagcctcctgagtacctgggattacaggtgcctgccaccacgcctggctaatttttgtatttttagtagagacagggtttcaccacattggccaggctggtcttgaactcctgacctaaggtgatccgcccgcctcagcctccttaaagtgctgggattacaggcatgagccaccgcacccagccgctttttaaaattttgatgatctgcttcctagagtattgagtatcttcctttaaactacagctcctcctcggacgctgcagtgagctgagatcgcaccactgcactccagcctgggtgccagagcaagactccatctcaaaaaaaaaaaaaaaaaatacagcttctcctatgaggtgcttagggctgcatcttggttttaggaccactgtgaacgtaagtaaaaagtataaagtaacacggagagcctaatgaagaaacttcttgctcagaggcctagaagggtacacaaaatgtcttctaaactagaaaacctaaggctggacacggtggctcatgcctgtaatcccagcactttggggggcggaggtgggcagatcacttgaggtcaggagttcgagaccagcctggccaacatggtgaaaacccatctctactgaaaatacagaagttagctgggcgtggtggcgcgtgcctatagtcccagctactcaggaagctgaggcaggggcattgcttgaacccgggaggtggaggttgcagtgagctgaggtcatgccactacactccagcctgggtgacagagtgagactccgtctccaaaaaaaaaaaaaaaaaaaaaaaa

SEQ ID NO: 106092 - DNA, 764 bp, Homo sapiens
  Payload ID: 797
  Gene Symbol: AGRP
  Gene Name: agouti related neuropeptide
  Uniprot ID: O00253
  ENST ID: ENST00000290953
  CDS Start-End: 301-699
agctcctaggtccctgtcctgtggaaatttgtggaccctgggcaccctctcttgctcccaaattttaatcggctcctggaaacctcaccccaaattggagataggcactcctcttgtagaacaaaaggctcaggttcagggagtgagggcctgaactgtgcccccaccctccaggaagggtccttcacggcctggctgcagggatcagtcacgtgtggcccttcattaggccctgccatataagccaagggcacggggtggccgggaactctctaggcaagaatcccggaggcagaggccatgctgaccgcagcggtgctgagctgtgccctgctgctggcactgcctgccacgcgaggagcccagatgggcttggcccccatggagggcatcagaaggcctgaccaggccctgctcccagagctcccaggcctgggcctgcgggccccactgaagaagacaactgcagaacaggcagaagaggatctgttgcaggaggctcaggccttggcagaggtactagacctgcaggaccgcgagccccgctcctcacgtcgctgcgtaaggctgcatgagtcctgcctgggacagcaggtgccttgctgtgacccatgtgccacgtgctactgccgcttcttcaatgccttctgctactgccgcaagctgggtactgccatgaatccctgcagccgcacctagctggccaacgtcagggtcggggctagggtaggggcaaggaaactcgaataaaggatgggaccaac

SEQ ID NO: 106093 - DNA, 586 bp, Homo sapiens
  Payload ID: 798
  Gene Symbol: ASIP
  Gene Name: agouti signaling protein
  Uniprot ID: P42127
  ENST ID: ENST00000374954
  CDS Start-End: 11-409
gcctcctgggatggatgtcacccgcttactcctggccaccctgctggtcttcctctgcttcttcactgccaacagccacctgccacctgaggagaagctccgagatgacaggagcctgagaagcaactcctctgtgaacctactggatgtcccttctgtctctattgtggcgctgaacaagaaatccaaacagatcggcagaaaagcagcagaaaagaaaagatcttctaagaaggaggcttcgatgaagaaagtggtgcggccccggacccccctatctgcgccctgcgtggccacccgcaacagctgcaagccgccggcacccgcctgctgcgacccgtgcgcctcctgccagtgccgcttcttccgcagcgcctgctcctgccgcgtgctcagcctcaactgctgagcgcccccactcccggccgcgagcaggcagggcttcggggacgcggggcgcttctcgggcgggtgatccctaacagggcggcttcccagggctgcaggcgggcggaggttccaggagatgggacttcagggagacctggcttgggctaaaatcgaaatacaatatatataggctgct

SEQ ID NO: 106094 - DNA, 610 bp, Homo sapiens
  Payload ID: 798
  Gene Symbol: ASIP
  Gene Name: agouti signaling protein
  Uniprot ID: P42127
  ENST ID: ENST00000568305
  CDS Start-End: 203-601
gactcagcccgctgaacgcctggaagaaattttgcagacccaccagagatccccagattccacttgtaaaaccattgatctaaaaactacgtcttgacttcagaacacttcttttgatctggaattatctattattgaccacagagagcagccactgacgatttcctggaacagggccctgtatagagagaggcctcctgggatggatgtcacccgcttactcctggccaccctgctggtcttcctctgcttcttcactgccaacagccacctgccacctgaggagaagctccgagatgacaggagcctgagaagcaactcctctgtgaacctactggatgtcccttctgtctctattgtggcgctgaacaagaaatccaaacagatcggcagaaaagcagcagaaaagaaaagatcttctaagaaggaggcttcgatgaagaaagtggtgcggccccggacccccctatctgcgccctgcgtggccacccgcaacagctgcaagccgccggcacccgcctgctgcgacccgtgcgcctcctgccagtgccgcttcttccgcagcgcctgctcctgccgcgtgctcagcctcaactgctgagcgccccca

SEQ ID NO: 106095 - DNA, 7323 bp, Homo sapiens
  Payload ID: 799
  Gene Symbol: AGRN
  Gene Name: agrin
  Uniprot ID: O00468
  ENST ID: ENST00000379370
  CDS Start-End: 51-6188
cccgtccccggcgcggcccgcgcgctcctccgccgcctctcgcctgcgccatggccggccggtcccacccgggcccgctgcggccgctgctgccgctccttgtggtggccgcgtgcgtcctgcccggagccggcgggacatgcccggagcgcgcgctggagcggcgcgaggaggaggcgaacgtggtgctcaccgggacggtggaggagatcctcaacgtggacccggtgcagcacacgtactcctgcaaggttcgggtctggcggtacttgaagggcaaagacctggtggcccgggagagcctgctggacggcggcaacaaggtggtgatcagcggctttggagaccccctcatctgtgacaaccaggtgtccactggggacaccaggatcttctttgtgaaccctgcacccccatacctgtggccagcccacaagaacgagctgatgctcaactccagcctcatgcggatcaccctgcggaacctggaggaggtggagttctgtgtggaagataaacccgggacccacttcactccagtgcctccgacgcctcctgatgcgtgccggggaatgctgtgcggcttcggcgccgtgtgcgagcccaacgcggaggggccgggccgggcgtcctgcgtctgcaagaagagcccgtgccccagcgtggtggcgcctgtgtgtgggtcggacgcctccacctacagcaacgaatgcgagctgcagcgggcgcagtgcagccagcagcgccgcatccgcctgctcagccgcgggccgtgcggctcgcgggacccctgctccaacgtgacctgcagcttcggcagcacctgtgcgcgctcggccgacgggctgacggcctcgtgcctgtgccccgcgacctgccgtggcgcccccgaggggaccgtctgcggcagcgacggcgccgactaccccggcgagtgccagctcctgcgccgcgcctgcgcccgccaggagaatgtcttcaagaagttcgacggcccttgtgacccctgtcagggcgccctccctgacccgagccgcagctgccgtgtgaacccgcgcacgcggcgccctgagatgctcctacggcccgagagctgccctgcccggcaggcgccagtgtgtggggacgacggagtcacctacgaaaacgactgtgtcatgggccgatcgggggccgcccggggtctcctcctgcagaaagtgcgctccggccagtgccagggtcgagaccagtgcccggagccctgccggttcaatgccgtgtgcctgtcccgccgtggccgtccccgctgctcctgcgaccgcgtcacctgtgacggggcctacaggcccgtgtgtgcccaggacgggcgcacgtatgacagtgattgctggcggcagcaggctgagtgccggcagcagcgtgccatccccagcaagcaccagggcccgtgtgaccaggccccgtccccatgcctcggggtgcagtgtgcatttggggcgacgtgtgctgtgaagaacgggcaggcagcgtgtgaatgcctgcaggcgtgctcgagcctctacgatcctgtgtgcggcagcgacggcgtcacatacggcagcgcgtgcgagctggaggccacggcctgtaccctcgggcgggagatccaggtggcgcgcaaaggaccctgtgaccgctgcgggcagtgccgctttggagccctgtgcgaggccgagaccgggcgctgcgtgtgcccctctgaatgcgtggctttggcccagcccgtgtgtggctccgacgggcacacgtaccccagcgagtgcatgctgcacgtgcacgcctgcacacaccagatcagcctgcacgtggcctcagctggaccctgtgagacctgtggagatgccgtgtgtgcttttggggctgtgtgctccgcagggcagtgtgtgtgtccccggtgtgagcaccccccgcccggccccgtgtgtggcagcgacggtgtcacctacggcagtgcctgcgagctacgggaagccgcctgcctccagcagacacagatcgaggaggcccgggcagggccgtgcgagcaggccgagtgcggttccggaggctctggctctggggaggacggtgactgtgagcaggagctgtgccggcagcgcggtggcatctgggacgaggactcggaggacgggccgtgtgtctgtgacttcagctgccagagtgtcccaggcagcccggtgtgcggctcagatggggtcacctacagcaccgagtgtgagctgaagaaggccaggtgtgagtcacagcgagggctctacgtagcggcccagggagcctgccgaggccccaccttcgccccgctgccgcctgtggcccccttacactgtgcccagacgccctacggctgctgccaggacaatatcaccgcagcccggggcgtgggcctggctggctgccccagtgcctgccagtgcaacccccatggctcttacggcggcacctgtgacccagccacaggccagtgctcctgccgcccaggtgtggggggcctcaggtgtgaccgctgtgagcctggcttctggaactttcgaggcatcgtcaccgatggccggagtggctgtacaccctgcagctgtgatccccaaggcgccgtgcgggatgactgtgagcagatgacggggctgtgctcgtgtaagcccggggtggctggacccaagtgtgggcagtgtccagacggccgtgccctgggccccgcgggctgtgaagctgacgcttctgcgcctgcgacctgtgcggagatgcgctgtgagttcggtgcgcggtgcgtggaggagtctggctcagcccactgtgtctgcccgatgctcacctgtccagaggccaacgctaccaaggtctgtgggtcagatggagtcacatacggcaacgagtgtcagctgaagaccatcgcctgccgccagggcctgcaaatctctatccagagcctgggcccgtgccaggaggctgttgctcccagcactcacccgacatctgcctccgtgactgtgaccaccccagggctcctcctgagccaggcactgccggccccccccggcgccctccccctggctcccagcagtaccgcacacagccagaccacccctccgccctcatcacgacctcggaccactgccagcgtccccaggaccaccgtgtggcccgtgctgacggtgccccccacggcaccctcccctgcacccagcctggtggcgtccgcctttggtgaatctggcagcactgatggaagcagcgatgaggaactgagcggggaccaggaggccagtgggggtggctctggggggctcgagcccttggagggcagcagcgtggccacccctgggccacctgtcgagagggcttcctgctacaactccgcgttgggctgctgctctgatgggaagacgccctcgctggacgcagagggctccaactgccccgccaccaaggtgttccagggcgtcctggagctggagggcgtcgagggccaggagctgttctacacgcccgagatggctgaccccaagtcagaactgttcggggagacagccaggagcattgagagcaccctggacgacctcttccggaattcagacgtcaagaaggattttcggagtgtccgcttgcgggacctggggcccggcaaatccgtccgcgccattgtggatgtgcactttgaccccaccacagccttcagggcacccgacgtggcccgggccctgctccggcagatccaggtgtccaggcgccggtccttgggggtgaggcggccgctgcaggagcacgtgcgatttatggactttgactggtttcctgcgtttatcacgggggccacgtcaggagccattgctgcgggagccacggccagagccaccactgcatcgcgcctgccgtcctctgctgtgacccctcgggccccgcaccccagtcacacaagccagcccgttgccaagaccacggcagcccccaccacacgtcggccccccaccactgcccccagccgtgtgcccggacgtcggcccccggccccccagcagcctccaaagccctgtgactcacagccctgcttccacggggggacctgccaggactgggcattgggcgggggcttcacctgcagctgcccggcaggcaggggaggcgccgtctgtgagaaggtgcttggcgcccctgtgccggccttcgagggccgctccttcctggccttccccactctccgcgcctaccacacgctgcgcctggcactggaattccgggcgctggagcctcaggggctgctgctgtacaatggcaacgcccggggcaaggacttcctggcattggcgctgctagatggccgcgtgcagctcaggtttgacacaggttcggggccggcggtgctgaccagtgccgtgccggtagagccgggccagtggcaccgcctggagctgtcccggcactggcgccggggcaccctctcggtggatggtgagacccctgttctgggcgagagtcccagtggcaccgacggcctcaacctggacacagacctctttgtgggcggcgtacccgaggaccaggctgccgtggcgctggagcggaccttcgtgggcgccggcctgagggggtgcatccgtttgctggacgtcaacaaccagcgcctggagcttggcattgggccgggggctgccacccgaggctctggcgtgggcgagtgcggggaccacccctgcctgcccaacccctgccatggcggggccccatgccagaacctggaggctggaaggttccattgccagtgcccgcccggccgcgtcggaccaacctgtgccgatgagaagagcccctgccagcccaacccctgccatggggcggcgccctgccgtgtgctgcccgagggtggtgctcagtgcgagtgccccctggggcgtgagggcaccttctgccagacagcctcggggcaggacggctctgggcccttcctggctgacttcaacggcttctcccacctggagctgagaggcctgcacacctttgcacgggacctgggggagaagatggcgctggaggtcgtgttcctggcacgaggccccagcggcctcctgctctacaacgggcagaagacggacggcaagggggacttcgtgtcgctggcactgcgggaccgccgcctggagttccgctacgacctgggcaagggggcagcggtcatcaggagcagggagccagtcaccctgggagcctggaccagggtctcactggagcgaaacggccgcaagggtgccctgcgtgtgggcgacggcccccgtgtgttgggggagtccccggttccgcacaccgtcctcaacctgaaggagccgctctacgtagggggcgctcccgacttcagcaagctggcccgtgctgctgccgtgtcctctggcttcgacggtgccatccagctggtctccctcggaggccgccagctgctgaccccggagcacgtgctgcggcaggtggacgtcacgtcctttgcaggtcacccctgcacccgggcctcaggccacccctgcctcaatggggcctcctgcgtcccgagggaggctgcctatgtgtgcctgtgtcccgggggattctcaggaccgcactgcgagaaggggctggtggagaagtcagcgggggacgtggataccttggcctttgacgggcggacctttgtcgagtacctcaacgctgtgaccgagagcgagaaggcactgcagagcaaccactttgaactgagcctgcgcactgaggccacgcaggggctggtgctctggagtggcaaggccacggagcgggcagactatgtggcactggccattgtggacgggcacctgcaactgagctacaacctgggctcccagcccgtggtgctgcgttccaccgtgcccgtcaacaccaaccgctggttgcgggtcgtggcacatagggagcagagggaaggttccctgcaggtgggcaatgaggcccctgtgaccggctcctccccgctgggcgccacgcagctggacactgatggagccctgtggcttgggggcctgccggagctgcccgtgggcccagcactgcccaaggcctacggcacaggctttgtgggctgcttgcgggacgtggtggtgggccggcacccgctgcacctgctggaggacgccgtcaccaagccagagctgcggccctgccccaccccatgagctggcaccagagccccgcgcccgctgtaattattttctatttttgtaaacttgttgctttttgatatgattttcttgcctgagtgttggccggagggactgctggcccggcctcccttccgtccaggcagccgtgctgcagacagacctagtgccgagggatggacaggcgaggtggcagcgtggagggctcggcgtggatggcagcctcaggacacacacccctgcctcaaggtgctgagcccccgccttgcactgcgcctgccccacggtgtccccgccgggaagcagccccggctcctgaatcaccctcgctccgtcaggcgggactcgtgtcccagagaggaaggggctgctgaggtctgatggggcccttcctccgggtgaccccacagggcctttccaagcccccatttgagctgctccttcctgtgtgtgctctgggccctgcctcggcctcctgcgccaatactgtgacttccaaacaatgttactgctgggcacagctctgcgttgctcccgtgctgcctgcgccagccccaggctgctgaggagcagaggccagaccagggccgatctgggtgtcctgaccctcagctggccctgcccagccaccctggacgtgaccgtatccctctgccacaccccaggccctgcgaggggctatcgagaggagctcactgtgggatggggttgacctctgccgcctgcctgggtatctgggcctggccatggctgtgttcttcatgtgttgattttatttgacccctggagtggtgggtctcatctttcccatctcgcctgagagcggctgagggctgcctcactgcaaatcctccccacagcgtcagtgaaagtcgtccttgtctcagaatgaccaggggccagccagtgtctgaccaaggtcaaggggcaggtgcagaggtggcagggatggctccgaagccagaaatgccttaaactgcaacgtcccgtcccttccccacccccatcccatccccacccccagccccagcccagtcctcctaggagcaggacccgatgaagcgggcggcggtggggctgggtgccgtgttactaactctagtatgtttctgtgtcaatcgctgtgaaataaagtctgaaaactttaaaa

SEQ ID NO: 106096 - DNA, 813 bp, Homo sapiens
  Payload ID: 799
  Gene Symbol: AGRN
  Gene Name: agrin
  ENST ID: ENST00000419249
  CDS Start-End: 1-813
ccgctacgacctgggcaagggggcagcggtcatcaggagcagggagccagtcaccctgggagcctggaccagggtctcactggagcgaaacggccgcaagggtgccctgcgtgtgggcgacggcccccgtgtgttgggggagtccccgaaatcccgcaaggttccgcacaccgtcctcaacctgaaggagccgctctacgtagggggcgctcccgacttcagcaagctggcccgtgctgctgccgtgtcctctggcttcgacggtgccatccagctggtctccctcggaggccgccagctgctgaccccggagcacgtgctgcggcaggtggacgtcacgtcctttgcaggtcacccctgcacccgggcctcaggccacccctgcctcaatggggcctcctgcgtcccgagggaggctgcctatgtgtgcctgtgtcccgggggattctcaggaccgcactgcgagaaggggctggtggagaagtcagcgggggacgtggataccttggcctttgacgggcggacctttgtcgagtacctcaacgctgtgaccgagagcgaactggccaatgagatccccgtccccgaaactctggattccggggcccttcacagcgagaaggcactgcagagcaaccactttgaactgagcctgcgcactgaggccacgcaggggctggtgctctggagtggcaaggccacggagcgggcagactatgtggcactggccattgtggacgggcacctgcaactgagctacaacctgggctcccagcccgtggtgctgcgttccaccgtgcccgtcaacaccaa

SEQ ID NO: 106097 - DNA, 7394 bp, Homo sapiens
  Payload ID: 799
  Gene Symbol: AGRN
  Gene Name: agrin
  ENST ID: ENST00000620552
  CDS Start-End: 465-6257
cccgtccccggcgcggcccgcgcgctcctccgccgcctctcgcctgcgccatggccggccggtcccacccgggcccgctgcggccgctgctgccgctccttgtggtggccgcgtgcgtcctgcccggagccggcgggacatgcccggagcgcgcgctggagcggcgcgaggaggaggcgaacgtggtgctcaccgggacggtggaggagatcctcaacgtggacccggtgcagcacacgtactcctgcaaggttcgggtctggcggtacttgaagggcaaagacctggtggcccgggagagcctgctggacggcggcaacaaggtggtgatcagcggctttggagaccccctcatctgtgacaaccaggtgtccactggggacaccaggatcttctttgtgaaccctgcacccccatacctgtggccagcccacaagaacgagctgatgctcaactccagcctcatgcggatcaccctgcggaacctggaggaggtggagttctgtgtggaagataaacccgggacccacttcactccagtgcctccgacgcctcctgatgcgtgccggggaatgctgtgcggcttcggcgccgtgtgcgagcccaacgcggaggggccgggccgggcgtcctgcgtctgcaagaagagcccgtgccccagcgtggtggcgcctgtgtgtgggtcggacgcctccacctacagcaacgaatgcgagctgcagcgggcgcagtgcagccagcagcgccgcatccgcctgctcagccgcgggccgtgcggctcgcgggacccctgctccaacgtgacctgcagcttcggcagcacctgtgcgcgctcggccgacgggctgacggcctcgtgcctgtgccccgcgacctgccgtggcgcccccgaggggaccgtctgcggcagcgacggcgccgactaccccggcgagtgccagctcctgcgccgcgcctgcgcccgccaggagaatgtcttcaagaagttcgacggcccttgtgacccctgtcagggcgccctccctgacccgagccgcagctgccgtgtgaacccgcgcacgcggcgccctgagatgctcctacggcccgagagctgccctgcccggcaggcgccagtgtgtggggacgacggagtcacctacgaaaacgactgtgtcatgggccgatcgggggccgcccggggtctcctcctgcagaaagtgcgctccggccagtgccagggtcgagaccagtgcccggagccctgccggttcaatgccgtgtgcctgtcccgccgtggccgtccccgctgctcctgcgaccgcgtcacctgtgacggggcctacaggcccgtgtgtgcccaggacgggcgcacgtatgacagtgattgctggcggcagcaggctgagtgccggcagcagcgtgccatccccagcaagcaccagggcccgtgtgaccaggccccgtccccatgcctcggggtgcagtgtgcatttggggcgacgtgtgctgtgaagaacgggcaggcagcgtgtgaatgcctgcaggcgtgctcgagcctctacgatcctgtgtgcggcagcgacggcgtcacatacggcagcgcgtgcgagctggaggccacggcctgtaccctcgggcgggagatccaggtggcgcgcaaaggaccctgtgaccgctgcgggcagtgccgctttggagccctgtgcgaggccgagaccgggcgctgcgtgtgcccctctgaatgcgtggctttggcccagcccgtgtgtggctccgacgggcacacgtaccccagcgagtgcatgctgcacgtgcacgcctgcacacaccagatcagcctgcacgtggcctcagctggaccctgtgagacctgtggagatgccgtgtgtgcttttggggctgtgtgctccgcagggcagtgtgtgtgtccccggtgtgagcaccccccgcccggccccgtgtgtggcagcgacggtgtcacctacggcagtgcctgcgagctacgggaagccgcctgcctccagcagacacagatcgaggaggcccgggcagggccgtgcgagcaggccgagtgcggttccggaggctctggctctggggaggacggtgactgtgagcaggagctgtgccggcagcgcggtggcatctgggacgaggactcggaggacgggccgtgtgtctgtgacttcagctgccagagtgtcccaggcagcccggtgtgcggctcagatggggtcacctacagcaccgagtgtgagctgaagaaggccaggtgtgagtcacagcgagggctctacgtagcggcccagggagcctgccgaggccccaccttcgccccgctgccgcctgtggcccccttacactgtgcccagacgccctacggctgctgccaggacaatatcaccgcagcccggggcgtgggcctggctggctgccccagtgcctgccagtgcaacccccatggctcttacggcggcacctgtgacccagccacaggccagtgctcctgccgcccaggtgtggggggcctcaggtgtgaccgctgtgagcctggcttctggaactttcgaggcatcgtcaccgatggccggagtggctgtacaccctgcagctgtgatccccaaggcgccgtgcgggatgactgtgagcagatgacggggctgtgctcgtgtaagcccggggtggctggacccaagtgtgggcagtgtccagacggccgtgccctgggccccgcgggctgtgaagctgacgcttctgcgcctgcgacctgtgcggagatgcgctgtgagttcggtgcgcggtgcgtggaggagtctggctcagcccactgtgtctgcccgatgctcacctgtccagaggccaacgctaccaaggtctgtgggtcagatggagtcacatacggcaacgagtgtcagctgaagaccatcgcctgccgccagggcctgcaaatctctatccagagcctgggcccgtgccaggaggctgttgctcccagcactcacccgacatctgcctccgtgactgtgaccaccccagggctcctcctgagccaggcactgccggccccccccggcgccctccccctggctcccagcagtaccgcacacagccagaccacccctccgccctcatcacgacctcggaccactgccagcgtccccaggaccaccgtgtggcccgtgctgacggtgccccccacggcaccctcccctgcacccagcctggtggcgtccgcctttggtgaatctggcagcactgatggaagcagcgatgaggaactgagcggggaccaggaggccagtgggggtggctctggggggctcgagcccttggagggcagcagcgtggccacccctgggccacctgtcgagagggcttcctgctacaactccgcgttgggctgctgctctgatgggaagacgccctcgctggacgcagagggctccaactgccccgccaccaaggtgttccagggcgtcctggagctggagggcgtcgagggccaggagctgttctacacgcccgagatggctgaccccaagtcagaactgttcggggagacagccaggagcattgagagcaccctggacgacctcttccggaattcagacgtcaagaaggattttcggagtgtccgcttgcgggacctggggcccggcaaatccgtccgcgccattgtggatgtgcactttgaccccaccacagccttcagggcacccgacgtggcccgggccctgctccggcagatccaggtgtccaggcgccggtccttgggggtgaggcggccgctgcaggagcacgtgcgatttatggactttgactggtttcctgcgtttatcacgggggccacgtcaggagccattgctgcgggagccacggccagagccaccactgcatcgcgcctgccgtcctctgctgtgacccctcgggccccgcaccccagtcacacaagccagcccgttgccaagaccacggcagcccccaccacacgtcggccccccaccactgcccccagccgtgtgcccggacgtcggcccccggccccccagcagcctccaaagccctgtgactcacagccctgcttccacggggggacctgccaggactgggcattgggcgggggcttcacctgcagctgcccggcaggcaggggaggcgccgtctgtgagaaggtgcttggcgcccctgtgccggccttcgagggccgctccttcctggccttccccactctccgcgcctaccacacgctgcgcctggcactggaattccgggcgctggagcctcaggggctgctgctgtacaatggcaacgcccggggcaaggacttcctggcattggcgctgctagatggccgcgtgcagctcaggtttgacacaggttcggggccggcggtgctgaccagtgccgtgccggtagagccgggccagtggcaccgcctggagctgtcccggcactggcgccggggcaccctctcggtggatggtgagacccctgttctgggcgagagtcccagtggcaccgacggcctcaacctggacacagacctctttgtgggcggcgtacccgaggaccaggctgccgtggcgctggagcggaccttcgtgggcgccggcctgagggggtgcatccgtttgctggacgtcaacaaccagcgcctggagcttggcattgggccgggggctgccacccgaggctctggcgtgggcgagtgcggggaccacccctgcctgcccaacccctgccatggcggggccccatgccagaacctggaggctggaaggttccattgccagtgcccgcccggccgcgtcggaccaacctgtgccgatgagaagagcccctgccagcccaacccctgccatggggcggcgccctgccgtgtgctgcccgagggtggtgctcagtgcgagtgccccctggggcgtgagggcaccttctgccagacagcctcggggcaggacggctctgggcccttcctggctgacttcaacggcttctcccacctggagctgagaggcctgcacacctttgcacgggacctgggggagaagatggcgctggaggtcgtgttcctggcacgaggccccagcggcctcctgctctacaacgggcagaagacggacggcaagggggacttcgtgtcgctggcactgcgggaccgccgcctggagttccgctacgacctgggcaagggggcagcggtcatcaggagcagggagccagtcaccctgggagcctggaccagggtctcactggagcgaaacggccgcaagggtgccctgcgtgtgggcgacggcccccgtgtgttgggggagtccccgaaatcccgcaaggttccgcacaccgtcctcaacctgaaggagccgctctacgtagggggcgctcccgacttcagcaagctggcccgtgctgctgccgtgtcctctggcttcgacggtgccatccagctggtctccctcggaggccgccagctgctgaccccggagcacgtgctgcggcaggtggacgtcacgtcctttgcaggtcacccctgcacccgggcctcaggccacccctgcctcaatggggcctcctgcgtcccgagggaggctgcctatgtgtgcctgtgtcccgggggattctcaggaccgcactgcgagaaggggctggtggagaagtcagcgggggacgtggataccttggcctttgacgggcggacctttgtcgagtacctcaacgctgtgaccgagagcgaactggccaatgagatccccgtccccgaaactctggattccggggcccttcacagcgagaaggcactgcagagcaaccactttgaactgagcctgcgcactgaggccacgcaggggctggtgctctggagtggcaaggccacggagcgggcagactatgtggcactggccattgtggacgggcacctgcaactgagctacaacctgggctcccagcccgtggtgctgcgttccaccgtgcccgtcaacaccaaccgctggttgcgggtcgtggcacatagggagcagagggaaggttccctgcaggtgggcaatgaggcccctgtgaccggctcctccccgctgggcgccacgcagctggacactgatggagccctgtggcttgggggcctgccggagctgcccgtgggcccagcactgcccaaggcctacggcacaggctttgtgggctgcttgcgggacgtggtggtgggccggcacccgctgcacctgctggaggacgccgtcaccaagccagagctgcggccctgccccaccccatgagctggcaccagagccccgcgcccgctgtaattattttctatttttgtaaacttgttgctttttgatatgattttcttgcctgagtgttggccggagggactgctggcccggcctcccttccgtccaggcagccgtgctgcagacagacctagtgccgagggatggacaggcgaggtggcagcgtggagggctcggcgtggatggcagcctcaggacacacacccctgcctcaaggtgctgagcccccgccttgcactgcgcctgccccacggtgtccccgccgggaagcagccccggctcctgaatcaccctcgctccgtcaggcgggactcgtgtcccagagaggaaggggctgctgaggtctgatggggcccttcctccgggtgaccccacagggcctttccaagcccccatttgagctgctccttcctgtgtgtgctctgggccctgcctcggcctcctgcgccaatactgtgacttccaaacaatgttactgctgggcacagctctgcgttgctcccgtgctgcctgcgccagccccaggctgctgaggagcagaggccagaccagggccgatctgggtgtcctgaccctcagctggccctgcccagccaccctggacgtgaccgtatccctctgccacaccccaggccctgcgaggggctatcgagaggagctcactgtgggatggggttgacctctgccgcctgcctgggtatctgggcctggccatggctgtgttcttcatgtgttgattttatttgacccctggagtggtgggtctcatctttcccatctcgcctgagagcggctgagggctgcctcactgcaaatcctccccacagcgtcagtgaaagtcgtccttgtctcagaatgaccaggggccagccagtgtctgaccaaggtcaaggggcaggtgcagaggtggcagggatggctccgaagccagaaatgccttaaactgcaacgtcccgtcccttccccacccccatcccatccccacccccagccccagcccagtcctcctaggagcaggacccgatgaagcgggcggcggtggggctgggtgccgtgttactaactctagtatgtttctgtgtcaatcgctgtgaaataaagtctgaaaactttaaaagc

SEQ ID NO: 106098 - DNA, 1402 bp, Homo sapiens
  Payload ID: 800
  Gene Symbol: AHSA1
  Gene Name: AHA1, activator of heat shock 90kDa protein ATPase homolog 1 (yeast)
  Uniprot ID: O95433
  ENST ID: ENST00000216479
  CDS Start-End: 161-1177
ggaagttaaggaggggagggggtggagggaaaagcaagccaggaggtgcttgcggccgcttctagtagtttccaggcgctgccgggcggctggcactaagcggtcctgaggctgtggctacggctgctccggagctggtggcgccgcgataggagagccgatggccaagtggggtgagggagacccacgctggatcgtggaggagcgggcggacgccaccaacgtcaacaactggcactggacggagagagatgcttcaaattggtccacggataagctgaaaacactgttcctggcagtgcaggttcaaaatgaagaaggcaagtgtgaggtgacggaagtgagtaagcttgatggagaggcatccattaacaatcgcaaagggaaacttatcttcttttatgaatggagcgtcaaactaaactggacaggtacttctaagtcaggagtacaatacaaaggacatgtggagatccccaatttgtctgatgaaaacagcgtggatgaagtggagattagtgtgagccttgccaaagatgagcctgacacaaatctcgtggccttaatgaaggaagaaggggtgaaacttctaagagaagcaatgggaatttacatcagcaccctcaaaacagagttcacccagggcatgatcttacctacaatgaatggagagtcagtagacccagtggggcagccagcactgaaaactgaggagcgcaaggctaagcctgctccttcaaaaacccaggccagacctgttggagtcaaaatccccacttgtaagatcactcttaaggaaaccttcctgacgtcaccagaggagctctatagagtgtttaccacccaagagctggtgcaggcctttacccatgctcctgcaacattagaagcagacagaggtggaaagttccacatggtagatggcaacgtctctggggaatttactgatctggtccctgagaaacatattgtgatgaagtggaggtttaaatcttggccagagggacactttgccaccatcaccttgaccttcatcgacaagaacggagagactgagctgtgcatggaaggtcgaggcatccctgctcctgaggaagagcggacgcgacagggctggcagcggtactactttgagggcattaaacagacctttggctatggcgcacgcttattttagggccagcggcaggggactccagcctgctggacacttcagtccagctctctcctgactggggcttgcgactcacaggattgcatcgtcccagctgctaacttggggccggggcccctcccttccacatataccttgggtttgtgcatgttttctgctgggtgggttcagagggcaatttctcttttatgtgtacatatgctaaataaacataatttaaaaaacatg

SEQ ID NO: 106099 - DNA, 1173 bp, Homo sapiens
  Payload ID: 800
  Gene Symbol: AHSA1
  Gene Name: AHA1, activator of heat shock 90kDa protein ATPase homolog 1 (yeast)
  Uniprot ID: O95433
  ENST ID: ENST00000535854
  CDS Start-End: 159-1025
aagttaaggaggggagggggtggagggaaaagcaagccaggaggtgcttgcggccgcttctagtagtttccaggcgctgccgggcggctggcactaagcggtcctgaggctgtggctacggctgctccggagctggtggcgccgcgataggagagccgatggccaagtggggtgagggagacccacgctggatcgtggaggagcgggcggacgccaccaacgtcaacaactggcactggacggagagagatgcttcaaattggtccacggataagctgaaaacactgttcctggcagtgcaggttcaaaatgaagaaggcaagtgtgaggtgacggaagtgagtaagcttgatggagaggcatccattaacaatcgcaaagggaaacttatcttcttttatgaatggagcgtcaaactaaactggacaggtacttctaagtcaggagtacaatacaaaggacatgtggagatccccaatttgtctgatgaaaacagcgtggatgaagtggagattagtgtgagccttgccaaagatgagcctgacacaaatctcgtggccttaatgaaggaagaaggggtgaaacttctaagagaagcaatgggaatttacatcagcaccctcaaaacagagttcacccagggcatgatcttacctacaatgaatggagagtcagtagacccagtggggcagccagcactgaaaactgaggagcgcaaggctaagcctgctccttcaaaaacccaggccagacctgttggagtcaaaatccccacttgtaagatcactcttaaggaaaccttcctgacgtcaccagaggagctctatagagtgtttaccacccaagagctggtgcaggcctttacccatgctcctgcaacattagaagcagacagaggtggaaagttccacatggtagatggcaacgtctctggggaatttactgatctggtccctgagaaacatattgtgatgaagtggaggtttaaatcttggccagaggggtctcactgtcactcaggctagagtgcagtggcataatcacagcaaactgcagccttaacctcccagacccaaacgatcctcctgcttcagcttcccaagtagctgagactacgtgtgccaccatgccagcttttttttttttttttttttttttacttttttacttttt

SEQ ID NO: 106100 - DNA, 849 bp, Homo sapiens
  Payload ID: 800
  Gene Symbol: AHSA1
  Gene Name: AHA1, activator of heat shock 90kDa protein ATPase homolog 1 (yeast)
  ENST ID: ENST00000556369
  CDS Start-End: 1-271
tgttggagtcaaaatccccacttgtaagatcactcttaaggaaaccttcctgacgtcaccagaggagctctatagagtgtttaccacccaagagctggtgcaggcctttacccatgctcctgcaacattagaagcagacagaggtggaaagttccacatggtagatggcaacgtctctggggaatttactgatctggtccctgagaaacatattgtgatgaagtggaggtttaaatcttggccagaggggtctcactgtcactcaggctagagtgcagtggcataatcacagcaaactgcagccttaacctcccagacccaaacgatcctcctgcttcagcttcccaatgctgggattacaggtgtgagccaccacgcccagccaggttgccccagtcttaaactcagatggaaacctagatatgaaacctccgtcccctctgcctttcccaggacactttgccaccatcaccttgaccttcatcgacaagaacggagagactgagctgtgcatggaaggtcgaggcatccctgctcctgaggaagagcggacgcgacagggctggcagcggtactactttgagggcattaaacagacctttggctatggcgcacgcttattttagggccagcggcaggggactccagcctgctggacacttcagtccagctctctcctgactggggcttgcgactcacaggattgcatcgtcccagctgctaacttggggccggggcccctcccttccacatataccttgggtttgtgcatgttttctgctgggtgggttcagagggcaatttctcttttatgtgtacatatgctaaataaacataatttaaaaaaca

SEQ ID NO: 106101 - DNA, 832 bp, Homo sapiens
  Payload ID: 800
  Gene Symbol: AHSA1
  Gene Name: AHA1, activator of heat shock 90kDa protein ATPase homolog 1 (yeast)
  ENST ID: ENST00000555517
  CDS Start-End: 154-456
aaggaggggagggggtggagggaaaagcaagccaggaggtgcttgcggccgcttctagtagtttccaggcgctgccgggcggctggcactaagcggtcctgaggctgtggctacggctgctccggagctggtggcgccgcgataggagagccgatggccaagtggggtgagggagacccacgctggatcgtggaggagcgggcggacgccaccaacgtcaacaactggcactggacggagagagatgcttcaaattggtccacggataagctgaaaacactgttcctggcagtgcaggttcaaaatgaagaaggcaagtgtgaggtgacggaagtgagtaagcttgatggagaggcatccattaacaatcgcaaagggaaacttatcttcttttatgaatggagcgtcaaactaaactggacaggtaagtctaagctgggctgtcagagagattaactgtgttttgtttaacctgttaagtagctggagagaacagttttgaggagttacagaccttgaagggagaaggcagatgttgctgctttggagtcctatgtaaagcagtatcgagtcctggaatttctttgccattgtgggatgctaaatggatttcctgtgtctgggtctcataagtcccatccatgaagtggccgggccactgcatctttgggccttggtctttgttgggacacctacgatgatatttcttcagactagctacatgtatcttgtgagtgatttaaaaggaggaaggagaggatttttttggtcttgatctttgtgcactgtcttcagtgtgaatcttaacagattaaaccactgcgctaatgaa

SEQ ID NO: 106102 - DNA, 763 bp, Homo sapiens
  Payload ID: 800
  Gene Symbol: AHSA1
  Gene Name: AHA1, activator of heat shock 90kDa protein ATPase homolog 1 (yeast)
  ENST ID: ENST00000553374
  CDS Start-End: 1-649
gtgtgaggtgacggaagtgagtaagcttgatggagaggcatccattaacaatcgcaaagggaaacttatcttcttttatgaatggagcgtcaaactaaactggacaggtacttctaagtcaggagtacaatacaaaggacatgtggagatccccaatttgtctgatgaaaacagcgtggatgaagtggagattagtgtgagccttgccaaagatgagcctgacacaaatctcgtggccttaatgaaggaagaaggggtgaaacttctaagagaagcaatgggaatttacatcagcaccctcaaaacagagttcacccagggcatgatcttacctacaatgaatggagagtcagtagacccagtggggcagccagcactgaaaactgaggagcgcaaggctaagcctgctccttcaaaaacccaggccagacctgttggagtcaaaatccccacttgtaagatcactcttaaggaaaccttcctgacgtcaccagaggagctctatagagtgtttaccacccaagagctggtgcaggcctttacccatgctcctgcaacattagaagcagacagaggtggaaagttccacatggtagatggcaacgtctctggggaatttactgatctggtgagtacctgccggccctagactcaggttattgcctctggtcagatgagtgacatttctctttttctgaactctataggtaaaatgtaaggctttaatctctttgttaataaaacattttgtttttcaaaaaaa

SEQ ID NO: 106103 - DNA, 1048 bp, Homo sapiens
  Payload ID: 800
  Gene Symbol: AHSA1
  Gene Name: AHA1, activator of heat shock 90kDa protein ATPase homolog 1 (yeast)
  ENST ID: ENST00000555133
  CDS Start-End: 439-1048
ttctttgttttcctatgggtgaggaatggttgtatgagcagttgggtttcgggacgctttttggggagaacccgatggagtctgaaggatctctaaatcaggcggaacccacggacggagagagatgcttcaaattggtccacggataagctgaaaacactgttcctggcagtgcaggttcaaaatgaagaaggcaagtgtgaggtgacggaagtgagtaagcttgatggagaggcatccattaacaatcgcaaagggaaacttatcttcttttatgaatggagcgtcaaactaaactggacaggtacttctaagtcaggagtacaatacaaaggacatgtggagatccccaatttgtctgatgaaaacagcgtggatgaagtggagattagtgtgagccttgccaaagatgagcctgacacaaatctcgtggccttaatgaaggaagaaggggtgaaacttctaagagaagcaatgggaatttacatcagcaccctcaaaacagagttcacccagggcatgatcttacctacaatgaatggagagtcagtagacccagtggggcagccagcactgaaaactgaggagcgcaaggctaagcctgctccttcaaaaacccaggccagacctgttggagtcaaaatccccacttgtaagatcactcttaaggaaaccttcctgacgtcaccagaggagctctatagagtgtttaccacccaagagctggtgcaggcctttacccatgctcctgcaacattagaagcagacagaggtggaaagttccacatggtagatggcaacgtctctggggaatttactgatctggtccctgagaaacatattgtgatgaagtggaggtttaaatcttggccagagggacactttgccaccatcaccttgaccttcatcgacaagaacggagagactgagctgtgcatggaaggtcgaggcatccctgctcctgaggaagagcggacgcgacagggctggcagcggtactactttgagggcattaaacagacctttggctatggcgcacgcttatttt

SEQ ID NO: 106104 - DNA, 621 bp, Homo sapiens
  Payload ID: 800
  Gene Symbol: AHSA1
  Gene Name: AHA1, activator of heat shock 90kDa protein ATPase homolog 1 (yeast)
  ENST ID: ENST00000555729
  CDS Start-End: 1-400
atggagcgtcaaactaaactggacaggtacttctaagtcaggagtacaatacaaaggacatgtggagatccccaatttgtctgatgaaaacagcgtggatgaagtggagattagtgtgagccttgccaaagatgagcctgacacaaatctcgtggccttaatgaaggaagaaggggtgaaacttctaagagaagcaatgggaatttacatcagcaccctcaaaacaggacactttgccaccatcaccttgaccttcatcgacaagaacggagagactgagctgtgcatggaaggtcgaggcatccctgctcctgaggaagagcggacgcgacagggctggcagcggtactactttgagggcattaaacagacctttggctatggcgcacgcttattttagggccagcggcaggggactccagcctgctggacacttcagtccagctctctcctgactggggcttgcgactcacaggattgcatcgtcccagctgctaacttggggccggggcccctcccttccacatataccttgggtttgtgcatgttttctgctgggtgggttcagagggcaatttctcttttatgtgtacatatgctaaataaacataatttaaaaaa

SEQ ID NO: 106105 - DNA, 2437 bp, Homo sapiens
  Payload ID: 801
  Gene Symbol: AHSA2
  Gene Name: AHA1, activator of heat shock 90kDa protein ATPase homolog 2 (yeast)
  Uniprot ID: Q719I0
  ENST ID: ENST00000357022
  CDS Start-End: 1259-1672
gccttctggcagtttctgggagctgcgaacgcgccgccccggggctcggcggccggaaacgctggcttcggagccttaggcgccgcggcctttccttgttttccgcccagtccacgccgccatggccaagtggggccaggggaacccccactggatcgtggaggagcgggaggacgggaccaacgtgaacaactggcgctggcgcggctggcggcggcctccttccgggatctggggagggccgggccgcgggagccggggctgccctggggtctgtgcggggccgcggggccagggggtcagggggccgccccccctcagctgctggacgcagggctcggccttcgcctctcggctcgggagagtccttgagtacggagaccggctaggagggttgcagctgcctctttttgaaagttgggttgggccccaagagtgacttccgacagacctttccactcccaccgtctgtggcctgagggccttcccttctcctcccgcccacccctctggatgtttcggggagttagaagggagctggattgagagactgtgttaggggcgggggtatggaacgtagtggaaagggcagaaatttggatctcagttcgcgcccaccccgcaggcgcctcccgcgagccgggccctctgtgagtgagacaagctccccttcctttacgcgcctcacctggcgcgtggggagaggtcggcagccctccgccgcagaacctccggaagggatgtcctctgccctgcgcctctggccggggctgtggtccctccaggccgtcgaggggatgctgaggccggtccccagaggagcatgacttggctggtccggaggagctctgagggcatgggcaatcttggctcgctgcaacctcagcttccagagttcaagcgagtctcctgcttcagcctcatgagtagctgggactacagatgcgtgccactacgtccgtctgatgacagagcgggatgccaccagcttgtccaaagggaagttccaggagctcctggtgggcatcgttgtggagaatgacgctggccgcggcgagatcaacgagttgaagcaggtggaaggggaggcttcgtgcagcagccgcaaaggaaagctgattttcttctatgagtggaacatcaaactgggctggaaaggcatcgttaaagaatctggagtgaagcacaagggattgattgaaatacccaatctttctgaggaaaatgaagtagatgacactgagaatttacaacgggaatgattttaccaacgaaagctatggcaacccaggaattgactgtcaaaagaaaactgagtgggaataccctgcaggttcaggcctcatctccagtggcactgggtgtaaggattcccactgtggctcttcacatgatggaactgtttgacacaactgtagagcagctgtatagcatcttcactgtaaaggagttaacaaataagaagatcatcatgaaatggagatgtgggaactggccagaagaacactatgccatggttgcactgaattttgtgcctactctagggcaaacagaattacaattgaaggagttcctatctatctgtaaagaagagaacatgaaattctgttggcagaagcagcattttgaagaaataaaaggttcactgcagctgacccccctaaatggttgaattaaaatttattataaggcattactttttgtaagcggaaaaagtgtcacatttacctcttccctatcttttgtttaaaaggactgtctttattttatattggatgaaatctatgaacatatatacaatgtaaagcattgtttgactctttattataactagacactgcattgatttaaaagtagcaaacaacctgaaattaagtattaacctgaccttccatcgatattcctctggaaataggtaagtcctgagtgcagatagttgatgtttcccaagctgaagcttgtcctatagcaagcttgcttgcagctgtacttttagttcaagatgacaaaaaataaatggcatgttgacactattcctttattttactttagggtttttaaggtgtgtagatcttaggtcgtaaaacagtggtatattgcattcaaaagcatgttgaggtgagggcaaattggctgtgttttgctccacatctccctgcacatctccctgctgtggttttgcacttcggtgtggagaggattgagaagtctgtggggacacattagttctgtggactgctggtaacacttccagtgaaacagcatataatggataaatgtttcccccctctttcacggttttctcactactttcacctgagaagactgaagcaacgtatgtaaacaaatgaaaagtcatcacaatcagtttaattaagtgcacagaatagcaatcaatcaatcagtcatgtcaataaaaataaaacaattattttta

SEQ ID NO: 106106 - DNA, 6574 bp, Homo sapiens
  Payload ID: 801
  Gene Symbol: AHSA2
  Gene Name: AHA1, activator of heat shock 90kDa protein ATPase homolog 2 (yeast)
  Uniprot ID: Q719I0
  ENST ID: ENST00000394457
  CDS Start-End: 1744-2157
ccacgccgccatggccaagtggggccaggggaacccccactggatcgtggaggagcgggaggacgggaccaacgtgaacaactggcgctggcgcggctggcggcggcctccttccgggatctggggagggccgggccgcgggagccggggctgccctggggtctgtgcggggccgcggggccagggggtcagggggccgccccccctcagctgctggacgcagggctcggccttcgcctctcggctcgggagagtccttgagtacggagaccggctaggagggttgcagctgcctctttttgaaagttgggttgggccccaagagtgacttccgacagacctttccactcccaccgtctgtggcctgagggccttcccttctcctcccgcccacccctctggatgtttcggggagttagaagggagctggattgagagactgtgttaggggcgggggtatggaacgtagtggaaagggcagaaatttggatctcagttcgcgcccaccccgcaggcgcctcccgcgagccgggccctctgtgagtgagacaagctccccttcctttacgcgcctcacctggcgcgtggggagaggtcggcagccctccgccgcagaacctccggaagggatgtcctctgccctgcgcctctggccggggctgtggtccctccaggccgtcgaggggatgctgaggccggtccccagaggagcatgacttggctggtccggaggagctctgagggcatgggcaatcttggctcgctgcaacctcagcttccagagttcaagcgagtctcctgcttcagcctcatgagtagctgggactacagatgcgtgccactacgtccgtctgatgtttgtatttttagtagagacagggtttcaccatgttggtcaggctgctctcgaactccagatctcgtgatccgcccgcctgggcctactaaagtgctgggattacaggcgtgagctagatctgactttctagtgtcctagccttggcccgatggacatgtcatttctctcagctcgtttctgtcccctaaagtgagaatattgcctgggaagattacattagacgatgtatatgcgaagacacttgatagctggtattgtcatgattctgattagttcactactgctactttccctgtggcctaggctttgcctatttccagtgggcgagctagctagatcctcctcccttaaataagccagtgtttttaagacagaatactacttgcatagtggacaataatatcttaaagaactgagcaggatgaaaagaatttgatagaaagcaggtttgaggagcacattggaggttggcaggtttcgaggctgcttgagaggacttgggccgatctgggctgggcttggacgtgaccctggcacccaggcaggtggatcccagctggggcttccattcacgactttctggtccctggcaggacagagcgggatgccaccagcttgtccaaagggaagttccaggagctcctggtgggcatcgttgtggagaatgacgctggccgcggcgagatcaacgagttgaagcaggtggaaggggaggcttcgtgcagcagccgcaaaggaaagctgattttcttctatgagtggaacatcaaactgggctggaaaggcatcgttaaagaatctggagtgaagcacaagggattgattgaaatacccaatctttctgaggaaaatgaagtagatgacactgagaatttacaacgggaatgattttaccaacgaaagctatggcaacccaggaattgactgtcaaaagaaaactgagtgggaataccctgcaggttcaggcctcatctccagtggcactgggtgtaaggattcccactgtggctcttcacatgatggaactgtttgacacaactgtagagcagctgtatagcatcttcactgtaaaggagttaacaaataagaagatcatcatgaaatggagatgtgggaactggccagaagaacactatgccatggttgcactgaattttgtgcctactctagggcaaacagaattacaattgaaggagttcctatctatctgtaaagaagagaacatgaaattctgttggcagaagcagcattttgaagaaataaaaggttcactgcagctgacccccctaaatggttgaattaaaatttattataaggcattactttttgtaagcggaaaaagtgtcacatttacctcttccctatcttttgtttaaaaggactgtctttattttatattggatgaaatctatgaacatatatacaatgtaaagcattgtttgactctttattataactagacactgcattgatttaaaagtagcaaacaacctgaaattaagtattaacctgaccttccatcgatattcctctggaaataggtaagtcctgagtgcagatagttgatgtttcccaagctgaagcttgtcctatagcaagcttgcttgcagctgtacttttagttcaagatgacaaaaaataaatggcatgttgacactattcctttattttactttagggtttttaaggtgtgtagatcttaggtcgtaaaacagtggtatattgcattcaaaagcatgttgaggtgagggcaaattggctgtgttttgctccacatctccctgcacatctccctgctgtggttttgcacttcggtgtggagaggattgagaagtctgtggggacacattagttctgtggactgctggtaacacttccagtgaaacagcatataatggataaatgtttcccccctctttcacggttttctcactactttcacctgagaagactgaagcaacgtatgtaaacaaatgaaaagtcatcacaatcagtttaattaagtgcacagaatagcaatcaatcaatcagtcatgtcaataaaaataaaacaattatttttacatcaagtgtgctttatttcctccacaggtattctgttaaataaagcaccatttatatactgccaggccacagctaaagaggattctttacagaatcaaatttcttgtggttgttccgtatacaagtaaacttaattttgataataagaaccacagcgatcggaggcaatctgcctctataaggtacaaaactggcacagaggacaccatatcatacacagtaaaaatgctgtaagtttaaattacattgtacagggctaggcaaccctgttcttcccagacagccatattaaatgaaagccactaaagtgaactcttaattacataaaacatatccattatctgattgccctttaggaagtatactgaagatgcaagtttttttcatctggagttctgcctgaccaagaattaagcctataaatctatcttgccattcaagcagagagcactggacaaactgaagcacaaaaacaaataagcaaaacttatacaaacagcatgggggttgggggtgagggacttaaaagtagacatgctacacctaatgtcaagaagcagcttggtttcctttgccagatatccttgtgacgacatggattgtagattcaatggtcctacacagggtatctaaaatgtcatgttgctgcatatgactaaagagtcctctggaatggccacaactgagagataaagcaacctcagggtcctgggagggcaaagcttggccatcacagcttctcaagtcagctaagtcagacagaactgcagagatagaagtagaagggaactcagattcttcctcagctagggtagaatccttggaacagtggaggtctttaaattctttacaatcgtcatatctaccattgttggactgttcttctgcatgctgtgacctgatatttgacatgtcttctgaaaacgaagatggaacttccattcggtattctttaacagaactattttcaggggaaggaagatcttgctcagttcctggatcaataattgaggagtctctggtctcattgtcagaagtgctcgttggggtcaggacctccctggtttctgttttcatgtcactgatgcagctgtctacagtgtgctcctcatcactgctaacacgccgccttttaatgggagttgctccttcatcatctgtgaaaacacatgccaaaagggaaacttctctgaaagtcattaagatcacgttagggggggatgtgggaagttaattttgtttctagcatttatatttaggaggttcagctgaacacacaactcttaaaccagttacaccaagtgtattactccctcctcccaccctaaaggtaatgatagtagtccataaagctaacctttagtttttctttctttggcttcttgctcttggagtgagtttctctgttgcagacaagtcctgcatttgcttaaaagctcttgcagagttggaattagagctgggtttaactgtttgggagtgtgtactgacaggagcaaagcgagtgccctcaggtcctacaaaaacccagataggaacatttcaaattctaaagccaacactttgatgcagttgtttacagttaattgcagatgtttattttcccaggaatccattctttcctaagaataccctggtttctctgggattcttagaatgataaaaccagaaagccagtgttaagatactacagcatttcattagttgttttttttttttgttttgtttttgttttttttgagatggagtcttgttctttggcaaggctggagtgcagtggtgtaatctcggctcgctgcaacctccaccacccgggttcaagcgattcccctccctcagcctcccaagtagctgggactacaggcgcccgccaccacgcctggcttaattttttctattttagtagagacagggtttcaccatgttggccattgagatggtctcaatctcctgacctcgttatccaccggcctcgacctcccaaaatgcttggattgcaggcatgagccaccgtgcccagcctcattagttcttaaagtcactaatagcattattttatgcccacgaaccagtaagtcagaccaaagcctgaaatagtgttttctgaaaaatggaaaaggaaatataagaattttaaaaacaaaccttgaaatcagtttctcaagttaaaattctgatggatgtcacaaatagtaaggtcttccttactgagctctgtcatctgttttggcttttatgcatactgtgatttgggaggctgctgctcaacattctagcccatttccagagtgttccattattctaggacatggctgtcatgggagtctgcacaaggcaactaatgctctagatttaactgccttttttaaatcagtagatcattaattgtttcagttacataggagccataggcagtaatagaaacatcacaagtattgtttccaaaaatatacccaactagagataagaccactaagatgttccctttattacctttcagcatttaatgataccagcttgtagcttccaaggtgatagagtgtgctgtgtacatacaaggcatagtaaacgtgtatttaaaacttgtttttttgtcgcacatggcttaagagtttgaatcagtaagttaaagttacgagagtaaaatcatatgaaggccacacagttaactgaaggacagtttaaaagtgtgtgccgccgcctctgcatagttcttaccccatttaaagaagcacttgctttggaaatttcaactcggttggagaaatcagactgtaggttctgatactggcttatcaagtttgtaataagagtgctgatcaaattggcacagtttgcttcagaaaacacttgactttgaacctgaaaaagaagatttaaaaaaatctccaaaagaccagcataatgaaaccacaagcattaactaattagaaatgacacactgagtttccaaagtactacgtacctttagaaggaaatgtgtcatgaacgtgtagacaatgttgttgtttaaaaaagttctttcatccattaggatacatttaatatattctgcgaaaacaggatcttcacacaaaagcttgatgcagttttttgacatagcagactaaagtggggagaagatggttgagcacttacggttgagcacggaaaaaacttacacggaaaaaacttacacagaaaaaacatacacttgtgtatgatggaatctgaagccactgaaaatcctacttgaaaagccatgtctaactcacctattgaatttttagttaacagcaactatttttcatacagtaaaatgttactaatttagattaagggagtgctgggggaagacactgatgccgaaactgaacaaatgttttaaaagaaatgcaggtttattatccagcactgagagagttaacaaggactggaaaaataaggctaacaaagaataggatgtgaatgttttcaagggccaaattaatgtatttataggtaaccagagcatatgttgcaaaaagacacattttaagaatcaaaatcaattctccaaaatgttttaaactttactgtatattctcgctagcaacagtaattctgtaaataccttttccccccataaacactgcaagggtaaacaataaatcttctttcctaattatctca

SEQ ID NO: 106107 - DNA, 479 bp, Homo sapiens
  Payload ID: 801
  Gene Symbol: AHSA2
  Gene Name: AHA1, activator of heat shock 90kDa protein ATPase homolog 2 (yeast)
  ENST ID: ENST00000410073
  CDS Start-End: 15-455
aatttacaacgggaatgattttaccaacgaaagctatggcaacccaggaattgactgtcaaaagaaaactgagtgggaataccctgcaggttcaggcctcatctccagtggcactgggtgtaaggattcccactgtggctcttcacatgatggaactgtttgacacaactgtagagcagctgtatagcatcttcactgtaaaggaggaagagagagtttgtgttttattttctttaacaaataagaagatcatcatgaaatggagatgtgggaactggccagaagaacactatgccatggttgcactgaattttgtgcctactctagggcaaacagaattacaattgaaggagttcctatctatctgtaaagaagagaacatgaaattctgttggcagaagcagcattttgaagaaataaaaggttcactgcagctgacccccctaaatggttgaattaaaatttattataaggcatta

SEQ ID NO: 106108 - DNA, 1024 bp, Homo sapiens
  Payload ID: 802
  Gene Symbol: AHNAK
  Gene Name: AHNAK nucleoprotein
  Uniprot ID: Q09666
  ENST ID: ENST00000257247
  CDS Start-End: 237-686
agctgctctgccgcggggactgcaccgcccgccctgccagacccgcccggaacggggctcgtcgccgccagtagccgcagcaccgcagccttgggcctcgcgccggctatggccgtgccctggggctgagccctcaggttgtgaccgagattcccgacgagagagactgaggggaagagaggaaggaggggcgggctcctggcaaggcattcgctcctgagcggaatcctgcaaagatggagaaggaggagacaacccgggagctgctgctgcccaactggcagggtagtggctcccacgggctgaccatcgcccagagggacgacggcgtctttgtgcaggaggtgacgcagaactcccctgcggcccgcactggggtggtcaaggagggggaccagattgtgggtgccaccatctactttgacaacctgcagtcgggtgaggtgacccagctgctgaacaccatggggcaccacacggtgggcctgaagctgcaccgcaagggggaccgctctcccgagcctggccagacctggacccgtgaagtcttcagctcctgcagctctgaagtggttctgaacacaccacagccatcagcactggaatgcaaagaccagaacaaacagaaggaagccagcagccaagccggggcagtttcagtctccaccccaaatgcaggactgtagaagcggccaggaagaaaaccaccccctcttaaggttgtttttgtgaccgttctttggagcattgttctaaaaatgggaaattacatattgctgtgccaagggcaacaaacacctgcagttaaaggaataccttccgcgaggcggcttttcggagcatgcatgtttatagctccagccaggccagaccgagggctgctgcataagccctgcttggtgcatttctttacttgcaaggggacagagtgtgggcttaggtttgggactagagggggctttggcaactatggtgctcaggtgattatccttcgctcgtttatccaataaacatttatcaagca

SEQ ID NO: 106109 - DNA, 18787 bp, Homo sapiens
  Payload ID: 802
  Gene Symbol: AHNAK
  Gene Name: AHNAK nucleoprotein
  Uniprot ID: Q09666
  ENST ID: ENST00000378024
  CDS Start-End: 276-17948
acaagagccgcctccgcgcacgggggcccggccactcggagctgctctgccgcggggactgcaccgcccgccctgccagacccgcccggaacggggctcgtcgccgccagtagccgcagcaccgcagccttgggcctcgcgccggctatggccgtgccctggggctgagccctcaggttgtgaccgagattcccgacgagagagactgaggggaagagaggaaggaggggcgggctcctggcaaggcattcgctcctgagcggaatcctgcaaagatggagaaggaggagacaacccgggagctgctgctgcccaactggcagggtagtggctcccacgggctgaccatcgcccagagggacgacggcgtctttgtgcaggaggtgacgcagaactcccctgcggcccgcactggggtggtcaaggagggggaccagattgtgggtgccaccatctactttgacaacctgcagtcgggtgaggtgacccagctgctgaacaccatggggcaccacacggtgggcctgaagctgcaccgcaagggggaccgctctcccgagcctggccagacctggacccgtgaagtcttcagctcctgcagctctgaagtggttctgagcggggatgatgaggagtaccagcgcatctacaccacgaagatcaagccacggctgaagtcggaagatggagtggaaggagacctcggggagacccagagccgtaccatcacagtgaccagaagggtcacggcctacactgtggatgtgactggccgggaaggagccaaggacatagacatcagtagccctgaattcaagatcaagattccaagacatgaactgactgaaatctccaatgtggatgtggagacccagtctgggaagaccgtgatcagactgccctcgggctcgggggcagcctctccgacaggctctgctgtggatatccgagcaggggccatttctgcttcaggaccagagctccaaggtgctggccactcgaagctccaggtcaccatgcctgggataaaggtgggaggctcaggtgtcaatgtcaatgcaaagggcttggacttgggtggcagaggaggggtccaagttccagcagtggacatttcatcttctcttgggggtagggcagtagaggtacagggcccatctctggagagtggtgatcatggcaaaattaaatttcccaccatgaaagtgccgaaatttggtgtctcaacagggcgtgagggccagacaccaaaggcagggctgagggtttctgcacctgaagtctctgtggggcacaagggcggcaagccaggcttgactatccaagcccctcagctggaagtcagtgtgccctctgccaatattgagggccttgaggggaagctgaagggcccccaaatcactgggccatcacttgagggtgacctaggcctgaaaggtgccaagccacaggggcacattggggtggatgcctctgctccccaaattgggggtagcatcactggccccagtgtggaagttcaggcccctgacattgatgttcaggggcctgggagcaaactgaatgtgcccaagatgaaagtccccaagttctctgtatcaggtgcaaagggagaggaaactgggattgatgtgacactgcctacaggtgaagtgactgttcctggggtctctggggatgtcagcctgcctgagattgctactggtgggctggaaggaaagatgaaaggtactaaagtgaagactcctgaaatgattattcagaaacctaaaatctccatgcaggatgtggatctgagccttgggtctcctaaactgaaaggagatattaaggtttctgctcctggggtgcaaggtgatgttaaaggccctcaagtggcacttaaaggctccagagtggacatagagacaccaaacctagagggaaccttgacaggccctaggcttggcagtccttccgggaaaaccggaacctgtaggatctctatgtcagaagtagacttaaatgtggccgcacctaaagtgaaagggggtgtagatgtcacactccccagagtagaagggaaagtcaaagtccctgaagttgatgtcagaggccccaaagtggatgtcagtgccccagatgtcgaagcgcatggcccagaatggaacctgaaaatgcccaagatgaaaatgcccacgttcagcactccaggagccaaaggggaaggtccagatgttcatatgactctacccaaaggagatatcagtatttcagggcccaaggtcaatgtggaagccccagatgtcaacttggagggtctggggggaaaacttaaaggccccgatgttaagctgcctgatatgagtgtcaagacaccaaagatctccatgcctgatgtagatttgcacgtgaaaggtacaaaggtgaagggagagtatgatgtaactgtaccaaagctggaaggagaactcaaaggcccaaaagtggacattgatgccccagatgtggatgttcatggcccagactggcacttgaagatgcccaagatgaaaatgcccaaattcagtgtgccagggttcaaagcagagggcccagaagtggatgtgaacctgcccaaggctgatgtggacatttccgggcccaagatagatgttactgctcctgatgtgagcattgaggaaccagaagggaaattgaaagggcccaagtttaagatgcctgagatgaacatcaaagtccccaagatctccatgcctgatgtggacttacatctgaaaggccctaacgtaaagggagaatatgatgtcacaatgccaaaggttgaaagtgagattaaagttcctgatgttgaacttaaaagtgccaaaatggacattgatgtcccagatgtggaggttcaaggcccagactggcacctgaagatgcccaagatgaaaatgcccaagttcagcatgcctggcttcaaagcagagggcccagaagtggatgtgaacctgcccaaggctgatgtggacatctcaggacccaaggtgggtgttgaagttccagatgtgaatattgaaggacctgaaggaaagctgaagggccccaagttcaagatgccagagatgaatatcaaggcccccaagatctccatgcctgatgtggacttgcatatgaaaggtcctaaagtaaagggagaatatgatatgacagtgccaaagctggaaggggacctgaaaggcccaaaagtagatgtcagtgccccagatgttgaaatgcagggtcctgactggaacttgaagatgccaaagattaaaatgcccaaatttagcatgcccagcctcaaaggagaggggccagaatttgatgtgaacctgtccaaagcgaatgtggacatttctgcaccaaaagtagatactaatgctccagatctgagccttgaaggacctgaagggaagttgaaaggcccgaagtttaagatgcctgagatgcacttcagagctcctaagatgtctttgccagatgttgacctggatcttaaaggacccaaaatgaaaggaaatgtagatatctctgcaccaaagatagagggtgaaatgcaggttccagatgtggacatcagaggtcccaaggtagatattaaagcaccagatgtggaaggccaaggcctggactggagcctgaaaatacccaagatgaaaatgcccaagttcagcatgcccagcctcaaaggcgagggcccagaagtggatgtgaacttgcctaaggctgacgttgttgtctcaggacccaaggtggacatcgaagccccagatgtgagcctcgaaggtccagaagggaagctgaagggtcccaagtttaagatgcctgagatgcatttcaagacccccaagatctccatgcctgatgtggacttacacttgaaaggccccaaagtcaaaggggatgtggatgtgtctgtgcccaaggtagaaggtgaaatgaaagtgccagatgttgaaatcaaaggacccaaaatggacattgatgccccagatgtggaggttcaaggcccagactggcacctgaagatgcccaagatgaaaatgcccaagtttagcatgcctggcttcaaaggagagggccgagaagtggatgtgaacctgcccaaggctgacattgatgtctcaggacccaaggtggatgttgaagtcccagatgtgagccttgagggcccggaaggaaagctgaagggccccaagtttaagatgcctgagatgcacttcaaggcccccaagatctccatgcctgatgtggacctgaatcttaaggggccaaaattgaagggagatgtggatgtgtccttgcctgaggtagaaggtgaaatgaaagtgccagatgttgacattaaagggcccaaagttgacattagtgctccagatgtggatgttcatggcccagattggcacctgaagatgcccaaggtgaaaatgcccaagttcagcatgcccggcttcaaaggagagggccctgaagtggatgtgaagctgcccaaagctgacgttgatgtctcaggacccaaaatggatgctgaagttccagatgtgaatattgaaggtccagacgcaaaactaaaaggtcccaaattcaagatgccagaaatgagtataaagcctcagaagatatccataccagatgttggtttgcatttgaaaggtcctaaaatgaaaggagattatgatgtaacagttccaaaagtagaaggagagataaaagctcctgatgttgacatcaaaggccccaaagttgatattaatgcaccagatgtggaggttcatggcccagactggcacctgaagatgcccaaggtaaaaatgcccaagttcagcatgcctggctttaaaggagagggcccagaggtggatatgaacctgcccaaggctgaccttggtgtttcaggacccaaggtggacattgatgttccagatgtgaatcttgaagctccagaggggaaactaaaaggccctaagttcaagatgccaagcatgaatatacagacgcacaaaatctctatgcctgatgttggacttaatttgaaagcccctaaactgaaaactgatgtagatgtttcccttcccaaagtggaaggagacttgaagggtcctgaaattgatgtgaaagcccctaagatggatgtgaatgttggtgatattgatattgaaggtccagaagggaagttgaagggccccaagtttaagatgcctgagatgcatttcaaggcccccaagatctccatgcccgatgtggacttacacttgaaaggccccaaagtcaaaggggatatggatgtgtctgtgcccaaggtagaaggtgaaatgaaagtgccagatgttgacattaaagggcccaaagtggacattgatgccccagatgtggaggttcacgacccagattggcacctgaaaatgcccaagatgaaaatgcccaagttcagtatgcctggcttcaaagcagagggccctgaagtggatgtgaatctgccaaaggctgacattgatgtgtctggacccagtgtggacactgatgctcctgatttggatattgagggaccagaaggaaagttgaaaggctccaaatttaagatgcccaagttgaatataaaagctcccaaggtctccatgccagatgtggacttgaatttgaagggacccaaactgaagggagagatagatgcttctgtgccagaactggaaggtgatctcagagggccgcaagttgatgtcaaaggtccttttgtggaagcggaggtgcccgatgttgatctggagtgtcctgatgcaaagttgaaagggcccaagtttaagatgcctgagatgcacttcaaggcccccaagatctccatgcctgatgtggacttacacctgaaaggccccaaagtcaaaggggatgcggatgtgtcggtgccaaaattggagggagatttaacaggccccagtgtgggtgtggaggtgcctgatgttgagctggagtgtcctgatgcaaagttgaaaggccctaaatttaagatgccagacatgcacttcaaggcccccaagatctccatgcctgatgtggacttacacttgaaaggccccaaagtcaaaggggatgtggatgtgtcggtgccaaaattggagggagatttaacaggtcccagtgtgggtgtggaggtgcctgatgttgagctggagtgtcctgatgcaaagttgaaagggcccaagtttaagatgcctgagatgcacttcaagacccccaagatctccatgcctgatgtggacttacacctgaaaggccccaaagtcaaaggggatatggatgtgtctgtgcccaaggtagaaggtgaaatgaaagtgccagatgttgacatcaaaggacccaaaatggacattgatgccccagatgtggatgttcatggcccagactggcacctgaagatgcccaagatgaaaatgcccaagttcagcatgcctggcttcaaagcagagggcccagaagtggatgtgaacttgcccaaggctgatgttgttgtctcaggacccaaggtggatgttgaagtcccagatgtgagccttgaaggtccagaagggaagctgaagggccccaagcttaagatgcctgagatgcacttcaaggcccccaagatctccatgcctgatgtggacttacacttgaaaggccccaaagtcaaaggggatgtggatgtgtctttgccaaaattggagggagatttaacaggccccagtgtggatgtggaggtgcctgatgttgagctggagtgtcctgatgcaaagttgaaagggcccaagtttaagatgcctgagatgcacttcaagacccccaagatctccatgcctgatgtgaacttaaacttgaaaggccccaaagtcaaaggggatatggatgtgtctgttcccaaggtagaaggtgaaatgaaagtgccagatgttgacatcagagggcccaaagtggacattgatgccccagatgtggatgttcatggcccagactggcacctgaagatgcctaagatgaaaatgcccaagttcagcatgcctggcttcaaaggagagggcccagaagtggatgtgaacttgcccaaggctgacgttgatgtctcaggacccaaggtggatgttgaagtcccagatgtgagccttgaaggtccagaagggaagctgaagggccccaagtttaagatgcctgagatgcacttcaagacccccaagatctccatgcctgatgttgatttcaatttaaagggacccaaaatcaaaggagatgttgatgtttctgccccaaagctggagggagagttaaaaggtccagaattggatgtcaaaggtcccaaattagatgctgacatgccagaagtagctgtggaaggcccaaatggcaagtggaaaactcctaagttcaagatgccagatatgcactttaaagctcccaaaatctctatgccagacctcgatctacacttgaagagccccaaggcaaaaggagaggtggatgtagatgttcccaaattggaaggggaccttaaagggccacatgtggatgtcagtgggccagacattgacattgagggaccagagggcaaattgaaaggccctaagttcaagatgcctgatatgcatttcaaagcccccaatatttctatgcctgatgttgatctaaatctcaaaggacccaaaatcaagggggatgtggatgtgtctgtgcctgaggtagaaggtaaacttgaagtaccagatatgaacatcaggggccccaaagttgatgtaaatgcccccgatgtccaagctccagactggcacctgaagatgcccaagatgaaaatgcccaagttcagcatgcctggcttcaaagcagagggccctgaagtagacgtcaacttgcctaaggctgacgttgacatctcaggacccaaggtggacattgaaggccctgatgttaatattgaaggaccagagggaaagttgaaagggcctaagttaaagatgccagagatgaacatcaaagcccccaagatctccatgcctgactttgatttgcatctgaaaggtcccaaggtgaagggcgatgtggatgtttctctgcccaaagtggaaggtgacctcaagggccccgaagttgacatcaaggggcccaaagtggatattaatgccccagatgtgggtgttcaaggcccagactggcacctgaagatgcccaaggtgaaaatgccaaagttcagcatgcctggcttcaaaggagagggcccagatggggatgtgaagctgcccaaggctgacattgatgtctcaggacccaaagtggacattgaaggccctgatgttaacattgaaggaccagagggaaagttgaaagggcctaagttcaagatgccagagatgaatatcaaagcccccaagatctccatgcctgatattgacttaaacctgaaaggacccaaagtgaagggtgatgtggatgtttcccttcctaaagtggaaggtgacctcaagggcccagaagttgacatcaagggcccaaaagtggacattgacgcacctgatgttgatgttcatggcccagactggcacctaaagatgcccaagataaaaatgcccaagatcagcatgcctggcttcaaaggagaaggtccagatgtggacgtgaacctgcccaaggctgacattgatgtctcaggaccgaaagtggatgttgaatgtcccgatgtgaatatcgaaggacctgaaggaaagtggaaaagtccaaagtttaagatgccagagatgcattttaagactccaaagatatccatgccagatattgacctgaatctcacaggtccaaaaataaaaggagatgtggatgttacaggccctaaggtagagggagatctgaaaggtcctgaagttgacctcaaaggccccaaagtggacattgatgtcccagatgttaatgttcagggtccagactggcacctgaagatgcccaagatgaaaatgcccaagttcagcatgcctggcttcaaagcagagggccctgaagtggatgtgaacctgcccaaggctgacgttgatgtctcaggccccaaagtggacgttgaaggccctgatgttaacattgaaggaccagagggaaagttgaaagggcccaagttcaagatgccagagatgaatatcaaagcccccaagatccccatgcctgactttgatttgcatctgaaaggtcccaaggtgaagggcgatgtggatatttctctgcccaaagtggaaggtgacctcaagggccctgaagttgacatcaggggtccccaagtggacattgatgtcccggatgtgggcgttcaaggcccagactggcacctaaaaatgcccaaagtgaaaatgcccaaattcagcatgcctggcttcaaaggagagggcccagatgtggatgtgaacctgcccaaggctgaccttgatgtctcaggacccaaggtggacattgatgttccagatgtgaatatcgaaggcccagagggaaagttgaaaggtcccaaattcaaaatgcctgagatgaacatcaaagcccccaagatctccatgcctgacattgatcttaacctgaaaggtcccaaagtgaagggtgacatggatgtgtctctgccaaaagtggaaggtgacatgaaagttcctgacgtggatattaaaggccccaaagtggatattaatgccccagatgtggatgttcaaggcccagactggcacctgaagatgcctaaaataaaaatgcccaagatcagcatgcctggcttcaaaggagaaggtccagaagtggacgtgaacctgcccaaggctgaccttgacgtctcaggacccaaggtggacgttgatgttccagatgtgaatattgaaggtccagatgcgaaactgaagggccctaaattcaagatgccagagatgaacatcaaagctcctaaaatatcaatgcctgatttggacctcaatcttaaaggccctaaaatgaaaggagaggtggatgtttcacttgcaaatgtagaaggtgatttgaaaggacctgctcttgacataaaaggcccaaagatagatgtagatgctccagatattgacattcatggcccagatgccaaattaaaaggtccaaaactgaagatgcctgacatgcatgtaaacatgcccaagatctccatgccagaaattgacttgaatttgaaaggctcaaagcttaagggagatgttgatgtctctgggcccaagttggaaggtgacattaaagctcccagtttggatataaagggcccagaagtggacgtttccggtcctaagcttaatatcgaaggcaagtcaaagaaatctcgttttaagcttcccaaatttaatttttcgggctctaaagttcagacacctgaagtggatgtcaaaggtaaaaagccagatattgacataacaggtccaaaagttgatattaatgctcctgatgtcgaggtccaaggaaaagtgaaaggatccaagtttaaaatgcctttcctgagtatttcatctcccaaagtttctatgcctgacgtggagctaaatttgaaaagtcccaaagtcaaaggagacttagatattgcaggtcccaatttagaaggtgactttaaaggccccaaagtggatattaaggcaccagaagtcaatcttaatgcacctgatgtggatgttcatggtccagactggaatctgaaaatgcccaagatgaaaatgcccaaattcagtgtgtctggcttaaaagcagaagggccagatgtagctgtggatctaccaaaaggagacatcaacatagagggcccaagtatgaacattgagggcccagatctcaatgtggaaggtccggagggaggcttgaaaggtcccaaattcaagatgcctgacatgaatatcaaagctcccaagatctccatgcctgacattgacttaaacttgaaaggccccaaggtgaaaggtgatgtggatatttctcttcccaaacttgaaggggatctgaaagggccagaggttgatatcaaaggccctaaagtggacatcaatgccccagatgtggatgttcatggtccagactggcatctgaagatgcccaaagtgaaaatgcccaagttcagcatgcctggcttcaaaggagaaggccctgaagtcgatgttaccctccctaaagctgacattgacatttctggtcccaatgtagacgttgatgttccagacgtgaatattgaaggtccagatgcaaagctgaagggccccaagttcaagatgcctgagatgaacatcaaagcccccaagatctccatgcctgactttgacctgaacttgaagggacccaaaatgaagggtgatgtggttgtgtctttgcccaaagtggaaggtgatctaaaaggccctgaggtggacatcaagggccccaaagtggacattgacactcctgacattaacatcgaaggctcagagggtaaattcaagggacccaaatttaagataccagagatgcacctgaaggctcccaaaatatcgatgcctgacattgatttaaacctgaagggccccaaagtcaagggcgatgtggatgtttctctgcccaaaatggaaggtgacctcaagggtcctgaagttgacatcaagggccccaaagtggacattaatgctccagatgttgatgttcaaggcccagactggcacctgaagatgcccaaggtgaaaatgcccaagttcagcatgcctggcttcaaaggagagggcccagatgtggatgtgaacctgcccaaggctgaccttgatgtctcaggacccaaggtggacattgatgttccagatgtgaatatcgaaggcccagagggaaagttgaaaggtcccaaattcaagatgcctgagatgaacatcaaagcccccaagatctccatgcctgacattgatcttaacctgaaaggacccaaagtgaagggtgatatggatgtgtctctgccaaaagtggaaggtgacatgcaagttcctgacttggatattaaaggccccaaagtggatattaatgccccagatgtggatgttcgaggcccagactggcacctgaagatgcctaagataaaaatgcccaagatcagcatgcctggcttcaaaggagaaggtccagaagtggatgtgaacctgcccaaggctgaccttgacgtctcaggacccaaggtggacgttgatgttccagatgtgaatattgaaggtccagatgcgaaactgaagggccctaaattcaagatgccagagatgaacatcaaagcccccaagatctccatgcctgactttgatttgcatctgaaaggccctaaggtgaaaggagatgtggatgtttctctgcctaagatggaaggtgatctaaaggcccctgaagttgacatcaagggccccaaagtggacattgatgccccagatgtggatgttcatggcccagactggcacctgaagatgcccaaggtgaaaatgcccaaattcagcatgccaggatttaaaggagagggcccagaagtggatgttaatttgcccaaagctgacattgatgtctcaggacccaaagtggacattgacactcctgatattgatattcatggtccagaagggaaactgaagggccccaaatttaaaatgcctgacctgcacctcaaggcaccgaagatctctatgcctgaagttgacctgaatctgaaaggtccaaagatgaagggcgacgtggacgtttctctgcccaaagtggaaggcgacctcaagggccctgaagttgacatcaagggccccaaagtggacattgatgtcccagatgtggacgttcaaggcccagactggcacttaaaaatgcccaaagtgaaaatgcccaagttcagcatgcctggcttcaaaggagagggcccagatgtggatgtgaacctgcccaaggctgaccttgacgtctcaggacccaaggtggacattgatgttcctgatgtgaatatcgaaggtccagatgcgaaactaaagggccctaaattcaagatgcctgagatgaacatcaaagcccccaagatctccatgcctgactttgatttgcatctgaaaggtcccaaggtgaagggtgatgtggatgtttcccttcctaaagtggaaggtgacctcaagggcccagaagttgacatcaagggccccaaagtggacatcgatgcccctgatgtagatgttcatggcccagactggcacctgaagatgcccaaggtgaaaatgcccaaattcagcatgccaggattcaaaggagagggcccagatgtggatgttacccttcctaaggctgacattgagatttctggccccaaagtggacattgatgcccctgatgtcagtatcgaaggtccagatgcaaaactcaagggtccaaagttcaagatgccagagatgaacatcaaggcccccaaaatctccatgcctgacattgactttaacttgaagggtcccaaagtgaaaggtgatgtggatgtctctctgcccaaagtggaaggtgatctcaagggccctgaaattgacataaaaggccccagtttggacattgacacacctgatgtcaatattgaaggtccggaaggaaaattgaaggggcccaaatttaagatgcctgagatgaacatcaaagctcccaaaatctctatgcctgactttgatttgcacctgaaaggtcccaaggtgaagggtgatgtggatgtttcactacctaaggtggaaagtgatctgaaagggccagaggtagacattgaaggtcctgaagggaagctcaaaggtcccaagtttaagatgcctgatgtacatttcaaaagcccacaaatctccatgagtgacattgatttgaatttgaaaggacctaagataaaaggagatatggacatttccgttcctaaactggagggagatctgaaaggtcccaaagtggatgtcaaaggccctaaagtgggcattgacactcctgatattgacattcatggtccagaagggaaactgaagggccccaaatttaaaatgcctgacttacacctcaaggcaccgaagatctctatgcctgaagttgacctgaatctgaaaggtccaaaggtgaagggcgacatggacatttctctgcccaaagtggaaggcgacctcaagggccccgaagttgacatcagggaccccaaagtggacattgatgtcccagatgtggacgttcaaggcccagactggcacctaaaaatgcccaaagtgaaaatgcccaagttcagcatgcctggcttcaaaggagagggcccagatgtggatgtgaacctgcccaaggctgacattgatgtctcaggacccaaagtggacgttgatgttcctgatgtgaatatcgaaggtccagatgcgaaactaaagggccccaagttcaagatgcctgagatgagcatcaaagcccccaagatctccatgcctgatattgacttaaacctgaaaggacccaaagtgaagggcgatgtggatgttacccttcctaaagtggaaggtgacctcaagggcccagaagctgacatcaagggcccaaaagtggacatcaacacccctgatgtggatgttcatggcccagactggcacctgaagatgcccaaggtgaaaatgcccaaattcagcatgcctggcttcaaaggagaaggtccagatgtggatgtgagcctgcccaaggccgacatcgatgtctcgggacccaaggtggacgttgatattccagatgtgaatatcgaaggtccagacgcaaaactgaagggccccaagttcaagatgcctgaaataaatatcaaagctcccaagatctccatacctgatgttgacctggatttgaaaggacccaaagtaaaaggagattttgatgtgtctgtccctaaggttgaagggactttgaaaggcccagaagtagatcttaaaggtccacgtctggatttcgaaggccctgatgccaaactcagtggcccatctttgaagatgccatcgctggagatatctgctcctaaagtaactgctcctgatgttgatttgcatctcaaggcaccaaaaattggattttcaggtccgaagttagaaggtggtgaagtggacctcaagggacccaaagttgaagctccaagcttagatgtacacatggacagcccagatattaacatcgaagggccagatgttaaaatccccaaatttaagaaacccaagtttggatttggggcaaaaagccccaaagctgacatcaagtcaccttcactggatgtcactgttcctgaggcagagctgaaccttgagactcctgaaattagtgttggtggcaagggcaagaaaagtaagtttaaaatgcctaaaattcatatgagtggtcctaagattaaggccaaaaaacagggatttgacctgaatgttcctgggggtgaaattgatgccagcctcaaggctccggatgtagatgtcaacatcgcagggccggatgctgcactcaaagtcgacgtgaaatcgcccaaaaccaagaaaacgatgtttggaaaaatgtacttcccagatgtagagtttgacattaaatcacctaaatttaaagctgaggcccctctccctagccccaaactggagggtgaactccaggcacctgatctggaactttctttgccagcgattcacgtcgaaggtcttgacatcaaggcgaaggctcccaaggtcaagatgccagatgtggacatctcagtgccaaaaatagagggtgacctgaaaggccccaaagtgcaggcaaacttgggtgcacctgacatcaacatcgaaggcctagatgctaaagtcaaaacaccgtccttcggcatttctgcccctcaagtctccatccctgatgtgaatgtaaacttgaaaggaccaaagataaagggtgatgtccccagcgtgggactggaaggaccagatgtagatctgcaaggtccagaagcaaaaattaagttccccaagttttccatgcccaagatcggcatcccaggtgtgaaaatggagggtgggggagccgaggtccatgcccagctaccctctcttgaaggagacttgagaggaccagatgttaagctcgaagggcccgatgtttctctaaaggggccaggagtagacttgccttcagtgaacctctctatgccaaaagtctctgggcctgaccttgatctgaacttgaaaggaccaagtttgaagggagacctggatgcatctgttcccagcatgaaggtgcatgctccagggctcaacctcagtggtgtcggtggcaaaatgcaggtgggaggagacggtgtgaaagtgccagggatcgatgccacaacaaagcttaacgttggggcaccagatgtgacactgaggggaccaagcctgcagggagatctggctgtctctggtgacatcaaatgccctaaagtatccgtaggagctcctgatctaagcttggaggcatccgaaggcagcattaaacttcccaaaatgaagctgccccaatttggcatctctactccggggtccgacttgcacgtcaatgccaaggggccacaggtttctggcgaactgaaggggccaggtgtggatgtgaacctgaaagggcctcggatttcagcaccgaatgtggactttaacttggaaggaccaaaagtgaaagggagccttggggccactggtgagatcaaaggccccactgtcggaggaggtcttccaggcattggtgttcaaggcctagaaggaaacctccagatgcctggaattaagtcctctggatgtgatgtgaacctgccaggcgtgaatgtgaaactcccaactgggcagatttctgggcctgaaatcaaaggtggtctgaaaggttcagaagtaggtttccatggggctgctcctgatatcagtgtgaaggggcctgcctttaatatggcatctcctgagtcagattttggcatcaacttgaagggcccaaaaatcaaaggaggtgcggatgtttcagggggtgtcagtgccccagacatcagccttggtgaagggcatttgagtgttaaaggttccgggggtgagtggaagggaccccaagtctcctctgctctcaacttggacacatctaagtttgctgggggccttcatttctcaggaccaaaggtggaaggaggtgtgaaaggaggtcagattggactccaggctcctgggctgagtgtgtctgggcctcaaggtcacttggaaagtggatctggaaaagtaacattccctaaaatgaagatccccaaatttaccttctctggccgtgagctggttggcagagaaatgggggtggatgttcacttccctaaagcagaggccagcatccaagctggtgctggagacggcgagtgggaagagtctgaagtcaaactgaaaaagtccaagatcaaaatgcccaagtttaatttttccaaacctaaagggaaaggtggtgtcactggctcaccagaagcatcaatttctgggtccaaaggtgacctgaaaagttcaaaggccagcctgggctctctggaaggagaggcagaggccgaagcctcttcaccgaaaggcaaattctccttatttaaaagtaagaagccacggcaccgctcaaattcattcagtgatgaaagagagttctctggaccttccaccccgacggggacgctggagtttgaaggtggggaagtgtctctggaaggtgggaaagttaaagggaaacacgggaagctgaaattcggtacctttggtggattggggtcaaagagcaaaggtcattatgaggtgactgggagcgatgatgagacaggcaagttacaggggagtggggtgtccctggcctctaagaagtcccgactgtcctcctcttctagcaatgacagtgggaataaggttggcatccagcttcccgaggtggagctgtcagtttccacaaagaaagagtagcaggcctttgtatgtgtgtacatatatatatatataacaaaacatcagccttgggtggtgtgttcctatataaactccaaagggaaacacaccgactgcctcagcaatcatgcaaagaccttgcctggcccggtggcaagcgctgaaaaaccgaccgcctgtaggctcctggaactatacagataggtaaagagttccaagttcgtccagcccatgtgcaaagtcaacagtatttgccttaagatttcatatatatatatttttttgcattgactgctgagagctcctgtttactaagcaagcttttgtgtttattatcctcatttttactgaacattgttagttttggggtaatggaaacccactttttcattgtaatgactttgggggcttttgttagtaagggtgggtggggtgatgggttgcagacggaggtcaggtcttcctctttcctgagactggatctgttcaaacagcaaacgcccacagatggcccagaggtggtggtagtcagggtgtgtgggtgtttttagggttctttagtgttgtttctttcacccaggggtggtggtcccagccagtttggtgctgacggtgagaggaaattagaatctgtttgcaaattgtccaacccaccccctcaacatgaggggcttccattttctgtgttttgtaagggaactgtttccttcatgccgccatgttcctgatattagttctgatttctttttaacaaatgttatcatgattaagaaaatttccagcactttaatggccaattaactgagaatgtaagaaaattgatgctgtacaaggcaaataaagctgtttattaacct

SEQ ID NO: 106110 - DNA, 580 bp, Homo sapiens
  Payload ID: 802
  Gene Symbol: AHNAK
  Gene Name: AHNAK nucleoprotein
  ENST ID: ENST00000530285
  CDS Start-End: 148-580
gagctggcgacccgactccatggtccagcacatggcacagagactggggttgtgaccgagattcccgacgagagagactgaggggaagagaggaaggaggggcgggctcctggcaaggcattcgctcctgagcggaatcctgcaaagatggagaaggaggagacaacccgggagctgctgctgcccaactggcagggtagtggctcccacgggctgaccatcgcccagagggacgacggcgtctttgtgcaggaggtgacgcagaactcccctgcggcccgcactggggtggtcaaggagggggaccagattgtgggtgccaccatctactttgacaacctgcagtcgggtgaggtgacccagctgctgaacaccatggggcaccacacggtgggcctgaagctgcaccgcaagggggaccgctctcccgagcctggccagacctggacccgtgaagtcttcagctcctgcagctctgaagtggttctgagcggggatgatgaggagtaccagcgcatctacaccacgaagatcaagccacggctgaagtcggaagatggagtggaaggagacctcgggg

SEQ ID NO: 106111 - DNA, 584 bp, Homo sapiens
  Payload ID: 802
  Gene Symbol: AHNAK
  Gene Name: AHNAK nucleoprotein
  ENST ID: ENST00000533365
  CDS Start-End: 222-584
gggcttggcgtgggaggagggctaagctgcgctcgctggaaccctgcgctccagcggtgcgcgccaggagagggggcccgaagcgaggtctcgcctagagttggaaaggcagcgtgcttagggttgtgaccgagattcccgacgagagagactgaggggaagagaggaaggaggggcgggctcctggcaaggcattcgctcctgagcggaatcctgcaaagatggagaaggaggagacaacccgggagctgctgctgcccaactggcagggtagtggctcccacgggctgaccatcgcccagagggacgacggcgtctttgtgcaggaggtgacgcagaactcccctgcggcccgcactggggtggtcaaggagggggaccagattgtgggtgccaccatctactttgacaacctgcagtcgggtgaggtgacccagctgctgaacaccatggggcaccacacggtgggcctgaagctgcaccgcaagggggaccgctctcccgagcctggccagacctggacccgtgaagtcttcagctcctgcagctctgaagtggttctgaacacaccacagccatcagca

SEQ ID NO: 106112 - DNA, 701 bp, Homo sapiens
  Payload ID: 802
  Gene Symbol: AHNAK
  Gene Name: AHNAK nucleoprotein
  ENST ID: ENST00000530124
  CDS Start-End: 10-405
tcattccagatggagaaggaggagacaacccgggagctgctgctgcccaactggcagggtagtggctcccacgggctgaccatcgcccagagggacgacggcgtctttgtgcaggaggtgacgcagaactcccctgcggcccgcactggggtggtcaaggagggggaccagattgtgggtgccaccatctactttgacaacctgcagtcgggtgaggtgacccagctgctgaacaccatggggcaccacacggtgggcctgaagctgcaccgcaagggggaccgctctcccgagcctggccagacctggacccgtgaagtcttcagctcctgcagctctgaagtggttctggactgtagaagcggccaggaagaaaaccaccccctcttaaggttgtttttgtgaccgttctttggagcattgttctaaaaatgggaaattacatattgctgtgccaagggcaacaaacacctgcagttaaaggaataccttccgcgaggcggcttttcggagcatgcatgtttatagctccagccaggccagaccgagggctgctgcataagccctgcttggtgcatttctttacttgcaaggggacagagtgtgggcttaggtttgggactagagggggctttggcaactatggtgctcaggtgattatccttcgctcgtttatccaataaacatttatcaagcatctg

SEQ ID NO: 106113 - DNA, 568 bp, Homo sapiens
  Payload ID: 802
  Gene Symbol: AHNAK
  Gene Name: AHNAK nucleoprotein
  ENST ID: ENST00000528508
  CDS Start-End: 198-568
agctgcgctcgctggaaccctgcgctccagcggtgcgcgccaggagagggggcccgaagcgaggtctcgcctagagttggaaaggcagcgtgcttagggttgtgaccgagattcccgacgagagagactgaggggaagagaggaaggaggggcgggctcctggcaaggcattcgctcctgagcggaatcctgcaaagatggagaaggaggagacaacccgggagctgctgctgcccaactggcagggtagtggctcccacgggctgaccatcgcccagagggacgacggcgtctttgtgcaggaggtgacgcagaactcccctgcggcccgcactggggtggtcaaggagggggaccagattgtgggtgccaccatctactttgacaacctgcagtcgggtgaggtgacccagctgctgaacaccatggggcaccacacggtgggcctgaagctgcaccgcaagggggaccgctctcccgagcctggccagacctggacccgtgaagtcttcagctcctgcagctctgaagtggttctgagcggggatgatgaggagtaccagcgcat

SEQ ID NO: 106114 - DNA, 579 bp, Homo sapiens
  Payload ID: 802
  Gene Symbol: AHNAK
  Gene Name: AHNAK nucleoprotein
  ENST ID: ENST00000531324
  CDS Start-End: 323-579
aagagccgcctccgcgcacgggggcccggccactcggagctgctctgccgcggggactgcaccgcccgccctgccagacccgcccggaacggggctcgtcgccgccagtagccgcagcaccgcagccttgggcctcgcgccggctatggccgtgccctggggctgagccctcaggttgtgaccgagattcccgacgagagagactgaggggaagagaggaaggaggggcgggctcctggcaaggcattcgctcctgagcggaatcctgcaaagtggaaggacgtgagacgaattaccccacccccaacacctcacctggcagatggagaaggaggagacaacccgggagctgctgctgcccaactggcagggtagtggctcccacgggctgaccatcgcccagagggacgacggcgtctttgtgcaggaggtgacgcagaactcccctgcggcccgcactggggtggtcaaggagggggaccagattgtgggtgccaccatctactttgacaacctgcagtcgggtgaggtgacccagctgctgaacaccatggggcaccacacggtgggcctgaagct

SEQ ID NO: 106115 - DNA, 18254 bp, Homo sapiens
  Payload ID: 803
  Gene Symbol: AHNAK2
  Gene Name: AHNAK nucleoprotein 2
  Uniprot ID: Q8IVF2
  ENST ID: ENST00000333244
  CDS Start-End: 121-17508
ccgcggcagcgcagggcagcggggcagagcgcggctcccgcccgcccgccccgtgcgccggagccgggaccagcgactggacgcgacgggccgccaggcccgcaccgcctggccgccgcgatgtgcgactgcttccacatggtgctgcccacctggcccggaacccccggcagcgtgtccggccgtcagctgcagcccggggagccaggtgcagaaacggaagatgaccactctgtgactgaagggcctgcggatgagggcattcgaccacggccgcaggggtcttcacctgtctacgaatacacgactgaggctgccgactttggactccaggaagacgcccccggcaggcaaggttctgctgggagacggagatcctggtggaagcgagattcaggggactcacggacatttttcaggatgagtcgtccagaggctgtccaggaggcaacagaggtgacgctgaagacagaggtggaggcaggagccagtggctacagtgtcacaggtggtggggaccaggggatcttcgtcaagcaagtgctgaaggactcctcagccgccaagctttttaacttgagagaaggggatcagctgctcagtacaaccgtgttctttgaaaacataaaatatgaagatgctctcaaaatccttcaatattcagagccgtacaaggttcagttcaaaatcagacggcagctccctgccccacaggatgaagagtgggcttccagcgatgcccagcacggcccacagggcaaggagaaggaggacacggatgttgctgatgggtgcagagagacccccacgaaaactctggaaggagatggggaccaagagagactcatctccaaaccaagggtggggagaggcaggcagagccagagggagaggctctcttggccaaaatttcaatccataaagagcaagcgggggccgggaccccagaggtcacacagctcgtcagaggcctacgaacctagggacgcacatgacgtgtcccctacaagcacagacacagaggcccagctcacggtggagcgccaagagcagaaggcagggccgggcagccagaggaggcggaagttcctcaacctcagattcaggacaggctcgggacagggcccttcatcgacaggacagccaggcagggggttccagagtggggtgggccgtgctggggtcctggaagagttggggccctggggtgatagcctcgaggagactggggctgccacaggcagcaggagagaggagagggcagaacaggatcgagaagtgatgcctgctcagagcatgccattgcccacagagctcggtgaccctagactttgcgagggaacccctcaggaagggggactcagggcagccaggctccatggaaagaccctggaggggcaggcacaggagacagcagtggcccagaggaagcccagggcccagccaactcctggaatgagccgggagggtgaaggcgagggactgcagagcctggaaatcgggatcgccagactgtccttgagagacacaaccgaaggaggcacacagattggcccaccagaaattagggtgcgagtacacgatttaaagacaccaaaatttgcattttccacagaaaaagagccagaaagagaaaggcgccttagtaccccacagcgagggaagagacaggatgcgtcctcaaaagcgggtactggcctgaagggtgaggaggtggaaggagccgggtggatgccgggcagggaaccaaccacacatgcagaagcacagggggatgaaggagatggagaggaaggactacagaggacaaggatcactgaggaacaggacaagggcagggaagacacagaaggacagataagaatgcccaagttcaagataccctccttaggatggtcgccaagcaagcacacaaagacaggcagagaaaaagccacagaagacacagagcagggaagggaaggagaggccacagcaacagctgatagaagagaacagagacgcacagaggaaggattaaaagacaaagaagacagtgactcaatgacaaacacaacaaaaatacaactaatacacgatgaaaaacgcttaaaaaaggaacaaattctgacagaaaaggaagtggccaccaaagacagcaagttcaaaatgcccaagttcaagatgccattgttcggggcgtcagccccaggcaagtccatggaggcctcggtggatgtgtctgcgccgaaggtggaggccgacgtgagcctcctctccatgcagggggacctcaagaccactgacctcagcgtccagaccccttccgctgacctggaggtccaggatggccaagtggatgtgaaacttccggagggccccctgcccgagggagccagcctcaaagggcacctgcccaaggtgcagaggcccagtttgaagatgcccaaagtggacctcaagggccccaagctggacctgaaaggccccaaggcggaagtgacagcccccgatgtgaagatgtctctgtccagcatggaggtggacgtccaggccccgagagcaaagctggatggtgcgcggctggagggggacctgtccctggccgacaaggaggtgactgccaaagacagcaagttcaaaatgcccaagttcaagatgccatcattcggggtgtcggccccaggcaagtccatggaggactcggtggatgtgtctgcgccgaaggtggaggccgacgtgagcctctcctccatgcagggggacctcaaggccactgacctcagcattcagcccccttccgctgacctggaggtccaggctggccaagtggatgtgaaacttccggagggccctgtgcccgagggagccggccccaaagtgcacctgcccaaagtggagatgcccagtttcaagatgcccaaagtggacctcaagggcccccagatagatgttaagggccccaagctggacctgaaaggccccaaggcggaagtgacagcccccgatggcgaggtgtctctgcccagcatggaggtggatgtccaggcccagaaggccaagctggatggtgcgtggctggagggggacctgtccctggccgacaaggacgtgactgccaaagacagcaagttcaaaatgcccaagttcaagatgccgtcgttcggggtatcggccccagggaagtccatcaaggccttggtggatgtgtctgcacccaaggtggaggccgacctgagtctcccctccatgcagggggacctgaagaccactgacctcagcattcagcctgcttctactgacctgaaggtccaggctgaccaggtggatgtgaagctcccggagggccacctgcccgagggagctggccttaaagggcacttgcccaaggtggagatgcccagtttcaagatgcccaaagtggccctcaagggcccccaggtggacgtcaagggccccaagctggacctgaaaagccccaaggcggaagtcacagcccctgatgtggaggtgtctctgcccagcgtggaggtggacgtcgaggccccgggagccaagctggacagtgcgcggctggagggggaactgtccctggccgacaaggatgtgactgccaaagacagcaggttcaaaatgcccaagttcaagatgccatcgttcggggcgtcagccccaggcaagtccatcgaggcctcggtggatgtgtctgcacccaaagtggaggccgacgtgagtctcccctccatgcagggggacctcaagaccactgacctcagcattcagcccccttccgctgacctggaggtccacgctggccaggtggacgtgaagctcctggagggccacgtgcctgagggagccggcttcaaagggcacctgcccaaggtgcagatgcctagtttgaagatgcccaaagtggacctcaagggcccccaggtggaagtcaggggccccaagctggacctgaaaggtcataaggcagaggtgacggcccacgaagtggctgtgtctctgcccagtgtggaggtggacatgcaggccccgggagccaagttggatggcgcacagctggacggggacctgtccctggctgacaaggacgtgactgccaaagacagcaagttcaaaatgcccaagttcaagatgccgtcgttcggggtgtctgccccaggcaagtccattgaggcctccgtggacctgtctgcacccaaggtggaggccgacatgagcctcccctccatgcagggggacctcaagaccactgacctcagcattcagcccccttccactgacctggagctccaggctggccaattggacgtgaaactcccagagggccccgtgcccgagggagccggcctcaaagggcacctgcccaagctgcagatgcccagtttcaaggtgcccaaagtggacctcaagggccctgaaatagacatcaagggccccaagctggacctaaaagaccccaaggtggaagtgacagcccctgatgtggaggtttctctgcccagcgtggaggtggatgtcgaggccccaggagccaagctggatggtggacggctggaggaggacatgtccctggccgacaaggacttgactaccaaagacagcaagttcaaaatgcccaagttcaagatgccgtcgttcggggtgtctgccccaggcaagtccatcgaggcctcagtggatgtgtctgcgccgaaggtggaggccgacgtgagcctcccctccatgcagggggacctcaaggccactgacctgagcatacagcccccttctgctgacctggaggtccaggctggccaagtggacgtgaaactcccagagggccctgtgtccgagggagccggcctcaaagggcacctgcccaaagtgcagatgcccagtttcaagatgcccaaagtggacctcaaggggccccagatagatgttaagggccccaagctggacctgaaaggccccaaggtggaagtgacagcccccgatgtgaagatgtctctgtccagcatggaggtggacgtccaggccccgagagcaaagctggatggtgcgcagctggagggggacctgtccctggccgacaaggcggtgactgccaaagacagcaagttcaaaatgcccaagttcaagatgccatcatttggggtgtcggccccaggcaagtccatcgaggcctcggtggatgtgtctgagccgaaggtggaagctgatgtgagcctcccctccatgcagggggacctgaagaccactgacctcagcattcagtccccttccgccgacctggaggtccaggctggccaagtgaacgtgaaactcccggagggcccccttcccgagggagccggcttcaaagggcacctccccaaggtgcagatgcccagtttgaagatgcccaaagtggccctcaagggcccccagatggacgtcaagggccccaagctggacctgaaaggccccaaggcggaggtgatggcccccgacgtggaggtgtctctgcccagcgtggaggtggacgtcgaggctccaggagccaagctggacagtgtgcggctggagggtgacctgtccctggccgacaaggatgtgactgccaaagacagcaagttcaaaatgcccaagttcaagatgccgtcgttcggggtgtctgccccaggcaagtccatcgaggcctcggtggatgtgtctgcgccgaaggtggaggccgaagtgagcctcccctccatgcagggggacctcaagaccacggacctctgcattccgctcccttctgcagacctggtggtccaggctggccaagtggacatgaagctcccggagggccaggtgcccgagggagccggcctcaaagggcacttgcccaaggtggatatgcccagtttcaagatgcccaaagtggacctcaagggcccccagacagatgttaagggcgccaagctggacctgaaaggccccaaggcggaagtgacagcccccgatgtcgaggtgtctctgcccagcatggaggtggatgtccaggcccagaaggctaagctggatggtgcgcggctggagggagacctgtccctggccgacaaggacatgactgccaaagacagcaagttcaaaatgcccaaattcaagatgccgtcgttcggggtatcggccccagggaggtccatcgaggcctcggtggatgtgcctgcacccaaggtggaggccgacgtgagtctcccctccatgcagggggacctgaagaccactgacctcagcattcagcccccttctgccgacctgaaggtccagactggccaggtggatgtgaagctcccggagggccacgtgcccgagggagctggcctcaaagggcacctgcccaaggtggagatgcccagtttgaagatgcccaaagtggacctcaagggcccccaggtggacatcaagggccccaaactggacctaaaagaccccaaggtggaaatgagagtccccgatgtcgaggtgtctctgcccagcatggaggtggacgtccaggccccaagagccaagctggatagtgcgcatctgcagggggacctgaccctggccaacaaggacctgactaccaaagacagcaagttcaaaatgcccaagttcaagatgccgtcgtttggggtgtctgccccaggcaagtccatcgaggcctcggtggatgtgtctccacccaaggtggaggccgacatgagtctcccctccatgcagggggacctcaagaccactgacctcagcattcagcccctttccgccgacgtgaaggtccaggctggccaggtggacgtgaaactcctggagggccctgtgcccgaggaagtcggcctcaaagggcacctgcccaagctgcagatgcccagtttcaaggtgcccaaagtggacctcaagggccccgaaatagacatcaagggccccaagctggacctaaaagaccccaaggtggaagtgacagcccctgatgtggaggtgtctctgcccagcgtggaggtggacgtcaaggccccaggagccaagctggatggtgcgcggctggagggggacatgtccctggccgacaaggacgtgactgccaaagacagcaagttcaaaatgcccaagttcaagatgctgtcgtttggggtgtctgcccttggcaagtccatcgaggcctcagcggatgtgtctgcgttgaaggtggaggccgacgtgagcctcccctccatgcagggggacctcaagaccactgacctcagcgttcagcccccttccgctgacctggaggtccaggctggccaagtggatgtgaaactcccagagggccccgtgccggagggagccggcctcaaagggcacctgcccaagctgcagatgcccagtttcaagatgcccaaagtagatctcaagggcccccagatagatgtcaagggccccaagctggacctgaaaggccccaagacggacgtgatggcccccgacgtggaggtgtctcagcccagcgtggaggtggatgtcgaggccccgggagccaagctggatggtgcgtggctggagggggacctgtctgtggcggacaaggatgtgactaccaaagacagcaggttcaaaattcccaagttcaagatgccgtcattcggggtgtctgccccaggcaagtccatcgaggcctcggtggatgtgtctgcgccgaaggtggaggccgacgggagcctctcctccatgcagggggacctcaaggccactgacctcagcattcagcccccttccgctgacctggaggtccaggctggccaagtggacgtgaaactcccagagggccctgtgccggagggagccggcctcaaagggcacctgcccaaggtgcagatgcccagtttcaagatgcctgaaatggacctcaagggcccccagctagatgtcaagggccccaagctggacctgaaaggccccaaggcggaagtgacagcccccgatgtggagatgtctctgtccagcatggaggtggacgtccaggccccgagagcaaagctggatggtgcgcggctggagggggacctgtccctggccgacaagggtgtgacagccaaagatagcaagttcaaaatgcccaagttcaagatgccatcattcagggtgtcggccccaggcgagtccatcgaggcgttggtggatgtgtctgagctgaaggtggaagccgacatgagcctcccctccatgcaaggggaccttaagaccactgacatcagcattcagcccccctctgcccaactggaggtccaggctggccaggtggatgtgaaactcccagagggccacgttcccgagggagccggcctcaaagggcacctgcccaagctgcagatgcccagtttcaagatgcctgaagtggacctcaagggcccccagatagatgttaagggccccaacgtggacctgaaaggccccaaggcggaagtgacagcccccgatgtgaagatgtctctgtccagcatggaggtggacgtccaggccccgagagcaaagctggatggtgcgcggctggagggggacctgtccctggccgacaagggcatgacagccaaagacagcaagttcaaaatgcccaagttcaagatgccgtcattcggggtgtcggccccaggcaagtccatcgaggcctcggtggatgtgtctgagctgaaggtggaagctgacgggagcttcccctccatgcaaggggatcttaagaccactgacatccgcattcagcccccctccgcccaactggaggtccaggctggccaggtggacgtgaaactcccagagggccacgttcccgagggagccggcctcaaagggcacctgcccaaggtgcagatgcccagtttcaagatgcccaaagtggatctcaagggcccccagatagacgtcaagggccccaagctggacctgaaaggccccaaggcggaggtgacggcccccgacgtggaggtgtctctgcccagcgtggaggtggacgtcgaggccccgagagcaaagctggatggtgcacggctggagggtgacctgtccctggccgacaaggatgtgactgccaaagacagcaagttcaaaatgcccaagttcaagatgccgtcgttcggggtgtctgccccaggcaagtccattgaggtctcggtggatgtgtctgcgccgaaggtggaggccgaagtgagcctcccctccatgcagggggacctgaagaccactgacatcagcattgagcccccctctgcccaactggaggtccaggctggccaggtggacctgaagctcccagagggccacgttcccgagggagctggcctcaaagggcacctgcccaagttgcagatgcccagtttcaagatgcccaaagtagatcgcaagggaccccagatagatgtcaagggccccaagctggacctgaaaggcccgaagacggacgtgacggcccccgacgtggaggtgtctcagcccggcatggaggtggatgtcgaggccccaggagccaagttggatggtgcacggctggagggggacctgtccctggccgacaaggatgtgactgccaaagacagcaagttcaaaatgcccaagttcaagatgccgtcgttcggggtgtctgccccaggcaagtccattgaggtcttggtggatgtgtctgcgccaaaggtggaggccgacctgagcctcccctccatgcagggggacctgaagaacactgacatcagcattgagcccccctctgcccaactggaggtccaggctggccaggtggacgtgaagctcccagagggccacgttctcgagggagctggcctcaaagggcacctgcccaagttgcagatgcccagtttcaagatgcccaaagtagatcgcaagggcccccagatagacatcaagggccccaagctggacctgaaaggcccgaagatggatgtgacggcccccgacgtggaggtgtctcagcccagcatggaggtggacgtcgaggccccaggagccaagttggatggtgcacggctggagggggacctgtccctggccgacaaggatgtgactgccaaagacagcaagttcaaaatgcccaaattcaagatgccgtcgtacagggcgtctgccccaggcaagtccatccaggcctcggtggatgtgtctgcgccgaaggcggaggccgacgtgagcctcccctccatgcagggggacctcaagaccactgacctcagcattcagctcccttctgtggacctggaggtccaggctggccaggtggacgtgaagctcccggagggccacgtgcccgagggagctggcctcaaagggcacctgcccaaggtggagatgcccagtttcaagatgcccaaagtggacctcaagagcccccaggtggacatcaagggccccaagctggacctaaaagtccccaaggcggaagtgacagtccctgatgtggaggtgtctctgcccagcgtggaggtggacgtccaggccccgagagccaagctggatggtgcgcggctggagggggacctgtccctggctgaaaaggatgtgactgccaaagacagcaagttcaaaatgcccaagttcaagatgccctccttcggggtgtcggccccaggcaggtccatcgaggcctcgctggatgtgtctgcgccgaaggtggaggccgacgtgagcctctcctccatgcagggggacctcaaggccactgacctcagcattcagcccccttccgctgacctggaggtccaggctgtccaagtggatgtggaactcctggagggccccgtgcccgagggagccggcctcaaagggcacctgcccaaagtggagatgcccagtttaaagacgcccaaagtggacctcaagggcccccagatagatgttaagggccccaagctggacctgaaaggccccaaggcagaagtgagagtccccgatgtcgaggtgtctctgcccagcgtggaggtggatgtccaggccccgaaggccaagctggatgctgggcggctggagggagacctgtccctggctgacaaggacgtgactgccaaagacagcaagttcaaaatgcccaaattcaagatgccgtcattcagggtatcggccccagggaagtccatggaggcctcggtggatgtgtctgcacccaaggtggaagccgatgtgagtctcccctccatgcagggggacctgaagaccactgacctcagcattcagcccccttctgccgacctgaaggtccaggctggccagatggatgtgaagctcccggagggccaggtgcccgagggagccggcctcaaagagcacctgcccaaggtggagatgcccagtttgaagatgcccaaagtggacctcaagggcccccaggtggacatcaagggccccaagctggacctaaaagtctccaaggcggaagtcacagcccctgatgtggaggtgtctctgcccagcgtggaggtggacgtccaggccccaagagccaaactggatagtgcacagctggagggggacctgtccctggccgacaaggatgtgactgccaaagacagcaaattcaaaatgcccaagttcaagatgccgtcatttggggtgtctgccccaggcaagtccattgaggcctcggtgcacgtgtctgcacccaaggtggaggccgatgtgagtctcccctccatgcagggggacctcaagaccactgacctcagcattcagccccattctgccgacctgacggtccaagctcgccaggtggacatgaaactcctggagggccacgtgcccgaggaagccggcctcaaaggacacctgcccaaggtgcagatgcccagtttcaagatgcccaaagtcgacctcaagggccctgaaatagacatcaagggccccaagctggacctaaaagaccccaaggtggaagtgacagcccctgatgtggaggtttctctgcccagcgtggaggtggacgtcgaggccccaggagccaagctggatggtgcgcggctggagggggacctgtccctggccgacaaggacatgacggccaaagacagcaagttcaaaatgcccaagttcaagatgccgtcgttcggggtgtctgccccaggcaagtccatggaggcatcagtggatgtgaccgcgccaaaggtggaggccgacgtgagcctcccttccatgcagggggacctcaaggccactgacctcagcgttcagcccccttccgctgacctggaggtccaggctggccaagtggacgtgaaactcccagagggccccgtgcccgagggagccagcctcaaagggcacctgcccaaggtgcagatgcccagtttcaagatgcccaaagtggacctcaagggcccccagatagatgttaagggccccaagctggacctgaaaggccccaaggcggaagtgacagcccctgatgtgaagatgtctctgtccagcatggaggtggacgtccaggccccgagagcaaagctggatggtgtgcagctggagggggacctgtccctggccgacaaggatgtgactgccaaagacagcaagttcaaaatgcccaagttcaagatgccatcattcggggtgtcggccccaggcaagtccatggaggcgtccgtggatgtgtctgagctgaaggcgaaagccgacgtgagcctcccctccatgcagggggacctcaagaccactgacctcagcattcagtccccttccgccgacctggaggtccaggctggccaagtggacgtgaaactcccggagggccccctgcccaagggagccggcctcaaagggcacctccccaaggtgcagatgccctgtttgaagatgcccaaagtggccctcaagggcccccaggtggatgtcaagggccccaagctggacctgaaaggccccaaggcggatgtgatgacccccgtcgtggaggtgtctctgcccagcatggaggtggacgtcgaggccccgggagccaagctggacagtgtgcggctggagggtgacctgtccctagccgacaaggacatgactgccaaagacagcaagttcaaaatgcccaagttcaagatgccgtcgttcggggtgtctgccccaggcaagtccatcgaggcctcgttggatgtgtctgcgctgaaggtggaggctgacgtgagcctcccctccatgcagggggacctgaagaccactcacctcagcattcagcccccttccgctgatctggaggtccaggctggccaagaggatgtgaaactcccagagggccctgtgcatgagggagccggcctcaaagggcacctgccgaagctgcagatgcccagtttcaaggtacccaaagtggacctcaagggtccccagatagacgttaatgtccccaagctggacctgaaaggccccaaggtggaggtgacgtcccccaacctggacgtgtctctgcccagcatggaggtggacatccaagccccaggagccaagctggacagtacgcggctggagggggacctgtccctggctgacaaggacgtgactgccaaagacagcaagttcaaaatgcccaagttcaagatgccatcctttgggatgttgtccccaggcaagtccatcgaggtctcggtggatgtgtctgcgccaaagatggaggccgacatgagcattccctccatgcagggggacctcaagaccactgacctccgcattcaggccccttccgccgacctggaggtccaggctggccaggtggacttgaaacttccagaaggccacatgcccgaggtagccggcctcaaagggcacctgcccaaggtggagatgcccagtttcaagatgcccaaagtggacctcaagggcccccaggtggacgtcaagggccccaagctggacctgaaaggcccaaaggcagaggtgatggcccccgatgtggaggtgtctctgcccagcgtggagacggatgtccaggccccaggatccatgctggatggtgcgcggcttgagggggacctgtccctggcccacgaggatgtagctgggaaagacagtaagtttcaaggaccaaaactgagcacgtctggttttgaatggtcgtcaaagaaagtttccatgtcttcctctgaaatcgaaggaaatgttacattccatgagaagacttccacatttcccattgtggaatctgttgttcatgaaggtgatcttcatgatccatctcgcgatggtaacttggggcttgctgttggagaagttggaatggattcgaagtttaagaaactgcattttaaagtgcccaaagtttcattttcttctaccaaaactcctaaagatagtttagtcccaggtgcaaagtctagcataggtctttccacgattcctttatcatcttcagaatgctcaagttttgaattacaacaggtttcggcttgttcagagccatccatgcagatgcctaaggtgggttttgctgggtttccatcatcccggcttgatctcactggtcctcactttgaatcttctattctctctccctgtgaggatgttacacttacaaaataccaggtgactgttcccagagctgccttggcccctgagcttgctctggaaattccttctgggtctcaggctgatattcctcttcccaagacagagtgctccactgacctgcagcctccagagggagttccaacatctcaagctgagagtcactctggcccactgaattccatgattcctgtttctcttggtcaggtatcttttcctaaattctataaaccaaagtttgtgttttcagtcccccaaatggcagttcctgagggagacctacatgcagcagtgggtgccccagtcatgtctcctcttagccctggagaaagagtgcagtgccccttgccaagcacccagctgccatccccaggcacctgtgtgtctcagggcccagaagagcttgtggcctccttgcagacatcagtagtggcccctggagaagccccttctgaagatgctgaccacgaagggaaagggagtcccttgaaaatgcctaagattaagcttccatcatttaggtggtccccgaagaaggaaacagggccaaaggtggacccagaatgcagcgtggaggactcaaaactcagcctggttttagacaaggatgaagtggccccgcagtctgccatccacatggatctgcctcctgagagggatggagagaaggggaggagcacaaagcctggctttgccatgccaaaacttgcacttcccaaaatgaaggcttctaagagtggggtcagcctgccacagagagacgtggatccttccctttctagtgccacagcagggggtagctttcaagacacagaaaaggccagcagtgacggtggtaggggaggacttggtgcaacagcaagtgccacaggaagtgagggtgtgaacctccaccggccacaggtccacattcccagtttgggctttgccaaacctgatctcagatcctccaaggccaaggtggaggtgagccagcctgaagctgacctgcctcttcccaaacatgatctgtctaccgaaggtgacagcagaggatgtgggctcggggatgtcccagtgagccagccttgtggggaggggatagcccccacacctgaagatcccctccagccatcctgtagaaaaccagatgctgaagtcctcacagtggaaagcccagaggaggaagccatgaccaagtactcgcaggaaagctggtttaaaatgcccaagttccgcatgcccagccttaggcgctctttcagggacagaggcggggctggaaagctggaagtggctcagacacaggcaccggcagcaacagggggtgaagcagcagctaaagtcaaagagttccttgtttctgggtcaaacgtggaggcagctatgtccctacagctcccagaggcagatgcagaagtgacagcttctgagagcaaatcatccacagatattctaaggtgtgatcttgacagcacaggcttgaagctgcacctctccactgctgggatgactggggatgagctttccacttctgaggtcaggatccatccatccaaaggacctctcccttttcagatgcctggcatgaggcttccagaaacccaggttcttccaggagaaatagatgagactcctctttccaagccaggacatgaccttgccagcatggaggataaaacagagaaatggtcttcccagcctgaaggtccacttaaattgaaagcttcaagtactgatatgccatcccagatttctgtggttaatgtggatcaactgtgggaagattctgtcctaactgtcaaattccccaaattaatggtaccaaggttctccttccctgcccccagctcagaggatgatgtgttcatccccactgtgagggaagtgcagtgtccagaggccaatattgatacagccctttgtaaggaaagtccggggctctggggagccagcatcctgaaggcaggtgctggggtccctggggagcagcctgtggaccttaacctgcctttggaagctcccccaatttcaaaggtcagagtgcatattcagggtgctcaggttgaaagtcaagaggtcactatacacagcatagtgacaccagagtttgtagatctctcagtacccaggactttttccactcagattgtgcgggaatcagagatccccacgtcagagattcaaacaccttcgtacggattttccttattaaaagtgaaaatcccagagccccacacgcaggctagagtgtacacaacaatgactcaacactctaggactcaggagggcacagaagaggctcccatacaagccaccccaggagtagactccatttctggagatctccagcctgacactggagaaccatttgagatgatctcttccagcgtcaatgtactgggacagcaaacactcacatttgaagttccttctggccaccagcttgcagacagctgttcagatgaggagccagcagaaattcttgagtttccccctgatgatagccaagaggcaaccacaccactggcagatgaaggcagggctccaaaagacaaaccagaaagtaaaaaatctggtctgctctggttttggcttccaaacattgggttttcctcttctgttgatgagacaggtgttgattccaaaaatgacgtccagagatctgctcccattcaaacacagcctgaggcacgaccagaggcagaactgcctaaaaaacaggagaaggcaggctggttccgatttcccaaattagggttctcctcatctcctaccaagaaaagcaaaagcaccgaagatggggcagagctggaagaacaaaaacttcaagaagaaacaatcacgttttttgatgcccgagaaagtttctcccctgaagagaaggaagagggtgaactgatcgggcctgtgggcactgggctggactccagagtgatggtgacatccgcggcaagaacagagttaatcctgcccgagcaggacagaaaagctgacgatgaaagcaaagggtcaggcctgggaccaaatgaaggctgagaggtatggctcatcagtacaagagagatgcaaaaaactaagttggaaagtaaaggctacacacacatatggagcaccccatcccacagcacattacatccacctcacttcacagaacggagaacagagcagaaatgaccagaacacctttgtcaccatcacacagccctcctaaaatggaaccaaagcttcccagctccctcaaagctttggatgcaaagaaggcaccctgacttccacaagacaccagaattcacacggtactcagaggcactgctggggaagtttgttggtctttattagataaatttccagagacctgtccataatacccaacagaacatgactgtttctttgaggaaagggttataatgtctgtggtgtacaagtcgtttttggtataacttctttcctgctgctgctgcttcccggcaaacatagttttcctatttcaggcagagtgcggtatattccaggaaacactgtttcctactcacttagcttacttctttgttgaatgcctcactaatggcaagtttcaagatgttttgggtgacaatgcacacatgctgggcaaaagggtgatggccagtggctggcagctgggccagcagaagctaggacatctgtgagttgtcattctcatctatccatgtccactggcctgccagcatccgccagtgccttgccagtgtgcacggtcccacactgtggcccctgagtcccctaatgtacacgctgcagcc

SEQ ID NO: 106116 - DNA, 3436 bp, Homo sapiens
  Payload ID: 803
  Gene Symbol: AHNAK2
  Gene Name: AHNAK nucleoprotein 2
  Uniprot ID: Q8IVF2
  ENST ID: ENST00000557457
  CDS Start-End: 245-2626
gacaggatgcgtcctcaaaagcggacagagtgctccactgacctgcagcctccagagggagttccaacatctcaagctgagagtcactctggcccactgaattccatgattcctgtttctcttggtcaggtggtccccgaagaaggaaacagggccaaaggtggacccagaatgcagcgtggaggactcaaaactcagcctggttttagacaaggatgaagtggccccgcagtctgccatccacatggatctgcctcctgagagggatggagagaaggggaggagcacaaagcctggctttgccatgccaaaacttgcacttcccaaaatgaaggcttctaagagtggggtcagcctgccacagagagacgtggatccttccctttctagtgccacagcagggggtagctttcaagacacagaaaaggccagcagtgacggtggtaggggaggacttggtgcaacagcaagtgccacaggaagtgagggtgtgaacctccaccggccacaggtccacattcccagtttgggctttgccaaacctgatctcagatcctccaaggccaaggtggaggtgagccagcctgaagctgacctgcctcttcccaaacatgatctgtctaccgaaggtgacagcagaggatgtgggctcggggatgtcccagtgagccagccttgtggggaggggatagcccccacacctgaagatcccctccagccatcctgtagaaaaccagatgctgaagtcctcacagtggaaagcccagaggaggaagccatgaccaagtactcgcaggaaagctggtttaaaatgcccaagttccgcatgcccagccttaggcgctctttcagggacagaggcggggctggaaagctggaagtggctcagacacaggcaccggcagcaacagggggtgaagcagcagctaaagtcaaagagttccttgtttctgggtcaaacgtggaggcagctatgtccctacagctcccagaggcagatgcagaagtgacagcttctgagagcaaatcatccacagatattctaaggtgtgatcttgacagcacaggcttgaagctgcacctctccactgctgggatgactggggatgagctttccacttctgaggtcaggatccatccatccaaaggacctctcccttttcagatgcctggcatgaggcttccagaaacccaggttcttccaggagaaatagatgagactcctctttccaagccaggacatgaccttgccagcatggaggataaaacagagaaatggtcttcccagcctgaaggtccacttaaattgaaagcttcaagtactgatatgccatcccagatttctgtggttaatgtggatcaactgtgggaagattctgtcctaactgtcaaattccccaaattaatggtaccaaggttctccttccctgcccccagctcagaggatgatgtgttcatccccactgtgagggaagtgcagtgtccagaggccaatattgatacagccctttgtaaggaaagtccggggctctggggagccagcatcctgaaggcaggtgctggggtccctggggagcagcctgtggaccttaacctgcctttggaagctcccccaatttcaaaggtcagagtgcatattcagggtgctcaggttgaaagtcaagaggtcactatacacagcatagtgacaccagagtttgtagatctctcagtacccaggactttttccactcagattgtgcgggaatcagagatccccacgtcagagattcaaacaccttcgtacggattttccttattaaaagtgaaaatcccagagccccacacgcaggctagagtgtacacaacaatgactcaacactctaggactcaggagggcacagaagaggctcccatacaagccaccccaggagtagactccatttctggagatctccagcctgacactggagaaccatttgagatgatctcttccagcgtcaatgtactgggacagcaaacactcacatttgaagttccttctggccaccagcttgcagacagctgttcagatgaggagccagcagaaattcttgagtttccccctgatgatagccaagaggcaaccacaccactggcagatgaaggcagggctccaaaagacaaaccagaaagtaaaaaatctggtctgctctggttttggcttccaaacattgggttttcctcttctgttgatgagacaggtgttgattccaaaaatgacgtccagagatctgctcccattcaaacacagcctgaggcacgaccagaggcagaactgcctaaaaaacaggagaaggcaggctggttccgatttcccaaattagggttctcctcatctcctaccaagaaaagcaaaagcaccgaagatggggcagagctggaagaacaaaaacttcaagaagaaacaatcacgttttttgatgcccgagaaagtttctcccctgaagagaaggaagagggtgaactgatcgggcctgtgggcactgggctggactccagagtgatggtgacatccgcggcaagaacagagttaatcctgcccgagcaggacagaaaagctgacgatgaaagcaaagggtcaggcctgggaccaaatgaaggctgagaggtatggctcatcagtacaagagagatgcaaaaaactaagttggaaagtaaaggctacacacacatatggagcaccccatcccacagcacattacatccacctcacttcacagaacggagaacagagcagaaatgaccagaacacctttgtcaccatcacacagccctcctaaaatggaaccaaagcttcccagctccctcaaagctttggatgcaaagaaggcaccctgacttccacaagacaccagaattcacacggtactcagaggcactgctggggaagtttgttggtctttattagataaatttccagagacctgtccataatacccaacagaacatgactgtttctttgaggaaagggttataatgtctgtggtgtacaagtcgtttttggtataacttctttcctgctgctgctgcttcccggcaaacatagttttcctatttcaggcagagtgcggtatattccaggaaacactgtttcctactcacttagcttacttctttgttgaatgcctcactaatggcaagtttcaagatgttttgggtgacaatgcacacatgctgggcaaaagggtgatggccagtggctggcagctgggccagcagaagctaggacatctgtgagttgtcattctcatctatccatgtccactggcctgccagcatccgccagtgccttgccagtgtgcacggtcccacactgtggcccctgagtcccctaatgtacacgctgcagccagaatgcagatggagctggcttggctgttccctggatgggcaataaagaaagtgctgcatccca

SEQ ID NO: 106117 - DNA, 2863 bp, Homo sapiens
  Payload ID: 804
  Gene Symbol: AAED1
  Gene Name: AhpC/TSA antioxidant enzyme domain containing 1
  Uniprot ID: Q7RTV5
  ENST ID: ENST00000375234
  CDS Start-End: 1-681
atggccgcgccggccccggtcacgcggcaggttagcggcgccgccgccctggtcccggccccgagcggccccgacagcgggcagcccctggcggccgccgtggccgagctgccggtgctggacgcccgcgggcagcgggtaccgttcggcgcgctgttccgggagcgccgcgccgtggtggtgttcgtgcggcatttcctgtgttacatctgcaaggaatacgtagaggatctggccaaaatccccaggagtttcttacaagaagcaaatgtcacccttatagtgattggacagtcatcctaccatcatattgagcctttttgcaagctgactggatattctcatgaaatctatgtcgatcctgagagagaaatttataaaagattgggaatgaaaagaggtgaagaaattgcttcctcaggacagagcccccacataaaatcaaatctactctcaggaagccttcagagcctgtggcgggcagtgactggccctctctttgattttcaaggagacccagctcagcaaggtggaaccctcattttaggtccaggtaacaacatccattttatacaccgcgataggaataggttggatcacaaacctatcaactctgttttacagcttgtaggagttcagcatgtgaactttacaaacagaccttcagttatccatgtgtgacttaaaatgcactcagtcactttcaactggaccttctggaatgtgaccttcaatgcctgggtgtaatatcctcgtgcagtgtctaacctgctgtcccttcccagcctttgaggagttagggaagcataaagggggcttgaacctgttgaattgcatgctgggaagcatcagttgtcaaaatatgttatatacttccattttataacttttaacattttatacaaaaaaaatgaatatacaaaatataactttaaaagctataaaatcataaatactctaaattattttacattatggtatattcagtcaatgaaagagttttttggcaatataaattctgacagtatataaggggacaggagaacaacacaagaccattatattcagtgaagaaggcaaaatatcaaatctgtcaacaatgtaactgcatttttatatgtatatatttgtatttttgtatgctttggaaaaagacaggaaataaacaccaaaatgttgccagtaggtatctctgtgttaagattagtgttattattttcttttctgtacttttctgtatttcccaactgttatataatgagcatgattaatattgtagggccaggaaaaggtctttaaacattataggacaattttatgccacataacaaccttcacaaaagagcaaaattatataagctgtagtccacttttccatcgtaattgctttactcagaggaagtgtggcaatccgaacatttcacatatagccagtgtccacagcaccttctcaaactacatacttgctatccgtttcactaggattttggggggttgggggagctatggagaaaaaaattgttttagatatttaagatatgtatttaaaaatatggtcagtgtgctttttgaaagggaactataagaattttttttttttttttttttgagatggagtctcactctgttgcccaggctggagtgcagtggcatgatctcggctcactgcaagttccgcctcccgggttcacgccattctcctgcctcagcctcccgagtagctgggactacaggcacccaccaccacgcccggctaattttttgtatttttattagagacggggtttcactgtgttataacagccaggatggtcttgacctcctgacctcatgatccgcccacctcggcctcccaatgtgttgggattacaggtatgagccaccttgcctggcttttttttttttttttttttttttttttttgagatggagtcttgctctgtcgcccaggctggagtgcaatggctcaatctcagctcactgcaacttccgcctccttggttcaagcaattctgcctcagcctcccaagtagctgggattacaggcacccgccaccatacctggctacttttagtagagacggggttccaccatgttggccaggctggtctcgaactccatacctcaggtgatccgtctgcctcggcctcccaaagtgctagaattgcaggcgttagccaccattcccggccaagaattgttaaaattttttaaaacttggtaacttaaatgtacactatggtttagttatgcattcctagagaactgctatttctcaccctcaaactgctcttatttgggagacttgttatctttcatttttctagaattttttttttttttttgagacggagtttcactcttgttgcacaggatggagtgcaatggcacgatctcggctcactgcaacctccacctcccgggttcaagtgattctcctgcctcagcctcctgagtagctgagattacaggcatgcgccaccatgcctggctaagtttctattttttagtaaagatggagtttctccatgtcggtcaggctggtctcgaactcccgacctcaggtgatctgcctgcctcagcctcccaaagtgctaggattataggcatgagccaccgcgcccggcctatttttctagaatcttaatatgtttagttgggaggtgtcccagaaatcctgatgaaaagtatagcaaaatcagaattttggtaatgattagcaagtataatactgctttgaactcagtacttttatatgaagcatataaagttacaaaaaaaactaatgtattcaaatatttgaatatatcttcatgtttgtataatgtttttattcaataaaaatgaaatttctcatttaaa

SEQ ID NO: 106118 - DNA, 2723 bp, Homo sapiens
  Payload ID: 804
  Gene Symbol: AAED1
  Gene Name: AhpC/TSA antioxidant enzyme domain containing 1
  ENST ID: ENST00000446045
  CDS Start-End: 1-541
aggccctcggccgccccgcgtcatggccgcgccggccccggtcacgcggcagcatttcctgtgttacatctgcaaggaatacgtagaggatctggccaaaatccccaggagtttcttacaagaagcaaatgtcacccttatagtgattggacagtcatcctaccatcatattgagcctttttgcaagctgactggatattctcatgaaatctatgtcgatcctgagagagaaatttataaaagattgggaatgaaaagaggtgaagaaattgcttcctcaggacagagcccccacataaaatcaaatctactctcaggaagccttcagagcctgtggcgggcagtgactggccctctctttgattttcaaggagacccagctcagcaaggtggaaccctcattttaggtccaggtaacaacatccattttatacaccgcgataggaataggttggatcacaaacctatcaactctgttttacagcttgtaggagttcagcatgtgaactttacaaacagaccttcagttatccatgtgtgacttaaaatgcactcagtcactttcaactggaccttctggaatgtgaccttcaatgcctgggtgtaatatcctcgtgcagtgtctaacctgctgtcccttcccagcctttgaggagttagggaagcataaagggggcttgaacctgttgaattgcatgctgggaagcatcagttgtcaaaatatgttatatacttccattttataacttttaacattttatacaaaaaaaatgaatatacaaaatataactttaaaagctataaaatcataaatactctaaattattttacattatggtatattcagtcaatgaaagagttttttggcaatataaattctgacagtatataaggggacaggagaacaacacaagaccattatattcagtgaagaaggcaaaatatcaaatctgtcaacaatgtaactgcatttttatatgtatatatttgtatttttgtatgctttggaaaaagacaggaaataaacaccaaaatgttgccagtaggtatctctgtgttaagattagtgttattattttcttttctgtacttttctgtatttcccaactgttatataatgagcatgattaatattgtagggccaggaaaaggtctttaaacattataggacaattttatgccacataacaaccttcacaaaagagcaaaattatataagctgtagtccacttttccatcgtaattgctttactcagaggaagtgtggcaatccgaacatttcacatatagccagtgtccacagcaccttctcaaactacatacttgctatccgtttcactaggattttggggggttgggggagctatggagaaaaaaattgttttagatatttaagatatgtatttaaaaatatggtcagtgtgctttttgaaagggaactataagaattttttttttttttttttttgagatggagtctcactctgttgcccaggctggagtgcagtggcatgatctcggctcactgcaagttccgcctcccgggttcacgccattctcctgcctcagcctcccgagtagctgggactacaggcacccaccaccacgcccggctaattttttgtatttttattagagacggggtttcactgtgttataacagccaggatggtcttgacctcctgacctcatgatccgcccacctcggcctcccaatgtgttgggattacaggtatgagccaccttgcctggcttttttttttttttttttttttttttttttgagatggagtcttgctctgtcgcccaggctggagtgcaatggctcaatctcagctcactgcaacttccgcctccttggttcaagcaattctgcctcagcctcccaagtagctgggattacaggcacccgccaccatacctggctacttttagtagagacggggttccaccatgttggccaggctggtctcgaactccatacctcaggtgatccgtctgcctcggcctcccaaagtgctagaattgcaggcgttagccaccattcccggccaagaattgttaaaattttttaaaacttggtaacttaaatgtacactatggtttagttatgcattcctagagaactgctatttctcaccctcaaactgctcttatttgggagacttgttatctttcatttttctagaattttttttttttttttgagacggagtttcactcttgttgcacaggatggagtgcaatggcacgatctcggctcactgcaacctccacctcccgggttcaagtgattctcctgcctcagcctcctgagtagctgagattacaggcatgcgccaccatgcctggctaagtttctattttttagtaaagatggagtttctccatgtcggtcaggctggtctcgaactcccgacctcaggtgatctgcctgcctcagcctcccaaagtgctaggattataggcatgagccaccgcgcccggcctatttttctagaatcttaatatgtttagttgggaggtgtcccagaaatcctgatgaaaagtatagcaaaatcagaattttggtaatgattagcaagtataatactgctttgaactcagtacttttatatgaagcatataaagttacaaaaaaaactaatgtattcaaatatttgaatatatcttcatgtttgtataatgtttttattcaataaaaatgaaatttctcatttaaa

SEQ ID NO: 106119 - DNA, 2514 bp, Homo sapiens
  Payload ID: 804
  Gene Symbol: AAED1
  Gene Name: AhpC/TSA antioxidant enzyme domain containing 1
  ENST ID: ENST00000411939
  CDS Start-End: 1-332
aatacgtagaggatctggccaaaatccccaggagtttcttacaagaagcaaatgtcacccttatagtgattggacagtcatcctaccatcatattgagcctttttgcaagctgactggatattctcatgaaatctatgtcgatcctgagagagaaatttataaaagattgggaatgaaaagaggtgaagaaattgcttcctcaggtaacaacatccattttatacaccgcgataggaataggttggatcacaaacctatcaactctgttttacagcttgtaggagttcagcatgtgaactttacaaacagaccttcagttatccatgtgtgacttaaaatgcactcagtcactttcaactggaccttctggaatgtgaccttcaatgcctgggtgtaatatcctcgtgcagtgtctaacctgctgtcccttcccagcctttgaggagttagggaagcataaagggggcttgaacctgttgaattgcatgctgggaagcatcagttgtcaaaatatgttatatacttccattttataacttttaacattttatacaaaaaaaatgaatatacaaaatataactttaaaagctataaaatcataaatactctaaattattttacattatggtatattcagtcaatgaaagagttttttggcaatataaattctgacagtatataaggggacaggagaacaacacaagaccattatattcagtgaagaaggcaaaatatcaaatctgtcaacaatgtaactgcatttttatatgtatatatttgtatttttgtatgctttggaaaaagacaggaaataaacaccaaaatgttgccagtaggtatctctgtgttaagattagtgttattattttcttttctgtacttttctgtatttcccaactgttatataatgagcatgattaatattgtagggccaggaaaaggtctttaaacattataggacaattttatgccacataacaaccttcacaaaagagcaaaattatataagctgtagtccacttttccatcgtaattgctttactcagaggaagtgtggcaatccgaacatttcacatatagccagtgtccacagcaccttctcaaactacatacttgctatccgtttcactaggattttggggggttgggggagctatggagaaaaaaattgttttagatatttaagatatgtatttaaaaatatggtcagtgtgctttttgaaagggaactataagaattttttttttttttttttttgagatggagtctcactctgttgcccaggctggagtgcagtggcatgatctcggctcactgcaagttccgcctcccgggttcacgccattctcctgcctcagcctcccgagtagctgggactacaggcacccaccaccacgcccggctaattttttgtatttttattagagacggggtttcactgtgttataacagccaggatggtcttgacctcctgacctcatgatccgcccacctcggcctcccaatgtgttgggattacaggtatgagccaccttgcctggcttttttttttttttttttttttttttttttgagatggagtcttgctctgtcgcccaggctggagtgcaatggctcaatctcagctcactgcaacttccgcctccttggttcaagcaattctgcctcagcctcccaagtagctgggattacaggcacccgccaccatacctggctacttttagtagagacggggttccaccatgttggccaggctggtctcgaactccatacctcaggtgatccgtctgcctcggcctcccaaagtgctagaattgcaggcgttagccaccattcccggccaagaattgttaaaattttttaaaacttggtaacttaaatgtacactatggtttagttatgcattcctagagaactgctatttctcaccctcaaactgctcttatttgggagacttgttatctttcatttttctagaattttttttttttttttgagacggagtttcactcttgttgcacaggatggagtgcaatggcacgatctcggctcactgcaacctccacctcccgggttcaagtgattctcctgcctcagcctcctgagtagctgagattacaggcatgcgccaccatgcctggctaagtttctattttttagtaaagatggagtttctccatgtcggtcaggctggtctcgaactcccgacctcaggtgatctgcctgcctcagcctcccaaagtgctaggattataggcatgagccaccgcgcccggcctatttttctagaatcttaatatgtttagttgggaggtgtcccagaaatcctgatgaaaagtatagcaaaatcagaattttggtaatgattagcaagtataatactgctttgaactcagtacttttatatgaagcatataaagttacaaaaaaaactaatgtattcaaatatttgaatatatcttcatgtttgtataatgtttttattcaataaaaatgaaatttctcatttaaa

SEQ ID NO: 106120 - DNA, 308 bp, Homo sapiens
  Payload ID: 805
  Gene Symbol:
  Gene Name: AJ239318.1
  ENST ID: ENST00000624445
  CDS Start-End: 86-274
cttctgcaaagatctatttgtttagccatgttcaaatattgccctaaaatgttcacaggttccaggataaccagatgactgaggaatgttgaagattgcagtgatggaagtgcctcagtcagcctggaagactgtatggatggaggttgcctggtcacactgtcatgtccctctctccctgaaaaagagacacatttgcctttgtgcaaggcaatacatacatttgatctatgtatacactttggtctatgcattctgttatttaacattctaataatgttgatgaccttaaaatatgcttgacaatg

SEQ ID NO: 106121 - DNA, 4262 bp, Homo sapiens
  Payload ID: 806
  Gene Symbol: AJUBA
  Gene Name: ajuba LIM protein
  Uniprot ID: Q96IF1
  ENST ID: ENST00000262713
  CDS Start-End: 377-1993
agatccggccaggcagacaaaagtttgggagagaagttcggtctgtggctagcgtgagagctaggggggcgggggccggggagagtggggcagtcgggcgagtcgacgcgtgaacagatagacctgcggactggacagccgcggccagagaccctgctagccccgctcagccccagatgcgcggggggacgcagcccctcccgctgggggatgctgtgggattcctggcgcagggcatccaggccgcccgctaagcccctgtgcctcccctgtgcccctggggaaccagagtccggctgcagggaaagagaaccggccgccgagacgccgcagggtgccaggcggggagggggcgagaggccccaggcccgagggcatggagcggttaggagagaaagccagtcgcctgctggagaagttcggccgcagaaagggtgaatctagccggtctgggtctgacgggacccccgggccgggcaaggggcgcctaagtgggttggggggacctaggaagtcagggccccgaggagctactgggggacctggggatgagccgttggagccggcccgggagcaaggttccctggacgctgagcgaaatcagcgcggctcctttgaggcgccgcgctacgaaggctcttttcccgcggggccgccgcccacccgggccttgcctctacctcagtcgttgccccccgattttcggctggagcccacggccccggccctcagcccccgctctagcttcgccagtagctcggccagcgacgcgagcaagccgtccagcccccggggcagcctgctgctggacggggcgggggctggcggagctggaggtagccggccctgcagcaatcgcaccagcggcatcagcatgggctacgaccagcgccacgggagccccttgccagcggggccgtgcctgtttggcccacccctggccggagcaccggcaggctattctcccggaggggtcccgtccgcctacccggagctccacgccgccctggaccgattgtacgctcagcggcccgcggggttcggctgccaggaaagccgccactcgtatcccccggccctgggcagccctggagctctagccggggccggagtgggagcggcggggcccttggagagacggggggcgcaacccggacgacactctgtgaccggctacggggactgcgccgtgggcgcccggtaccaggacgagctaacagctttgcttcgcctgacggtgggcaccggtgggcgagaagccggagcccgcggagaaccctcggggattgagccgtcgggtctggaggagccaccaggtcctttcgttccggaggccgcccgggcccggatgcgggagccagaggccagggaggactacttcggcacctgtatcaagtgcaacaaaggcatctatgggcagagcaatgcctgccaggccctggacagcctctaccacacccagtgctttgtttgctgctcttgtgggcgaactttgcgttgcaaggctttctacagtgtcaatggctctgtgtactgtgaggaagattatctgttttcagggtttcaggaggcagctgagaaatgctgtgtctgtggtcacttgattttggagaagatcctacaagcaatggggaagtcctatcatccaggctgtttccgatgcattgtttgcaacaagtgcctggatggcatccccttcacagtggacttctccaaccaagtatactgtgtcaccgactaccacaaaaattatgctcctaagtgtgcagcctgtggccaacccatcctcccctctgagggctgtgaggacatcgtgagggtgatatccatggaccgggattatcactttgagtgctaccactgtgaggactgccggatgcagctgagtgatgaggaaggctgctgctgtttccctctggatgggcacttgctctgccatggttgccacatgcagcggctcaatgcccgacaaccccctgccaactatatctgagctgcaatcactgctgctgctgtcaccctgcagacaaactgctgtggccagtgggcccctctgaggccagccaaggcaaagaatgcactctgcaggcctggcagaagagtcctctggggaggaccccaagggccggagacccaaagatcatgatattccaaatggattgtggaagagaaaccttatatttaccagggtgggggcgactggcctttttcccatgtgtgcagtctgagcttaggcacacacaggagggttccaggactttctgaacatctgattctgtatcttcagtatatatattttgtttgttttagagatgggatctcaccatgttgcccaggctagtcttgaactcctgggctcgaatgatcctcccaccttggcctcccaaagtgctgggattataggcgtaagccactgtgtctggcctagtgtatgattatgcatgagtcacgcaatgttctggtcctggattccaggagtagaggacctagctttaaatcaattagtttcagctaaactgactagaaccaaatcaaagtgtaattctccctccagctcccccaaaccccagagttttggggttgtggttgatgcagtgtgggatgtccctgagaggtagcaagtctagggtggtgagttcctgctaggcaaccaaatttaagctcctcactttttgtgacacatggtgtcagatatggggtcccgcacctatatctggatgaagaggtagaaactctggacctcattaatgagttatttcttggccttcttctaaggactaggagagctccttatctgtctgagaatggggaccagctctgagtggggttgctgcctgtattccctgtttctcaggaacttacatgggtctggggaggctaggtaggtgattgtacgtggttgctcttctccttggctgggggaggtaatgagcagatctctgtgggtgtggagcttgttggggggatgtctaggaagcttcagcttagccacattcccaagtttaggtgcactgagccatatagcccagtgtatgcatgtgtgggtgtgttcatgcacacacacactctctctcttgtctctctgtctctctctcactctttcttactctcttctcaggtcacttgtacacttggtttcctagtagaagctcacttgccacctctcagaggggtcccggattgcatccatcacaatcccaaaactagagttggggggaactggagggagcaaaacactgatttgatactagtcagtttgcttgaaactagttcacctaaagctagatctcttaaaaccaatttactgaaaacttgtttgcttaaagttaatgacttaatgactaatttgccaaaagctcaattcctattttggtgtgtttatatccatttaggtgtcctattcttttttgtcatgctttggatatttcaaggatttatatctattcatccaagagtacttctgagctattatcagcaacataaatttatcaaatttgcagcactttgtaaatgatgagattgcttcctacctttatggatgtctttttctatgttatctaccattcaaaaacttttttaaaaagtttaaagtttctagcaataaatacaattggtacagacattttgtgtatcatttttttgtttcttaatccaatattcctttacaaattaaatgccttgaaaaatataatggagttcaatgtgattttgatgctttggtctaacttctacattcctactgttaaaaaggccagtatatcttaaacaaatgaataggcatgaggcatattcagttgacttacaatgaaaagttatacagacaacagtaataactaaaagggtgaatctgctaaatccttttgaaatgctgcagatttgataaatatttattttagactaattggttttaggtgaattggttttaggcaaattaatttagtaatctttgatctttagtcttcattttctgtcactcagtgagtttcttactggaaatgatgactcctgacaacagaatttccacatttgggggctattctaaggtgactatgccagccaacctgggaaatacataaaagagatctctgagtgagagggaaagaggtcagatttatacaactgagcgccagaggggaaaatgcaccttgttggagtgagaaatgttctgaaactgaattacttcttgtacagctgagatagcttcttctgaactattattaaataagtgaatacaaaggccctatgatgggaaatccagacaa

SEQ ID NO: 106122 - DNA, 2569 bp, Homo sapiens
  Payload ID: 806
  Gene Symbol: AJUBA
  Gene Name: ajuba LIM protein
  Uniprot ID: Q96IF1
  ENST ID: ENST00000361265
  CDS Start-End: 73-1689
aaagagaaccggccgccgagacgccgcagggtgccaggcggggagggggcgagaggccccaggcccgagggcatggagcggttaggagagaaagccagtcgcctgctggagaagttcggccgcagaaagggtgaatctagccggtctgggtctgacgggacccccgggccgggcaaggggcgcctaagtgggttggggggacctaggaagtcagggccccgaggagctactgggggacctggggatgagccgttggagccggcccgggagcaaggttccctggacgctgagcgaaatcagcgcggctcctttgaggcgccgcgctacgaaggctcttttcccgcggggccgccgcccacccgggccttgcctctacctcagtcgttgccccccgattttcggctggagcccacggccccggccctcagcccccgctctagcttcgccagtagctcggccagcgacgcgagcaagccgtccagcccccggggcagcctgctgctggacggggcgggggctggcggagctggaggtagccggccctgcagcaatcgcaccagcggcatcagcatgggctacgaccagcgccacgggagccccttgccagcggggccgtgcctgtttggcccacccctggccggagcaccggcaggctattctcccggaggggtcccgtccgcctacccggagctccacgccgccctggaccgattgtacgctcagcggcccgcggggttcggctgccaggaaagccgccactcgtatcccccggccctgggcagccctggagctctagccggggccggagtgggagcggcggggcccttggagagacggggggcgcaacccggacgacactctgtgaccggctacggggactgcgccgtgggcgcccggtaccaggacgagctaacagctttgcttcgcctgacggtgggcaccggtgggcgagaagccggagcccgcggagaaccctcggggattgagccgtcgggtctggaggagccaccaggtcctttcgttccggaggccgcccgggcccggatgcgggagccagaggccagggaggactacttcggcacctgtatcaagtgcaacaaaggcatctatgggcagagcaatgcctgccaggccctggacagcctctaccacacccagtgctttgtttgctgctcttgtgggcgaactttgcgttgcaaggctttctacagtgtcaatggctctgtgtactgtgaggaagattatctgttttcagggtttcaggaggcagctgagaaatgctgtgtctgtggtcacttgattttggagaagatcctacaagcaatggggaagtcctatcatccaggctgtttccgatgcattgtttgcaacaagtgcctggatggcatccccttcacagtggacttctccaaccaagtatactgtgtcaccgactaccacaaaaattatgctcctaagtgtgcagcctgtggccaacccatcctcccctctgagggctgtgaggacatcgtgagggtgatatccatggaccgggattatcactttgagtgctaccactgtgaggactgccggatgcagctgagtgatgaggaaggctgctgctgtttccctctggatgggcacttgctctgccatggttgccacatgcagcggctcaatgcccgacaaccccctgccaactatatctgagctgcaatcactgctgctgctgtcaccctgcagacaaactgctgtggccagtgggcccctctgaggccagccaaggcaaagaatgcactctgcaggcctggcagaagagtcctctggggaggaccccaagggccggagacccaaagatcatgatattccaaatggattgtggaagagaaaccttatatttaccagggtgggggcgactggcctttttcccatgtgtgcagtctgagcttaggcacacacaggagggttccaggactttctgaacatctgattctgtatcttcagtatatatattttgtttgttttagagatgggatctcaccatgttgcccaggctagtcttgaactcctgggctcgaatgatcctcccaccttggcctcccaaagtgctgggattataggcgtaagccactgtgtctggcctagtgtatgattatgcatgagtcacgcaatgttctggtcctggattccaggagtagaggacctagctttaaatcaattagtttcagtttgcttgaaactagttcacctaaagctagatctcttaaaaccaatttactgaaaacttgtttgcttaaagttaatgacttaatgactaatttgccaaaagctcaattcctattttggtgtgtttatatccatttaggtgtcctattcttttttgtcatgctttggatatttcaaggatttatatctattcatccaagagtacttctgagctattatcagcaacataaatttatcaaatttgcagcactttgtaaatgatgagattgcttcctacctttatggatgtctttttctatgttatctaccattcaaaaacttttttaaaaagtttaaagtttctagcaataaatacaattggtac

SEQ ID NO: 106123 - DNA, 2648 bp, Homo sapiens
  Payload ID: 806
  Gene Symbol: AJUBA
  Gene Name: ajuba LIM protein
  Uniprot ID: Q96IF1
  ENST ID: ENST00000397388
  CDS Start-End: 655-1020
taactccagtcctgacctccatggagtctgtccctggaaggagacaggcatttgagagcaggatagatatgctcaggcaaagaggcttctaggttgaagggtcccagagggaaaggcctgttaacaatgtggttctctctatgcaaatcatatagcaccttattaagagctcacgtattccagcacgtagttggctttactctcccaggtggcttcctatgcactggagaggaaggcagtttgtttaggggaggggccctagaaaactgttaaggaggcaggagctggaggagcagcaagcagaggagaggggaagttggctggaatgaagccaaagcaaattggaattgcatcagatggaatttttgtgcggggaaggacagacagcagttaggaggaaaagcacaaagtccaggtttaaatatattatgcagcagcggggagcagtgaccccagaagtcttgcacctgggctgtgggataggttccagccccttctctattgtttctagggcgaactttgcgttgcaaggctttctacagtgtcaatggctctgtgtactgtgaggaagattatctgttttcagggtttcaggaggcagctgagaaatgctgtgtctgtggtcacttgattttggagaagatcctacaagcaatggggaagtcctatcatccaggctgtttccgatgcattgtttgcaacaagtgcctggatggcatccccttcacagtggacttctccaaccaagtatactgtgtcaccgactaccacaaaaattatgctcctaagtgtgcagcctgtggccaacccatcctcccctctgagggctgtgaggacatcgtgagggtgatatccatggaccgggattatcactttgagtgctaccactgtgaggactgccggatgcagctgagtgatgaggaaggctgctgctgtttccctctggatgggcacttgctctgccatggttgccacatgcagcggctcaatgcccgacaaccccctgccaactatatctgagctgcaatcactgctgctgctgtcaccctgcagacaaactgctgtggccagtgggcccctctgaggccagccaaggcaaagaatgcactctgcaggcctggcagaagagtcctctggggaggaccccaagggccggagacccaaagatcatgatattccaaatggattgtggaagagaaaccttatatttaccagggtgggggcgactggcctttttcccatgtgtgcagtctgagcttaggcacacacaggagggttccaggactttctgaacatctgattctgtatcttcagtatatatattttgtttgttttagagatgggatctcaccatgttgcccaggctagtcttgaactcctgggctcgaatgatcctcccaccttggcctcccaaagtgctgggattataggcgtaagccactgtgtctggcctagtgtatgattatgcatgagtcacgcaatgttctggtcctggattccaggagtagaggacctagctttaaatcaattagtttcagctaaactgactagaaccaaatcaaagtgtaattctccctccagctcccccaaaccccagagttttggggttgtggttgatgcagtgtgggatgtccctgagaggtagcaagtctagggtggtgagttcctgctaggcaaccaaatttaagctcctcactttttgtgacacatggtgtcagatatggggtcccgcacctatatctggatgaagaggtagaaactctggacctcattaatgagttatttcttggccttcttctaaggactaggagagctccttatctgtctgagaatggggaccagctctgagtggggttgctgcctgtattccctgtttctcaggaacttacatgggtctggggaggctaggtaggtgattgtacgtggttgctcttctccttggctgggggaggtaatgagcagatctctgtgggtgtggagcttgttggggggatgtctaggaagcttcagcttagccacattcccaagtttaggtgcactgagccatatagcccagtgtatgcatgtgtgggtgtgttcatgcacacacacactctctctcttgtctctctgtctctctctcactctttcttactctcttctcaggtcacttgtacacttggtttcctagtagaagctcacttgccacctctcagaggggtcccggattgcatccatcacaatcccaaaactagagttggggggaactggagggagcaaaacactgatttgatactagtcagtttgcttgaaactagttcacctaaagctagatctcttaaaaccaatttactgaaaacttgtttgcttaaagttaatgacttaatgactaatttgccaaaagctcaattcctattttggtgtgtttatatccatttaggtgtcctattcttttttgtcatgctttggatatttcaaggatttatatctattcatccaagagtacttctgagctattatcagcaacataaatttatcaaatttgcagcactttgtaaatgatgagattgcttcctacctttatggatgtctttttctatgttatctaccattcaaaaacttttttaaaaagtttaaagtttctagcaataaatacaattggtacagac

SEQ ID NO: 106124 - DNA, 651 bp, Homo sapiens
  Payload ID: 806
  Gene Symbol: AJUBA
  Gene Name: ajuba LIM protein
  ENST ID: ENST00000556731
  CDS Start-End: 412-651
actgcttacccattctgattcctttgctaaacctttaatctcctatctctgcctgtctgacttcagcactcagcttttctcactcccccagtttctgcctggttctctttaggctcatctgtctgtctatccttctgtttacagggcctcttctggctatatctctttccctatctttcctcccctgtgtctcatgagcttctaagtcagctttcctaacccactggacagagttggaagtagggattttgaggggaagaaggcaaagggcgaactttgcgttgcaaggctttctacagtgtcaatggctctgtgtactgtgaggaagattatctgttttcagggtttcaggaggcagctgagaaatgctgtgtctgtggtcacttgattttggagaagatcctacaagcaatggggaagtcctatcatccaggctgtttccgatgcattgtttgcaacaagtgcctggatggcatccccttcacagtggacttctccaaccaagtatactgtgtcaccgactaccacaaaaattatgctcctaagtgtgcagcctgtggccaacccatcctcccctctgagggctgtgaggacatcgtgagggtgatatccatggaccgggattatcactttgagtgctaccactgtgag

SEQ ID NO: 106125 - DNA, 751 bp, Homo sapiens
  Payload ID: 806
  Gene Symbol: AJUBA
  Gene Name: ajuba LIM protein
  ENST ID: ENST00000553736
  CDS Start-End: 1-430
ccgccactcgtatcccccggccctgggcagccctggagctctagccggggccggagtgggagcggcggggcccttggagagacggggggcgcaacccggacgacactctgtgaccggctacggggactgcgccgtgggcgcccggtaccaggacgagctaacagctttgcttcgcctgacggtgggcaccggtgggcgagaagccggagcccgcggagaaccctcggggattgagccgtcgggtctggaggagccaccaggtcctttcgttccggaggccgcccgggcccggatgcgggagccagaggccagggaggactacttcggaatcatgctcacatggtcccctctgcacggagccctctgccaagccagatccttttctccatccttggaagtctgcagtggagagaaatcattctataactgaacagctcgtttgactgatgggaaactgaagtcccagagacgatttctgggcctagcctgctttctctagaaagtattttcaagtctgctgctgagcacctgtggactggcatctttgaccgttcatcctacacactgcaacagagatcataccttgcctgtgtagtcttttctccccaacagaaactaagcatctgaatgccagggaccatatcttcgactttctccaggtttccttaggtagtggtgctgtgttaagcacaaaacagatgctcagaaaatatctgttgagtaattaaataaacaagaatggatctgctca

SEQ ID NO: 106126 - DNA, 567 bp, Homo sapiens
  Payload ID: 806
  Gene Symbol: AJUBA
  Gene Name: ajuba LIM protein
  ENST ID: ENST00000553911
  CDS Start-End: 374-567
aaatatattatgcagcagcggggagcagtgaccccagaagtcttgcacctgggctgtgggataggttccagccccttctctattgtttctagggcgaactttgcgttgcaaggctttctacagtgtcaatggctctgtgtactgtgaggaagattatctgttttcagggtttcaggaggcagctgagaaatgctgtgtctgtggtcacttgattttggagaagatggagtctcactctgttgcccaggctggagtccagtggtgcgatctcggcttactgcaagctccgcctcctggttcacgccattctcctgcctagctgggactacaggcgcccgccacatgcccggctaattttttgatcctacaagcaatggggaagtcctatcatccaggctgtttccgatgcattgtttgcaacaagtgcctggatggcatccccttcacagtggacttctccaaccaagtatactgtgtcaccgactaccacaaaaattatgctcctaagtgtgcagcctgtggccaacccatcctcccctctgagggctgtgaggacatcgtgagggt

SEQ ID NO: 106127 - DNA, 418 bp, Homo sapiens
  Payload ID: 806
  Gene Symbol: AJUBA
  Gene Name: ajuba LIM protein
  ENST ID: ENST00000553592
  CDS Start-End: 179-418
cagacagcagttaggaggaaaagcacaaagtccagggcgaactttgcgttgcaaggctttctacagtgtcaatggctctgtgtactgtgaggaagattatctgttttcagggtttcaggaggcagctgagaaatgctgtgtctgtggtcacttgattttggagaagatcctacaagcaatggggaagtcctatcatccaggctgtttccgatgcattgtttgcaacaagtgcctggatggcatccccttcacagtggacttctccaaccaagtatactgtgtcaccgactaccacaaaaattatgctcctaagtgtgcagcctgtggccaacccatcctcccctctgagggctgtgaggacatcgtgagggtgatatccatggaccgggattatcactttgagtgctaccactgtgag

SEQ ID NO: 106128 - DNA, 1330 bp, Homo sapiens
  Payload ID: 807
  Gene Symbol: AKIRIN1
  Gene Name: akirin 1
  ENST ID: ENST00000372984
  CDS Start-End: 94-531
attggagccggcttggctggcgagcccggctgaggagcctcttgggccgcacttaccgccgcgtccgctcccggtccctggcccctcagcggcatggcgtgcggggcgacgctgaagcggcccatggagttcgaggcggcgctgctgagccccggctccccgaagcggcggcgctgcgcccctctgcccggccccactccgggcctcaggcccccggacgccgagccgccgccgccgtttcagacgcagaccccaccgcagagtctgcagcagcccgccccgcccggcagcgagcggcgccttccaactccgggttcctcatggatgaagaaggaccagcccacatttaccctccgacaagttggcataatatgtgagcgcctcttaaaagactatgaagataaaattcgggaggagtatgagcaaatcctcaataccaaactagcagaacaatatgaatcttttgtgaaattcacacatgatcagattatgcgacggtatgggacaaggccaacaagctatgtgtcatgaagctttgtcacatatctgggtaccaggtttgacctcaagagatggctgctgtacactttttgcaactggtttgatgtcacatttcagctccaactttgcatcctgagaacacttaaacgtttctgcaggtccattttatacaacttgaaagaccgtaaaactttctggttgccacaagcatatctttcttttctgctcatccaataaacagctgtgccctactgtgatagattttccaaacaaaaatacctggagcagcagtttagcaaaatatgccttcagtggcattcaacaaatggagtttccccaagcacagttctgtaagaagtgcgtgtgagagtgtgtgtatatgtgtgtatgtgtattttaagttattatttgtattgtgcaaaaatttttttttgatcttggggattctggctgtgaatttggtgcacgacaattatggtaaaaaaacatttgcttggtctaaagaagatcattaatgttttgtgaccatacaagttgtaacagtggattgtttttatgtgtaggtattgttaaatacagggactgtttccaggcacagaatatgaatcgtaagttaggatggacattagatgtgattatgatgataaagcgaaggtctgcggtcctatatctacagacacgtggtgagaaattagaacaaactggagacgggccattgacacatggactctgcctgggcatgttaggttaattctttgactccaagccttaaaatactcacatggagtcagcgctcacctcattcacacaattatcatagagctccctg

SEQ ID NO: 106129 - DNA, 1243 bp, Homo sapiens
  Payload ID: 807
  Gene Symbol: AKIRIN1
  Gene Name: akirin 1
  Uniprot ID: Q9H9L7
  ENST ID: ENST00000446189
  CDS Start-End: 94-537
attggagccggcttggctggcgagcccggctgaggagcctcttgggccgcacttaccgccgcgtccgctcccggtccctggcccctcagcggcatggcgtgcggggcgacgctgaagcggcccatggagttcgaggcggcgctgctgagccccggctccccgaagcggcggcgctgcgcccctctgcccggccccactccgggcctcaggcccccggacgccgagccgccgccgccgtttcagacgcagaccccaccgcagagtctgcagcagcccgccccgcccggcagcgagcggcgccttccaactccggagcaaatttttcagaacataaaacaagaatatagtcgttatcagaggtggagacatttagaagttgttcttaatcagagtgaagcttgtgcttcggaaagtcaacctcactcctcagcactcacagcacctagctctccagaacaatatgaatcttttgtgaaattcacacatgatcagattatgcgacggtatgggacaaggccaacaagctatgtgtcatgaagctttgtcacatatctgggtaccaggtttgacctcaagagatggctgctgtacactttttgcaactggtttgatgtcacatttcagctccaactttgcatcctgagaacacttaaacgtttctgcaggtccattttatacaacttgaaagaccgtaaaactttctggttgccacaagcatatctttcttttctgctcatccaataaacagctgtgccctactgtgatagattttccaaacaaaaatacctggagcagcagtttagcaaaatatgccttcagtggcattcaacaaatggagtttccccaagcacagttctgtaagaagtgcgtgtgagagtgtgtgtatatgtgtgtatgtgtattttaagttattatttgtattgtgcaaaaatttttttttgatcttggggattctggctgtgaatttggtgcacgacaattatggtaaaaaaacatttgcttggtctaaagaagatcattaatgttttgtgaccatacaagttgtaacagtggattgtttttatgtgtaggtattgttaaatacagggactgtttccaggcacagaatatgaatcgtaagttaggatggacattagatgtgattatgatgataaagcgaaggtctgcggtcctatatctacagacacgtggtgagaaattagaacaaactggagacgggccattgacacatggactctgcctg

SEQ ID NO: 106130 - DNA, 2741 bp, Homo sapiens
  Payload ID: 807
  Gene Symbol: AKIRIN1
  Gene Name: akirin 1
  Uniprot ID: Q9H9L7
  ENST ID: ENST00000432648
  CDS Start-End: 159-737
gatggtgtgcgcccgtgacgtcacagaaggcggggccagcgccgctgccgggtgctggaggcgccattggagccggcttggctggcgagcccggctgaggagcctcttgggccgcacttaccgccgcgtccgctcccggtccctggcccctcagcggcatggcgtgcggggcgacgctgaagcggcccatggagttcgaggcggcgctgctgagccccggctccccgaagcggcggcgctgcgcccctctgcccggccccactccgggcctcaggcccccggacgccgagccgccgccgccgtttcagacgcagaccccaccgcagagtctgcagcagcccgccccgcccggcagcgagcggcgccttccaactccggagcaaatttttcagaacataaaacaagaatatagtcgttatcagaggtggagacatttagaagttgttcttaatcagagtgaagcttgtgcttcggaaagtcaacctcactcctcagcactcacagcacctagctctccaggttcctcatggatgaagaaggaccagcccacatttaccctccgacaagttggcataatatgtgagcgcctcttaaaagactatgaagataaaattcgggaggagtatgagcaaatcctcaataccaaactagcagaacaatatgaatcttttgtgaaattcacacatgatcagattatgcgacggtatgggacaaggccaacaagctatgtgtcatgaagctttgtcacatatctgggtaccaggtttgacctcaagagatggctgctgtacactttttgcaactggtttgatgtcacatttcagctccaactttgcatcctgagaacacttaaacgtttctgcaggtccattttatacaacttgaaagaccgtaaaactttctggttgccacaagcatatctttcttttctgctcatccaataaacagctgtgccctactgtgatagattttccaaacaaaaatacctggagcagcagtttagcaaaatatgccttcagtggcattcaacaaatggagtttccccaagcacagttctgtaagaagtgcgtgtgagagtgtgtgtatatgtgtgtatgtgtattttaagttattatttgtattgtgcaaaaatttttttttgatcttggggattctggctgtgaatttggtgcacgacaattatggtaaaaaaacatttgcttggtctaaagaagatcattaatgttttgtgaccatacaagttgtaacagtggattgtttttatgtgtaggtattgttaaatacagggactgtttccaggcacagaatatgaatcgtaagttaggatggacattagatgtgattatgatgataaagcgaaggtctgcggtcctatatctacagacacgtggtgagaaattagaacaaactggagacgggccattgacacatggactctgcctgggcatgttaggttaattctttgactccaagccttaaaatactcacatggagtcagcgctcacctcattcacacaattatcatagagctccctggacactgaacctctaaagggaaaaggtctaccctggagccaggagcatcagggttggcttgggagcatgagaggtgagcccagggctaggcctgggccaggccccggcagcactgctacttgggaggagccacttcacctttgtattagttattaaaaaatataatttgggctgggcgcagtggctcacgcctgtaatcccagcactttgggagtccgaggcatgcggatcacttgaggtcaggagttcgagaccaccctggccaatatggtgaaaccccatctctactaaaaatacaacaaagttagccgggcgtggtggcaggcgtctgtaatcccagctgcttgggaggctgaggcaggagaatcacttgaaccctggaggtggcggttgcagtgagcacagatcatgccactgcactccagcctgggcaacaaaacgagacttcgtctcaaaaaaaaaaaaaaaacatagaatttggatcctttggtcgggttctcccaaattcttttgaggtgtccatggtcaactgcttcagctttgttttggcaaccccctgcccgaagtcgcatataggctgttcttcaccttgtttccaaggctgaggaacagaaagtagcctctgttttgaggaggtggaagttaagtatacatttattttttactgtgacttgttcaggaccacattttacaaaatgccttgtttccttcattgtttctggaaaggaaagttctattaatattgttttactttgaatatagaatagtttttttaattagggcttattttgaaaaattctgagtttaattcaaatgtatgccaataccttccaaagtaaggtaatattcagagacagttgttgtgatcagatggcttagagaaatttctggaatattcacattcgaagattccttattaatgaatgtctttgacttaaatctaaccaaaaactgcaacattattctttgtacattttcattatatagtgttaacaagcttagttgcaaacaaataaaatacttaagctatttgtttaccttgccttcttaatactgtgataatgtttattaattcaaataacttatgtgagagctgctataaccatttccccagttcaacattgcattgaaaatttatggacctttaaaaaaaaaagcccaacagtgatttttttttaataattaaagaatgattttactttgta

SEQ ID NO: 106131 - DNA, 718 bp, Homo sapiens
  Payload ID: 807
  Gene Symbol: AKIRIN1
  Gene Name: akirin 1
  ENST ID: ENST00000531822
  CDS Start-End: 1-392
ggcccccggacgccgagccgccgccgccgtttcagacgcagaccccaccgcagagtctgcagcagcccgccccgcccggcagcgagcggcgccttccaactccggagcaaatttttcagaacataaaacaagaatatagtcgttatcagaggtggagacatttagaagttgttcttaatcagagtgaagcttgtgcttcggaaagtcaacctcactcctcagcactcacagcacctagctctccaggttcctcatggatgaagaaggaccagcccacatttaccctccgacaagttggcataatatgtgagcgcctcttaaaagactatgaagataaaattcgggaggagtatgagcaaatcctcaataccaaactagcagatgtgtcatgaagctttgtcacatatctgggtaccaggtttgacctcaagagatggctgctgtacactttttgcaactggtttgatgtcacatttcagctccaactttgcatcctgagaacacttaaacgtttctgcaggtccattttatacaacttgaaagaccgtaaaactttctggttgccacaagcatatctttcttttctgctcatccaataaacagctgtgccctactgtgatagattttccaaacaaaaatacctggagcagcagtttagcaaaatatgccttcagtggcattcaacaaatggagtttccccaagcacagttctgtaaga

SEQ ID NO: 106132 - DNA, 1662 bp, Homo sapiens
  Payload ID: 808
  Gene Symbol: AKIRIN2
  Gene Name: akirin 2
  Uniprot ID: Q53H80
  ENST ID: ENST00000257787
  CDS Start-End: 526-1137
ggttggacgtgttcgcttgggttcctgctgcggcagctacctcgcaatctctctgcatcgatcgccgctcgcaagctactgaccgtactcgggcgtattaggagccgcgttccagcctcacaccccacggtgctgttttcgacttcagaaaggatctagtctcagcacagaagcgcctcaggcgcggcgcaaagctcgagcggacggcgggggcggccggagcctctctcgggggagccgcgcctgaggaggcggaagaacccccctgacgcgactggcgtgtgcttctgcccgccaccgcccctcccgctctcacccgggccgtccctggccactgcccctgccgcggaggcagcggcggcagcggctctcctttccacagccggcgctccgcgacccgcttggctcctgagcccgtcgggtaggctctcctcgagttcccgctcttcaccccttccctcaccctcttctttcgtcacccgtccccgaccccacccgagcccggcgcctcagctgcccccggccatggcgtgcggagccactctgaaaaggactctggatttcgacccgctgttgagcccggcgtccccgaagcgcaggcgatgtgcgccattgtcggcgcccacctcggccgctgcctccccgttgtcggcggccgcggccaccgccgcctccttctccgctgcggccgcctcgccgcagaagtatctccgaatggagccatcccccttcggcgacgtctcctcccgcctcaccacagaacaaattctgtacaacataaaacaagagtataaacgaatgcagaagagaagacatttagaaacgagtttccaacagacagatccgtgttgtacttctgatgcacagccacatgcatttctcctcagtggaccagcttcaccagggacttcatctgcagcatcctcaccattaaaaaaagaacagcccttatttactctacggcaggttgggatgatctgtgaacgtttgttgaaagaacgtgaagagaaagttcgagaagaatatgaagaaatattgaacacaaaacttgcagaacaatatgatgcgtttgtgaagtttacgcatgatcaaataatgcgacgatatggagaacagcctgctagctatgtttcatgaatcacgtatcctgcatttgtgggctgccttgttccttgttgagttgttgcaagaggtcccaattatgacatgcagcaatgccaataccccttctgtgaatacaggttatttcaagctttcgtcagtggcaaccactcttaggcagcagcaactggttttggaaatttccctgatgtcagtaccacctggatgtggacctttgctacctgtattaataccagtggcctcattttgctgtatcattacaatttggcttcttatattaatgtttgaaaaggattaaagctggtattctagaacatgcccttcactggttgtgtaaataaaactgtagaatgacacttcagatgaagttagtgtgattttaattgtgcactacaaccgagctgtaaccagttactaattttagaatgtaatcccaggacaatattaagcaaatagcctgcagtgcttcctgtgaaatagtgaaggaggagggcatttctgtattccaggacttcttggggtttcagaatgggtttgtat

SEQ ID NO: 106133 - DNA, 2318 bp, Homo sapiens
  Payload ID: 809
  Gene Symbol: AKNAD1
  Gene Name: AKNA domain containing 1
  ENST ID: ENST00000369994
  CDS Start-End: 54-2222
tgacagcagccagctcaggaggcagaggacgagagcgatcgggctgcacacacatggatgaggctgatttttcagaacacacgacttataagcaggaggatttgccttatgatggggacctctctcagattaagataggcaatgattacagttttacctcaaaaaaggatggccttgaagtcttaaatcaaattattttcatagcagatgaccctcaagagaaggctatgcatagtgagacttgtggaaatacagctgtgaccatacccctgggtaaaattactgaaaatgctgccaacaaaaaagacgagaaagagaaacaatgcactgcagctcttcatattccagcaaatgaaggagacgcttctaagtcaagcatttctgatattttacttcatcatctttccaaagagccattcttaagaggtcaaggcattgattgtgaaaccctcccagagatctcaaatgccgacagttttgaagaggaagctattattaaaagtattatttcatgttataataagaattcttggccaaaagaacaaaccccagaactcactgaccaactcaacccgaaaagggatggtgaaaacagcaataagcctggttctgccaccacgacagaggaaaatacctctgatttagaagggccagtggctgctggagatagcagccatcaagaaaatgtgaatgttctaactaaaaccaagggtccaggtgataaacaaaaaagttatcaagggcagtcaccccagaaacagcagactgaaaaagcaaattcaggcaacacgttcaaatacggccaaggtcaagttcattaccagctccctgatttctctaagattgctcccaaagtgaaaattcctaaaaataagataattaataaaccacttgcaatagctaaacaagccagcttttcttccaagtcgagagataaacccactcttgtgcaagatagtctagaaaccacgcctgagtcaaactgtgttgaaaaacaacatcaagagcagaaagggaaaatcactgaaccttcacaacaaatccagatggagcccatagtacatatccaccaagaacttctcacaggaatagaatctgaggcaagtctctctaagttgtcaccaacctctcagaaaggcacttcctcaagttcttcttacatatttcaaaagatatcccaagggaaacagatgtgtcagaagttgaaagaacagactgatcaactgaagactaaagtacaagaattttccaaaagaataaaacaggactctccttaccatttgcaagacaagaagctggtcctggagaaactgcagggacaccttgaactgctggagcagaactttctggccaccaaggacaagcatctgactttgcagcagcaagtccacaagcacgaatcaacaatcgttggtgactttgatccagaaagaaaagtggaaggtgaaatcttcaaattggagatgctgcttgaagatgttaaagagaaaatggatgaaagcaaatatacttcagctccttcccttcctgtgagttctccagttaccctggatgacttggcctccaccttctcttcactctcaaatgaggcccccaacgaggagctctgtgagctggccccgcagacttacctaaacggtcattatggagatgcagctgcccagaacaagccagaccaagtggccatgaggctgtcttctaactctggggaggatcccaacggcactccaagaaggcaggattgtgcagagatgacggcacccagtccgagctgtgccttctgtcgcaggctccttgaatggaagcaaaacgtggagaaaaagggccacggaaggatcaactgtggaagattttcaattgtccttcatgaaaaggcaccacactcagattcaactcccaattctgatacaggacacagcttctgttctgattctggcactgaaatgcagagtaacaaatgtcaggactgtggcactaagattcctacctcccgaagagcctgcaggaaagaaccaactaaagaatttcattatagatacaacactccaggacagaattactcaaatcatagcaaaagaggtgcctttgtccagccccattctttagatgaaagtaaaaactcttcaccctgtcttgtgcactcacctgacacttccaaatccagccctacatctggatggcaagaggctgagctggggctggaaaatatgaaatcgcagtgaccaaggactttgaaagttattaagggctacaccagtgcaagttggtagcaacccataaatgtttgctgaacaaataaatgacttactggataatca

SEQ ID NO: 106134 - DNA, 2641 bp, Homo sapiens
  Payload ID: 809
  Gene Symbol: AKNAD1
  Gene Name: AKNA domain containing 1
  Uniprot ID: Q5T1N1
  ENST ID: ENST00000369995
  CDS Start-End: 260-2545
agaaaatcaatttggattctacagaaaggttctgttggattctgagtggaacctctttggatatgcctttggatttcaagattgagccaagtgttgacatgggaagatgctccagttcctccagttatctcaaagaagctcattaccttgctaaggaatagcacacagtgaagacagtcagtgagaaccagagctattgttacaactgacagcagccagctcaggaggcagaggacgagagcgatcgggctgcacacacatggatgaggctgatttttcagaacacacgacttataagcaggaggatttgccttatgatggggacctctctcagattaagataggcaatgattacagttttacctcaaaaaaggatggccttgaagtcttaaatcaaattattttcatagcagatgaccctcaagagaaggctatgcatagtgagacttgtggaaatacagctgtgaccatacccctgggtaaaattactgaaaatgctgccaacaaaaaagacgagaaagagaaacaatgcactgcagctcttcatattccagcaaatgaaggagacgcttctaagtcaagcatttctgatattttacttcatcatctttccaaagagccattcttaagaggtcaaggcattgattgtgaaaccctcccagagatctcaaatgccgacagttttgaagaggaagctattattaaaagtattatttcatgttataataagaattcttggccaaaagaacaaaccccagaactcactgaccaactcaacccgaaaagggatggtgaaaacagcaataagcctggttctgccaccacgacagaggaaaatacctctgatttagaagggccagtggctgctggagatagcagccatcaagaaaatgtgaatgttctaactaaaaccaagggtccaggtgataaacaaaaaagttatcaagggcagtcaccccagaaacagcagactgaaaaagcaaattcaggcaacacgttcaaatacggccaaggtcaagttcattaccagctccctgatttctctaagattgctcccaaagtgaaaattcctaaaaataagataattaataaaccacttgcaatagctaaacaagccagcttttcttccaagtcgagagataaacccactcttgtgcaagatagtctagaaaccacgcctgagtcaaactgtgttgaaaaacaacatcaagagcagaaagggaaaatcactgaaccttcacaacaaatccagatggagcccatagtacatatccaccaagaacttctcacaggaatagaatctgaggcaagtctctctaagttgtcaccaacctctcagaaaggcacttcctcaagttcttcttacatatttcaaaagatatcccaagggaaacagatgtgtcagaagttgaaagaacagactgatcaactgaagactaaagtacaagaattttccaaaagaataaaacaggactctccttaccatttgcaagacaagaagctggtcctggagaaactgcagggacaccttgaactgctggagcagaactttctggccaccaaggacaagcatctgactttgcagcagcaagtccacaagcacgaatcaacaatcgttggtgactttgatccagaaagaaaagtggaaggtgaaatcttcaaattggagatgctgcttgaagatgttaaagagaaaatggatgaaagcaaatatacttcagctccttcccttcctgtgagttctccagttaccctggatgacttggcctccaccttctcttcactctcaaatgagattcccaaggagcaccccggccacccttctgggcctcgaggctcaggtgggagtgaggtaacagggacaccccaaggagggccgcaggaggcccccaacgaggagctctgtgagctggccccgcagacttacctaaacggtcattatggagatgcagctgcccagaacaagccagaccaagtggccatgaggctgtcttctaactctggggaggatcccaacggcactccaagaaggcaggattgtgcagagatgacggcacccagtccgagctgtgccttctgtcgcaggctccttgaatggaagcaaaacgtggagaaaaagggccacggaaggatcaactgtggaagattttcaattgtccttcatgaaaaggcaccacactcagattcaactcccaattctgatacaggacacagcttctgttctgattctggcactgaaatgcagagtaacaaatgtcaggactgtggcactaagattcctacctcccgaagagcctgcaggaaagaaccaactaaagaatttcattatagatacaacactccaggacagaattactcaaatcatagcaaaagaggtgcctttgtccagccccattctttagatgaaagtaaaaactcttcaccctccctggcctctccattttgctgcccaggtcttgtgcactcacctgacacttccaaatccagccctacatctggatggcaagaggctgagctggggctggaaaatatgaaatcgcagtgaccaaggactttgaaagttattaagggctacaccagtgcaagttggtagcaacccataaatgtttgctgaacaaataaatgacttactggataatca

SEQ ID NO: 106135 - DNA, 3053 bp, Homo sapiens
  Payload ID: 809
  Gene Symbol: AKNAD1
  Gene Name: AKNA domain containing 1
  Uniprot ID: Q5T1N1
  ENST ID: ENST00000370001
  CDS Start-End: 270-2780
acctgacttcagaaaatcaatttggattctacagaaaggttctgttggattctgagtggaacctctttggatatgcctttggatttcaagattgagccaagtgttgacatgggaagatgctccagttcctccagttatctcaaagaagctcattaccttgctaaggaatagcacacagtgaagacagtcagtgagaaccagagctattgttacaactgacagcagccagctcaggaggcagaggacgagagcgatcgggctgcacacacatggatgaggctgatttttcagaacacacgacttataagcaggaggatttgccttatgatggggacctctctcagattaagataggcaatgattacagttttacctcaaaaaaggatggccttgaagtcttaaatcaaattattttcatagcagatgaccctcaagagaaggctatgcatagtgagacttgtggaaatacagctgtgaccatacccctgggtaaaattactgaaaatgctgccaacaaaaaagacgagaaagagaaacaatgcactgcagctcttcatattccagcaaatgaaggagacgcttctaagtcaagcatttctgatattttacttcatcatctttccaaagagccattcttaagaggtcaaggcattgattgtgaaaccctcccagagatctcaaatgccgacagttttgaagaggaagctattattaaaagtattatttcatgttataataagaattcttggccaaaagaacaaaccccagaactcactgaccaactcaacccgaaaagggatggtgaaaacagcaataagcctggttctgccaccacgacagaggaaaatacctctgatttagaagggccagtggctgctggagatagcagccatcaagaaaatgtgaatgttctaactaaaaccaagggtccaggtgataaacaaaaaagttatcaagggcagtcaccccagaaacagcagactgaaaaagcaaattcaggcaacacgttcaaatacggccaaggtcaagttcattaccagctccctgatttctctaagattgctcccaaagtgaaaattcctaaaaataagataattaataaaccacttgcaatagctaaacaagccagcttttcttccaagtcgagagataaacccactcttgtgcaagatagtctagaaaccacgcctgagtcaaactgtgttgaaaaacaacatcaagagcagaaagggaaaatcactgaaccttcacaacaaatccagatggagcccatagtacatatccaccaagaacttctcacaggaatagaatctgaggcaagtctctctaagttgtcaccaacctctcagaaaggcacttcctcaagttcttcttacatatttcaaaagatatcccaagggaaacagatgtgtcagaagttgaaagaacagactgatcaactgaagactaaagtacaagaattttccaaaagaataaaacaggactctccttaccatttgcaagacaagaagctggtcctggagaaactgcagggacaccttgaactgctggagcagaactttctggccaccaaggacaagcatctgactttgcagcagcaagtccacaagcacgaatcaacaatcgttggtgactttgatccagaaagaaaagtggaaggtgaaatcttcaaattggagatgctgcttgaagatgttaaagagaaaatggatgaaagcaaatatacttcagctccttcccttcctgtgagttctccagttaccctggatgacttggcctccaccttctcttcactctcaaatgagattcccaaggagcaccccggccacccttctgggcctcgaggctcaggtgggagtgaggtaacagggacaccccaaggagggccgcaggaggcccccaacgaggagctctgtgagctggccccgcagacttacctaaacggtcattatggagatgcagctgcccagaacaagccagaccaagtggccatgaggctgtcttctaactctggggaggatcccaacggcactccaagaaggcaggattgtgcagagatgacggcacccagtccgagctgtgccttctgtcgcaggctccttgaatggaagcaaaacgtggagaaaaagggccacggaaggatcaactgtggaagattttcaattgtccttcatgaaaaggcaccacactcagattcaactcccaattctgatacaggacacagcttctgttctgattctggcactgaaatgcagagtaacaaatgtcaggactgtggcactaagattcctacctcccgaagagcctgcaggaaagaaccaactaaagaatttcattatagatacaacactccaggacagaattactcaaatcatagcaaaagaggtgcctttgtccagccccattctttagatgaaagtaaaaactcttcaccctcttttttaaaacccaaacggatctgttctcagagagtgaattcaaaatcctttaaaggtgaacatgagcccacaccaggaaaaaaaaaacttcaggctttcatgacctacagctcagaccctgcaacaccctcaccccatttctactcctgcaggatttctggaagcaaatccttatgtgactttgatagcactgaagaaataaaatctgagattttaaactcggctttggatcatgccctaaggacagcaaccattttgaaagaaactacagatcaaatgattaaaacgattgcagaagaccttgctaaagcacagaggtggaggaatcgactgaaatactagttcaacgctaggctaccaaggattcaaaagaaaaaaatgcaaagaaaacttgatcttcccccaaaatgtattttacttactacacaatttaggaagatgactttctagagaaaacacagaaaccataagaaatgggtaacacaaagtacttaaaggaaaaagaaaaaagaaaggacttctgattcttaaaatcaaaagcaaccaacaagtatttattttaaaataaatctatgttcttcttaactcataataaaagaaatcaaaacaaaacaa

SEQ ID NO: 106136 - DNA, 2638 bp, Homo sapiens
  Payload ID: 809
  Gene Symbol: AKNAD1
  Gene Name: AKNA domain containing 1
  Uniprot ID: Q5T1N1
  ENST ID: ENST00000472781
  CDS Start-End: 260-1507
agaaaatcaatttggattctacagaaaggttctgttggattctgagtggaacctctttggatatgcctttggatttcaagattgagccaagtgttgacatgggaagatgctccagttcctccagttatctcaaagaagctcattaccttgctaaggaatagcacacagtgaagacagtcagtgagaaccagagctattgttacaactgacagcagccagctcaggaggcagaggacgagagcgatcgggctgcacacacatggatgaggctgatttttcagaacacacgacttataagcaggaggatttgccttatgatggggacctctctcagattaagataggcaatgattacagttttacctcaaaaaaggatggccttgaagtcttaaatcaaattattttcatagcagatgaccctcaagagaaggctatgcatagtgagacttgtggaaatacagctgtgaccatacccctgggtaaaattactgaaaatgctgccaacaaaaaagacgagaaagagaaacaatgcactgcagctcttcatattccagcaaatgaaggagacgcttctaagtcaagcatttctgatattttacttcatcatctttccaaagagccattcttaagaggtcaaggcattgattgtgaaaccctcccagagatctcaaatgccgacagttttgaagaggaagctattattaaaagtattatttcatgttataataagaattcttggccaaaagaacaaaccccagaactcactgaccaactcaacccgaaaagggatggtgaaaacagcaataagcctggttctgccaccacgacagaggaaaatacctctgatttagaagggccagtggctgctggagatagcagccatcaagaaaatgtgaatgttctaactaaaaccaagggtccaggtgataaacaaaaaagttatcaagggcagtcaccccagaaacagcagactgaaaaagcaaattcaggcaacacgttcaaatacggccaaggtcaagttcattaccagctccctgatttctctaagattgctcccaaagtgaaaattcctaaaaataagataattaataaaccacttgcaatagctaaacaagccagcttttcttccaagtcgagagataaacccactcttgtgcaagatagtctagaaaccacgcctgagtcaaactgtgttgaaaaacaacatcaagagcagaaagggaaaatcactgaaccttcacaacaaatccagatggagcccatagtacatatccaccaagaacttctcacaggaatagaatctgaggcaagtctctctaagttgtcaccaacctctcagaaaggcacttcctcaagttcttcttacatatttcaaaagatatcccaagggaaacagatgtgtcagaagttgaaagaacagactgatcaactgaagactaaagtacaagaattttccaaaagaataaaacaggactctccttaccatttgcaagacaagaagctgtgacttcaccgctgcaggtcctggagaaactgcagggacaccttgaactgctggagcagaactttctggccaccaaggacaagcatctgactttgcagcagcaagtccacaagcacgaatcaacaatcgttggtgactttgatccagaaagaaaagtggaaggtgaaatcttcaaattggagatgctgcttgaagatgttaaagagaaaatggatgaaagcaaatatacttcagctccttcccttcctgtgagttctccagttaccctggatgacttggcctccaccttctcttcactctcaaatgaggtaatacagcaatgtacagtctaattttgtgccaggaaaaatggtgtttttgcatttatagactcctaattcatggattcactgaattccatttttaatatctcatgaaaatttaactttccaaagtcccatgaattatattattttaaatggaaccagcttttaaagattagaagctatttcaagtgttaatttttgaaacatctttatagtttaggatgtaacaatgctgtttaaatccattaaaccaccgaagagctatttcttccaaattaataagaaaatttttgtagatcatgcctggaagaaataattttttttcttcatagttttgtactcaccaggctggagtgtggtagcacgatctcagctcactgcaacctttgtctcccgggctcaagtgattctcctccctcagcctcccaagcagctgagattacaggtgcatgccaccactgcctggctaattttttatatttttggtagagatggggtttcaccatgttggccaggctggtctcaaactcctgacctcaagtgatccgcccgcttggccttccaaagtgttgggattacaggcatgagccacctgaaaataaagaatagcacactcagtgaaataattatttcccatgaatccacttctgcattttccttctctcaagttaaattcttttggatttctacttatgcaagattgggaattcaaattaaccaccactgtctttctatactttttgcctttgtagcctcaactatcagaacattcagactaaaatcaaaattctgagaaacagaatcatttaaataaataccttaaattgac

SEQ ID NO: 106137 - DNA, 2646 bp, Homo sapiens
  Payload ID: 809
  Gene Symbol: AKNAD1
  Gene Name: AKNA domain containing 1
  ENST ID: ENST00000461774
  CDS Start-End: 252-1961
aatttggattctacagaaaggttctgttggattctgagtggaacctctttggatatgcctttggatttcaagattgagccaagtgttgacatgggaagatgctccagttcctccagttatctcaaagaagctcattaccttgctaaggaatagcacacagtgaagacagtcagtgagaaccagagctattgttacaactgacagcagccagctcaggaggcagaggacgagagcgatcgggctgcacacacatggatgaggctgatttttcagaacacacgacttataagcaggaggatttgccttatgatggggacctctctcagattaagataggcaatgattacagttttacctcaaaaaaggatggccttgaagtcttaaatcaaattattttcatagcagatgaccctcaagagaaggctatgcatagtgagacttgtggaaatacagctgtgaccatacccctgggtaaaattactgaaaatgctgccaacaaaaaagacgagaaagagaaacaatgcactgcagctcttcatattccagcaaatgaaggagacgcttctaagtcaagcatttctgatattttacttcatcatctttccaaagagccattcttaagaggtcaaggcattgattgtgaaaccctcccagagatctcaaatgccgacagttttgaagaggaagctattattaaaagtattatttcatgttataataagaattcttggccaaaagaacaaaccccagaactcactgaccaactcaacccgaaaagggatggtgaaaacagcaataagcctggttctgccaccacgacagaggaaaatacctctgatttagaagggccagtggctgctggagatagcagccatcaagaaaatgtgaatgttctaactaaaaccaagggtccaggtgataaacaaaaaagttatcaagggcagtcaccccagaaacagcagactgaaaaagcaaattcaggcaacacgttcaaatacggccaaggtcaagttcattaccagctccctgatttctctaagattgctcccaaagtgaaaattcctaaaaataagataattaataaaccacttgcaatagctaaacaagccagcttttcttccaagtcgagagataaacccactcttgtgcaagatagtctagaaaccacgcctgagtcaaactgtgttgaaaaacaacatcaagagcagaaagggaaaatcactgaaccttcacaacaaatccagatggagcccatagtacatatccaccaagaacttctcacaggaatagaatctgaggcaagtctctctaagttgtcaccaacctctcagaaaggcacttcctcaagttcttcttacatatttcaaaagatatcccaagggaaacagatgtgtcagaagttgaaagaacagactgatcaactgaagactaaagtacaagaattttccaaaagaataaaacaggactctccttaccatttgcaagacaagaagctggtcctggagaaactgcagggacaccttgaactgctggagcagaactttctggccaccaaggacaagcatctgactttgcagcagcaagtccacaagcacgaatcaacaatcgttggtgactttgatccagaaagaaaagtggaaggtgaaatcttcaaattggagatgctgcttgaagatgttaaagagaaaatggatgaaagcaaatatacttcagctccttcccttcctgtgagttctccagttaccctggatgacttggcctccaccttctcttcactctcaaatgagattcccaaggagcaccccggccacccttctgggcctcgaggctcaggtgggagtgaggtaacagggacaccccaaggagggccgcaggaggcccccaacgaggagctctgtgagctggccccgcagacgaggatcccaacggcactccaagaaggcaggattgtgcagagatgacggcacccagtccgagctgtgccttctgtcgcaggctccttgaatggaagcaaaacgtggagaaaaagggccacggaaggatcaactgtggaagattttcaattgtccttcatgaaaaggcaccacactcagattcaactcccaattctgatacaggacacagcttctgttctgattctggcactgaaatgcagagtaacaaatgtcaggactgtggcactaagattcctacctcccgaagagcctgcaggaaagaaccaactaaagaatttcattatagatacaacactccaggacagaattactcaaatcatagcaaaagaggtgcctttgtccagccccattctttagatgaaagtaaaaactcttcaccctgtaagtacatctcctgcatgaccccatccatatcaacaacctaatgtcccaggtatgggacattcacatgacactggccactgcttccatctgggaagccctggcctctccattttgctgcccaggtcttgtgcactcacctgacacttccaaatccagccctacatctggatggcaagaggctgagctggggctggaaaatatgaaatcgcagtgaccaaggactttgaaagttattaagggctacaccagtgcaagttggtagcaacccataaatgtttgctgaacaaataaatgacttactggataa

SEQ ID NO: 106138 - DNA, 2895 bp, Homo sapiens
  Payload ID: 809
  Gene Symbol: AKNAD1
  Gene Name: AKNA domain containing 1
  Uniprot ID: Q5T1N1
  ENST ID: ENST00000474186
  CDS Start-End: 407-2365
agaagaagcaggcacgccatgattttgaagctccgtttttgttctgttattcaactgcagtcaacttccaactgttgaaaaaaagatgatttagaattaaagggttgcttgtctgtgtcgcaaggcccttcaacttgttcacctgtgatatccagagactccaagatgttgaaaggttctgttggattctgagtggaacctctttggatatgcctttggatttcaagattgagccaagtgttgacatgggaagatgctccagttcctccagttatctcaaagaagctcattaccttgctaaggaatagcacacagtgaagacagtcagtgagaaccagagctattgttacaactgacagcagccagctcaggaggcagaggacgagagcgatcgggctgcacacacatggatgaggctgatttttcagaacacacgacttataagcaggaggatttgccttatgatggggacctctctcagattaagataggcaatgattacagttttacctcaaaaaaggatggccttgaagtcttaaatcaaattattttcatagcagatgaccctcaagagaaggctatgcatagtgagacttgtggaaatacagctgtgaccatacccctgggtaaaattactgaaaatgctgccaacaaaaaagacgagaaagagaaacaatgcactgcagctcttcatattccagcaaatgaaggagacgcttctaagtcaagcatttctgatattttacttcatcatctttccaaagagccattcttaagaggtcaaggcattgattgtgaaaccctcccagagatctcaaatgccgacagttttgaagaggaagctattattaaaagtattatttcatgttataataagaattcttggccaaaagaacaaaccccagaactcactgaccaactcaacccgaaaagggatggtgaaaacagcaataagcctggttctgccaccacgacagaggaaaatacctctgatttagaagggccagtggctgctggagatagcagccatcaagaaaatgtgaatgttctaactaaaaccaagggtccaggtgataaacaaaaaagttatcaagggcagtcaccccagaaacagcagactgaaaaagcaaattcaggcaacacgttcaaatacggccaaggtcaagttcattaccagctccctgatttctctaagattgctcccaaagtgaaaattcctaaaaataagataattaataaaccacttgcaatagctaaacaagccagcttttcttccaagtcgagagataaacccactcttgtgcaagatagtctagaaaccacgcctgagtcaaactgtgttgaaaaacaacatcaagagcagaaagggaaaatcactgaaccttcacaacaaatccagatggagcccatagtacatatccaccaagaacttctcacaggaatagaatctgaggcaagtctctctaagttgtcaccaacctctcagaaaggcacttcctcaagttcttcttacatatttcaaaagatatcccaagggaaacagatgtgtcagaagttgaaagaacagactgatcaactgaagactaaagtacaagaattttccaaaagaataaaacaggactctccttaccatttgcaagacaagaagctggtcctggagaaactgcagggacaccttgaactgctggagcagaactttctggccaccaaggacaagcatctgactttgcagcagcaagtccacaagcacgaatcaacaatcgttggtgactttgatccagaaagaaaagtggaaggtgaaatcttcaaattggagatgctgcttgaagatgttaaagagaaaatggatgaaagcaaatatacttcagctccttcccttcctgtgagttctccagttaccctggatgacttggcctccaccttctcttcactctcaaatgaggaggatcccaacggcactccaagaaggcaggattgtgcagagatgacggcacccagtccgagctgtgccttctgtcgcaggctccttgaatggaagcaaaacgtggagaaaaagggccacggaaggatcaactgtggaagattttcaattgtccttcatgaaaaggcaccacactcagattcaactcccaattctgatacaggacacagcttctgttctgattctggcactgaaatgcagagtaacaaatgtcaggactgtggcactaagattcctacctcccgaagagcctgcaggaaagaaccaactaaagaatttcattatagatacaacactccaggacagaattactcaaatcatagcaaaagaggtgcctttgtccagccccattctttagatgaaagtaaaaactcttcaccctaaaaaaacttcaggctttcatgacctacagctcagaccctgcaacaccctcaccccatttctactcctgcaggatttctggaagcaaatccttatgtgactttgatagcactgaagaaataaaatctgagattttaaactcggctttggatcatgccctaaggacagcaaccattttgaaagaaactacagatcaaatgattaaaacgattgcagaagaccttgctaaagcacagaggtggaggaatcgactgaaatactagttcaacgctaggctaccaaggattcaaaagaaaaaaatgcaaagaaaacttgatcttcccccaaaatgtattttacttactacacaatttaggaagatgactttctagagaaaacacagaaaccataagaaatgggtaacacaaagtacttaaaggaaaaagaaaaaagaaaggacttctgattcttaaaatcaaaagcaaccaacaagtatttattttaaaataaatctatgttcttcttaactcataataaaagaaatcaaaacaaaa

SEQ ID NO: 106139 - DNA, 2133 bp, Homo sapiens
  Payload ID: 810
  Gene Symbol: AKTIP
  Gene Name: AKT interacting protein
  Uniprot ID: Q9H8T0
  ENST ID: ENST00000300245
  CDS Start-End: 219-1100
cggggatcaagcaggggcagggctggcgctgcggcgggagatgctgtcgggccgcggcggcgcttggcagccaggagctctgcattgaaggcactgggccgtttgattggtgcaagtaggaattcagagaaggagctctgctttaaaggtaaagtgaatgccgaagacagaagatttggatgatacaccactgactttctttgtttggaatacacgttatgaaccctttctggagcatgtctacaagctctgtacgcaaacgatctgaaggtgaagagaagacattaacaggggacgtgaaaaccagtcctccacgaactgcaccaaagaaacagctgccttctattcccaaaaatgctttgcccataactaagcctacatctcctgccccagcagcacagtcaacaaatggcacgcatgcgtcctatggacccttctacctggaatactctcttcttgcagaatttaccttggttgtgaagcagaagctaccaggcgtctatgtgcagccatcttatcgctctgcattaatgtggtttggagtaatattcatacggcatggactttaccaagatggcgtatttaagtttacagtttacatccctgataactatccagatggtgactgtccacgcttggtgttcgatattcctgtctttcacccgctagttgatcccacctcaggtgagctggatgtgaagagagcatttgcaaaatggaggcggaaccataatcatatttggcaggtattaatgtatgcaaggagagttttctacaagattgatacagcaagccccctgaacccagaggctgcagtactgtatgaaaaagatattcagctttttaaaagtaaagttgttgacagtgttaaggtgtgcactgctcgtttgtttgaccaacctaaaatagaagacccctatgcaattagcttttctccatggaatccttctgtacatgatgaagccagagaaaagatgctgactcagaaaaagaagcctgaagaacagcacaataaaagtgttcatgttgctggcctgtcatgggtaaagcctggctcagtacagcctttcagtaaagaagagaaaacagtggcgacttaagagatggtgaatctggtgcaccatgcactttcctgctagactctggcctagttcaagctgaccaatggcagaggactgcctgaagagtaaaactgtgtgaacaatgactgactgccagtgttttccatgtatgcataggttctaacagcagggtttggaaacctgtctctaagtaatgcattacttctgtcagaagtgtcttagggtggttatctagttcagtactccaaattattggggaccttgaggcttaagtaagtatttttctgaatataatgctaaaggtaagttgcattcatttaaactaatagagcagacagaattcagcactacttaatagtttataaatcagtggtttcagttgtatatatgttaggaaatggagaggtatagagagagcaggttccatagctcagcacttttaagtggaagatcatttgaatctcagtcttcagcctgcactgatttgtagcctgcactgtcttactgatttacaaactgaaatcactgagaaatgtctttagttcagtgagaagaaaccagaacacttgttcctagtgttgtgttgttttttttaagcaaattacttactgtatttttatggcaggagggagaaaaagtgttacaacggtttctaatgaagtccggtatttaaatgataaatgactaatgtgtttagtagagacaaaataaaccaataaatgattgttctttgccatttatgcaggaaactacccttttctcaatataaccaaacaaaggctaatttataaatgctttattgaaaaatacacttatcttcatataaaattacagtagcagtatcttgagaagttttataaatatttttgcagaacactattctaattgaacaatgtaagttccatatttctctcagcaatatgaagttacctagtaactttgtttatactgattcaatttacaattgaattttctccctaataagattattaatttgacttgaaaactgctggaacaatagtgattaataaagatatgtatagataattca

SEQ ID NO: 106140 - DNA, 2426 bp, Homo sapiens
  Payload ID: 810
  Gene Symbol: AKTIP
  Gene Name: AKT interacting protein
  Uniprot ID: Q9H8T0
  ENST ID: ENST00000394657
  CDS Start-End: 176-1054
ggcggggcggggatcaagcaggggcagggctggcgctgcggcgggagatgctgtcgggccgcggcggcgcttggcagccaggagctctgcattgaaggcactggggtaaagtgaatgccgaagacagaagatttggatgatacaccactgactttctttgtttggaatacacgttatgaaccctttctggagcatgtctacaagctctgtacgcaaacgatctgaaggtgaagagaagacattaacaggggacgtgaaaaccagtcctccacgaactgcaccaaagaaacagctgccttctattcccaaaaatgctttgcccataactaagcctacatctcctgccccagcagcacagtcaacaaatggcacgcatgcgtcctatggacccttctacctggaatactctcttcttgcagaatttaccttggttgtgaagcagaagctaccaggcgtctatgtgcagccatcttatcgctctgcattaatgtggtttggagtaatattcatacggcatggactttaccaagatggcgtatttaagtttacagtttacatccctgataactatccagatggtgactgtccacgcttggtgttcgatattcctgtctttcacccgctagttgatcccacctcaggtgagctggatgtgaagagagcatttgcaaaatggaggcggaaccataatcatatttggcaggtattaatgtatgcaaggagagttttctacaagattgatacagcaagccccctgaacccagaggctgcagtactgtatgaaaaagatattcagctttttaaaagtaaagttgttgacagtgttaaggtgtgcactgctcgtttgtttgaccaacctaaaatagaagacccctatgcaattagcttttctccatggaatccttctgtacatgatgaagccagagaaaagatgctgactcagaaaaagcctgaagaacagcacaataaaagtgttcatgttgctggcctgtcatgggtaaagcctggctcagtacagcctttcagtaaagaagagaaaacagtggcgacttaagagatggtgaatctggtgcaccatgcactttcctgctagactctggcctagttcaagctgaccaatggcagaggactgcctgaagagtaaaactgtgtgaacaatgactgactgccagtgttttccatgtatgcataggttctaacagcagggtttggaaacctgtctctaagtaatgcattacttctgtcagaagtgtcttagggtggttatctagttcagtactccaaattattggggaccttgaggcttaagtaagtatttttctgaatataatgctaaaggtaagttgcattcatttaaactaatagagcagacagaattcagcactacttaatagtttataaatcagtggtttcagttgtatatatgttaggaaatggagaggtatagagagagcaggttccatagctcagcacttttaagtggaagatcatttgaatctcagtcttcagcctgcactgatttgtagcctgcactgtcttactgatttacaaactgaaatcactgagaaatgtctttagttcagtgagaagaaaccagaacacttgttcctagtgttgtgttgttttttttaagcaaattacttactgtatttttatggcaggagggagaaaaagtgttacaacggtttctaatgaagtccggtatttaaatgataaatgactaatgtgtttagtagagacaaaataaaccaataaatgattgttctttgccatttatgcaggaaactacccttttctcaatataaccaaacaaaggctaatttataaatgctttattgaaaaatacacttatcttcatataaaattacagtagcagtatcttgagaagttttataaatatttttgcagaacactattctaattgaacaatgtaagttccatatttctctcagcaatatgaagttacctagtaactttgtttatactgattcaatttacaattgaattttctccctaataagattattaatttgacttgaaaactgctggaacaatagtgattaataaagatatgtatagataattcagctgttaaataacattttctaatttgtataaatggtactatggtactaataaaaacctaaattctccaaccaatttttttaaactgccaggaacacccaaaaatatttttaaatatatcaccttaatagacatttcttttagataactccctcctaaaggaagaggtcataagttttcatattaatcccctcaattcaacttgattaaaatcttttcttagctggttgatccctatataacaaaaaactggagaatttaaaacattcccaaaaggtggctataggggttttaacattttaaaaaaatataaaagcattaaagaaaatattggatgttta

SEQ ID NO: 106141 - DNA, 819 bp, Homo sapiens
  Payload ID: 810
  Gene Symbol: AKTIP
  Gene Name: AKT interacting protein
  ENST ID: ENST00000568022
  CDS Start-End: 71-819
gtaaagtgaatgccgaagacagaagatttggatgatacaccactgactttctttgtttggaatacacgttatgaaccctttctggagcatgtctacaagctctgtacgcaaacgatctgaaggtgaagagaagacattaacaggggacgtgaaaaccagtcctccacgaactgcaccaaagaaacagctgccttctattcccaaaaatgctttgcccataactaagcctacatctcctgccccagcagcacagtcaacaaatggcacgcatgcgtcctatggacccttctacctggaatactctcttcttgcagaatttaccttggttgtgaagcagaagctaccaggcgtctatgtgcagccatcttatcgctctgcattaatgtggtttggagtaatattcatacggcatggactttaccaagatggcgtatttaagtttacagtttacatccctgataactatccagatggtgactgtccattgtccagggggacttctgtgctttgcagcagcttccggcatgccatcagagctttgtttctctgctcagggtctgcaagggaggctggctgcctgccatcctgcagcactcaccagcgcttggtgttcgatattcctgtctttcacccgctagttgatcccacctcaggtgagctggatgtgaagagagcatttgcaaaatggaggcggaaccataatcatatttggcaggtattaatgtatgcaaggagagttttctacaagattgatacagcaagccccctgaacccagaggctgcagtactgtatgaaaaagatattcagctttttaaaag

SEQ ID NO: 106142 - DNA, 959 bp, Homo sapiens
  Payload ID: 810
  Gene Symbol: AKTIP
  Gene Name: AKT interacting protein
  ENST ID: ENST00000568596
  CDS Start-End: 578-959
agatgctgtcgggccgcggcggcgcttggcagccaggagctctgcattgaaggcactggggtgaggcttactgcccggcaggctggtgggtacgcgagggctgaggtgtctgtaaatctggccgccagcctccacgggcccggcatttgtccatctttctaggcgctcgcgactcggcgacggcggccgcagtgggacacggaggcggggccgggcacctgtgcgcgtttgcaggcacctgctgcgctggccgcctcgcagcccgggactgctgctggggactgcggctggagctgggctggcccggcccgagggagaggggggcccagctggctcgccccggcccgtgcccgccctccccggccgggtcccgaccccgagctctggttaagggggcgtcgccgggccccagagcccccccactggaggggcccgcggctcccgggccagcatcgagctagctgcgaggccaggacagggcccccgccttgcatcacctcgagacaggtaaagtgaatgccgaagacagaagatttggatgatacaccactgactttctttgtttggaatacacgttatgaaccctttctggagcatgtctacaagctctgtacgcaaacgatctgaaggtgaagagaagacattaacaggggacgtgaaaaccagtcctccacgaactgcaccaaagaaacagctgccttctattcccaaaaatgctttgcccataactaagcctacatctcctgccccagcagcacagtcaacaaatggcacgcatgcgtcctatggacccttctacctggaatactctcttcttgcagaatttaccttggttgtgaagcagaagctaccaggcgtctatgtgcagccatcttatcgctctgcattaatgtggtttggagtaatattcatacggcatggactttaccaagatggcgtatttaagtttacagtttaca

SEQ ID NO: 106143 - DNA, 1162 bp, Homo sapiens
  Payload ID: 810
  Gene Symbol: AKTIP
  Gene Name: AKT interacting protein
  Uniprot ID: Q9H8T0
  ENST ID: ENST00000570004
  CDS Start-End: 177-1055
gctggcgctgcggcgggagatgctgtcgggccgcggcggcgcttggcagccaggagctctgcattgaaggcactggggtgaggcttactgcccggcaggctggtgggtaaagtgaatgccgaagacagaagatttggatgatacaccactgactttctttgtttggaatacacgttatgaaccctttctggagcatgtctacaagctctgtacgcaaacgatctgaaggtgaagagaagacattaacaggggacgtgaaaaccagtcctccacgaactgcaccaaagaaacagctgccttctattcccaaaaatgctttgcccataactaagcctacatctcctgccccagcagcacagtcaacaaatggcacgcatgcgtcctatggacccttctacctggaatactctcttcttgcagaatttaccttggttgtgaagcagaagctaccaggcgtctatgtgcagccatcttatcgctctgcattaatgtggtttggagtaatattcatacggcatggactttaccaagatggcgtatttaagtttacagtttacatccctgataactatccagatggtgactgtccacgcttggtgttcgatattcctgtctttcacccgctagttgatcccacctcaggtgagctggatgtgaagagagcatttgcaaaatggaggcggaaccataatcatatttggcaggtattaatgtatgcaaggagagttttctacaagattgatacagcaagccccctgaacccagaggctgcagtactgtatgaaaaagatattcagctttttaaaagtaaagttgttgacagtgttaaggtgtgcactgctcgtttgtttgaccaacctaaaatagaagacccctatgcaattagcttttctccatggaatccttctgtacatgatgaagccagagaaaagatgctgactcagaaaaagcctgaagaacagcacaataaaagtgttcatgttgctggcctgtcatgggtaaagcctggctcagtacagcctttcagtaaagaagagaaaacagtggcgacttaagagatggtgaatctggtgcaccatgcactttcctgctagactctggcctagttcaagctgaccaatggcagaggactgcctgaagagtaaaactgtgtgaacaatga

SEQ ID NO: 106144 - DNA, 541 bp, Homo sapiens
  Payload ID: 810
  Gene Symbol: AKTIP
  Gene Name: AKT interacting protein
  ENST ID: ENST00000564497
  CDS Start-End: 500-541
gggcagggctggcgctgcggcgggagatgctgtcgggccgcggcggcgcttggcagccaggagctctgcattgaaggcactggggcgctcgcgactcggcgacggcggccgcagtgggacacggaggcggggccgggcacctgtgcgcgtttgcaggcacctgctgcgctggccgcctcgcagcccgggactgctgctggggactgcggctggagctgggctggcccggcccgagggagaggggggcccagctggctcgccccggcccgtgcccgccctccccggccgggtcccgaccccgagctctggttaagggggcgtcgccgggccccagagcccccccactggaggggcccgcggctcccgggccagcatcgagctagctgcgaggccaggacagggcccccgccttgcatcacctcgagacaggtaaagtgaatgccgaagacagaagatttggatgatacaccactgactttctttgtttggaatacacgttatgaaccctttctggagcatgtctacaagctctgtacgcaaa

SEQ ID NO: 106145 - DNA, 562 bp, Homo sapiens
  Payload ID: 810
  Gene Symbol: AKTIP
  Gene Name: AKT interacting protein
  ENST ID: ENST00000563928
  CDS Start-End: 114-562
ttttctcttggaaaacaaaacagcagtaatgggcactggcaaggtaaagtgaatgccgaagacagaagatttggatgatacaccactgactttctttgtttggaatacacgttatgaaccctttctggagcatgtctacaagctctgtacgcaaacgatctgaaggtgaagagaagacattaacaggggacgtgaaaaccagtcctccacgaactgcaccaaagaaacagctgccttctattcccaaaaatgctttgcccataactaagcctacatctcctgccccagcagcacagtcaacaaatggcacgcatgcgtcctatggacccttctacctggaatactctcttcttgcagaatttaccttggttgtgaagcagaagctaccaggcgtctatgtgcagccatcttatcgctctgcattaatgtggtttggagtaatattcatacggcatggactttaccaagatggcgtatttaagtttacagtttacatccctgataactatccagatggtgactgtccacgcttggtgttcgatattcctgtctttcacccgct

SEQ ID NO: 106146 - DNA, 574 bp, Homo sapiens
  Payload ID: 810
  Gene Symbol: AKTIP
  Gene Name: AKT interacting protein
  ENST ID: ENST00000570041
  CDS Start-End: 454-574
ggaagttgctgttcttacagctgggcttggctgcttttcctttgcttctttgtatttttagtaaatgacccactgactttatgacctttgagacatgctttcttatccacgacttgaagcttcggctggaagatctgtacttgtgaaatgtctctcttgcgtgcctgtgttgcatttgtctggattgcttggcagttccttaagtacatgatcctgcagtttctatatgtttcgaagttgtagaaggcagtttattgggggatggtactgacaggactcaggtaactacttttgtcgtcttagtgacatacttgtgctgtgccttcctgttttctcttatttctttggctaatactttgctggaggaatcattttgtactcaggtaaagtgaatgccgaagacagaagatttggatgatacaccactgactttctttgtttggaatacacgttatgaaccctttctggagcatgtctacaagctctgtacgcaaacgatctgaaggtgaagagaagacattaacaggggacgtgaaaaccagtcctccacgaactgcaccaaagaaacagctgc

SEQ ID NO: 106147 - DNA, 562 bp, Homo sapiens
  Payload ID: 810
  Gene Symbol: AKTIP
  Gene Name: AKT interacting protein
  ENST ID: ENST00000565408
  CDS Start-End: 154-562
agaggcaaccaaaaatggaccaaacaacccggccagagaatgcggcttctgagtgtaagacactgaggcggtgtcacagacaggtaaagtgaatgccgaagacagaagatttggatgatacaccactgactttctttgtttggaatacacgttatgaaccctttctggagcatgtctacaagctctgtacgcaaacgatctgaaggtgaagagaagacattaacaggggacgtgaaaaccagtcctccacgaactgcaccaaagaaacagctgccttctattcccaaaaatgctttgcccataactaagcctacatctcctgccccagcagcacagtcaacaaatggcacgcatgcgtcctatggacccttctacctggaatactctcttcttgcagaatttaccttggttgtgaagcagaagctaccaggcgtctatgtgcagccatcttatcgctctgcattaatgtggtttggagtaatattcatacggcatggactttaccaagatggcgtatttaagtttacagtttacatccctgataactatccagatggtgact

SEQ ID NO: 106148 - DNA, 1760 bp, Homo sapiens
  Payload ID: 811
  Gene Symbol: AKT1S1
  Gene Name: AKT1 substrate 1 (proline-rich)
  Uniprot ID: Q96B36
  ENST ID: ENST00000344175
  CDS Start-End: 112-882
ggcatggcctaagccggtcagctaaggccatgttaatacggggctgtcccatctctctgcggggcgcgacagctggaagagccgaacggataagagaagaggagggcgcggatggcgtcggggcgccccgaggagctgtgggaggccgtggtgggggccgctgagcgcttccgggcccggactggcacggagctggtgctgctgaccgcggccccgccgccaccaccccgcccgggcccctgtgcctatgctgcccatggtcgaggagccctggcggaggcagcgcgccgttgcctccacgacatcgcactggcccacagggctgccactgctgctcggcctcctgcgcccccaccagcaccacagccacccagtcccacacccagcccaccccggcctaccctggccagagaggacaacgaggaggacgaggatgagcccacagagacagagacctccggggagcagctgggcattagtgataatggagggctctttgtgatggatgaggacgccaccctccaggaccttccccccttctgtgagtcagaccccgagagtacagatgatggcagcctgagcgaggagacccccgccggcccccccacctgctcagtgcccccagcctcagccctacccacacagcagtacgccaagtccctgcctgtgtctgtgcccgtctggggcttcaaggagaagaggacagaggcgcggtcatcagatgaggagaatgggccgccctcttcgcccgacctggaccgcatcgcggcgagcatgcgcgcgctggtgctgcgagaggccgaggacacccaggtcttcggggacctgccacggccgcggcttaacaccagcgacttccagaagctgaagcggaaatattgaagtccagggagggagcgccccgggccgcgtccgccccgtcccacactacgcccccgccccactcccggggcctgctaatctgaggccgatccgggaccggcctccttgcgtctcccattcccaagattgtcccgcctctgccaatccccgccgtccttccagcccacgacctgccgcgccgaggagcggcatctgtcccgtttcccgattgggtctgtcgtctctctccgcctagcgacagattccttctattaagggattggctcgctgagttctaagctctaaatgggtcaactcctttgttttccgcctagcgacaagggatttgctcgcacggcattggctccatcccctagtcgctggacagctctttttttgattggctcaaatcctgtaaagggcttgaccagtctctacatagtcaccgtccgcttttcctgagttctccctcccaattggctccagcttcctgggggcgtggccaagccctcctcttcccagaattggcccggggccttcaatttacgttctttacactacggggactggggtcgtctttgcccacgtcccgacaacttgttccctgaccccctcagggatggccccaaactgtccctgcctctggcaccccctttcattggttccatccatccccacaacagcctgccaatcgaagcccgtccctgcatccaggatggtaccagctcccgcccctcgccccccacctccacaggtgccttaaagggccctcgtccacccaaggtggggggcaggggccctcactctccggccctggtgtgggggagagagtgaggggttgggggatcggcagttgggaggggcgctctgagattaaagagttttacctctgagataaa

SEQ ID NO: 106149 - DNA, 623 bp, Homo sapiens
  Payload ID: 811
  Gene Symbol: AKT1S1
  Gene Name: AKT1 substrate 1 (proline-rich)
  ENST ID: ENST00000391830
  CDS Start-End: 298-623
aaaccacattcccaaaactttccgttgcaaatttccaaactttcccagtttctaccctcagcctttcaaagtcccgcccctcattccagttcccacacccagccttcttcaggtcccactgctgaccgccagaccaaactcctacagctgccgcctgcatcccagaccgcctgcatcccgctcggagcgggtccgagccctgctccctcccagcgcaccttttccacgacacggatgacaccagcgatgagagagtctcggtcctgatacttcttagcgctggtgtgcagggcgcggatggcgtcggggcgccccgaggagctgtgggaggccgtggtgggggccgctgagcgcttccgggcccggactggcacggagctggtgctgctgaccgcggccccgccgccaccaccccgcccgggcccctgtgcctatgctgcccatggtcgaggagccctggcggaggcagcgcgccgttgcctccacgacatcgcactggcccacagggctgccactgctgctcggcctcctgcgcccccaccagcaccacagccacccagtcccacacccagcccaccccggcctaccctggccagagaggacaacgaggaggacgaggatga

SEQ ID NO: 106150 - DNA, 2025 bp, Homo sapiens
  Payload ID: 811
  Gene Symbol: AKT1S1
  Gene Name: AKT1 substrate 1 (proline-rich)
  Uniprot ID: Q96B36
  ENST ID: ENST00000391831
  CDS Start-End: 384-1154
atttcctgttttcttcctagaccagtgggtcctccctggaccccgggcgaggttgggaggtctcggggcagctgagcgtggccccaggcgctcaccccatggctaccgcgttcatgctcaggttcctcacatcttggggtgtggggtactaaaatttcgacaggaggggtggttccacccctctcctccttagctcttttccctcctccctgcatccaaagaggacagccacatcgtgctccccctcctgtggggaacacgtctcactttcctctaatctctccctgatcttacacgaaactcgtctatcggggcgggttcttcctccatctctcagctccttggaggaaacaggacctcctctagaagctgaaggggcgcggatggcgtcggggcgccccgaggagctgtgggaggccgtggtgggggccgctgagcgcttccgggcccggactggcacggagctggtgctgctgaccgcggccccgccgccaccaccccgcccgggcccctgtgcctatgctgcccatggtcgaggagccctggcggaggcagcgcgccgttgcctccacgacatcgcactggcccacagggctgccactgctgctcggcctcctgcgcccccaccagcaccacagccacccagtcccacacccagcccaccccggcctaccctggccagagaggacaacgaggaggacgaggatgagcccacagagacagagacctccggggagcagctgggcattagtgataatggagggctctttgtgatggatgaggacgccaccctccaggaccttccccccttctgtgagtcagaccccgagagtacagatgatggcagcctgagcgaggagacccccgccggcccccccacctgctcagtgcccccagcctcagccctacccacacagcagtacgccaagtccctgcctgtgtctgtgcccgtctggggcttcaaggagaagaggacagaggcgcggtcatcagatgaggagaatgggccgccctcttcgcccgacctggaccgcatcgcggcgagcatgcgcgcgctggtgctgcgagaggccgaggacacccaggtcttcggggacctgccacggccgcggcttaacaccagcgacttccagaagctgaagcggaaatattgaagtccagggagggagcgccccgggccgcgtccgccccgtcccacactacgcccccgccccactcccggggcctgctaatctgaggccgatccgggaccggcctccttgcgtctcccattcccaagattgtcccgcctctgccaatccccgccgtccttccagcccacgacctgccgcgccgaggagcggcatctgtcccgtttcccgattgggtctgtcgtctctctccgcctagcgacagattccttctattaagggattggctcgctgagttctaagctctaaatgggtcaactcctttgttttccgcctagcgacaagggatttgctcgcacggcattggctccatcccctagtcgctggacagctctttttttgattggctcaaatcctgtaaagggcttgaccagtctctacatagtcaccgtccgcttttcctgagttctccctcccaattggctccagcttcctgggggcgtggccaagccctcctcttcccagaattggcccggggccttcaatttacgttctttacactacggggactggggtcgtctttgcccacgtcccgacaacttgttccctgaccccctcagggatggccccaaactgtccctgcctctggcaccccctttcattggttccatccatccccacaacagcctgccaatcgaagcccgtccctgcatccaggatggtaccagctcccgcccctcgccccccacctccacaggtgccttaaagggccctcgtccacccaaggtggggggcaggggccctcactctccggccctggtgtgggggagagagtgaggggttgggggatcggcagttgggaggggcgctctgagattaaagagttttacctctg

SEQ ID NO: 106151 - DNA, 1911 bp, Homo sapiens
  Payload ID: 811
  Gene Symbol: AKT1S1
  Gene Name: AKT1 substrate 1 (proline-rich)
  Uniprot ID: Q96B36
  ENST ID: ENST00000391832
  CDS Start-End: 263-1033
gggcgcgacagctggaagagccgaacggataagagaagaggaggtgagaggagctgtacaccacaagaggcactgagggactcaggataacgggatgaagccgtcagtgcccccagaaacgaagcggccccggacgaatttctgagtcaccgtcgcgagaaagcgggctgagccgccattttgaagcctggcaaaccgaagcaagaaatgctgccgtgttggatctttgccagccttcgtgccgaatgggagcagggcgcggatggcgtcggggcgccccgaggagctgtgggaggccgtggtgggggccgctgagcgcttccgggcccggactggcacggagctggtgctgctgaccgcggccccgccgccaccaccccgcccgggcccctgtgcctatgctgcccatggtcgaggagccctggcggaggcagcgcgccgttgcctccacgacatcgcactggcccacagggctgccactgctgctcggcctcctgcgcccccaccagcaccacagccacccagtcccacacccagcccaccccggcctaccctggccagagaggacaacgaggaggacgaggatgagcccacagagacagagacctccggggagcagctgggcattagtgataatggagggctctttgtgatggatgaggacgccaccctccaggaccttccccccttctgtgagtcagaccccgagagtacagatgatggcagcctgagcgaggagacccccgccggcccccccacctgctcagtgcccccagcctcagccctacccacacagcagtacgccaagtccctgcctgtgtctgtgcccgtctggggcttcaaggagaagaggacagaggcgcggtcatcagatgaggagaatgggccgccctcttcgcccgacctggaccgcatcgcggcgagcatgcgcgcgctggtgctgcgagaggccgaggacacccaggtcttcggggacctgccacggccgcggcttaacaccagcgacttccagaagctgaagcggaaatattgaagtccagggagggagcgccccgggccgcgtccgccccgtcccacactacgcccccgccccactcccggggcctgctaatctgaggccgatccgggaccggcctccttgcgtctcccattcccaagattgtcccgcctctgccaatccccgccgtccttccagcccacgacctgccgcgccgaggagcggcatctgtcccgtttcccgattgggtctgtcgtctctctccgcctagcgacagattccttctattaagggattggctcgctgagttctaagctctaaatgggtcaactcctttgttttccgcctagcgacaagggatttgctcgcacggcattggctccatcccctagtcgctggacagctctttttttgattggctcaaatcctgtaaagggcttgaccagtctctacatagtcaccgtccgcttttcctgagttctccctcccaattggctccagcttcctgggggcgtggccaagccctcctcttcccagaattggcccggggccttcaatttacgttctttacactacggggactggggtcgtctttgcccacgtcccgacaacttgttccctgaccccctcagggatggccccaaactgtccctgcctctggcaccccctttcattggttccatccatccccacaacagcctgccaatcgaagcccgtccctgcatccaggatggtaccagctcccgcccctcgccccccacctccacaggtgccttaaagggccctcgtccacccaaggtggggggcaggggccctcactctccggccctggtgtgggggagagagtgaggggttgggggatcggcagttgggaggggcgctctgagattaaagagttttacctctgagataaa

SEQ ID NO: 106152 - DNA, 3640 bp, Homo sapiens
  Payload ID: 811
  Gene Symbol: AKT1S1
  Gene Name: AKT1 substrate 1 (proline-rich)
  Uniprot ID: Q96B36
  ENST ID: ENST00000391833
  CDS Start-End: 1991-2761
ctggattagaatatctgccctcctaaaggcaggcaggatggcggtcaggatttagaacaggccccggatctagactttctgagtccaggtcccagccctgcctcttccagttgtggcccttcaagatgctgactgcccctgggcctgagtttgcaactgtaaaatggggtgaactgtaactaaagctcctgtctcatagtgtaggtgaaagggtgggatgagaaggttgatcccatcttgggtccttgcgtggcttctgggaggtggtggataaacctcttccttcccttggggctttgaactccctgagtgagtcagataggtgagatgccaggtgtggaatcccagcactgaataggtgctcagcaaacaccaacatcaatgatcgtgagtcataaaaggcctgcaaatttcattcagactccagactccctgctcccttcaccctggtgggctggaccacagctgtgcctgaatccgtgcagtggcggtgtgcttactgcctcccggaagagcgtcttccgcagcccagcagctctggctcaaccacgctggttaatggggaagaaaatgaggcacagagagggccagtgagccatctaaggtcacacagcaggtttgagacagagtcagggcaaggacccagcccccctgccctcgctcttctcacccagtaaggagacgcaccctgcattgtctgcttagggccgacctgtcctgcaaacacaaatccctgaccttgggggaattcacagtctgatgcaggaggcagccaggttacagctgtcacaagctcaggtgacatgaatgctcatggaggaagcccagggcatcggatgggctcctgaagtcatctgatgcaccctgggggatcagggacaacagaggacctgccagaacagtcttgtaggaaaagccgtgtggatttcccagcacagagagcagcgccagcaccatttcagccccgactctctgaggcctcagtcatagaaccagccagttccctctggaaggaagtgtgctgggaaggtggccactcagacagtgtgggaccccctatggagcagactggctggatctatgggcgagggaaagtttcttccaccctaggatgagtgaaaggttggtggggaatggagcacaagtcatcaaggtcagggaccacgttttctgaaggcctcgggcctcagaggctctggaaggccgtggaggcaggatggcccaggagctggggatggccagaacacctagagcctccagggcctgccctgaggactatggcgaggagtagcatcagctccgggtgctgaaggaaccccctgggccttgtgcaggacactcttgacgggatggctgggcgacggagcagggtggcatcatccatcaaattcaacacaagccccacgtggaattctaaattttctagacaccatgttaaaagagtaaaaaaagcagatgaaattcctttttttttttttttttgcccaggctggcttcgaactcttgggctcggtgatccgcctgcctcggcctcccaaagtgctggggttgcaggcctgagccaccacgcccggctcgttcggctttattgtactcagtcttcagaacccagtgcaggttttattgttagaggcctctctgctaggactctctgctaggactccctgcctttccagtactccctgttcacatgtggctggcggctcccacagaggccagggcagggccaaaggggaaggagtacagtgacttggggcaggaggaatgggttggggcagaggacgtcgccagggtctgggcctgcgaggactggatggtgagaatcctggggagtagcaggtttggggaggacacacagcaccgctgggacaaggtgggtggagggtggtgagtgccatccaggggacgggcgggcactctgagtgggtggcgatgatgtaggccgccaagcctcagccccctctgtcctgctctggcccgcagggcgcggatggcgtcggggcgccccgaggagctgtgggaggccgtggtgggggccgctgagcgcttccgggcccggactggcacggagctggtgctgctgaccgcggccccgccgccaccaccccgcccgggcccctgtgcctatgctgcccatggtcgaggagccctggcggaggcagcgcgccgttgcctccacgacatcgcactggcccacagggctgccactgctgctcggcctcctgcgcccccaccagcaccacagccacccagtcccacacccagcccaccccggcctaccctggccagagaggacaacgaggaggacgaggatgagcccacagagacagagacctccggggagcagctgggcattagtgataatggagggctctttgtgatggatgaggacgccaccctccaggaccttccccccttctgtgagtcagaccccgagagtacagatgatggcagcctgagcgaggagacccccgccggcccccccacctgctcagtgcccccagcctcagccctacccacacagcagtacgccaagtccctgcctgtgtctgtgcccgtctggggcttcaaggagaagaggacagaggcgcggtcatcagatgaggagaatgggccgccctcttcgcccgacctggaccgcatcgcggcgagcatgcgcgcgctggtgctgcgagaggccgaggacacccaggtcttcggggacctgccacggccgcggcttaacaccagcgacttccagaagctgaagcggaaatattgaagtccagggagggagcgccccgggccgcgtccgccccgtcccacactacgcccccgccccactcccggggcctgctaatctgaggccgatccgggaccggcctccttgcgtctcccattcccaagattgtcccgcctctgccaatccccgccgtccttccagcccacgacctgccgcgccgaggagcggcatctgtcccgtttcccgattgggtctgtcgtctctctccgcctagcgacagattccttctattaagggattggctcgctgagttctaagctctaaatgggtcaactcctttgttttccgcctagcgacaagggatttgctcgcacggcattggctccatcccctagtcgctggacagctctttttttgattggctcaaatcctgtaaagggcttgaccagtctctacatagtcaccgtccgcttttcctgagttctccctcccaattggctccagcttcctgggggcgtggccaagccctcctcttcccagaattggcccggggccttcaatttacgttctttacactacggggactggggtcgtctttgcccacgtcccgacaacttgttccctgaccccctcagggatggccccaaactgtccctgcctctggcaccccctttcattggttccatccatccccacaacagcctgccaatcgaagcccgtccctgcatccaggatggtaccagctcccgcccctcgccccccacctccacaggtgccttaaagggccctcgtccacccaaggtggggggcaggggccctcactctccggccctggtgtgggggagagagtgaggggttgggggatcggcagttgggaggggcgctctgagattaaagagttttacctctgagataaat

SEQ ID NO: 106153 - DNA, 1849 bp, Homo sapiens
  Payload ID: 811
  Gene Symbol: AKT1S1
  Gene Name: AKT1 substrate 1 (proline-rich)
  Uniprot ID: Q96B36
  ENST ID: ENST00000391834
  CDS Start-End: 195-965
cttcttcaggtcccactgctgaccgccagaccaaactcctacagctgccgcctgcatcccagaccgcctgcatcccgctcggagcgggtccgagccctgctccctcccagcgcaccttttccacgacacggatgacaccagcgatgagagagtctcggtcctgatacttcttagcgctggtgtgcagggcgcggatggcgtcggggcgccccgaggagctgtgggaggccgtggtgggggccgctgagcgcttccgggcccggactggcacggagctggtgctgctgaccgcggccccgccgccaccaccccgcccgggcccctgtgcctatgctgcccatggtcgaggagccctggcggaggcagcgcgccgttgcctccacgacatcgcactggcccacagggctgccactgctgctcggcctcctgcgcccccaccagcaccacagccacccagtcccacacccagcccaccccggcctaccctggccagagaggacaacgaggaggacgaggatgagcccacagagacagagacctccggggagcagctgggcattagtgataatggagggctctttgtgatggatgaggacgccaccctccaggaccttccccccttctgtgagtcagaccccgagagtacagatgatggcagcctgagcgaggagacccccgccggcccccccacctgctcagtgcccccagcctcagccctacccacacagcagtacgccaagtccctgcctgtgtctgtgcccgtctggggcttcaaggagaagaggacagaggcgcggtcatcagatgaggagaatgggccgccctcttcgcccgacctggaccgcatcgcggcgagcatgcgcgcgctggtgctgcgagaggccgaggacacccaggtcttcggggacctgccacggccgcggcttaacaccagcgacttccagaagctgaagcggaaatattgaagtccagggagggagcgccccgggccgcgtccgccccgtcccacactacgcccccgccccactcccggggcctgctaatctgaggccgatccgggaccggcctccttgcgtctcccattcccaagattgtcccgcctctgccaatccccgccgtccttccagcccacgacctgccgcgccgaggagcggcatctgtcccgtttcccgattgggtctgtcgtctctctccgcctagcgacagattccttctattaagggattggctcgctgagttctaagctctaaatgggtcaactcctttgttttccgcctagcgacaagggatttgctcgcacggcattggctccatcccctagtcgctggacagctctttttttgattggctcaaatcctgtaaagggcttgaccagtctctacatagtcaccgtccgcttttcctgagttctccctcccaattggctccagcttcctgggggcgtggccaagccctcctcttcccagaattggcccggggccttcaatttacgttctttacactacggggactggggtcgtctttgcccacgtcccgacaacttgttccctgaccccctcagggatggccccaaactgtccctgcctctggcaccccctttcattggttccatccatccccacaacagcctgccaatcgaagcccgtccctgcatccaggatggtaccagctcccgcccctcgccccccacctccacaggtgccttaaagggccctcgtccacccaaggtggggggcaggggccctcactctccggccctggtgtgggggagagagtgaggggttgggggatcggcagttgggaggggcgctctgagattaaagagttttacctctgagataaatgtgaa

SEQ ID NO: 106154 - DNA, 3075 bp, Homo sapiens
  Payload ID: 811
  Gene Symbol: AKT1S1
  Gene Name: AKT1 substrate 1 (proline-rich)
  Uniprot ID: Q96B36
  ENST ID: ENST00000391835
  CDS Start-End: 1374-2204
attgccccgggaccaaggcggggagaatggtccagcccgcgttcggatgctgacgtgcgttccacagggggcagggctcaaggagtcgcctgagccgggggggcggggccatgggaggttcttccctggggcggtggacgggagggtgacggcgcgtttataagagatcggtgtttgccaaggccgtgccggattctcgagagccaaggcctgagagaagagctgatcactagacggggcgtttcgcatacactgaagcgagggaatgcgtcctcagtgcttaccctgtagccggctccttccatagtcgccgccgaaggccccactgccccgcctcctccttttcctagtcagcgtgttgtcacttccggagaaaacagttcccctccgggccggacagtggtagcggcccgacccgttctagagaaggagcgggtgaaaccatttttcagaagggggttattccactggaacctcgagggtggatcggagtcacgtggcgcagacgctgaaggtggatccggctacggagagtgcgcaggcgcagtgttcgccctctcgccacgaagtaaacaagtgggagggtctgagagctgcaccacctggggcaagcacgccttgaaacgcccacttccttctccatattgtatactggaattgaagccaaggaggtaccattttgctcgagggcatggcctaagccggtcagctaaggccatgttaatacggggctgtcccatctctctgcggggcgcgacagctggaagagccgaacggataagagaagaggaggtgagaggagctgtacaccacaagaggcactgagggactcaggataacgggatgaagccgtcagtgcccccagaaacgaagcggccccggacgaatttctgagtcaccgtcgcgagaaagcgggctgagccgccattttgaagcctggcaaaccgaagcaagaaatgctgccgtgttggatctttgccagccttcgtgccgaatgggagcaggttggagggagggagagccaatatacactatgggctgattaagcccggttggctgccatgttgttaacgagcaccgatttcctctacttttgtcgaagaagtttattgtgggtcagggacgtcaggtcgcttgccttcgtttactgtggtcatgattgagcatatgaggacggccattattgttgggggcaaatggaaatgctctaggcggggccatttttcttaggggcaagctgtcgtcacccttgtcaactggttcggatgaagcccctgtggccgccatcttgatctcgggcggccccgataagggaggcggagtgtgcggagaggaggcggggcaactgcgcggacgtgacgcaaggcgccgccatgtcttttgagggcggtgacggcgccgggccggccatgctggctacgggcacggcgcggatggcgtcggggcgccccgaggagctgtgggaggccgtggtgggggccgctgagcgcttccgggcccggactggcacggagctggtgctgctgaccgcggccccgccgccaccaccccgcccgggcccctgtgcctatgctgcccatggtcgaggagccctggcggaggcagcgcgccgttgcctccacgacatcgcactggcccacagggctgccactgctgctcggcctcctgcgcccccaccagcaccacagccacccagtcccacacccagcccaccccggcctaccctggccagagaggacaacgaggaggacgaggatgagcccacagagacagagacctccggggagcagctgggcattagtgataatggagggctctttgtgatggatgaggacgccaccctccaggaccttccccccttctgtgagtcagaccccgagagtacagatgatggcagcctgagcgaggagacccccgccggcccccccacctgctcagtgcccccagcctcagccctacccacacagcagtacgccaagtccctgcctgtgtctgtgcccgtctggggcttcaaggagaagaggacagaggcgcggtcatcagatgaggagaatgggccgccctcttcgcccgacctggaccgcatcgcggcgagcatgcgcgcgctggtgctgcgagaggccgaggacacccaggtcttcggggacctgccacggccgcggcttaacaccagcgacttccagaagctgaagcggaaatattgaagtccagggagggagcgccccgggccgcgtccgccccgtcccacactacgcccccgccccactcccggggcctgctaatctgaggccgatccgggaccggcctccttgcgtctcccattcccaagattgtcccgcctctgccaatccccgccgtccttccagcccacgacctgccgcgccgaggagcggcatctgtcccgtttcccgattgggtctgtcgtctctctccgcctagcgacagattccttctattaagggattggctcgctgagttctaagctctaaatgggtcaactcctttgttttccgcctagcgacaagggatttgctcgcacggcattggctccatcccctagtcgctggacagctctttttttgattggctcaaatcctgtaaagggcttgaccagtctctacatagtcaccgtccgcttttcctgagttctccctcccaattggctccagcttcctgggggcgtggccaagccctcctcttcccagaattggcccggggccttcaatttacgttctttacactacggggactggggtcgtctttgcccacgtcccgacaacttgttccctgaccccctcagggatggccccaaactgtccctgcctctggcaccccctttcattggttccatccatccccacaacagcctgccaatcgaagcccgtccctgcatccaggatggtaccagctcccgcccctcgccccccacctccacaggtgccttaaagggccctcgtccacccaaggtggggggcaggggccctcactctccggccctggtgtgggggagagagtgaggggttgggggatcggcagttgggaggggcgctctgagattaaagagttttacctctg

SEQ ID NO: 106155 - DNA, 438 bp, Homo sapiens
  Payload ID: 811
  Gene Symbol: AKT1S1
  Gene Name: AKT1 substrate 1 (proline-rich)
  ENST ID: ENST00000599525
  CDS Start-End: 339-438
caggctggcttcgaactcttgggctcggtgatccgcctgcctcggcctcccaaagtgctggggttgcaggcctgagccaccacgcccggctcgttcggctttattgtactcagtcttcagaacccagtgcaggttttattgttagaggcctctctgctaggactctctgctaggactccctgcctttccagtactccctgttcacatgtggctggcggctcccacagaggccagggcagggccaaaggggaaggagtacagtgacttggggcaggaggaatgggttggggcagaggacgtcgccagggtctgggcctgcgaggactggatgggcgcggatggcgtcggggcgccccgaggagctgtgggaggccgtggtgggggccgctgagcgcttccgggcccggactggcacggagctggtgctgctgaccgcgg

SEQ ID NO: 106156 - DNA, 359 bp, Homo sapiens
  Payload ID: 812
  Gene Symbol:
  Gene Name: AL008723.1
  ENST ID: ENST00000623133
  CDS Start-End: 9-347
gtggtcagctggatcctccctttgcggtgaacagattctctgcagactcccaggtcccattctgtgcttgttcccacgtccacctcccagcagtggcggccacaggtaaagcgaggggagcccaggatgcaaacggacacgtcaaatctctcggcaaggtcttgccgattctgtctgatgcgcccacttcggacgctcctgaggtcgtcagaaatgaggaggaagttgttggctgtgttggcatccaaggtcatatccactgtgaaaaggaaaaaaagttgctcagcaaatggacagaaaccaaccctatgcctctcttctacttcaaaggcccaaatatctcttgactttagtttctt

SEQ ID NO: 106157 - DNA, 552 bp, Homo sapiens
  Payload ID: 813
  Gene Symbol:
  Gene Name: AL021546.6
  ENST ID: ENST00000551806
  CDS Start-End: 1-505
gtcgagtggcgcccatggcgaagagggctcagctcgcatgtggaagactctcaccttcttcgtcgcgctccccggggtggcagtcagcatgctgaatgtgtacctgaagtcgcaccacggagagcacgagagacccgagttcatcgcctacccccatctccgcatcaggaccaagggcagtggccggatcacggctgcggtgatcgagcacctggagcgtctagcgcttgtggacttcggcagccgcgaggcagtggcgcgactggagaaagctatcgccttcgccgaccggctacgcgccgtggacacagacggggtggagcccatggaatcggtcctggaggacagatgtctatacctgagatccgacaatgtggtagaaggcaactgtgctgatgaattactacaaaactcccatcgcgtcgtggaggagtactttgtggcccccccaggtaatatctctttgccaaagctggatgaacaagagccattcccacacagctgagtagctcattctggaaagggggtactctgtgaacatgtggaagcata

SEQ ID NO: 106158 - DNA, 841 bp, Homo sapiens
  Payload ID: 814
  Gene Symbol:
  Gene Name: AL022578.1
  ENST ID: ENST00000624399
  CDS Start-End: 11-742
aggagtcaacatggagaagttacggaagtgggtgctttgggacgttcggtacccctcggcggcgtggtcaggtggggaacatggccgcgcccacgtcgcgcttccccatgggatacaccatgttggaggagtgtccatccgtattgaggatgaggacacctctgaactcacagagcaggctgtgagtttagagctgtctgctctaaactcaggtggagctgtcccgctggtggcagggagcacgggtggggacgtttctctgggcgggctaactggaggagggggtctttggacctgtagtctatggatctgtgtgataccgctccgagaaactgaagggcctcttggaaagaatcaggggcggccgcggctatctcctggcagataccacaggatgagaagcggggagatgtcaggctggttacaggcttctcctaggacataccacaaggggaggaggaggaggagaaatcatggttatgcaagccctcctaggatatgccatgaggtgggaaaaagggagaactcagagtgctgggttcccctcctgctgtgcctgtggggcttggatgcgaggtttgaatgctgcagcaatttaccttatctcccactccatctaccccagctaaaaagggactacgtagtaccaatactaataatttttaatgtgtccttagtccaatgcaatatgtcaataaaaatctttaggaaactttattatttttatttcctcatgaagtaaaatatatgtggtcatggtgcccttactttggaaatgtagctttaatacaaggctctgcttctacccttcaaccagtttgctgctccatatcacctccaa

SEQ ID NO: 106159 - DNA, 2073 bp, Homo sapiens
  Payload ID: 815
  Gene Symbol:
  Gene Name: AL023806.1
  ENST ID: ENST00000625058
  CDS Start-End: 150-755
ccagtagagtgagatgctgctgaaaagatacccaaaaatgtgtaagcgactttggaactgggtagcaggcagaagttggaaaagtttggagggctcagaagaagacaggaaaatgtgggaaagtttggaacttcctagaaacttgaagaatggctttgaccaaaatgctgataatgatatggacaatgaaatccaggctgagctggtctcagatggagatgaggaacttgttgggaattggagctaaagtgactcgttatgttttagcaaagagactggtggcattttgcccctgccctaaagatttgtggaactttgaacttgagagagatgatttagggtatctggtggaagaagtttctaagcagcaaagcattcaagaggtgacttgggtgctgttaaaggcattcagttttataagggaagcagagcataaaaggttggaaaatttgcagcctgataatgtgatagaaaagaaaatcctattttctgaggagaaatttaagctggctgcaaaaatttggataagtaatgaggagctgaatattaatccccaagacaatggggaaaatgtctgcagggcatgtcagaggtcttcacagcagctcctcctgtcacagacctggaggcctagaaggaaaaaatggtttcatggtctgggcccaaggcccccttgctctgtgcagcctaaggacttggtgccttgcgtcccagccactccagccatggctaaaaggggccaaggtacagtttgagccattgcttcagagagtgcaagccccaaggcttggcagcttccatgtggtgctgagcctgcaggtgcacagaagttgagaattgaggtttggaacctctgcctagatttcagaggatgtacggaaatgcctggatatgcccaggcagaagaagtttgctgcagggacaaaggcctcatggagaacctctgccagggcagtgcagaagggaaatgtggggtcagagcccccacacagagtccctaccgaagcactgcctagtggagctgtgagaagagggtcaccgtcctccagaccccagaatggtgaatccactgacagcttgcactgtgcacctggaaaagccgtagacaatgccagcccatgaaagcagccaggagaggggctattccctgcaaagccacatgggtggagctgcccaagaccatgggaacccacttcttgcattggcatgacctggatgtgagtcatggagtcaaaggagatcattttggaactttaagacttgactgccccaatgattttggacttgcatgggcctttagccctttgttttggtcagtttctcccatttgcaatgagtgtgtttatccaatgtctgtgcccccatttcatctagaaagtaattaacttgcttttgattttactggttcataggtggaagggacttgccttatctcagatgaggctttggactttggccttttgagttaaggctgaaatgagctaagactttgtgggatggttgggaaggcatgattggttttgaaatatgaggacatgagatttgggagggaccaggagtggaatgatatggattggctttgtcctcactcaaatctcatctttaattgtaactcccacaattcccacatgttgtgggagggacccagtgggaggtaaacgaatcatgagggtgggtctttcccatgctattctcatgatagtgaatatgtctcatgagatctggtgcttttaaaaatgggagtttcctctcacaagttctctctcttttcctgttgccatccatgtaagatatgacttgtcctgcttgccttctgtcatgattgtgaggtttccccagccacgtggaactgtaattccattaaacctatttttcttcccagtctcgggtatgtctttatcggcagcatgaaaacagactaatacagaaggcattcagtagaggtttgttaatctaataatgaaaaatgattgaatagtgtcgtgtcagttagcttttgctgcataacatgaaatcctaaaagtttgttgtttaagcaacaatataattagctcatgattggttggctcagca

SEQ ID NO: 106160 - DNA, 375 bp, Homo sapiens
  Payload ID: 816
  Gene Symbol:
  Gene Name: AL023875.1
  ENST ID: ENST00000625088
  CDS Start-End: 1-375
atgactcttaacgagcatgctgccttcaagcatctgtttaacaaagcacatcttgcaccacccttaatccatttaaccctgagtggacacagcacatgtttcagagagcacagggttgggggtaaggtcacagatcaacaggatcccaaggcagaagaatttttcttagtaccgaacaaaatgaaaagtctcccatgtctacctctttctacacagacacggcaaccatccgatttctcaatcttttccccacctttcccccctttctattccacaaaaccgccattgtcatcatggcccgttctcaatgagctgttgggtacacctcccagatggggtggtggcctggcagaggggctcctcacttcccagtag

SEQ ID NO: 106161 - DNA, 1864 bp, Homo sapiens
  Payload ID: 817
  Gene Symbol:
  Gene Name: AL049794.1
  ENST ID: ENST00000623513
  CDS Start-End: 1275-1634
gggtggatcacttgaggtcaggagttcgagaccagcctgaccaacacgatgaaaccctgtctctactgaaaatacaaaaattagctgggtgtagtggcaggcacctgtaatcccagctactcaggaggctgaggcaggagaattgcttgaacccagaaggttgcagggagccaagatcacaccactgcactctgtcttaaaaaaaaataataaattaaaatagaaagttaaaacataggaatatataagcacatatttccttagctatcagaaatgtgagtgtgaaaaagacaaataatatgctggtgtcataatgaaaataattttaaccttgcagagccccccaagacctttaaaaacctctgggctgcgtgtcaggatacagtggtctccaagctaggcacagttcttgcctttgttgtactggatgctgtggtgctgtggaagcccatggtggggggttgggtctaacagacttgtggcatcaggaagggtacttggagagacagacctgaagtggagactagcctgggacaacaggtgtagtggtggatggagcagcatgtgggaggcccagaggcctcacctgaaaacctcaacgaagctcataatggctgcgtgttaatattgcatatgctgggatgataccagcagtttgagttctctggcttcagcgtgatatgattttatccacttgtttattttcagaggcacatgtagctgttctcaattcccttctctgtatgacttataggaagctaaaggcttccttgtgttagggagcttcctatttcaagtgctgagctgggtttgtcaagctttgaaaatgcagacagagccatgaaacctaagggggactcagaggaagtgtccatgtgcaggagagacaaggctgaattaaaaggcatgattaatcacaaaagagtggaagagtgatgcttgagagttgaggacgtgagtaaaacagaagtagaactgctcatttgatgtcatcacgttatctcaagatgagccctcttggcctcagacagtgggtagcattacattatatgttagctccgcgcccccacgcccaccctccttctttgaaatgatgtctaaattagaggtgtaactgtcccaccaggtgcaacttgagccttcctttgccctcctgtagctgtcgtgggaggggggcctgctttcttgggcacagactgtttggtcagctgagccacagaaatgaggccaggcctgtgttgctctctgtctatgcttgattgcaaggaacactgatgatatcagagggctttcttacctcaagcccttctggcttaaggacaaggttatttctttcatttctgtctgcaaactgtggtagtgtattcgatttcaaggattctgggatgaattcttcaatgataagaacctgctattattgtccctgctttacagctccagggattggcagcctcattcttcaaaagttgcacacctttagggccttgggaggtacaggcaccagcaaggagtcagaaggaatgaaagctggagagatgcggcccacactggaaagacaggaggaaaggagagagaaagcgcctcggccaggcacagtggctcatgcctgtaatcccagcactttgggaggctgaggcgggagatcacctgaggtcaggagactgagaccagcttgaccaacatggtgaaaccccatctctactaaaaatacaaaactagccgggcatggtggcgagtgcctgtaatctccgctacttaggaggctgaggcaggagaattgcttgaaccaggaggcggaggttgcagtgagctgagatcgtgccattgcactccagcctaggcaacaagagcaaaactgcatctc

SEQ ID NO: 106162 - DNA, 63 bp, Homo sapiens
  Payload ID: 818
  Gene Symbol:
  Gene Name: AL049872.1
  ENST ID: ENST00000624063
  CDS Start-End: 1-63
tcaagtatttttcattttccaggtggtccccctgctgctgctgctgctgctgctgttgctgct

SEQ ID NO: 106163 - DNA, 171 bp, Homo sapiens
  Payload ID: 819
  Gene Symbol:
  Gene Name: AL109927.1
  ENST ID: ENST00000624809
  CDS Start-End: 1-171
atgatcctagaaagtgggagaaagaaaggaggtagtggaaggcctaggaaagagccagggcagtctattgaaaaggatataagaagcctttctctacaatgcaagtgttgtgaagacaggtctttatgggctatttcaaccccacccccaattgtcatattacatggttag

SEQ ID NO: 106164 - DNA, 375 bp, Homo sapiens; identical to SEQ ID NO: 103504
  Payload ID: 820
  Gene Symbol:
  Gene Name: AL133335.1
  ENST ID: ENST00000624441
  CDS Start-End: 1-375

SEQ ID NO: 106165 - DNA, 99 bp, Homo sapiens
  Payload ID: 821
  Gene Symbol:
  Gene Name: AL133475.1
  ENST ID: ENST00000629867
  CDS Start-End: 1-99
gaatgtaaactccataatacaggaatttttgtctactttgttcattacagcatcaacagtgcctggtacattttattgaggtcattgttacacaagctc

SEQ ID NO: 106166 - DNA, 375 bp, Homo sapiens; identical to SEQ ID NO: 103451
  Payload ID: 822
  Gene Symbol:
  Gene Name: AL135745.1
  ENST ID: ENST00000623865
  CDS Start-End: 1-375

SEQ ID NO: 106167 - DNA, 93 bp, Homo sapiens
  Payload ID: 823
  Gene Symbol:
  Gene Name: AL135842.1
  ENST ID: ENST00000624892
  CDS Start-End: 1-93
agacagtctttgcaaagaagggtccagagcccccagagctgtggcagcagctggagcccccagactgctggccactgccactgccacagcagc

SEQ ID NO: 106168 - DNA, 375 bp, Homo sapiens
  Payload ID: 824
  Gene Symbol:
  Gene Name: AL136097.1
  ENST ID: ENST00000623714
  CDS Start-End: 1-375
atgactcttaacgagcatgctgccttcaagcatctgtttaacaaagcacatcttgcaccgcccttaatccattcaaccctgagtggacacagcacatgtttcagagagcacagggttgggggtaaggtcacagatcaacaggatcccaaggcagaagaatttttcttagtacagaacaaaatgaaaagtctcccatgtctacctctttctacacagacacggcaaccatccgatttctcaatcttttccccacctttcccccctttctattccacaaaaccgccattgtcatcatggcccgttctcaatgagctgttgggtacacctcccagacggggtggtggccgggcagaggtgctcctcacttcccagtag

SEQ ID NO: 106169 - DNA, 69 bp, Homo sapiens
  Payload ID: 825
  Gene Symbol:
  Gene Name: AL137164.1
  ENST ID: ENST00000626267
  CDS Start-End: 1-69
gagtatcaaaaatatatcattatgtcagatatcccagtatgtagtaaacaaaaaactcaaatacatttt

SEQ ID NO: 106170 - DNA, 375 bp, Homo sapiens
  Payload ID: 826
  Gene Symbol:
  Gene Name: AL137860.1
  ENST ID: ENST00000624078
  CDS Start-End: 1-375
atgactcttaacgagcatgctgccttcaagcatctgtttaacaaagcacatcttgcaccgcccttaatccatttaaccctgagtggacacagcacatgtttcagagagcacagggttggggataaggtcacagatcaacaggatcccaaggcagaagaatttttcttagtacagaacaaaatgaaaagtctcccatgtctacttctatccacacagacccggcaaccatccgatttctcaatcttttccccacccttcccgcctttctattccacaaaaccgccattgtcatcatggcccatccccaatgagccgctgggcacacctcccagacggggttgtggccgggcagaggggctcctcacttcccagtag

SEQ ID NO: 106171 - DNA, 57 bp, Homo sapiens
  Payload ID: 827
  Gene Symbol:
  Gene Name: AL138706.2
  ENST ID: ENST00000623337
  CDS Start-End: 1-57
ctggtacaactagtagttacatgtaaatatctattacatttttcttcaagtgaaact

SEQ ID NO: 106172 - DNA, 33 bp, Homo sapiens
  Payload ID: 828
  Gene Symbol:
  Gene Name: AL138751.1
  ENST ID: ENST00000626763
  CDS Start-End: 1-33
atctctactaaaaagggcaaggttacaagaagt

SEQ ID NO: 106173 - DNA, 54 bp, Homo sapiens
  Payload ID: 829
  Gene Symbol:
  Gene Name: AL139333.1
  ENST ID: ENST00000628460
  CDS Start-End: 1-54
agtacagtacttgctttaaaagacagactctcactcttttgcccaggctggagt

SEQ ID NO: 106174 - DNA, 57 bp, Homo sapiens
  Payload ID: 830
  Gene Symbol:
  Gene Name: AL158839.1
  ENST ID: ENST00000624855
  CDS Start-End: 1-57
ttagaagagatttattctcagccaaattttacagaagacctcctgagggctgtcctc

SEQ ID NO: 106175 - DNA, 54 bp, Homo sapiens
  Payload ID: 831
  Gene Symbol:
  Gene Name: AL162426.1
  ENST ID: ENST00000625046
  CDS Start-End: 1-54
agcaggtctaggcgtagctgccggccatgggggaggctactcgggaggttgggg

SEQ ID NO: 106176 - DNA, 3027 bp, Homo sapiens
  Payload ID: 832
  Gene Symbol:
  Gene Name: AL354822.1
  ENST ID: ENST00000612565
  CDS Start-End: 680-1411
ctgggacctcccctctccttgcggcatgctgggctttcccttagaaaaccccatgtcatttccttcaatggaacatgaatcagcttcacccacagtgtctgcatgtctctgtccatagcaaacgtttttattaccttaaaatatagatctttaccttaactagccaagacctaggaccctttttccaagctcttttagatgaagtaataaatgcaaatattagagatgtgtatatgtgtataaatatatggagaaaagatgttgcctagttgtacaaattagctttaatacaactcctgatttaaattatttaattgtgagaagggcgattctaactcaacacaccaacgaaataaaagccttatccctctgctccgccaaaatatcccatttagagcctgcgtgtgtgtgtacacacacgtgtgcactcatccccacctgaccgtatcaaattattatttaaactagatatttttactttgttgcatagtagtaatggtttctggaatgaaaaaataaaaaacaggagaataaaactgtttaaatgtatctccgggtgaacgctgtggccactgcacggaccccgtcgatggcgcccagtacctgcgtctcaggaagaggttctggcggggcctccgcctgaggccgcgcccctgggacctgtcccgcgtccacgtgaatgcggagcgcagcattcaccatcccctccctgaaacagcggtccccgaggtgctccacaggcagggccgagctgggcaagggggagcccagcccctgcacgggccgccctgagcagcggggacgcaggaagagctcgctggctccaccagcccctaccccagatgcgggacctcagaccagcaaggacctggagcccccaccccacggttgccaggaggcggacaggggcggctcctggggggctaccacctcgaggccgttccgccagaacttgagcgacttgggaaggcacagtgtcctgcccttgaagaggaacctgtgtcctggaggcagcagcctgggagctcctcctctgaggacaccgcagaggcgagtgactctggcggcgcagcgctggctttcccgtccgcagaggagagctgtggggctgggtgagctggaccagggagcacagctggctgctctcggcctccgatggggagtggacagcttagggggttgcccccgtgccagccagcctgctggccactctgggcttcatcacaccctcacctgcctgcgcaggcacctagcactgcaggctggagcttctggccatgctggtcaacttccccaacgagcctctgctgcctgggaacagcaaggccagagctacaccgccctgcacttggcagccatgtaccttggagatggtgaagctgctagtgggaacataggacgccgatgttgacatcagggactacactgggaaaagggcctcccagcatgtgagtcagagcatcacagaagagattgagaccctgatgggagtcctggacaaggacgatggggagagcaccgccagcagcgggggtgagtactggaagatttaaaagctgccccctccatctcaccacctacaaactctcacacgtcctggaagatggggggaccctctccaccatcaccacttggctgaaggtggtccagacgtgaagccaaggattccaaggcgcacagcctcgggcaggactaatggacttaaaaaacacaggctcaacaaaatccacttcacaacccagatggttcatatcacaccctctttcaaggacccagagcagccactggaagagaaggagtaggaacgctctcttaaagtccacttatcctattccttcaaattaagaccaaagtccaatgtatttaggtaaaaaataatttcttttagaaaatgctaaggtttgtcttctgaaatttaataacagaaacaaaaaaagaacactagatgtaatgaagtgagaccagaaaagacaaactaaactatccttactaggttggaatggatggggtggagttcctatcaggctagcattctggggaaagctgtattttttttttttggcggtggggggaaggtgtctcactctgtcgcccaggctggaatgcagtggcgccatctccgctcactgcaagctcagcccctcgggtttatgccattctccagccccagcctcccagtagctgggactacaggcgtccgccaccacacacggctaatttttttgtatttttagttgagacggtgtttcaccgtgttctccaggatggtctcgattcctgaattcgtgatccgcccgcctctgcctcccaaagtgctgggattacaggcgtgagccactgcgcctggccggatttctttttaagagattcatcataccttgacctgtgccccatttccctcctccacctgtctgacctggcattcctatttcgggagaccagaagtggggggaagagaagggatgactgtttctttgctttcaccattcctgcatgccatgcaaaggaaggaatattgcgcttttaaatatccgttttattaagtaagtggttactctttcaaagacaaaaaaaatgcaaattgttacaaaactggcagtatttgtaagtgcaagcactacacgctgccttgttcttttaccaattgcatttgcattttaaggtactacttgtacagccatggtggagaacagtttggaggttcctctaaacactgaaaatagaggtgccacatgatccagcaatcccactgttggatatataccccagaaataagaaatgagtatatcgaagaaattatctgcactcccatgttggttgcaccactgttgacaatagctaagatttggaagcaacctaagtgtccatcaacagattaatgtattaaagaaaatgtggtagatacacacagtggagtattattcagccctaaaaaagaatgagattcagtcatttgcaacaacatggaaggaactggatatcattatgttaagggaaataagccaagcacggaaaggcagacattgc

SEQ ID NO: 106177 - DNA, 1212 bp, Homo sapiens
  Payload ID: 833
  Gene Symbol:
  Gene Name: AL354828.1
  ENST ID: ENST00000623728
  CDS Start-End: 1-1212
atatttctaagagtttcctccagtgacaagcaactggactttctactccaggcaaaaataaataaatcacagagatttcccagaaggcaaaatgttccaattctgtggcaccgctgttcactacctacacatatacgaacccaaagatggaatgttcttatttcaaatctactctgtatatcatatcagaccatggggtttttttccctttcttttctttttttatgtttccttcgagaccttttaaaaacagaagtcttattaaaatctaatgaaaatcataatggcaatttaaaagttccagatgttagagtcatgctggagtgcagtggcgcgatctcggctcactgcaagctccgcctcccgggttcacgccattctcctgcctcagcctcccgagtagctgggactacaggcgcccaccaccacgcccggctaattttttgtatttttagtagaggcagagtttcaccgtgttatcacaaggtcagaagatcgagagcattctggctaacacgagaaaaccatccaaagaaatacaaaacaaaattagctgggcgtggtggtgggcgcctaccagctactcgggaggctgaggcaggagaatggcgtgaacctaggaggcagagcttgcagcggagatcaggccactgcactccagcctgggcaacagggagagactccatctcaaaaaaggtaggtcaacactgccgaaagcaacgggcgacagattgcttaaaagtggatgtgggccaggcgcagtggctcatgcctgtaatcccagcacttttgggaggccaaggcagccagatcacgagagaccagtctggcaaacatagtgaaaccccgtctctactaaaaatacaaaaaattagccgggtctggcagtgtgcacctgtaatcccagctactcgggaggctgaggcgggagaatcacgtgaacccaggaggcggaggttgcagccaagatcacaacactgcactccagcccaggtgacaactatgcacggtagcagaatatacatggccaaggaaggagaggtgggtatgggatggggggaagataaaatactgctccccgttacacacattacaccaccaccaccattactgtcaagcacatcatcattgcctacccccaccaataccatcaccgctatcatcaccaccattaccatcaacaccaaaactgaaaccaccaccactacaacc

SEQ ID NO: 106178 - DNA, 681 bp, Homo sapiens
  Payload ID: 834
  Gene Symbol:
  Gene Name: AL354828.2
  ENST ID: ENST00000624023
  CDS Start-End: 1-681
aggctggagtgcagtggcctgatctccgctcactgcaagctctgcctcctaggttcacgccattctcctgcctcagcctcccgagtagctgggactataggcgcccaccaccacgcccagctaattttttgtatttttagtagagacggggtttcaccgtgttatcacgaggtcagcagatcgagaccatcctggctaacacggtgtacatatatacgtaaatacaaaaaattagccgggcgtggtggtgggcgcctgccagctactcgggaggctgaggcaggagaatggcgtgaacccgggaggcggagcttgcagccgagatcgcgccactgcactccagcctgggcgacagagcgagactccgtctccataaaaaaaaaggatcatggaagactccaaaacaaagaagacacattgaaactctgttcaggaaaagttcgctggagcatgcctgtgatttctttgaacacgggagggaaagctacagcattgaggatgtctggagcaggctctgcactacacggtgaaaccccgtctctactaaaaatacaaaaaattagctgggcgtggtggcaggcgcctgtagtcccagctgctggggaggctgaggcaggagaatggcgtgaacccaggaggcggagcttgcatgagcggagattgcgtcactgcactccagcc

SEQ ID NO: 106179 - DNA, 510 bp, Homo sapiens
  Payload ID: 835
  Gene Symbol:
  Gene Name: AL356131.3
  ENST ID: ENST00000635558
  CDS Start-End: 1-510
atgggcaaagacatcatgaataaaacaccaaaagcaatggcaacaaaagccagaattgacaaatgggatctaattaaactaaagagcttctgcacagcaaaagaaactatcatcagaacgaacaggcaacctacagaatgggagaaatttttggcaatctatccatctgacaaagggctaatatccagaatctacatggataaaaacagaaactataaaaagttaaaaagcagggtgacaaagcaaagagtacaaccaatgaaggttgatttaaaatgggataaaaagggccgggagcggctgctcaggcctgtaatcccagcactttgggaggctgaggcaggcagatcacctgaggccaggagttggagaccaccctggccaacatggcaaaacccggtctctactaaaaatacaaaaattagctgggtgtggtggcagctgcctgtaatcgcagctactcgggaggctaaggcgggagaatggattgaacctgggaggcagaggttg

SEQ ID NO: 106180 - DNA, 33 bp, Homo sapiens
  Payload ID: 836
  Gene Symbol:
  Gene Name: AL356135.1
  ENST ID: ENST00000624857
  CDS Start-End: 1-33
atggcaaggagaaaattatcatgctttctcatt

SEQ ID NO: 106181 - DNA, 2640 bp, Homo sapiens
  Payload ID: 837
  Gene Symbol:
  Gene Name: AL356289.1
  ENST ID: ENST00000622918
  CDS Start-End: 1567-2139
ctttttttttttttttttttttttttgagacggagtcttgcactgttgcccaggctggagacagtggtgtgatcttggctcactgcagtctccacctctcagattcaagtgattctcctgcctcagcctcccaagtagctgggattataggtgcccgccaccctgcctggctaatttttgtatttttagtaaagatggggttttgtaacattggccaggctggtctcaaactcctgacctcaactgaactgcccccatcgggcttccaaagtgttgggattagaggtctgagctactgggcccgggcaaacttggaaacatttttttccttcctagtgcctcagttttctcaaatgtaaaatgggaataaaatatctaccttgtaagacttttgtgagggtctaataactgttatatacattatctcatttaatcttcacaacaacctttaaaatagggatacgatcattctcaatttacagttgagtgaaagtgaggcagttcagatggcttgactaaggttacctggcatttgagtggcagagccaagatttaaacccagctctgtctgatgctagaccctttgcttcaaccatattctgtaatgtctcatttctaggaatgaatgaaggaatgttcacacatgtatcatccagcctctgaggtgcctctgacaaccataattgcctcctcatgaaaccgagcccagttcctcctgtggctcttcctgctgcagccgtgggccttgctctcctggctggaagcgctgttttcatcttatctggggattctcattgctgacggtgctggaggctgtggggcacagtggtttcaagcacaggctttggagtcaggcaaacctgggtttcaatatggctcaggaagctgttgggcaggaggacttttggtgagcaggcactgtctgataatggtgtttcccaggatcccaggtttcttgggggcacacaagtaggccaaagatgatctgggaacctcccagagaattgcctcatactgtactctccccaagaggctgcagccaagagaataggggccacgtcacgggggctcatgatggagtctgggctttgtgggaaaggaagtggggagggtctcagaaatgtttttacaatgtaaaatcttccagttagaactttatatgcaggatttaatcagaaggaaatttggacaggactcatttttctcattgctgctctaagtggctgctctaagcagtctggactgtctcccctgtggctttgttgagttcagtaaacatttattgtgcacatactgtgtgcaggcactttgctggggatacagggatgaaatagggacagtgcccatgcctgagggcattgccctgaagctggatgctaaggccatctgtgtgtgtgtctgtgtgtctgcatgtatctctgtgtctgcgtgtgtctctgtgtctgtgcttctgtgtctatgtgtatgtctgtgtgagtgtctgtgggtctctttttttgtgtttgtgtgtgtatctgtgtgtgtgttctctgtgtgcctgtatgtgtctttgatgtgtgtttctgtatgtgtctctgtgtgtgtctatatgtgtgtatctgtgtctatgtatgtgtgtgtcattttgtttgtttctgggtgtgtctacctctgcgtgtctctgtatacctgtatctccgtgtgtgtgtctgtgtgtgtgtatttgtgtgtctctgtatgtgcgtccgtgggtgtgtgtctgtgtgtgtgtgtgtgtgtattgagagggagggagaaagaaagggagcgacagatgggtcagcatggaaggtgtatcctcattcacagccctgggaggaatcagtcaatccacctactggtcaagaccaactctggtggtgcctggctgacagtgggaatgtgacttttcatttaagaatgggtttgcatttcctaggaaaagaatgtaggagttggagtctcaaggagtgttttttttttccttttgtgattgagagagcacagccttgtgtgcattggctgacagttaccaatctgcgtgttggggatagccacagagaagagacagagggaaccgcagacagtgagcaggagtctggtggaaccagtctgcctttaggcccaaacccccaactatgaatacctcaccttagggagctcagtcttttgtttgttcataaaaaaccaatctgggaaccagaggtggacaggaaagaggaggctgacctgctgctcccaggttaatgtgatcttggctggtgttgacaagtgtattatggttcatagcatagcacaaacccttagagattccccttgccctcaccggggtcaccacaccaaaccaggtatcttcaggagtgaggaccacaaaaaattggagatctcaccagggtgggcagagatttctttgttaaagtctgaaggagagaagactcaggggcatctctctggctccaaatctctgaagggccaaaggcagaagtgctgggggagtgtcaagttttcatttacaacagggacagcctgacagtggctgccttatgtggcagtgagtttcagtcaacagtcaacagaggcccaacgactactcaccaatgggaccaggtggccatagagggctggggagggcagagcaaggac

SEQ ID NO: 106182 - DNA, 900 bp, Homo sapiens
  Payload ID: 838
  Gene Symbol:
  Gene Name: AL356585.2
  ENST ID: ENST00000624447
  CDS Start-End: 1-900
agccagaccctggcctcagcacaagctccagtgcagaccccagcacccactctgcctggtcctgctcttccagggcccttccctggtggccgtgtggtcaggctgcacccagtccttttggcctccactgtggacagctatgagagacgcaacaagggtgctgcccgagttatcgggaccctgttgggaactgtcaacaaacactctgtggaggtcaccaattgcttttcagtgtcatacaatgagtcagatgaagtggttgttgacatggaatttgctaagaacatgtatgaactgcataaaaaagtttctccaaatgagctcatcttggggtggtacgctgccggccatgacatcacagagcactctgtgctgatccatgagtactacagccgagaggcccccaaccccatccacctcactgtggacacaagtctccagaacggccatatgagcatcaaagcctatgtcagcactttaatgggtgtccctgggaggaccgtgggagtgttcacacctttgacagtgaaatatgcatactatgacactgaatgcatcagagttgacctgatcatgaagacctgctttagccccaacagagtggttggactctcaagtgacctgcagcaagtaggaggggcatcagctcacatccaggatgccctgagcatagtgttgcaatatgcagaggatatactatctgcaaaggtgtcagctgacaatacaatcaggaaggtgggccacttcctgatgagcctggttaaccaagtaccgaaaatagttcccgatgactttgagaccatgctccacagcaacatcaatgacctgttgatggtggcctacctggccaacctcacacagtcacagattgccctcaatgaaaaacgtgtaaacctgtga

SEQ ID NO: 106183 - DNA, 900 bp, Homo sapiens; identical to SEQ ID NO: 106182
  Payload ID: 839
  Gene Symbol:
  Gene Name: AL356585.3
  ENST ID: ENST00000629000
  CDS Start-End: 1-900

SEQ ID NO: 106184 - DNA, 649 bp, Homo sapiens
  Payload ID: 840
  Gene Symbol:
  Gene Name: AL357140.1
  ENST ID: ENST00000623863
  CDS Start-End: 25-408
ccaaaaggaaggaagtggacagaaatggatttgcaccattctgtccaaccagagtccttgctcctaagcacagcatcattttccttctcgttaattatcccttttaacagcaacgaaatgacctggccggcacacgagaacacagagatgaggccacaccttgtaatttctggggttctgagggggaccctggtggtggttctgggtgctgcggttctttcagtaaagaacttccaggagtttctaatcagctgctttcatcaagattctcataaccttctcctgctgccgctttcaagtgggtttgttcccgagcacattattaggaaagcggctataataactgcttacctgcctccggctccgctccacaaacacccgccaagcccacactgtgcaaaacagtagtaacacgcccgcctgagaatggctccgcggctccgcattgctgcctaagagctttcctgcatgtgatctcatttcatcctcaccgcaactccgggccggggaactcatgtccccggtgaggaagtccaggcttgagatcggcctcaacagtcggaggtggcaaagccagggcttgctcgaagccccaccttctcactgttggggagcaggctgactccaagctgtggaatcctgtgcaggg

SEQ ID NO: 106185 - DNA, 1268 bp, Homo sapiens
  Payload ID: 841
  Gene Symbol:
  Gene Name: AL358852.1
  ENST ID: ENST00000623174
  CDS Start-End: 71-619
ctggggctcttcctgcagcaccgggcgcggccaaccctcgcttccccagggcagggctcagctcgggtcaatgcaaccagccaagtcaggcccggagcgggccggctctgcccgccagtccaaacctctggaccctcgccagcggggatgggcgtgggccccggcggccaccgccccgccaactcgagcactggaggagcgcacccgctacgccagccccggacctacctggaggggagagcagagctcctggacagcggccacgggcctgagggcggacgctgaggcggccagagtccgtcccagcaaccccaagtatccctggtggggcagagcggggagacgaacgggggggctgccgcgggccagcgcggcccgtcccaggggtcgtgaggacctggctctccccttaacaccaggccaccgccgccgccgccgccattttgccttccactcagtgtcgccgccgccgcactccgctgcaggtttcccggatgtgggcatttcccggcgtcgcttgcgcgggggccgaggactgggggcttttgcccgcccggctgctgcgagggagcgcgcagcctgcggcctccgggcttcgttgcgtcgcccgcagctctgatcgttcgtgagcgtcgccccacgtcgctcccgcctgcccctgcccatacgactcgcccgcgcccgtgggttaaggctgtctcccgcccagcctacttggttgattcaatccttttccccattgatctatttctctggaccgagtagggatgtgcatttcacggagctacgttctcagaagggaacaactgagttgctctgggaaacctccctgtggacctcagaattccagatttttggcgctttgaaataaaattttattcttgcttagcgttctttccccgaacaagccggtgagcttccagcatctgtattttctgaatccggcagataagaaatgcttgagccaggaccgattgattagcagcggtttagagatcttatctgtcaaccgcatccgtagaaggagatcgttattgccataattggaataccggtgacggtgtgacaagaggttttacttctggttaagctgaatgtaaagtgtgggatgggatcgttgggtttgatgtataaggtacggtccaccctttgtgaagatcgcctttgccagtttttcctctaggaaatatacagttagtgttttcaagtaccttctttcgtaatttttctactacagagtacaaaaaaattaaagacatctttttctg

SEQ ID NO: 106186 - DNA, 2436 bp, Homo sapiens
  Payload ID: 842
  Gene Symbol:
  Gene Name: AL360294.1
  ENST ID: ENST00000624397
  CDS Start-End: 205-753
ggcgtctggacacccttcatcttttagccgttgccctgttcttggtgaactgcttgttaggaccaaaagtggcccacccctttctctgggacagtgcagagcaccggggccagaggctcaaagcacctccaagctgagatcagagactttggatatcgttgatccagaggcttccaaacttttcctggtgattgaattcttaccatgaaatccagtgaggagctccaatgcctcaagcagatggaagaggaactgctcttcttgaaggcagggcagggctctcagagggcaagactcaccccacccctgccacgggctctccagggtaactttggagccccagcactctgtggaatatggttcgcagaacacttgcatcctgctgttgggatgcccccaaactataatagcagcatgctcagtctttcaccagaaagaaccatcttatctggaggatggtcaggaaaacaaactcaacagccagtgcctcccctcagaactctgctcctgaggtctcctttcagtctgcataagtcctcccaacctgggagccccaaagcttctcagcggatccatcccctcttccattctatcccaaggtctcagctgcattctgttctgcttggtcttcctctcctcttcatacagactagaccttcaccccctgcccagtatggcgcgcaaatgccattgagatacatttgttttggtcccaatatcttttggggctccaaaaagccccagaaagagtaatgccttcagccatggcccatgtgatgacttttcccagagacagccccatgggtcagtgatcgccggtgggaggtctccccagcctcccttcaagccttcaagtctgtgtagaggcgccttctcttctctgggcattccccgctttgttgcagagaaattattttctactcagcggctttcaggtagagagagaaagtgcatgcggtatgaaggatgtgaagatggagggcttgacgtcgtgggtcatgttttgtggttaattcccccacataacaaaacagtgagcaaatgtttataaacaggaactcagtgtttcagtgatgaaagcctctggcctcgccacactgattgctggtgtgcgcgcacacacacactcacacaccctgtttttcttacacacacacagcttcatggagcagagagctggaaagggtgtccagaatggtggatcaggcttattattattactttttttatctccaccaaactctctccttaagccccagcagcccaacccccccccgcaccagacagcatatcgaaggagtaagctgcaggtcagcctatattttaggcagaaaattaggcaaccttgggagagaccggtttccagcagacacgcacggacgcgatggtgaggttgggctgagacggtccttcctggatgcagtcaccctccccatcccgagttttactccctggggggattgtggtgggtgcctggcctcctctcccaccagcgcactgccccaagcttgcctaggtagtatcagcactggggtgagggatgcaatgcgggtttatagttggctgtggggacttctgatttctccaccccatagatgataaacgaccgcggggcttcctctcccaggtctttcctcactctccttcgtctttccctctttctccatgggaaaggtagaatgagacttgccaccagggacatccaggcacattcctcttcccaatcagcctctacccattctctttctgtctcgtgtgtatcagtggcattttcttgtgtagcttcccagatttgcaaacccgctccacatcctggacgcagacccccttcgctggctctatgaaggcttcacgttcctggggcattcgagacttgactttccagagcaactttggatccaccctgttacccttttttttgttttgttttgttttgagagggagtctcgctgtgttgtccaggctggagtgcagtggtgtgatctcggcttactgcaacctccgcctactgggttcaagtgattctcttgcctcaatctccccagtacctgggattacaggtagacaccatcacgcctggctaatttttgtatttttagtaaagacagggtttcatcatgttggcctggctggtctcaaactcctgacctcaggcgatccgcccgcctcagcctcccaaagttctgggattacaagtgtgaaccaccgtgcccaacctcccctcgtttttgacctttgtccccaaatgtctttcatccagttactaggacttgtagcctttttgcaaataggtatctgtaagcatagaagaatagggtgatttgtgaagtgacccttagtggcatctgtggcggtcctactaatcagatttgcagaagaaacacggaaacaaggaaactcctctcttatattaaaataaataaggtttttaatttc

SEQ ID NO: 106187 - DNA, 2094 bp, Homo sapiens
  Payload ID: 843
  Gene Symbol:
  Gene Name: AL365181.2
  ENST ID: ENST00000624731
  CDS Start-End: 1165-1584
gctaatggttaggctaaagtagtggtcctggagaaaagtgaagagatgaggctggagatggcaggaacaggcatgcagagccatataagccagtccgataaatctggattgtgtcatcctaggtcaaacaagacccagtgacatgatgacatttatgttttagagagaacactggatgctttgtggagaagtccatcctccacaaaggttggggtggggagtgagactacaggtgttcttaggaggctgctggagaaagaaattaggcaagagatgatgatggcccgaagtggggtagtagatggtaacagagatgtagagaaatgggaaagatttgctaggtaacatgtatagcccttagcacataatgaccattacatgttagcttcctcctattggtacagtagaaagtggaggcctgaagtcctgggttccagtcctgtttgccattactagccagctgtgggctcttcagcaaaccacttttcacccttttagccacatctgcaaagcagggatggtccagataatctctcaggtctcctctggcttctaagtcctttgaattagatgtcccctggcccccccaaaatttggcagctcctgacttaagagactgtaccctacctcccacgccctattgctgctcccttaacagatggcaggatccacggaacctgaagatctcaattcctgctgagggtctgggcagtctaagtaagcaacagcaaggctggtcacaggatcccactatgttaggaaagttctgagaattgataaggcatacaaggcaactgttcaggccccagggaaaccagggaagagaaaaaggatggactctgttacccacagcctctaataccttcacaaacttctgatacagcaagttgggcttgggatgattataacgggtggtctccttagaaaggctccttatctgtactccatcctgtagagaattatcagtaccagtgaatgggtgacatatcatgactgcctacgccacaggtcccaggccctctgtttcatgtgcccatctatcaagagctcatacctgcccagtttccactaccaagttggccgcagtcttgttgaagagctcattccaccagtggtttgtgaactccttggcagggtcatgtcctacctgccaggggaataaatatgagctctgagtgcctgcctcacctgccctcaagggtcccctctcccacacatgctaaccttcctcacaaggcaccccccacacaggcctcttgccattccacacacctgacattggggtatactctgtacctctcagaagacctcctagcgcacttctttctagtaccactccatatagtcccctgcctttgtgtgagcctgaactatctcttccttcaaattcttttggtagagagcccatatctctttttccctcccctagtcctcccaaccaccacttcttcattatccactgtcaaatttcttcctttcttcccttttctgggaaagttagaaattttcttctgcaaatttccctttaaactagcttttcctcctttaattaaatggactacatgggggggtaatccaggatgatggctttcccctgggcagatggtaggcagggagctgggggatgtggaagaggccccatggggatcaccttgagtccatccatgctttagcagctgctcctcagcaaacttcatcccacgactcttgacctctggggtgacattcatggtgagaaaaaagtctctatcctcagactctcaccagagaagaagaggtgatatcatccttttaagaagaaagtagaaagtgcccaaacagccatcagttccatcctgactgcttgttaagaattctctgctagttgggtgcagtggcacacacctgtagtcccagctacatgggaggctgaggcgggattgcttgagtccagcctgggcagtatagcaagaccctctctcataaaaagaataaagcggccaggcacagtggttcacatttgtaatcccagcactttggaaggccaaggtagaagaatcacttgagcccaggagttccagaccagtgtgggcaacgtagtgaaaccctgcctct

SEQ ID NO: 106188 - DNA, 294 bp, Homo sapiens
  Payload ID: 844
  Gene Symbol:
  Gene Name: AL365202.1
  ENST ID: ENST00000624522
  CDS Start-End: 1-294
ttatttataaaaaagagtcttgctttgttgcccaggctggagtacagtggcaccatcttggctcactgcaacctctgccttctgggttcaagtaattctcatgcctcagcctcccaagtagctgggattacgggcatgtgccaccatgtctggctaatttttgtatttttagtagagacagggtttcaccatgttgcccaagctggacttgaactcctagtgtcaagcagttctcctgccttggcctcccaaagcactgagattacaggcatgagccaatgtgcctggccatta

SEQ ID NO: 106189 - DNA, 48 bp, Homo sapiens
  Payload ID: 845
  Gene Symbol:
  Gene Name: AL445183.1
  ENST ID: ENST00000623045
  CDS Start-End: 1-48
ttaggaaaaccctctgccaccagtacattctccacacaccagctacag

SEQ ID NO: 106190 - DNA, 2508 bp, Homo sapiens
  Payload ID: 846
  Gene Symbol:
  Gene Name: AL513412.1
  ENST ID: ENST00000535193
  CDS Start-End: 1-2508
atgaagcactatgggctgccctggaagaggactgaagaagcagctgcagacactgccctaaccatcatggaggtggccgaggtggaaagtcctctgaaccccagctgtaagataatgaccttcagaccctccatggaggagttccgggagttcaacaaataccttgcatacatggagtctaaaggagcccatcgtgcgggtcttgcaaaggtgattcctcctaaggagtggaagccaagacagtgctatgatgacattgataatttgctcattccagcaccaattcagcagatggtcacagggcagtcaggactgttcactcagtacaacatccagaaaaaagcgatgactgtgaaggagttcaggcagctggccaacagtggcaaatattgtactccaagatacttggattacgaagatttggagcgcaagtactggaagaacttaacttttgtggcacctatctatggtgcagatattaatgggagcatatatgatgagggtgtggatgaatggaacatagctcgcctcaatacagtcttggatgtggttgaagaagagtgtggcatttctattgagggtgtaaataccccatatctctattttggcatgtggaagaccacgtttgcatggcacaccgaagacatggacctctatagcattaattatctccactttggagagcccaagtcttggtatgctatacctccggagcatggaaaacgacttgaaagactagctcaaggttttttcccaagcagctcccaagggtgtgatgcatttcttcgccacaagatgacattgatttctccatcagtattgaagaaatatggtattccctttgacaagataacccaggaggctggagaattcatgatcactttcccatatggctaccatgctggttttaatcatggtttcaactgtgcagaatctacaaattttgctactgtcagatggattgactatggaaaagttgccaaattgtgcacttgcaggaaagacatggtgaagatttcaatggatatctttgtgaggaaatttcagccagacagatatcagctttggaaacaaggaaaggatatatacaccattgatcacacgaagcctactccagcatccacccctgaagtaaaagcatggctgcagaggaggaggaaagtaagaaaagcatcccgaagcttccagtgtgctaggtctacctctaaaaggcctaaggctgatgaggaagaggaagtgtcagatgaagtcgatggggcagaggtccctaaccccgactcagtcacagatgacctcaaggtcagtgaaaagtcagaagcagcagtgaagctgaggaacacagaagcatcttcagaagaagagtcatctgctagcaggatgcaggtggagcagaatttatcagatcatatcaaactctcaggaaacagctgcttaagtacatctgtaacagaagacataaaaactgaggatgacaaagcttatgcatatagaagtgtaccttctatatccagtgaggctgatgattccattccattgtctagtggctatgagaagcccgagaaatcagacccatccgagctttcatggccaaagtcacctgagtcatgctcatcagtggcagagagtaatggtgtgttaacagagggagaagagagtgatgtggagagccatgggaatggccttgaacctggggaaatcccagcggtccccagtggagagagaaatagcttcaaagtccccagtatagcagagggagagaacaaaacctctaagagttggcgccatccacttagcaggcctccagcaagatctccgatgactcttgtgaagcagcaggcgccaagtgatgaagaattgcctgaggttctgtccattgaggaggaagtggaagaaacagagtcttgggcgaaacctctcatccacctttggcagacgaagtcccctaacttcgcagctgagcaagagtataatgcaacagtggccaggatgaagccacactgtgccatctgcactctgctcatgccgtaccacaagccagatagcagcaatgaagaaaatgatgctagatgggagacaaaattagatgaagtcgttacatcggagggaaagactaagcccctcataccagagatgtgttttatttatagtgaagaaaatatagaatattctccacccaatgccttccttgaagaggatggaacaagtctccttatttcctgtgcaaagtgctgcgtacgggttcatgcaagttgttatggtattccttctcatgagatctgtgatggatggctgtgtgcccggtgcaaaagaaatgcgtggacagcagaatgctgtctctgcaatttgagaggaggtgctcttaagcaaacgaagaacaataagtgggcccatgtcatgtgcgccgttgcggtcccagaagttcgattcactaatgtcccagaaaggacacaaatagatgtaggcagaatacctttacagaggttaaaattgggaaggctgggaatctag

SEQ ID NO: 106191 - DNA, 1186 bp, Homo sapiens
  Payload ID: 847
  Gene Symbol:
  Gene Name: AL513523.1
  ENST ID: ENST00000599578
  CDS Start-End: 468-890
gacattctggcttgttttattgtcatttaaaaacaacttttaagacacgattatctctgccaaaaaaaaaacaaaaaaaaacaaaaaaaaaaacagactcaaggaaatgggatcatttgacaattctgtgaaacttgcctctgggactccctgggctctggtgtagattgaggtgccaacctcagaccaacctaagcctccagggcacaccacgtggggctgtggccaccctttcagactcctttctgaatgcttgtggcatctgccccatgattaggaatggacaccctgaccacgtcatagatgcccatttcacactggcatgtggatagtgactataaaacgtcccttcagaacaaaccaagacctgaaggggaagcaggaagggacacccacacactgagtctctgctctcatcctagcttatctggccagctgcccctttgtcatttcccttctctgttgaaatggctctttgggagactgggggaggagattgcggaaggggccagggggctgaggacttccactatggtctgattttacagagcctctggcttcagtcagatcccaaatatcactgggaacagcagtgtgaggggctggaggccccaggaggagggaaggggctaggggctgcatggcagcttctcaaactcagccagaggagaaagctcctccttccaccgggggagcttggggatgcagcaagggtgtttcccctgcaatctcctcagcctctattaacctttgaatcaccaagaaggagagggcagtccagccgggggtgggatggggaatgcagggcctcagtcactgtcagagcccactgcagaggacccttttcgtttccgcttggtaggcttcggtttcgtgtcttcctcttctgaagcactgctggagcccgactcttcttcggcattggggggctgtgtggcattctttcgacttcgagggctggacagagctgcttttcgccggctcttgggtggcttggtggaagagtcctcatattcctccgccagggagaagagatcactgaatttcatcttgtgggcttcgtcacagctcgcttggacatgctgcagcgcctggagaattggcgtctggctaaaaacttctgcttggtgttggtcaggttgagccgcagattgtccaagtgctccaggatctgctccagagtcag

SEQ ID NO: 106192 - DNA, 1186 bp, Homo sapiens; identical to SEQ ID NO: 106191
  Payload ID: 848
  Gene Symbol:
  Gene Name: AL513523.2
  ENST ID: ENST00000623024
  CDS Start-End: 468-890

SEQ ID NO: 106193 - DNA, 2748 bp, Homo sapiens
  Payload ID: 849
  Gene Symbol:
  Gene Name: AL589743.1
  ENST ID: ENST00000624585
  CDS Start-End: 362-994
cagcgatcagcttggctgcccttgcttcgtagtgccacagtagaggctaggggagcaactggctttcctccccaaaaggcgggcagggttatccacactttgcccaggtccctgaagcctgcggctgagctcggggataacaggggccaagtcaccggtcccagacacctaggaactattagagacaggaaccagcatatgagacaggggctgttaagtaggaggttggagaacacacgtttttggtctaaaccgggggcccctctctttgcccactgagcccgcggcctgcgtggtgctgagactgcctctggccgcgtccgcttgggacaaggcctgagcggtggctgatcccacctggatgtcccgggccggctcccacccgaagcccgccatcccgggacgcggtggggagaagctggcactgctccttgccatgcttggcggccgctgctgcccggctgggggtcccgagtcgcacacgccccgcaagccctggccaccgatccggagggaacgccctgggctgcggtccccgaagccaagagaagaagcaggtcccagggccgactccaaagccgcatctccagctttgttcatgggtccgggaagcagaggccgccgccggccaccgtcgtgggcgagaagaagggcacgaggcggccggggctcctgcccggaaccacatgtgcgcgccgggccccgcttcttcatcgcacttgcggccccggctgcccggggcctgcgagtttccagccagggcccgggactctggcgcggtccggccgcgaggaaggaaggcgtggcccgggtgggggtagcggcaggcctgcggctccggccacggggcaggggcagaaaaacgaccccggcgctgtccgggcatccagctcggttcccgctgcagccaggagactcccgggagcgctctaggaaccacagagccctggaactcacctggcagcctcgcggcgctaaagccggcggagcctgagacagcgcgcggcgaggcggtcacgctccacccccgcgtggcggcaggactcggatttcgcccctggttttaaaattgtgccggtggagcccgggacgctgggaagagcgttctgcgcccctccagtcgcggtctccgccctaaaccgacttccagagccgcctctgctccctggaggggcgcagtggcggacaccggcgtcccacgaagtcgcaggtcctcagtctgagggctgccccgcacgctcggaatgcaggagggtctccgcctcgctgcgctgcccctgggggcggaggcgtgcgctgcaggcgagagaggcggcccggtatcgatggagaagcacagagggctttgaggtcgcaacgtcccggttgctgagcggagtcaggagtcaggttccaaagggacagcgctcagggttgtaatcaccacccggcccaccgcttccgcagctgcgagtctagggcggagctgttgggtggaccgagcaggcgaggcgcaggcaggcagcggctccgcctcggaatccgcctcgaccggggcccaggtgcccgccccacctgtccctcggtcaccccaaccctgtttcctcgacccccagcactcctccaggcctagttcgcttcagaggcgcgagacccggaaaacaaggaagaagcgagctcagcctcaatccccgtccccaccccactttcgggaccgctaagctggagaattgaagggggcggaccccggattaaagccgctcccttcccagcctcgccccgctttcctaatgtccgtgatgatttcgttattggcagggaagagccagactccctgcgctcccaagacggggcgattgggagggggttctggagctcatgcctggggtcggcccggcgggggtgaccccgcgccctcgccggtgcaaggagaacagctggttcccgccggggcagggaagcgtggacggtgtgggctcaggcgcctggcaggcacacggggcctctaaagcttggtcactgtcacagatcgtgtggttgtttcttccgtccccgccacgccttcctcctgggatggggattcattccctagcaggtgtcggagaactggcgcccttgcagggtaggcgccccggagcctgaggcgggaactttaaaatcagacgcttgggggccgggctgggaaaaactggcggaaaatattataactgaactctcaatgccagctgttgtagaagctcctgggacaagccgtggaagtcccctcaggaggcttccgcgatgtcctaggtggctgctccgcccgccacggtcatttccattgactcacacgcgccgcctggaggaggaggctgcgctggacacgccggtggcgcctttgcctgggggagcgcagcctggagctctggcggcagcgctgggagcggggcctcggaggctgggcctggggacccaaggttgggcggggcgcaggaggtgggctcagggttctccagagaatccccatgagctgacccgcagggcggccgggccagtaggcaccgggcccccgcggtgacctgcggccccgaagctggagcagccactgcaaatgctgcgctgaccccaaatgctgtgtcctttaaatgttttaattaagaataattaataggtccgggtgtggaggctcaagccttaatccccagcacctggcgaggccgaggagggaggatcccttgagcccagaggttcgagactagcctgggcaacacagtcagactccatccttcc

SEQ ID NO: 106194 - DNA, 375 bp, Homo sapiens
  Payload ID: 850
  Gene Symbol:
  Gene Name: AL590235.1
  ENST ID: ENST00000623890
  CDS Start-End: 1-375
atgactcttaacgagcatgctgccttcaagcatctgtttaacaaagcacatcttgcaccacccttaatccattcaaccctgaggggacacagcacatgtttcagagagcacagggttgggggtaaggtcacagatcaacaggatcccaaggcagaagaatttttcttagtgcagaacaaaatgaaaagtctcccatgtctacctctttctacacagacatggcaaccatccgatttctcaatcttttccccacctttcccccctttctattccacaaaaccgccattgtcatcatggcccgttctcaatgagctgttgagtacacctcccagacggggtggtggccgggcagatgggctcctcacttcccagtag

SEQ ID NO: 106195 - DNA, 150 bp, Homo sapiens
  Payload ID: 851
  Gene Symbol:
  Gene Name: AL591806.1
  ENST ID: ENST00000624422
  CDS Start-End: 1-150
ccccttatttatttatttatttatttatttatttatttatttatagagacggaatctcaccatgttggccaggctggcctcaaactcctgacctcaagtgatccacccgccttggcctcccaaagtgctgggattacaggcgtgagccac

SEQ ID NO: 106196 - DNA, 372 bp, Homo sapiens
  Payload ID: 852
  Gene Symbol:
  Gene Name: AL592183.1
  ENST ID: ENST00000612919
  CDS Start-End: 1-372
atggctttgttggcctcaaatggctgctttattagatgcaatgaagcaggggacatagaagcaaaaagtaaaacagcaggagaagaagaaatgatcaagattagatcctgtgctgaaagagaaaccaagaaaaaagatgacattccagaagaagacaaaggaaatgtaaaacaatgtgaaatcaattatgtaaagaaatttcagagcttccaagagcacaaacttaaaataagtaaagaagacagtaaaattcttaaaaaggctcagaaagatggatttttgcaagagacgcttctggacagtttaggctatgagcatagatggaagaggtggctgttgtattggatcaaggatatgagcagagatggatga

SEQ ID NO: 106197 - DNA, 135 bp, Homo sapiens
  Payload ID: 853
  Gene Symbol:
  Gene Name: AL596220.1
  ENST ID: ENST00000623025
  CDS Start-End: 1-135
atgtgtgtatatacatatatctatctatctatctatctatctatctatctatctataatactatacacacacatattaaagaaaagaggtatttttttggttggttgctacaattttatactactaataaaataa

SEQ ID NO: 106198 - DNA, 276 bp, Homo sapiens
  Payload ID: 854
  Gene Symbol:
  Gene Name: AL645728.1
  ENST ID: ENST00000624594
  CDS Start-End: 1-276
ggtgtgatctcggctcactgcaacctccacctcccaggttcaagcgattctcctgcctcagcctctcgagtggctggaattacaggcacacaccaccacgcctggctaatttttgtatttttagtagagacggggtttcaccatgttggccaggatgggctcgatctcttgacttctgatccacccacctcagcctcccacagtgctgggattacagacgtgagccaccatgcctggccatggatattaattttttttttttttgagatggagtct

SEQ ID NO: 106199 - DNA, 69 bp, Homo sapiens
  Payload ID: 855
  Gene Symbol:
  Gene Name: AL645922.1
  ENST ID: ENST00000623068
  CDS Start-End: 1-69
cccaccttgtgctgcctcagctgcttctcctcgttgtggccgaggtgggaggatcacttgagaccagga

SEQ ID NO: 106200 - DNA, 414 bp, Homo sapiens
  Payload ID: 856
  Gene Symbol:
  Gene Name: AL662852.1
  ENST ID: ENST00000616686
  CDS Start-End: 1-414
atggagggtgcacttgctgatatgaagttttattttatacaaatcctggagaagctaagtgaggccatgtcagtgttgccagaagacatgagaatcatgccagatctctgtggcttaacattggaacatagtgttctggaggctgggaagttcaagatcaaggtaccagcaaatttcattacctggtgccccataatggcacacagctttactcagcaacccctgccagcttccaagccccaggatactgacctgcaccagcacatggggcagcattacctccccaacagtgtggagaagagaacatttcaccactgggtgatgagagtagacagtgactcttggcttctcaatgctagacatgattggagacctttcattgttctattagaaaagtccatgaagaagctgtga

SEQ ID NO: 106201 - DNA, 414 bp, Homo sapiens; identical to SEQ ID NO: 106200
  Payload ID: 857
  Gene Symbol:
  Gene Name: AL929561.1
  ENST ID: ENST00000622022
  CDS Start-End: 1-414

SEQ ID NO: 106202 - DNA, 2299 bp, Homo sapiens
  Payload ID: 858
  Gene Symbol: AARD
  Gene Name: alanine and arginine rich domain containing protein
  Uniprot ID: Q4LEZ3
  ENST ID: ENST00000378279
  CDS Start-End: 46-513
catctttcagcagcagcggtagagcagtgaccaggcgtctccgcgatgggccccggggacttccgccgctgcagagagagaatttcccaggggctccagggactcccaggtagagcggagctttggttcccacctcgtcccgcgtgcgacttcttcggggacggcaggagcacggacatccaggaggaggccctcgccgccagcccgctgctggaggacctcagacgacggctgacgcgcgccttccagtgggcggtgcagcgcgcgatctcgaggcgcgtgcaggaggcggcggcggcggcggcggcgcgggaggagcagagctggacgggcgttgaggccaccctggccaggctgcgggcggagctggtggaaatgcatttccaaaaccaccagctggctagaactttactggacctaaacatgaaagtgcagcaattgaaaaaggagtatgaactggaaattacatcagactcccaaagcccaaaagatgatgctgcgaatccggaataaagaaatgcacacgcaagggctgggcgcggtggctcacgcctgtaatcccagcactttgggaggccgaggcgggcggatcaagacgtcaggagattgagaccatcctggctaacactgtgaaaccctgcctctactaaaaatacaaaaaattagccagacgtggtggcaggcacctgtagtccctgctactcaggagtctgaggcaggagaatggcgtgaacccaggagacagagcttgcagtgagccgaaatcctgccactgcactccagcctgggtgacagagcaagactccatctcaaaaaaaaaaaaaaaaaaaaaagcacacgcgaagctctggatcctaaaactaacgcatacaaccctgaaacaattctgatgaacacattatgctttgcataagttttgaggggcaatttatagacccaaaacaaatgacaggggaaggtgacagaaaaacatctaagagaggggagagaaaaatgatgtattaccaagttttaaagttatttatttgttatttttactgggacatagaagtaaaatataactatagataaatctctctctgtctctctcactcaaagaatgctttaatgccaactttcggtattcaaccttgtgtcacctgacctttctggcattgcctgagctttcagagtttgtgcttgttttgttttacttgattattctcagtttgtctgtccagcagcctgccctgcttcttgtggagaattgtttctacttggattctaaccatgccctttaggtggtctgtgactaagggtattccatcttcctggatatagtcatgcagctcaaggcaggcagatgggtttgtccttaggatttttgaatgggcactaaaagagtagatgactatttctgccagtagaagctgtggatcaggggcttggaagctgctggtggtcaccatgtgagaaagcccacaccctaatggaggtgactgaaacggaaccactaaaagcacaaaaggggagggagggagggagggtgcttcgcttccttgttcctggggtcaagctgtataagactccaggccttgctcttgtttatgtacatgaaatattctgatatccttctcataaaatctctttttgcctaagtaaattcaagctggagtttcatgacttgtatctagtgttcataactaatacagttgttcagttttaggagttaaaatggttcttactgttgaattggactatctaactgtacccgaaaagtgctgtctttttaatgcaaacagtaaagttaataaaaaatagttgcagatctaagtgatatttataatggttattgtctgcaaaatacaaattaatttataacaagctatgtaattttaatatttaataaactataaaaatcagttcttgaagacaaaggagaacagaagagacacagtctttctcttgttaaaagaaatacaaggacaagcatggtggatcacgcttgtaattccagcactttgggaggctgaggtgggcagattgtttgagctcaggagtttgagaccagcctggtcaacatggcaaaaccccatctctactaaaaatacaaaaattagccaggcgtggtggtgctcgcctatagtaccagctactcaggaggctgaggcataagaatcacttgaacctgggagatggaggttgcagtgagccgagatcatgcccctgcactccagcctgggtgacagagggggacttggcctcgaaaaaataaataaataataaaaataaaataaatgcaagttgttttatgtgtgtg

SEQ ID NO: 106203 - DNA, 1865 bp, Homo sapiens
  Payload ID: 859
  Gene Symbol: AGXT
  Gene Name: alanine-glyoxylate aminotransferase
  Uniprot ID: P21549
  ENST ID: ENST00000307503
  CDS Start-End: 388-1566
gcctgccaagcctcaattatctgtgctccgaccctttaagaaacacttctctcacccctgagctaagcagaataagaggggctggacgtgcaggactcagagtgggagcgaggagggctggggtgaggacagctttgtcacactctgtttttctgtcactcagccctgggggctccctctgcctgagggcttcgtcccctgctgcctggccgtgacccgcagcacaagcacagataagcctcagggaacaaaaggcagggctgccacggaagcccatccaccaatcctcacctctcacctctgtgtccgccctgctgggaaatattccaggctttggccaaggccagtgcagccccaggttcccgagcggcaggttgggtgcggaccatggcctctcacaagctgctggtgaccccccccaaggccctgctcaagcccctctccatccccaaccagctcctgctggggcctggtccttccaacctgcctcctcgcatcatggcagccggggggctgcagatgatcgggtccatgagcaaggatatgtaccagatcatggacgagatcaaggaaggcatccagtacgtgttccagaccaggaacccactcacactggtcatctctggctcgggacactgtgccctggaggccgccctggtcaatgtgctggagcctggggactccttcctggttggggccaatggcatttgggggcagcgagccgtggacatcggggagcgcataggagcccgagtgcacccgatgaccaaggaccctggaggccactacacactgcaggaggtggaggagggcctggcccagcacaagccagtgctgctgttcttaacccacggggagtcgtccaccggcgtgctgcagccccttgatggcttcggggaactctgccacaggtacaagtgcctgctcctggtggattcggtggcatccctgggcgggacccccctttacatggaccggcaaggcatcgacatcctgtactcgggctcccagaaggccctgaacgcccctccagggacctcgctcatctccttcagtgacaaggccaaaaagaagatgtactcccgcaagacgaagcccttctccttctacctggacatcaagtggctggccaacttctggggctgtgacgaccagcccaggatgtaccatcacacaatccccgtcatcagcctgtacagcctgagagagagcctggccctcattgcggaacagggcctggagaacagctggcgccagcaccgcgaggccgcggcgtatctgcatgggcgcctgcaggcactggggctgcagctcttcgtgaaggacccggcgctccggcttcccacagtcaccactgtggctgtacccgctggctatgactggagagacatcgtcagctacgtcatagaccacttcgacattgagatcatgggtggccttgggccctccacggggaaggtgctgcggatcggcctgctgggctgcaatgccacccgcgagaatgtggaccgcgtgacggaggccctgagggcggccctgcagcactgccccaagaagaagctgtgacctgcccactggcacacagctggcactggcacacacctgtcccatgcccaccctgagggatcaggagcaaacagaccctgcaaggtcctccaggcctggggacaggaaagccactgacccagcccgggaggcagaaccaggcagcctccctggccccaggcagcccttttccctccagtggcacctcctggaaacagtccacttgggcgcaaaacccagtgccttccaaatgagctgcagtccccaggccatgagcctcccgggaatgtttaataaagggcctggccaactctcctcac

SEQ ID NO: 106204 - DNA, 2364 bp, Homo sapiens
  Payload ID: 860
  Gene Symbol: AGXT2
  Gene Name: alanine--glyoxylate aminotransferase 2
  Uniprot ID: Q9BYV1
  ENST ID: ENST00000231420
  CDS Start-End: 202-1746
ctctttttctcccccttgaaggcactgttactagaaatagagagctctggggcttgcctgaagccatgggcagtcaccactccaggattccccttttagcgcctcctccccatcttaatctcaaagtccagcaggatagtgagcagttagagcccggcctccaatctgcttccatgggggttggctttctgagtgggagaaatgactctaatctggagacatttgctgagacccttgtgcctggtcacttccgctcccaggatccttgagatgcatcctttcctgagcctaggtacttcccggacatcagtaaccaagctcagtcttcatacaaagcccagaatgcctccatgtgacttcatgcctgaaagataccagtcccttggctacaaccgtgtcctggaaatccacaaggaacatctttctcctgtggtgacggcatatttccagaaacccctgctgctccaccaggggcacatggagtggctctttgatgctgaaggaagcagatacctggatttcttttccgggattgttactgtcagtgttggccattgccacccaaaggtgaatgcagtggcacaaaagcagctcggccgcctgtggcatacaagcaccgtcttcttccaccctccaatgcatgaatatgcagagaagcttgccgcacttcttcctgagcctcttaaggtcattttcttggtgaacagtggctcagaagccaatgagctggccatgctgatggccagggcgcactcaaacaacatagacatcatttctttcagaggagcctaccatggatgcagtccttacacacttggcttgacaaacgtagggacctacaagatggaactccctggtgggacaggttgccaaccaacaatgtgtccagatgtttttcgtggcccttggggaggaagccactgtcgagattctccagtgcaaacaatcaggaagtgcagctgtgcaccagactgctgccaagctaaagatcagtatattgagcaattcaaagatacgctgagcacatctgtggccaagtcaattgctggatttttcgcagaacctattcaaggtgtgaatggagttgtccagtacccaaaggggtttctaaaggaagcctttgagctggtgcgagcaaggggaggcgtgtgcattgcagatgaagtgcagacaggatttggaaggttgggctctcacttctggggcttccaaacccacgatgtcctgcctgacattgtcaccatggctaaagggattgggaatggctttcccatggcagcagtcataaccactccagagattgccaaatctttggcgaaatgcctgcagcacttcaacacctttggagggaaccccatggcctgtgccattggatctgctgtgcttgaggtgattaaagaagaaaatctacaggaaaacagtcaagaagttgggacctacatgttactaaagtttgctaagctgcgggatgaatttgaaattgttggagacgtccgaggcaaaggtctcatgataggcatagaaatggtgcaggataagataagctgtcggcctcttccccgtgaagaagtaaatcagatccatgaggactgcaagcacatgggactcctcgttggcagaggcagcattttttctcagacatttcgcattgcgccctcaatgtgcatcactaaaccagaagttgattttgcagtagaagtatttcgttctgccttaacccaacacatggaaagaagagctaagtaacattgtcagaaataaataaaaccacaagtctcaagaatttgccacgtatgttcaagggtgaatttgaagaatttcagaaccactggtatccagagaaagcctgcagctctccacaggagctgtaaaagtcatggttgactgcctaccaaccatatttgttagcagagcccctcttatcttgagaactccattcttcagggaaaggatctccctagctcagagaataaatcctaattagtttatgttaggtatggtaatttgattcccctttgcagtgattggtttatgcatgaatatgtgatgtatttttgtccagtgaatcttgaagaaaaatcttttggtggaggtgccttcagggaaagttttcttcaccctcactcttcagttcaagaagagatgtcttcttgttgcgctgagaacaccatatgttcatgacgagattcctggcaccatgtcagccggcttgtagtcatgaggacaaccctttttggtgaggttggaagatggatggaagccaagtgcttagtgatgtcaaagaagcactcacttaagcattcctggagccaccctacctcagggcctcttgatatttgaggtaataaattcattgttctgtat

SEQ ID NO: 106205 - DNA, 1561 bp, Homo sapiens
  Payload ID: 860
  Gene Symbol: AGXT2
  Gene Name: alanine--glyoxylate aminotransferase 2
  Uniprot ID: Q9BYV1
  ENST ID: ENST00000510428
  CDS Start-End: 44-1363
ctccaatctgcttccatgggggttggctttctgagtgggagaaatgactctaatctggagacatttgctgagacccttgtgcctggtcacttccgctcccaggatccttgagatgcatcctttcctgagcctaggtacttcccggacatcagtaaccaagctcagtcttcatacaaagcccagaatgcctccatgtgacttcatgcctgaaagataccagtcccttggctacaaccgtgtcctggaaatccacaaggaacatctttctcctgtggtgacggcatatttccagaaacccctgctgctccaccaggggcacatggagtggctctttgatgctgaaggaagcagatacctggatttcttttccgggattgttactgtcagtgttggccattgccacccaaaggtgaatgcagtggcacaaaagcagctcggccgcctgtggcatacaagcaccgtcttcttccaccctccaatgcatgaatatgcagagaagcttgccgcacttcttcctgagcctcttaaggtcattttcttggtgaacagtggctcagaagccaatgagctggccatgctgatggccagggcgcactcaaacaacatagacatcatttctttcagaggagcctaccatggatgcagtccttacacacttggcttgacaaacgtagggacctacaagatggaactccctggtgggacaggttgccaaccaacaatgtgtccagatgtttttcgtggcccttggggaggaagccactgtcgagattctccagtgcaaacaatcaggaagtgcagctgtgcaccagactgctgccaagctaaagatcagtatattgagcaattcaaagatacgctgagcacatctgtggccaagtcaattgctggatttttcgcagaacctattcaaggtgtgaatggagttgtccagtacccaaaggggtttctaaaggaagcctttgagctggtgcgagcaaggggaggcgtgtgcattgcagatgaagtgattaaagaagaaaatctacaggaaaacagtcaagaagttgggacctacatgttactaaagtttgctaagctgcgggatgaatttgaaattgttggagacgtccgaggcaaaggtctcatgataggcatagaaatggtgcaggataagataagctgtcggcctcttccccgtgaagaagtaaatcagatccatgaggactgcaagcacatgggactcctcgttggcagaggcagcattttttctcagacatttcgcattgcgccctcaatgtgcatcactaaaccagaagttgattttgcagtagaagtatttcgttctgccttaacccaacacatggaaagaagagctaagtaacattgtcagaaataaataaaaccacaagtctcaagaatttgccactgaatcttgaagaaaaatcttttggtggaggtgccttcagggaaagttttcttcaccctcactcttcagttcaagaagagatgtcttcttgttgcgctgagaacaccatatgttcatgacgagattcctggcaccatgtcagccggcttgtag

SEQ ID NO: 106206 - DNA, 2181 bp, Homo sapiens
  Payload ID: 860
  Gene Symbol: AGXT2
  Gene Name: alanine--glyoxylate aminotransferase 2
  Uniprot ID: Q9BYV1
  ENST ID: ENST00000618015
  CDS Start-End: 244-1563
ctctctctccttcctattttcattctatctcttttcctcactctctttttctcccccttgaaggcactgttactagaaatagagagctctggggcttgcctgaagccatgggcagtcaccactccaggattccccttttagcgcctcctccccatcttaatctcaaagtccagcaggatagtgagcagttagagcccggcctccaatctgcttccatgggggttggctttctgagtgggagaaatgactctaatctggagacatttgctgagacccttgtgcctggtcacttccgctcccaggatccttgagatgcatcctttcctgagcctaggtacttcccggacatcagtaaccaagctcagtcttcatacaaagcccagaatgcctccatgtgacttcatgcctgaaagataccagtcccttggctacaaccgtgtcctggaaatccacaaggaacatctttctcctgtggtgacggcatatttccagaaacccctgctgctccaccaggggcacatggagtggctctttgatgctgaaggaagcagatacctggatttcttttccgggattgttactgtcagtgttggccattgccacccaaaggtgaatgcagtggcacaaaagcagctcggccgcctgtggcatacaagcaccgtcttcttccaccctccaatgcatgaatatgcagagaagcttgccgcacttcttcctgagcctcttaaggtcattttcttggtgaacagtggctcagaagccaatgagctggccatgctgatggccagggcgcactcaaacaacatagacatcatttctttcagaggagcctaccatggatgcagtccttacacacttggcttgacaaacgtagggacctacaagatggaactccctggtgggacaggttgccaaccaacaatgtgtccagatgtttttcgtggcccttggggaggaagccactgtcgagattctccagtgcaaacaatcaggaagtgcagctgtgcaccagactgctgccaagctaaagatcagtatattgagcaattcaaagatacgctgagcacatctgtggccaagtcaattgctggatttttcgcagaacctattcaaggtgtgaatggagttgtccagtacccaaaggggtttctaaaggaagcctttgagctggtgcgagcaaggggaggcgtgtgcattgcagatgaagtgattaaagaagaaaatctacaggaaaacagtcaagaagttgggacctacatgttactaaagtttgctaagctgcgggatgaatttgaaattgttggagacgtccgaggcaaaggtctcatgataggcatagaaatggtgcaggataagataagctgtcggcctcttccccgtgaagaagtaaatcagatccatgaggactgcaagcacatgggactcctcgttggcagaggcagcattttttctcagacatttcgcattgcgccctcaatgtgcatcactaaaccagaagttgattttgcagtagaagtatttcgttctgccttaacccaacacatggaaagaagagctaagtaacattgtcagaaataaataaaaccacaagtctcaagaatttgccacgtatgttcaagggtgaatttgaagaatttcagaaccactggtatccagagaaagcctgcagctctccacaggagctgtaaaagtcatggttgactgcctaccaaccatatttgttagcagagcccctcttatcttgagaactccattcttcagggaaaggatctccctagctcagagaataaatcctaattagtttatgttaggtatggtaatttgattcccctttgcagtgattggtttatgcatgaatatgtgatgtatttttgtccagtgaatcttgaagaaaaatcttttggtggaggtgccttcagggaaagttttcttcaccctcactcttcagttcaagaagagatgtcttcttgttgcgctgagaacaccatatgttcatgacgagattcctggcaccatgtcagccggcttgtagtcatgaggacaaccctttttggtgaggttggaagatggatggaagccaagtgcttagtgatgtcaaagaagcactcacttaagcattcctggagccaccctacctcagggcctcttgatatttgaggtaataaattcattgttctgtat

SEQ ID NO: 106207 - DNA, 3678 bp, Homo sapiens
  Payload ID: 861
  Gene Symbol: ANPEP
  Gene Name: alanyl (membrane) aminopeptidase
  Uniprot ID: P15144
  ENST ID: ENST00000300060
  CDS Start-End: 315-3218
ggagtccagtgctggaggggcagggacggcggcggcgcagctcggaacccgccagggtccagggtccaggttccagcgcccggcggcccaggcaccccccgagcccagctccacacaccgttcctggatctcctctccccaggcggagcgtgcccctgcccagtccagtgaccttcgcctgttggagccctggttaatttttgcccagtctgcctgttgtggggctcctcccctttggggatataagcccggcctggggctgctccgttctctgcctggcctgaggctccctgagccgcctccccaccatcaccatggccaagggcttctatatttccaagtccctgggcatcctggggatcctcctgggcgtggcagccgtgtgcacaatcatcgcactgtcagtggtgtactcccaggagaagaacaagaacgccaacagctcccccgtggcctccaccaccccgtccgcctcagccaccaccaaccccgcctcggccaccaccttggaccaaagtaaagcgtggaatcgttaccgcctccccaacacgctgaaacccgattcctaccgggtgacgctgagaccgtacctcacccccaatgacaggggcctgtacgtttttaagggctccagcaccgtccgtttcacctgcaaggaggccactgacgtcatcatcatccacagcaagaagctcaactacaccctcagccaggggcacagggtggtcctgcgtggtgtgggaggctcccagccccccgacattgacaagactgagctggtggagcccaccgagtacctggtggtgcacctcaagggctccctggtgaaggacagccagtatgagatggacagcgagttcgagggggagttggcagatgacctggcgggcttctaccgcagcgagtacatggagggcaatgtcagaaaggtggtggccactacacagatgcaggctgcagatgcccggaagtccttcccatgcttcgatgagccggccatgaaggccgagttcaacatcacgcttatccaccccaaggacctgacagccctgtccaacatgcttcccaaaggtcccagcaccccacttccagaagaccccaactggaatgtcactgagttccacaccacgcccaagatgtccacgtacttgctggccttcattgtcagtgagttcgactacgtggagaagcaggcatccaatggtgtcttgatccggatctgggcccggcccagtgccattgcggcgggccacggcgattatgccctgaacgtgacgggccccatccttaacttctttgctggtcattatgacacaccctacccactcccaaaatcagaccagattggcctgccagacttcaacgccggcgccatggagaactggggactggtgacctaccgggagaactccctgctgttcgaccccctgtcctcctccagcagcaacaaggagcgggtggtcactgtgattgctcatgagctggcccaccagtggttcgggaacctggtgaccatagagtggtggaatgacctgtggctgaacgagggcttcgcctcctacgtggagtacctgggtgctgactatgcggagcccacctggaacttgaaagacctcatggtgctgaatgatgtgtaccgcgtgatggcagtggatgcactggcctcctcccacccgctgtccacacccgcctcggagatcaacacgccggcccagatcagtgagctgtttgacgccatctcctacagcaagggcgcctcagtcctcaggatgctctccagcttcctgtccgaggacgtattcaagcagggcctggcgtcctacctccacacctttgcctaccagaacaccatctacctgaacctgtgggaccacctgcaggaggctgtgaacaaccggtccatccaactccccaccaccgtgcgggacatcatgaaccgctggaccctgcagatgggcttcccggtcatcacggtggataccagcacggggaccctttcccaggagcacttcctccttgaccccgattccaatgttacccgcccctcagaattcaactacgtgtggattgtgcccatcacatccatcagagatggcagacagcagcaggactactggctgatagatgtaagagcccagaacgatctcttcagcacatcaggcaatgagtgggtcctgctgaacctcaatgtgacgggctattaccgggtgaactacgacgaagagaactggaggaagattcagactcagctgcagagagaccactcggccatccctgtcatcaatcgggcacagatcattaatgacgccttcaacctggccagtgcccataaggtccctgtcactctggcgctgaacaacaccctcttcctgattgaagagagacagtacatgccctgggaggccgccctgagcagcctgagctacttcaagctcatgtttgaccgctccgaggtctatggccccatgaagaactacctgaagaagcaggtcacacccctcttcattcacttcagaaataataccaacaactggagggagatcccagaaaacctgatggaccagtacagcgaggttaatgccatcagcaccgcctgctccaacggagttccagagtgtgaggagatggtctctggccttttcaagcagtggatggagaaccccaataataacccgatccaccccaacctgcggtccaccgtctactgcaacgctatcgcccagggcggggaggaggagtgggacttcgcctgggagcagttccgaaatgccacactggtcaatgaggctgacaagctccgggcagccctggcctgcagcaaagagttgtggatcctgaacaggtacctgagctacaccctgaacccggacttaatccggaagcaggacgccacctctaccatcatcagcattaccaacaacgtcattgggcaaggtctggtctgggactttgtccagagcaactggaagaagctttttaacgattatggtggtggctcgttctccttctccaacctcatccaggcagtgacacgacgattctccaccgagtatgagctgcagcagctggagcagttcaagaaggacaacgaggaaacaggcttcggctcaggcacccgggccctggagcaagccctggagaagacgaaagccaacatcaagtgggtgaaggagaacaaggaggtggtgctccagtggttcacagaaaacagcaaatagtccccagcccttgaagtcacccggcccccatgcaaggtgcccacatgtgtccatcccagcggctggtgcagggcctccattcctggagcccgaggcaccagtgtcctcccctcaaggacaaagtctccagcccacgttctctctgcctgtgagccagtctagttcctgatgacccaggctgcctgagcacctcccagcccctgcccctcatgccaaccccgccctaggcctggcatggcacctgtcgcccagtgccctggggctgatctcagggaagcccagctccagggccagatgagcagaagctctcgatggacaatgaacggccttgctgggggccgccctgtaccctctttcacctttccctaaagaccctaaatctgaggaatcaacagggcagcagatctgtatatttttttctaagagaaaatgtaaataaaggatttctagatgagtgaga

SEQ ID NO: 106208 - DNA, 663 bp, Homo sapiens
  Payload ID: 861
  Gene Symbol: ANPEP
  Gene Name: alanyl (membrane) aminopeptidase
  ENST ID: ENST00000559874
  CDS Start-End: 353-663
gagcgacagagcgagactctgtctcaaaaacaaataaaggaaaaagaaaaaaatgagaagcgcgtgttcccgactccggtgctttttcgcaaggtcgtgctactgcgccttctgaactacgagtcccaggcaccccccgagcccagctccacacaccgttcctggatctcctctccccaggcggagcgtgcccctgcccagtccagtgaccttcgcctgttggagccctggttaatttttgcccagtctgcctgttgtggggctcctcccctttggggatataagcccggcctggggctgctccgttctctgcctggcctgaggctccctgagccgcctccccaccatcaccatggccaagggcttctatatttccaagtccctgggcatcctggggatcctcctgggcgtggcagccgtgtgcacaatcatcgcactgtcagtggtgtactcccaggagaagaacaagaacgccaacagctcccccgtggcctccaccaccccgtccgcctcagccaccaccaaccccgcctcggccaccaccttggaccaaagtaaagcgtggaatcgttaccgcctccccaacacgctgaaacccgattcctaccgggtgacgctgagaccgtacctcacccccaatgacaggggcctgtacgtttttaa

SEQ ID NO: 106209 - DNA, 582 bp, Homo sapiens
  Payload ID: 861
  Gene Symbol: ANPEP
  Gene Name: alanyl (membrane) aminopeptidase
  ENST ID: ENST00000560028
  CDS Start-End: 1-198
acgcttatccaccccaaggacctgacagccctgtccaacatgcttcccaaaggtcccagcaccccacttccagaagaccccaactggaatgtcactgagttccacaccacgcccaagatgtccacgtacttgctggccttcattgtcagtgagttcgactacgtggagaagcaggcatccaatggtgtcttggtatgaggctgggcccatctctccttcacgtgggctggccccggcttgaggggtcttcccgttctcttcatccctgtgccagtttctgaattgttaggccagggttggaatcccacctctgagtgatttcagatccggatctgggcccggcccagtgccattgcggcgggccacggcgattatgccctgaacgtgacgggccccatccttaacttctttgctggtcattatgacacaccctacccactcccaaaatcagaccagattggcctgccagacttcaacgccggcgccatggagaactggggactggtgacctaccgggagaactccctgctgttcgaccccctgtcctcctccagcagcaacaaggagcgggtggtcactgtg

SEQ ID NO: 106210 - DNA, 638 bp, Homo sapiens
  Payload ID: 861
  Gene Symbol: ANPEP
  Gene Name: alanyl (membrane) aminopeptidase
  ENST ID: ENST00000560137
  CDS Start-End: 456-638
gaggagtccagtgctggaggggcagggacggcggcggcgcagctcggaacccgccagggtccagggtccaggttccagcgcccggcggcccagctctcaagcagatcaatgcaatgccacctggccgcttgctttgcccactgggcctacagccggaagcctgcccttcagccctcgggcctgatcccaggccgcctgcagcctgtaaccagacactgtttgcttccagcaggcaccccccgagcccagctccacacaccgttcctggatctcctctccccaggcggagcgtgcccctgcccagtccagtgaccttcgcctgttggagccctggttaatttttgcccagtctgcctgttgtggggctcctcccctttggggatataagcccggcctggggctgctccgttctctgcctggcctgaggctccctgagccgcctccccaccatcaccatggccaagggcttctatatttccaagtccctgggcatcctggggatcctcctgggcgtggcagccgtgtgcacaatcatcgcactgtcagtggtgtactcccaggagaagaacaagaacgccaacagctcccccgtggcctccaccaccccgtccgcctcagccaccaccaaccccgcctcg

SEQ ID NO: 106211 - DNA, 896 bp, Homo sapiens
  Payload ID: 861
  Gene Symbol: ANPEP
  Gene Name: alanyl (membrane) aminopeptidase
  ENST ID: ENST00000560030
  CDS Start-End: 1-369
aatgacctgtggctgaacgagggcttcgcctcctacgtggagtacctgggtgctgactatgcggagcccacctggaacttgaaagacctcatggtgctgaatgatgtgtaccgcgtgatggcagtggatgcactggcctcctcccacccgctgtccacacccgcctcggagatcaacacgccggcccagatcagtgagctgtttgacgccatctcctacagcaaggtgcagcccgctcctcgtggggcacggggaaggagggcgcctcagtcctcaggatgctctccagcttcctgtccgaggacgtattcaagcagggcctggcgtcctacctccacacctttgcctaccagaacaccatctacctgaacctgtgggaccacctgcaggaggctgtgaacaaccggtccatccaactccccaccaccgtgcgggacatcatgaaccgctggaccctgcagatgggcttcccggtcatcacggtggataccagcacggggaccctttcccaggagcacttcctccttgaccccgattccaatgttacccgcccctcagaattcaactacgtgtggattgtgcccatcacatccatcagagatggcagacagcagcaggactactggctgatagatgtaagagcccagaacgatctcttcagcacatcaggcaatgagtgggtcctgctgaacctcaatgtgacgggctattaccgggtgaactacgacgaagagaactggaggaagattcagactcagctgcagagagaccactcggccatccctgtcatcaatcgggcacagatcattaatgacgccttcaacctggccagtgcccataaggtccctgtcactctggcgctgaacaacaccctcttcctgattgaagagagacag

SEQ ID NO: 106212 - DNA, 3477 bp, Homo sapiens
  Payload ID: 862
  Gene Symbol: AARS
  Gene Name: alanyl-tRNA synthetase
  Uniprot ID: P49588
  ENST ID: ENST00000261772
  CDS Start-End: 145-3051
cgtggcgggttgtggtaggtcgtggtctgaggccggtacagctgcgcgtctgcgggaataggtgcagcgggcccttggcgggggactctgagggaggagctggggacggcgaccctaggagagttctttggggtgactttcaagatggactctactctaacagcaagtgaaatccggcagcgatttatagatttcttcaagaggaacgagcatacgtatgttcactcgtctgccaccatcccattggatgaccccactttgctctttgccaatgcaggcatgaaccagtttaaacccattttcctgaacacaattgacccatctcaccccatggcaaagctgagcagagctgccaatacccagaagtgcatccgggctgggggcaaacataatgacctggacgatgtgggcaaggatgtctatcatcacaccttcttcgagatgctgggctcttggtcttttggagattactttaaggaattggcatgtaagatggctctggaactcctcacccaagagtttggcattcccattgaaagactttatgttacttactttggcggggatgaagcagctggcttagaagcagatctggaatgcaaacagatctggcaaaatttggggctggatgacaccaaaatcctcccaggcaacatgaaggataacttctgggagatgggtgacacgggcccctgtggtccttgcagtgagatccactacgaccggattggtggtcgggacgccgcacatcttgtcaaccaggacgaccctaatgtgctggagatctggaaccttgtgttcatccagtataacagggaagctgatggcattctgaaacctcttcccaagaaaagcattgacacagggatgggcctggaacgactggtatctgtgctgcagaataagatgtccaactatgacactgacctttttgtcccttactttgaagccattcagaagggcacaggtgcccgaccatacactgggaaagttggtgctgaggatgccgatgggattgacatggcctaccgggtgctggctgaccacgctcggaccatcactgtggcactggctgatggtggccggcctgacaacacagggcgtggatatgtgttgagacggattctccgccgagctgtccgatacgcccatgaaaagctcaatgccagcaggggcttctttgctacgttagtggatgttgtcgtccagtccctgggagatgcatttcctgagctgaagaaggacccagacatggtgaaggacatcattaatgaagaagaggtgcagtttctcaagactctcagcagagggcgtcgcatcctggacaggaaaattcagagcctgggagacagcaagaccattcccggagacactgcttggctcctctatgacacctatgggtttccagtggatctgactggactgattgctgaagagaagggcctggtggtagacatggatggctttgaagaggagaggaaactggcccagctgaaatcacagggcaagggagctggtggggaagacctcattatgctggacatttacgctatcgaagagctccgggcacggggtctggaggtcacagatgattccccaaagtacaattaccatttggactccagtggtagctatgtatttgagaacacagtggctacggtgatggctctgcgcagggagaagatgttcgtggaagaggtgtccacaggccaggagtgtggagtggtgctggacaagacctgtttctatgctgagcaaggaggccagatctatgacgaaggctacctggtgaaggtggatgacagcagtgaagataaaacagagtttacagtgaagaatgctcaggtccgaggagggtatgtgctacacattggaaccatctacggtgacctgaaagtgggggatcaggtctggctgtttattgatgagccccgacgaagacccatcatgagcaaccacacagctacgcacattctgaacttcgccctgcgctcagtgcttggggaagctgaccagaaaggctcattggttgctcctgaccgcctcagatttgactttactgccaagggagccatgtccacccaacagatcaagaaggctgaagagattgctaatgagatgattgaggcagccaaggccgtctatacccaggattgccccctggcagcagcgaaagccatccagggcctacgggctgtgtttgatgagacctatcctgaccctgtgcgagtcgtctccattggggtcccggtgtccgagttgctggatgacccctctgggcctgctggctccctgacttctgttgagttctgtgggggaacgcacctgcggaactcgagtcatgcaggagcttttgtgatcgtgacggaagaagccattgccaagggtatccggaggattgtggctgtcacaggtgccgaggcccagaaggccctcaggaaagcagagagcttgaagaaatgtctctctgtcatggaagccaaagtgaaggctcagactgctccaaacaaggatgtgcagagggagatcgctgaccttggagaggccctggccactgcagtcatcccccagtggcagaaggatgaattgcgggagactctcaaatccctaaagaaggtcatggatgacttggaccgagccagcaaagccgatgtccagaaacgagtgttagagaagacgaagcagttcatcgacagcaaccccaaccagcctcttgtcatcctggagatggagagcggcgcctcagccaaggccctgaatgaagccttgaagctcttcaagatgcactcccctcagacttctgccatgctcttcacggtggacaatgaggctggcaagatcacgtgcctgtgtcaagttccccagaatgcagccaatcggggcttaaaagccagcgagtgggtgcagcaggtgtcaggcttgatggacggtaaaggtggtggcaaggatgtgtctgcacaggccacaggcaagaacgttggctgcctgcaggaggcgctgcagctggccacttccttcgcccagctgcgcctcggggatgtaaagaactgagtggggaaggaggaggctcccactggatccatccgtccagccaagagctcttcatctgctacaagaacatttgaatcttgggacctttaaagagcccctcctaacccagcagtaactggaacacacttgggagcagtcctatgtctcagtgccccttaaatttctgccctgagccctccacgtcagtgccatcggtctagaaccactaaccccgcattgctgttgatcgtcacgctcgcatctatagataacggctctccagacctgagctttccgcgtcagcaagtaggaatcgtttttgctgcagagaataaaaggaccacgtgcaatacttaatgccgcatgatctctatccctcttcccaataggggctggctcttttgacagcctttggcgtctgtagaataaatgctgtggctcctgctg

SEQ ID NO: 106213 - DNA, 839 bp, Homo sapiens
  Payload ID: 862
  Gene Symbol: AARS
  Gene Name: alanyl-tRNA synthetase
  ENST ID: ENST00000565361
  CDS Start-End: 1-839
tgacagcagtgaagataaaacagagtttacagtgaagaatgctcaggtccgaggagggtatgtgctacacattggaaccatctacggtgacctgaaagtgggggatcaggtctggctgtttattgatgagccccgacgaagacccatcatgagcaaccacacagctacgcacattctgaacttcgccctgcgctcagtgcttggggaagctgaccagaaaggctcattggttgctcctgaccgcctcagatttgactttactgccaagggagccatgtccacccaacagatcaagaaggctgaagagattgctaatgagatgattgaggcagccaaggccgtctatacccaggattgccccctggcagcagcgaaagccatccagggcctacgggctgtgtttgatgagacctatcctgaccctgtgcgagtcgtctccattggggtcccggtgtccgagttgctggatgacccctctgggcctgctggctccctgacttctgttgagttctgtgggggaacgcacctgcggaactcgagtcatgcaggagcttttgtgatcgtgacggaagaagccattgccaagggtatccggaggattgtggctgtcacaggtgccgaggcccagaaggccctcaggaaagcagagagcttgaagaaatgtctctctgtcatggaagccaaagtgaaggctcagactgctccaaacaaggatgtgcagagggagatcgctgaccttggagagccttgtagcagggaccccatggatcctgtccttggaccctggacattccctgctgctcccagtgctgctagcaggagagctcttcccaagcatg

SEQ ID NO: 106214 - DNA, 3854 bp, Homo sapiens
  Payload ID: 863
  Gene Symbol: AARS2
  Gene Name: alanyl-tRNA synthetase 2, mitochondrial
  Uniprot ID: Q5JTZ9
  ENST ID: ENST00000244571
  CDS Start-End: 4-2961
acgatggcagcgtcagtggcagctgcagcccggaggctgcggcgggccattcgaaggtcgcccgcatggcggggcctcagccatcggccgctctcatcggagccccctgcagccaaggcctcggccgtgagggccgcctttctgaacttctttcgggaccgccatggccaccggctggtgccctccgcttccgtgcggccccgcggcgaccccagtttgctttttgtcaatgcgggcatgaaccagttcaagccaatctttctgggcaccgtggatccacgaagcgagatggcaggcttccgacgtgtggccaacagccagaaatgtgtgagagctggaggacaccataacgacctggaagatgtgggtcgagacctttcccatcataccttctttgaaatgcttggcaattgggcctttgggggtgaatattttaaggaggaggcttgtaacatggcctgggaactgctgactcaggtctatgggatccctgaggaaaggctctggatctcctactttgatggtgaccccaaggcagggctggacccagacctggagaccagggacatctggctgagcttaggggtgcctgctagccgtgtgctttcctttggaccacaagagaacttctgggagatgggggatactggcccttgtgggccctgtactgagatccactacgaccttgctggtggggtgggagccccccagctggtagagctttggaacctggtcttcatgcaacacaacagagaggcagatggaagcctgcagcccctgccccagcggcatgtggacacaggaatgggcctggaaaggctggtggctgtgctgcaaggcaaacactccacctatgacactgacctcttttccccgctgctcaacgccatacagcagggctgcagggcacccccttacttgggccgagtaggggtggcagacgaggggcgcacagacacagcgtaccgcgtggtggctgaccacatccgcacactcagtgtctgcatctctgatggcatcttccctgggatgtcaggtcccccgctggttcttcgtcggatcctgcgtcgagctgtgcgtttctccatggagatcttaaaggcaccacctggcttcctaggcagcctggtacctgtagtggtggagacactgggagatgcttatccagaactgcaaaggaactcagcccagatcgccaacctggtgtcagaggacgaggcagccttcctggcctccctggagcggggtaggcggatcattgatcggactctgaggaccctggggccttcagatatgttccctgctgaagtggcctggtccttgtcactgtgtggagacctgggactccccttggacatggtagagctgatgctggaggagaaaggggtccagctagactccgctggactggagcggttggcccaagaggaggcccagcaccgggcacggcaggctgagccagttcagaagcagggattgtggcttgatgtccatgcgcttggggagctgcagcgccaaggagtgcccccaactgacgacagccccaagtacaactactccctgcgacccagcggaagttatgagttcggcacctgtgaggcccaggtgttgcaactgtatacagaggacgggacagcagtggcctccgtggggaaaggccagcgctgtggcctcctcttggacaggaccaacttctacgcagaacaggggggccaggcttcagaccgtggctacctggtgcgggcagggcaagaggacgtgctgttcccagtagcccgggcccaggtctgtggaggtttcatcctgcatgaggcagtagcccctgagtgcctgcggttaggggaccaggtgcagctgcatgtggatgaggcctggcgtctaggctgcatggcgaagcatacggccacccacctgctgaactgggcactgaggcagaccctgggccctggcacagagcagcagggctcccatctcaatcctgagcagctgcgcttggatgtgaccacccagaccccattgaccccagagcagctccgggcagtggagaacactgtgcaggaggccgtggggcaggatgaggctgtgtacatggaggaggtgcccctggcgctcactgcccaggtccctggcctgcgctctctggatgaggtttacccagaccctgtgcgggtggtatcagtgggggtgcccgtggcccatgcattggacccagcctcccaagccgcactgcagacctctgtggagctatgctgtgggacgcacctgttacgtactggggctgtaggggacctggttatcatcggggaccgccagctttccaagggcactacccgcctgctggccgtcactggggagcaggcccagcaggcccgagagctaggccagagcctggcccaggaagtgaaagcggccactgagcggctgagtctggggagccgggatgtggcggaggcactgaggctgtccaaggacataggacgactcattgaagctgtggaaactgctgtgatgccccagtggcagcggcgggagctgctggccacagtgaagatgctgcagcggcgtgccaacactgccatccgtaagctgcaaatgggacaggctgcaaagaaaactcaggagctgctggagcggcactcgaaggggcctctgattgtggacacagtctctgctgagtctctctcagtgctggtgaaggtggtacggcagctgtgtgagcaggcccccagcacgtctgtgctcctactcagcccccagcccatggggaaggtgctgtgtgcctgtcaggtggcccagggtgccatgcccaccttcacagcagaggcctgggcactggcagtgtgcagccacatggggggcaaggcgtggggctcacgagtggtggcccaaggcaccggaagcactactgacctggaagctgccctcagtatagcccaaacctatgccctcagccagctctgacccaggtccgcccagggacccacatggactaaaggcaatgccaggagccctgaaggagccagcagaaccttcccacatgctgaagcgaggactagaggctggaggccaagcagctgagccaaagaagatcacctgggccagggcctacgtgacacaaggagacatgggctagggaaggcagaactgggcccaaagacacacacccccttggtgaaagagaagacatggacaattatggctgtgactgcacattagaaattatttcactggccgggtgtggtggttcacacctgtaatccaagcactttgggaggccgaggcaggtagatcatgaggtcaggagatcaaaaccatcctggctaacatggtgaaaccccatctctactaaaaatacaaaaaattagccgggtgtggtggcacacgcctgtagtcccagctactcgggaggctgaggcagaagaatcgcttgaacctgggaggtggaggttgcagtgggccaagatcgcaccactgcactccagcctgggtgacagagcgagactctgtctcaaataattatttcacagaggatagcaagctccagaaggttctattacctttaaaaaagagtagttttgcccctcccagcaacctaagaccagtctgaactcacactgtctgaaaggccacccaggatccaaatcgggccatcttcattgccatgagtgttcggacaggctctgcgtgccaggcaacagtgggcagacaaagggctccctggctactgggaagatacagaaccatcctgtgaaaatcatttcagcactggagaccttctttgctattacttctttcattaacaatgacctctaatttaaattgggccctgctggtttgttgatgaattgagcaac

SEQ ID NO: 106215 - DNA, 783 bp, Homo sapiens
  Payload ID: 864
  Gene Symbol: AARSD1
  Gene Name: alanyl-tRNA synthetase domain containing 1
  ENST ID: ENST00000450475
  CDS Start-End: 317-571
ccaggcttctctgcgcgtgcgcctcctcacacgcctgcagttcaccaccaccgtggtctcctgctgtcccgcggagctgcagactgaagggagcaacggcaagaaagaagtgctgagcggtttccaagtggtgctggaagacacagtgcttttccctgagggcgggggacagcctgatgaccgtggtacaatcaatgacatctctgtgctgagagtgactcgccgtggggaacaggctgatcatttcacccagacacccctggatccaggaagccaggttctggtccgggtagattgggagcggaggtttgaccacatgcagcagcattcagggcagcatctcatcacggcagttgctgaccatctatttaagctgaagacaacatcatgggagttagggagatttcggagtgcgattgagctggacaccccctctatgactgcagagcaagtagctgccattgagcagagcgtcaatgaaaaaatcagagatcggctgcctgtgaatgtccgagaactgagcctggatgatcctgaggtggagcaggtaaggtggccggggtttgcctgatgatcatgctgggcccattcgggttgttaacatcgagggcgttgattccaacatgtgctgtgggacccatgtgagcaatctcagtgaccttcaggtcattaagattctgggcactgagaaggggaaaaagaacagaaccaacctgatatttctgtctgggaaccgggtgctgaagtggatggagagaagtcatggaactgaaaaagcactga

SEQ ID NO: 106216 - DNA, 752 bp, Homo sapiens
  Payload ID: 864
  Gene Symbol: AARSD1
  Gene Name: alanyl-tRNA synthetase domain containing 1
  ENST ID: ENST00000430739
  CDS Start-End: 333-752
cgctctccgttcgctcccaggcttctctgcgcgtgcgcctcctcacacgcctgcagttcaccaccaccgtggtctcctgctgtcccgcggagctgcagactgaagggagcaacggcaagaaagaagtgctgagcggtttccaagtggtgctggaagacacagtgcttttccctgagggcgggggacagcctgatgaccgtggtacaatcaatgacatctctgtgctgagagtgactcgccgtggggaacaggctgatcatttcacccagacacccctggatccaggaagccaggttctggtccgggtagattgggagcggaggtttgaccacatgcagcagcattcagggcagcatctcatcacggcagttgctgaccatctatttaagctgaagacaacatcatgggagttagggagatttcggagtgcgattgagctggacaccccctctatgactgcagagcaagtagctgccattgagcagagcgtcaatgaaaaaatcagagatcggctgcctgtgaatgtccgagaactgagcctggatgatcctgaggtggagcaggtgagtggccggggtttgcctgatgatcatgctgggcccattcgggttgttaacatcgagggcgttgattccaacatgtgctgtgggacccatgtgagcaatctcagtgaccttcaggtcattaagattctgggcactgagaaggggaaaaagaacagaaccaacctgatatttctgtctgggaaccgg

SEQ ID NO: 106217 - DNA, 1322 bp, Homo sapiens
  Payload ID: 864
  Gene Symbol: AARSD1
  Gene Name: alanyl-tRNA synthetase domain containing 1
  Uniprot ID: Q9BTE6
  ENST ID: ENST00000427569
  CDS Start-End: 37-1275
ttctctgcgcgtgcgcctcctcacacgcctgcaggtatggcgttctggtgtcagcgtgacagttatgcccgagagttcaccaccaccgtggtctcctgctgtcccgcggagctgcagactgaagggagcaacggcaagaaagaagtgctgagcggtttccaagtggtgctggaagacacagtgcttttccctgagggcgggggacagcctgatgaccgtggtacaatcaatgacatctctgtgctgagagtgactcgccgtggggaacaggctgatcatttcacccagacacccctggatccaggaagccaggttctggtccgggtagattgggagcggaggtttgaccacatgcagcagcattcagggcagcatctcatcacggcagttgctgaccatctatttaagctgaagacaacatcatgggagttagggagatttcggagtgcgattgagctggacaccccctctatgactgcagagcaagtagctgccattgagcagagcgtcaatgaaaaaatcagagatcggctgcctgtgaatgtccgagaactgagcctggatgatcctgaggtggagcaggtgagtggccggggtttgcctgatgatcatgctgggcccattcgggttgttaacatcgagggcgttgattccaacatgtgctgtgggacccatgtgagcaatctcagtgaccttcaggtcattaagattctgggcactgagaaggggaaaaagaacagaaccaacctgatatttctgtctgggaaccgggtgctgaagtggatggagagaagtcatggaactgaaaaagcactgactgctctgcttaagtgtggagcagaggatcatgtggaagcagtgaaaaagctccagaactccaccaagatcctgcagaagaataacctgaatctgctcagagacctggctgtgcacattgcccatagcctcaggaacagtccagactggggaggtgtggtcatattacacaggaaggagggtgattcagagttcatgaatatcattgccaatgagattgggtcagaggagaccctcctgttcttaactgtgggcgatgagaaaggtggtggactcttcttactggcagggccacctgcgtctgtggagaccctggggcccagggtggctgaggtcctggaaggcaaaggagcagggaagaaaggccgttttcagggcaaggccaccaagatgagccggcggatggaggcgcaggcgcttctccaggactacatcagcacgcagagtgctaaggagtgagggcttagggcactcacctcctgtttccacaggaatcttttggtcaa

SEQ ID NO: 106218 - DNA, 680 bp, Homo sapiens
  Payload ID: 864
  Gene Symbol: AARSD1
  Gene Name: alanyl-tRNA synthetase domain containing 1
  ENST ID: ENST00000436545
  CDS Start-End: 15-311
acacgcctgcaggtatggcgttctggtgtcagcgtgacagttatgcccgagagttcaccaccaccgtggtctcctgctgtcccgcggagctgcagactgaagggagcaacggcaagaaagaagtgctgagcggtttccaagtggtgctggaagacacagtgcttttccctgagggcgggggacagatggtgtcttgctctgttgccaggctggagcgcagcggcgtgatctcggcttactgcaatctccgtctgccaggttcaagcaattcccctgcctcagtctcccgagtagctaggactacagcctgatgaccgtggtacaatcaatgacatctctgtgctgagagtgactcgccgtggggaacaggctgatcatttcacccagacacccctggatccaggaagccaggttctggtccgggtagattgggagcggaggtttgaccacatgcagcagcattcagggcagcatctcatcacggcagttgctgaccatctatttaagctgaagacaacatcatgggagttagggagatttcggagtgcgattgagctggacaccccctctatgactgcagagcaagtagctgccattgagcagagcgtcaatgaaaaaatcagagatcggctgcctgtgaatgtccgagaactgagcctggatgatcctgaggtggagca

SEQ ID NO: 106219 - DNA, 726 bp, Homo sapiens
  Payload ID: 864
  Gene Symbol: AARSD1
  Gene Name: alanyl-tRNA synthetase domain containing 1
  ENST ID: ENST00000591910
  CDS Start-End: 1-239
acagttatgcccgagagttcaccaccaccgtggtctcctgctgtcccgcggagctgcagactgaagggagcaacggcaagaaagaagtgctgagcggtttccaagtggtgctggaagacacagtgcttttccctgagggcgggggacaggctggagcgcagcggcgtgatctcggcttactgcaatctccgtctgccaggttcaagcaattcccctgcctcagtctcccgagtagctaggactacagcctgatgaccgtggtacaatcaatgacatctctgtgctgagagtgactcgccgtggggaacaggctgatcatttcacccagacacccctggatccaggaagccaggttctggtccgggtagattgggagcggaggtttgaccacatgcagcagcattcagggcagcatctcatcacggcagttgctgaccatctatttaagctgaagacaacatcatgagcaagtagctgccattgagcagagcgtcaatgaaaaaatcagagatcggctgcctgtgaatgtccgagaactgagcctggatgatcctgaggtggagcaggtgagtggccggggtttgcctgatgatcatgctgggcccattcgggttgttaacatcgagggcgttgattccaacatgtgctgtgggacccatgtgagcaatctcagtgaccttcaggtcattaagattctgggcactgagaaggggaaaaagaacagaa

SEQ ID NO: 106220 - DNA, 562 bp, Homo sapiens
  Payload ID: 864
  Gene Symbol: AARSD1
  Gene Name: alanyl-tRNA synthetase domain containing 1
  ENST ID: ENST00000591096
  CDS Start-End: 1-283
ggggaaaaagaacagaaccaacctgatatttctgtctgggaaccgggtgctgaagtggatggagagaagtcatggaactgaaaaagcactgactgctctgcttaagtgtggagcagaggatcatgtggaagcagtgaaaaagctccagaactccaccaagatcctgcagaagaataacctgaatctgctcagagacctggctgtgcacattgcccatagcctcaggaacagtccagactggggaggtgtggtcatattacacaggagaccctcctgttcttaactgtgggcgatgagaaaggtggtggactcttcttactggcagggccacctgcgtctgtggagaccctggggcccagggtggctgaggtcctggaaggcaaaggagcagggaagaaaggccgttttcagggcaaggccaccaagatgagccggcggatggaggcgcaggcgcttctccaggactacatcagcacgcagagtgctaaggagtgagggcttagggcactcacctcctgtttccacaggaatcttttggtcaataaaatagattgactcagaa

SEQ ID NO: 106221 - DNA, 2263 bp, Homo sapiens
  Payload ID: 865
  Gene Symbol: ALB
  Gene Name: albumin
  Uniprot ID: P02768
  ENST ID: ENST00000295897
  CDS Start-End: 90-1919
aattattggttaaagaagtatattagtgctaatttccctccgtttgtcctagcttttctcttctgtcaaccccacacgcctttggcacaatgaagtgggtaacctttatttcccttctttttctctttagctcggcttattccaggggtgtgtttcgtcgagatgcacacaagagtgaggttgctcatcggtttaaagatttgggagaagaaaatttcaaagccttggtgttgattgcctttgctcagtatcttcagcagtgtccatttgaagatcatgtaaaattagtgaatgaagtaactgaatttgcaaaaacatgtgttgctgatgagtcagctgaaaattgtgacaaatcacttcataccctttttggagacaaattatgcacagttgcaactcttcgtgaaacctatggtgaaatggctgactgctgtgcaaaacaagaacctgagagaaatgaatgcttcttgcaacacaaagatgacaacccaaacctcccccgattggtgagaccagaggttgatgtgatgtgcactgcttttcatgacaatgaagagacatttttgaaaaaatacttatatgaaattgccagaagacatccttacttttatgccccggaactccttttctttgctaaaaggtataaagctgcttttacagaatgttgccaagctgctgataaagctgcctgcctgttgccaaagctcgatgaacttcgggatgaagggaaggcttcgtctgccaaacagagactcaagtgtgccagtctccaaaaatttggagaaagagctttcaaagcatgggcagtagctcgcctgagccagagatttcccaaagctgagtttgcagaagtttccaagttagtgacagatcttaccaaagtccacacggaatgctgccatggagatctgcttgaatgtgctgatgacagggcggaccttgccaagtatatctgtgaaaatcaagattcgatctccagtaaactgaaggaatgctgtgaaaaacctctgttggaaaaatcccactgcattgccgaagtggaaaatgatgagatgcctgctgacttgccttcattagctgctgattttgttgaaagtaaggatgtttgcaaaaactatgctgaggcaaaggatgtcttcctgggcatgtttttgtatgaatatgcaagaaggcatcctgattactctgtcgtgctgctgctgagacttgccaagacatatgaaaccactctagagaagtgctgtgccgctgcagatcctcatgaatgctatgccaaagtgttcgatgaatttaaacctcttgtggaagagcctcagaatttaatcaaacaaaattgtgagctttttgagcagcttggagagtacaaattccagaatgcgctattagttcgttacaccaagaaagtaccccaagtgtcaactccaactcttgtagaggtctcaagaaacctaggaaaagtgggcagcaaatgttgtaaacatcctgaagcaaaaagaatgccctgtgcagaagactatctatccgtggtcctgaaccagttatgtgtgttgcatgagaaaacgccagtaagtgacagagtcaccaaatgctgcacagaatccttggtgaacaggcgaccatgcttttcagctctggaagtcgatgaaacatacgttcccaaagagtttaatgctgaaacattcaccttccatgcagatatatgcacactttctgagaaggagagacaaatcaagaaacaaactgcacttgttgagctcgtgaaacacaagcccaaggcaacaaaagagcaactgaaagctgttatggatgatttcgcagcttttgtagagaagtgctgcaaggctgacgataaggagacctgctttgccgaggagggtaaaaaacttgttgctgcaagtcaagctgccttaggcttataacatcacatttaaaagcatctcagcctaccatgagaataagagaaagaaaatgaagatcaaaagcttattcatctgtttttctttttcgttggtgtaaagccaacaccctgtctaaaaaacataaatttctttaatcattttgcctcttttctctgtgcttcaattaataaaaaatggaaagaatctaatagagtggtacagcactgttatttttcaaagatgtgttgctatcctgaaaattctgtaggttctgtggaagttccagtgttctctcttattccacttcggtagaggatttctagtttcttgtgggctaattaaataaatcattaatactcttctaa

SEQ ID NO: 106222 - DNA, 1659 bp, Homo sapiens
  Payload ID: 865
  Gene Symbol: ALB
  Gene Name: albumin
  ENST ID: ENST00000401494
  CDS Start-End: 21-1505
ccccacacgcctttggcacaatgaagtgggtaacctttatttcccttctttttctctttagctcggcttattccaggggtgtgtttcgtcgagatgcacacaagagtgaggttgctcatcggtttaaagatttgggagaagaaaatttcaaagccttatacttatatgaaattgccagaagacatccttacttttatgccccggaactccttttctttgctaaaaggtataaagctgcttttacagaatgttgccaagctgctgataaagctgcctgcctgttgccaaagctcgatgaacttcgggatgaagggaaggcttcgtctgccaaacagagactcaagtgtgccagtctccaaaaatttggagaaagagctttcaaagcatgggcagtagctcgcctgagccagagatttcccaaagctgagtttgcagaagtttccaagttagtgacagatcttaccaaagtccacacggaatgctgccatggagatctgcttgaatgtgctgatgacagggcggaccttgccaagtatatctgtgaaaatcaagattcgatctccagtaaactgaaggaatgctgtgaaaaacctctgttggaaaaatcccactgcattgccgaagtggaaaatgatgagatgcctgctgacttgccttcattagctgctgattttgttgaaagtaaggatgtttgcaaaaactatgctgaggcaaaggatgtcttcctgggcatgtttttgtatgaatatgcaagaaggcatcctgattactctgtcgtgctgctgctgagacttgccaagacatatgaaaccactctagagaagtgctgtgccgctgcagatcctcatgaatgctatgccaaagtgttcgatgaatttaaacctcttgtggaagagcctcagaatttaatcaaacaaaattgtgagctttttgagcagcttggagagtacaaattccagaatgcgctattagttcgttacaccaagaaagtaccccaagtgtcaactccaactcttgtagaggtctcaagaaacctaggaaaagtgggcagcaaatgttgtaaacatcctgaagcaaaaagaatgccctgtgcagaagactatctatccgtggtcctgaaccagttatgtgtgttgcatgagaaaacgccagtaagtgacagagtcaccaaatgctgcacagaatccttggtgaacaggcgaccatgcttttcagctctggaagtcgatgaaacatacgttcccaaagagtttaatgctgaaacattcaccttccatgcagatatatgcacactttctgagaaggagagacaaatcaagaaacaaactgcacttgttgagctcgtgaaacacaagcccaaggcaacaaaagagcaactgaaagctgttatggatgatttcgcagcttttgtagagaagtgctgcaaggctgacgataaggagacctgctttgccgaggagggtaaaaaacttgttgctgcaagtcaagctgccttaggcttataacatcacatttaaaagcatctcagcctaccatgagaataagagaaagaaaatgaagatcaaaagcttattcatctgtttttctttttcgttggtgtaaagccaacaccctgtctaaaaaacataaatttctttaatcattttgcctcttttctct

SEQ ID NO: 106223 - DNA, 591 bp, Homo sapiens
  Payload ID: 865
  Gene Symbol: ALB
  Gene Name: albumin
  ENST ID: ENST00000441319
  CDS Start-End: 1-591
ggatttgagtggggaggccaaagaagagccagccataacagcacattctcggcttattccaggggtgtgtttcgtcgagatgcacacaagagtgaggttgctcatcggtttaaagatttgggagaagaaaatttcaaagccttggtgttgattgcctttgctcagtatcttcagcagtgtccatttgaagatcatgtaaaattagtgaatgaagtaactgaatttgcaaaaacatgtgttgctgatgagtcagctgaaaattgtgacaaatcacttcataccctttttggagacaaattatgcacagttgcaactcttcgtgaaacctatggtgaaatggctgactgctgtgcaaaacaagaacctgagagaaatgaatgcttcttgcaacacaaagatgacaacccaaacctcccccgattggtgagaccagaggttgatgtgatgtgcactgcttttcatgacaatgaagagacatttttgaaaaaatacttatatgaaattgccagaagacatccttacttttatgccccggaactccttttctttgctaaaaggtataaagctgcttttacagaatgttgccaagct

SEQ ID NO: 106224 - DNA, 1483 bp, Homo sapiens
  Payload ID: 865
  Gene Symbol: ALB
  Gene Name: albumin
  ENST ID: ENST00000415165
  CDS Start-End: 42-1295
ctagcttttctcttctgtcaaccccacacgcctttggcacaatgaagtgggtaacctttatttcccttctttttctctttagctcggcttattccaggggtgtgtttcgtcgagatgcacacaagagtgaggttgctcatcggtttaaagatttgggagaagaaaatttcaaagccttggcagtagctcgcctgagccagagatttcccaaagctgagtttgcagaagtttccaagttagtgacagatcttaccaaagtccacacggaatgctgccatggagatctgcttgaatgtgctgatgacagggcggaccttgccaagtatatctgtgaaaatcaagattcgatctccagtaaactgaaggaatgctgtgaaaaacctctgttggaaaaatcccactgcattgccgaagtggaaaatgatgagatgcctgctgacttgccttcattagctgctgattttgttgaaagtaaggatgtttgcaaaaactatgctgaggcaaaggatgtcttcctgggcatgtttttgtatgaatatgcaagaaggcatcctgattactctgtcgtgctgctgctgagacttgccaagacatatgaaaccactctagagaagtgctgtgccgctgcagatcctcatgaatgctatgccaaagtgttcgatgaatttaaacctcttgtggaagagcctcagaatttaatcaaacaaaattgtgagctttttgagcagcttggagagtacaaattccagaatgcgctattagttcgttacaccaagaaagtaccccaagtgtcaactccaactcttgtagaggtctcaagaaacctaggaaaagtgggcagcaaatgttgtaaacatcctgaagcaaaaagaatgccctgtgcagaagactatctatccgtggtcctgaaccagttatgtgtgttgcatgagaaaacgccagtaagtgacagagtcaccaaatgctgcacagaatccttggtgaacaggcgaccatgcttttcagctctggaagtcgatgaaacatacgttcccaaagagtttaatgctgaaacattcaccttccatgcagatatatgcacactttctgagaaggagagacaaatcaagaaacaaactgcacttgttgagctcgtgaaacacaagcccaaggcaacaaaagagcaactgaaagctgttatggatgatttcgcagcttttgtagagaagtgctgcaaggctgacgataaggagacctgctttgccgaggagggtaaaaaacttgttgctgcaagtcaagctgccttaggcttataacatcacatttaaaagcatctcagcctaccatgagaataagagaaagaaaatgaagatcaaaagcttattcatctgtttttctttttcgttggtgtaaagccaacaccctgtctaaaaaacataaatttctttaatcattttgcctcttttctctgtgcttcaattaataaaaaatggaaagaatctaa

SEQ ID NO: 106225 - DNA, 1741 bp, Homo sapiens
  Payload ID: 865
  Gene Symbol: ALB
  Gene Name: albumin
  ENST ID: ENST00000503124
  CDS Start-End: 208-1587
ctgtcaaccccacacgcctttggcacaatgaagtgggtaacctttatttcccttctttttctctttagctcggcttattccaggggtgtgtttcgtcgagatgcacggtgttgattgcctttgctcagtatcttcagcagtgtccatttgaagatcatgtaaaattagtgaatgaagtaactgaatttgcaaaaacatgtgttgctgatgagtcagctgaaaattgtgacaaatcacttatacttatatgaaattgccagaagacatccttacttttatgccccggaactccttttctttgctaaaaggtataaagctgcttttacagaatgttgccaagctgctgataaagctgcctgcctgttgccaaagctcgatgaacttcgggatgaagggaaggcttcgtctgccaaacagagactcaagtgtgccagtctccaaaaatttggagaaagagctttcaaagcatgggcagtagctcgcctgagccagagatttcccaaagctgagtttgcagaagtttccaagttagtgacagatcttaccaaagtccacacggaatgctgccatggagatctgcttgaatgtgctgatgacagggcggaccttgccaagtatatctgtgaaaatcaagattcgatctccagtaaactgaaggaatgctgtgaaaaacctctgttggaaaaatcccactgcattgccgaagtggaaaatgatgagatgcctgctgacttgccttcattagctgctgattttgttgaaagtaaggatgtttgcaaaaactatgctgaggcaaaggatgtcttcctgggcatgtttttgtatgaatatgcaagaaggcatcctgattactctgtcgtgctgctgctgagacttgccaagacatatgaaaccactctagagaagtgctgtgccgctgcagatcctcatgaatgctatgccaaagtgttcgatgaatttaaacctcttgtggaagagcctcagaatttaatcaaacaaaattgtgagctttttgagcagcttggagagtacaaattccagaatgcgctattagttcgttacaccaagaaagtaccccaagtgtcaactccaactcttgtagaggtctcaagaaacctaggaaaagtgggcagcaaatgttgtaaacatcctgaagcaaaaagaatgccctgtgcagaagactatctatccgtggtcctgaaccagttatgtgtgttgcatgagaaaacgccagtaagtgacagagtcaccaaatgctgcacagaatccttggtgaacaggcgaccatgcttttcagctctggaagtcgatgaaacatacgttcccaaagagtttaatgctgaaacattcaccttccatgcagatatatgcacactttctgagaaggagagacaaatcaagaaacaaactgcacttgttgagctcgtgaaacacaagcccaaggcaacaaaagagcaactgaaagctgttatggatgatttcgcagcttttgtagagaagtgctgcaaggctgacgataaggagacctgctttgccgaggagggtaaaaaacttgttgctgcaagtcaagctgccttaggcttataacatcacatttaaaagcatctcagcctaccatgagaataagagaaagaaaatgaagatcaaaagcttattcatctgtttttctttttcgttggtgtaaagccaacaccctgtctaaaaaacataaatttctttaatcattttgcctcttttctct

SEQ ID NO: 106226 - DNA, 1911 bp, Homo sapiens
  Payload ID: 865
  Gene Symbol: ALB
  Gene Name: albumin
  ENST ID: ENST00000509063
  CDS Start-End: 25-1839
tcaaccccacacgcctttggcacaatgaagtgggtaacctttatttcccttctttttctctttagctcggcttattccaggggtgtgtttcgtcgagatgcacacaagagtgaggttgctcatcggtttaaagatttgggagaagaaaatttcaaagccttggtgttgattgcctttgctcagtatcttcagcagtgtccatttgaagatcatgtaaaattagtgaatgaagtaactgaatttgcaaaaacatgtgttgctgatgagtcagctgaaaattgtgacaaatcacttcataccctttttggagacaaattatgcacagttgcaactcttcgtgaaacctatggtgaaatggctgactgctgtgcaaaacaagaacctgagagaaatgaatgcttcttgcaacacaaagatgacaacccaaacctcccccgattggtgagaccagaggttgatgtgatgtgcactgcttttcatgacaatgaagagacatttttgaaaaaatacttatatgaaattgccagaagacatccttacttttatgccccggaactccttttctttgctaaaaggtataaagctgcttttacagaatgttgccaagctgctgataaagctgcctgcctgttgccaaagctcgatgaacttcgggatgaagggaaggcttcgtctgccaaacagagactcaagtgtgccagtctccaaaaatttggagaaagagctttcaaagcatgggcagtagctcgcctgagccagagatttcccaaagctgagtttgcagaagtttccaagttagtgacagatcttaccaaagtccacacggaatgctgccatggagatctgcttgaatgtgctgatgacagggcggaccttgccaagtatatctgtgaaaatcaagattcgatctccagtaaactgaaggaatgctgtgaaaaacctctgttggaaaaatcccactgcattgccgaagtggaaaatgatgagatgcctgctgacttgccttcattagctgctgattttgttgaaagtaaggatgtttgcaaaaactatgctgaggcaaaggatgtcttcctgggcatgtttttgtatgaatatgcaagaaggcatcctgattactctgtcgtgctgctgctgagacttgccaagacatatgaaaccactctagagaagtgctgtgccgctgcagatcctcatgaatgctatgccaaagtgttcgatgaatttaaacctcttgtggaagagcctcagaatttaatcaaacaaaattgtgagctttttgagcagcttggagagtacaaattccagaatgcgctattagttcgttacaccaagaaagtaccccaagtgtcaactccaactcttgtagaggtctcaagaaacctaggaaaagtgggcagcaaatgttgtaaacatcctgaagcaaaaagaatgccctgtgcagaagactatctatccgtggtcctgaaccagttatgtgtgttgcatgagaaaacgccagtaagtgacagagtcaccaaatgctgcacagaatccttggtgaacaggcgaccatgcttttcagctctggaagtcgatgaaacatacgttcccaaagagtttaatgctgaaacattcaccttccatgcagatatatgcacactttctgagaaggagagacaaatcaagaaacaaactgcacttgttgagctcgtgaaacacaagcccaaggcaacaaaagagcaactgaaagctgttatggatgatttcgcagcttttgtagagaagtgctgcaaggctgacgataaggagacctgctttgccgaggagcctaccatgagaataagagaaagaaaatgaagatcaaaagcttattcatctgtttttctttttcgttggtgtaaagccaacaccctgtctaaaaaacataaa

SEQ ID NO: 106227 - DNA, 1604 bp, Homo sapiens
  Payload ID: 865
  Gene Symbol: ALB
  Gene Name: albumin
  ENST ID: ENST00000476441
  CDS Start-End: 28-345
ctgtcaaccccacacgcctttggcacaatgaagtgggtaacctttatttcccttctttttctctttagctcggcttattccaggggtgtgtttcgtcgagatgcacatacttatatgaaattgccagaagacatccttacttttatgccccggaactccttttctttgctaaaaggtataaagctgcttttacagaatgttgccaagctgctgataaagctgcctgcctgttgccaaagctcgatgaacttcgggatgaagggaaggcttcgtctgccaaacagagactcaagtgtgccagtctccaaaaatttggagaaagagctttcaaagcatgggcagtagctcgcctgagccagagatttcccaaagctgagtttgcagaagtttccaagttagtgacagatcttaccaaagtccacacggaatgctgccatggagatctgcttgaatgtgctgatgacagggcggaccttgccaagtatatctgtgaaaatcaagattcgatctccagtaaactgaaggaatgctgtgaaaaacctctgttggaaaaatcccactgcattgccgaagtggaaaatgatgagatgcctgctgacttgccttcattagctgctgattttgttgaaagtaaggatgtttgcaaaaactatgctgaggcaaaggatgtcttcctgggcatgtttttgtatgaatatgcaagaaggcatcctgattactctgtcgtgctgctgctgagacttgccaagacatatgaaaccactctagagaagtgctgtgccgctgcagatcctcatgaatgctatgccaaagtgttcgatgaatttaaacctcttgtggaagagcctcagaatttaatcaaacaaaattgtgagctttttgagcagcttggagagtacaaattccagaatgcgctattagttcgttacaccaagaaagtaccccaagtgtcaactccaactcttgtagaggtctcaagaaacctaggaaaagtgggcagcaaatgttgtaaacatcctgaagcaaaaagaatgccctgtgcagaagactatctatccgtggtcctgaaccagttatgtgtgttgcatgagaaaacgccagtaagtgacagagtcaccaaatgctgcacagaatccttggtgaacaggcgaccatgcttttcagctctggaagtcgatgaaacatacgttcccaaagagtttaatgctgaaacattcaccttccatgcagatatatgcacactttctgagaaggagagacaaatcaagaaacaaactgcacttgttgagctcgtgaaacacaagcccaaggcaacaaaagagcaactgaaagctgttatggatgatttcgcagcttttgtagagaagtgctgcaaggctgacgataaggagacctgctttgccgaggagggtaaaaaacttgttgctgcaagtcaagctgccttaggcttataacatcacatttaaaagcatctcagcctaccatgagaataagagaaagaaaatgaagatcaaaagcttattcatctgtttttctttttcgttggtgtaaagccaacaccctgtctaaaaaacataaatttctttaatcattttgcctctttt

SEQ ID NO: 106228 - DNA, 1519 bp, Homo sapiens
  Payload ID: 865
  Gene Symbol: ALB
  Gene Name: albumin
  ENST ID: ENST00000511370
  CDS Start-End: 1-1363
tttttcaaaatttagatacttatatgaaattgccagaagacatccttacttttatgccccggaactccttttctttgctaaaaggtataaagctgcttttacagaatgttgccaagctgctgataaagctgcctgcctgttgccaaagctcgatgaacttcgggatgaagggaaggcttcgtctgccaaacagagactcaagtgtgccagtctccaaaaatttggagaaagagctttcaaagcatgggcagtagctcgcctgagccagagatttcccaaagctgagtttgcagaagtttccaagttagtgacagatcttaccaaagtccacacggaatgctgccatggagatctgcttgaatgtgctgatgacagggcggaccttgccaagtatatctgtgaaaatcaagattcgatctccagtaaactgaaggaatgctgtgaaaaacctctgttggaaaaatcccactgcattgccgaagtggaaaatgatgagatgcctgctgacttgccttcattagctgctgattttgttgaaagtaaggatgtttgcaaaaactatgctgaggcaaaggatgtcttcctgggcatgtttttgtatgaatatgcaagaaggcatcctgattactctgtcgtgctgctgctgagacttgccaagacatatgaaaccactctagagaagtgctgtgccgctgcagatcctcatgaatgctatgccaaagtgttcgatgaatttaaacctcttgtggaagagcctcagaatttaatcaaacaaaattgtgagctttttgagcagcttggagagtacaaattccagaatgcgctattagttcgttacaccaagaaagtaccccaagtgtcaactccaactcttgtagaggtctcaagaaacctaggaaaagtgggcagcaaatgttgtaaacatcctgaagcaaaaagaatgccctgtgcagaagactatctatccgtggtcctgaaccagttatgtgtgttgcatgagaaaacgccagtaagtgacagagtcaccaaatgctgcacagaatccttggtgaacaggcgaccatgcttttcagctctggaagtcgatgaaacatacgttcccaaagagtttaatgctgaaacattcaccttccatgcagatatatgcacactttctgagaaggagagacaaatcaagaaacaaactgcacttgttgagctcgtgaaacacaagcccaaggcaacaaaagagcaactgaaagctgttatggatgatttcgcagcttttgtagagaagtgctgcaaggctgacgataaggagacctgctttgccgaggagggtaaaaaacttgttgctgcaagtcaagctgccttaggcttataacatcacatttaaaagcatctcagcctaccatgagaataagagaaagaaaatgaagatcaaaagcttattcatctgtttttctttttcgttggtgtaaagccaacaccctgtctaaaaaacataaatttctttaatcattttgcctcttttctctgt

SEQ ID NO: 106229 - DNA, 1606 bp, Homo sapiens
  Payload ID: 865
  Gene Symbol: ALB
  Gene Name: albumin
  ENST ID: ENST00000621628
  CDS Start-End: 74-1264
agtatattagtgctaatttccctccgtttgtcctagcttttctcttctgtcaaccccacacgcctttggcacaatgaagtgggtaacctttatttcccttctttttctctttagctcggcttattccaggggtgtgtttcgtcgagatgcacacaagagtgaggttgctcatcggtttaaagatttgggagaagaaaatttcaaagccttggtgttgattgcctttgctcagtatcttcagcagtgtccatttgaagatcatgtaaaattagtgaatgaagtaactgaatttgcaaaaacatgtgttgctgatgagtcagctgaaaattgtgacaaatcacttcataccctttttggagacaaattatgcacagttgcaactcttcgtgaaacctatggtgaaatggctgactgctgtgcaaaacaagaacctgagagaaatgaatgcttcttgcaacacaaagatgacaacccaaacctcccccgattggtgagaccagaggttgatgtgatgtgcactgcttttcatgacaatgaagagacatttttgaaaaaatatacatatgaaaccactctagagaagtgctgtgccgctgcagatcctcatgaatgctatgccaaagtgttcgatgaatttaaacctcttgtggaagagcctcagaatttaatcaaacaaaattgtgagctttttgagcagcttggagagtacaaattccagaatgcgctattagttcgttacaccaagaaagtaccccaagtgtcaactccaactcttgtagaggtctcaagaaacctaggaaaagtgggcagcaaatgttgtaaacatcctgaagcaaaaagaatgccctgtgcagaagactatctatccgtggtcctgaaccagttatgtgtgttgcatgagaaaacgccagtaagtgacagagtcaccaaatgctgcacagaatccttggtgaacaggcgaccatgcttttcagctctggaagtcgatgaaacatacgttcccaaagagtttaatgctgaaacattcaccttccatgcagatatatgcacactttctgagaaggagagacaaatcaagaaacaaactgcacttgttgagctcgtgaaacacaagcccaaggcaacaaaagagcaactgaaagctgttatggatgatttcgcagcttttgtagagaagtgctgcaaggctgacgataaggagacctgctttgccgaggagggtaaaaaacttgttgctgcaagtcaagctgccttaggcttataacatcacatttaaaagcatctcagcctaccatgagaataagagaaagaaaatgaagatcaaaagcttattcatctgtttttctttttcgttggtgtaaagccaacaccctgtctaaaaaacataaatttctttaatcattttgcctcttttctctgtgcttcaattaataaaaaatggaaagaatctaatagagtggtacagcactgttatttttcaaagatgtgttgctatcctgaaaattctgtaggttctgtggaagttccagtgttctctcttattccacttcggtagaggatttctagtttcttgtgggctaattaaataaatcattaatactcttct

SEQ ID NO: 106230 - DNA, 1418 bp, Homo sapiens
  Payload ID: 865
  Gene Symbol: ALB
  Gene Name: albumin
  Uniprot ID: P02768
  ENST ID: ENST00000621085
  CDS Start-End: 42-1232
ctagcttttctcttctgtcaaccccacacgcctttggcacaatgaagtgggtaacctttatttcccttctttttctctttagctcggcttattccaggggtgtgtttcgtcgagatgcacacaagagtgaggttgctcatcggtttaaagatttgggagaagaaaatttcaaagccttggtgttgattgcctttgctcagtatcttcagcagtgtccatttgaagatcatgtaaaattagtgaatgaagtaactgaatttgcaaaaacatgtgttgctgatgagtcagctgaaaattgtgacaaatcacttcataccctttttggagacaaattatgcacagttgcaactcttcgtgaaacctatggtgaaatggctgactgctgtgcaaaacaagaacctgagagaaatgaatgcttcttgcaacacaaagatgacaacccaaacctcccccgattggtgagaccagaggttgatgtgatgtgcactgcttttcatgacaatgaagagacatttttgaaaaaatacttatatgaaaccactctagagaagtgctgtgccgctgcagatcctcatgaatgctatgccaaagtgttcgatgaatttaaacctcttgtggaagagcctcagaatttaatcaaacaaaattgtgagctttttgagcagcttggagagtacaaattccagaatgcgctattagttcgttacaccaagaaagtaccccaagtgtcaactccaactcttgtagaggtctcaagaaacctaggaaaagtgggcagcaaatgttgtaaacatcctgaagcaaaaagaatgccctgtgcagaagactatctatccgtggtcctgaaccagttatgtgtgttgcatgagaaaacgccagtaagtgacagagtcaccaaatgctgcacagaatccttggtgaacaggcgaccatgcttttcagctctggaagtcgatgaaacatacgttcccaaagagtttaatgctgaaacattcaccttccatgcagatatatgcacactttctgagaaggagagacaaatcaagaaacaaactgcacttgttgagctcgtgaaacacaagcccaaggcaacaaaagagcaactgaaagctgttatggatgatttcgcagcttttgtagagaagtgctgcaaggctgacgataaggagacctgctttgccgaggagggtaaaaaacttgttgctgcaagtcaagctgccttaggcttataacatcacatttaaaagcatctcagcctaccatgagaataagagaaagaaaatgaagatcaaaagcttattcatctgtttttctttttcgttggtgtaaagccaacaccctgtctaaaaaacataaatttctttaatcattttgcctcttttctctgtgcttcaattaataaaaaatggaaagaatct

SEQ ID NO: 106231 - DNA, 1499 bp, Homo sapiens
  Payload ID: 866
  Gene Symbol: ADH1A
  Gene Name: alcohol dehydrogenase 1A (class I), alpha polypeptide
  Uniprot ID: P07327
  ENST ID: ENST00000209668
  CDS Start-End: 115-1242
aagcaaaaaaaataaataaatacctatgcaatacacctgctttatgcacttgagcagggaagaaatccacaaggactcaccagtctcctggtctgcagagaagacagaatcaacatgagcacagcaggaaaagtaatcaaatgcaaagcagctgtgctatgggagttaaagaaacccttttccattgaggaggtggaggttgcacctcctaaggcccatgaagttcgtattaagatggtggctgtaggaatctgtggcacagatgaccacgtggttagtggtaccatggtgaccccacttcctgtgattttaggccatgaggcagccggcatcgtggagagtgttggagaaggggtgactacagtcaaaccaggtgataaagtcatcccactcgctattcctcagtgtggaaaatgcagaatttgtaaaaacccggagagcaactactgcttgaaaaacgatgtaagcaatcctcaggggaccctgcaggatggcaccagcaggttcacctgcaggaggaagcccatccaccacttccttggcatcagcaccttctcacagtacacagtggtggatgaaaatgcagtagccaaaattgatgcagcctcgcctctagagaaagtctgtctcattggctgtggattttcaactggttatgggtctgcagtcaatgttgccaaggtcaccccaggctctacctgtgctgtgtttggcctgggaggggtcggcctatctgctattatgggctgtaaagcagctggggcagccagaatcattgcggtggacatcaacaaggacaaatttgcaaaggccaaagagttgggtgccactgaatgcatcaaccctcaagactacaagaaacccatccaggaggtgctaaaggaaatgactgatggaggtgtggatttttcatttgaagtcatcggtcggcttgacaccatgatggcttccctgttatgttgtcatgaggcatgtggcacaagtgtcatcgtaggggtacctcctgattcccaaaacctctcaatgaaccctatgctgctactgactggacgtacctggaagggagctattcttggtggctttaaaagtaaagaatgtgtcccaaaacttgtggctgattttatggctaagaagttttcattggatgcattaataacccatgttttaccttttgaaaaaataaatgaaggatttgacctgcttcactctgggaaaagtatccgtaccattctgatgttttgagacaatacagatgttttcccttgtggcagtcttcagcctcctctaccctacatgatctggagcaacagctgggaaatatcattaattctgctcatcacagattttatcaataaattacatttgggggctttccaaagaaatggaaattgatgtaaaattatttttcaagcaaatgtttaaaatccaaatgagaactaaataaagtgttgaacatcagctggggaattgaagccaataaaccttccttcttaaccatt

SEQ ID NO: 106232 - DNA, 4072 bp, Homo sapiens
  Payload ID: 867
  Gene Symbol: ADH1B
  Gene Name: alcohol dehydrogenase 1B (class I), beta polypeptide
  Uniprot ID: P00325
  ENST ID: ENST00000305046
  CDS Start-End: 69-1196
gcactcaagcagagaagaaatccacaaagactcacagtctgctggtgggcagagaagacagaaacgacatgagcacagcaggaaaagtaatcaaatgcaaagcagctgtgctatgggaggtaaagaaacccttttccattgaggatgtggaggttgcacctcctaaggcttatgaagttcgcattaagatggtggctgtaggaatctgtcacacagatgaccacgtggttagtggcaacctggtgaccccccttcctgtgattttaggccatgaggcagccggcatcgtggagagtgttggagaaggggtgactacagtcaaaccaggtgataaagtcatcccgctctttactcctcagtgtggaaaatgcagagtttgtaaaaacccggagagcaactactgcttgaaaaatgatctaggcaatcctcgggggaccctgcaggatggcaccaggaggttcacctgcagggggaagcccattcaccacttccttggcaccagcaccttctcccagtacacggtggtggatgagaatgcagtggccaaaattgatgcagcctcgcccctggagaaagtctgcctcattggctgtggattctcgactggttatgggtctgcagttaacgttgccaaggtcaccccaggctctacctgtgctgtgtttggcctgggaggggtcggcctatctgctgttatgggctgtaaagcagctggagcagccagaatcattgcggtggacatcaacaaggacaaatttgcaaaggccaaagagttgggtgccactgaatgcatcaaccctcaagactacaagaaacccattcaggaagtgctaaaggaaatgactgatggaggtgtggatttttcgtttgaagtcatcggtcggcttgacaccatgatggcttccctgttatgttgtcatgaggcatgtggcacaagcgtcatcgtaggggtacctcctgcttcccagaacctctcaataaaccctatgctgctactgactggacgcacctggaagggggctgtttatggtggctttaagagtaaagaaggtatcccaaaacttgtggctgattttatggctaagaagttttcactggatgcgttaataacccatgttttaccttttgaaaaaataaatgaaggatttgacctgcttcactctgggaaaagtatccgtaccgtcctgacgttttgaggcaatagagatgccttcccctgtagcagtcttcagcctcctctaccctacaagatctggagcaacagctaggaaatatcattaattcagctcttcagagatgttatcaataaattacacatgggggctttccaaagaaatggaaattgatgggaaattatttttcaggaaaatttaaaattcaagtgagaagtaaataaagtgttgaacatcagctggggaattgaagccaacaaaccttccttcttaaccattctactgtgtcacctttgccattgaggaaaaatattcctgtgacttcttgcatttttggtatcttcataatctttagtcatcgaatcccagtggaggggacccttttacttgccctgaacatacacatgctgggccattgtgattgaagtcttctaactctgtctcagttttcactgtcgacattttcctttttctaataaaaatgtaccaaatccctggggtaaaagctagggtaaggtaaaggatagactcacatttacaagtagtgaaggtccaagagttctaaatacaggaaatttcttaggaactcaaataaaatgccccacattttactacagtaaatggcagtgtttttatgacttttatactatttctttatggtcgatatacaattgattttttaaaataatagcagatttcttgcttcatatgacaaagcctcaattactaattgtaaaaactgaactattcccagaatcatgttcaaaaaatctgtaatttttgctgatgaaagtgcttcattgactaaacagtattagtttgtggctataaatgattatttagatgatgactgaaaatgtgtataaagtaattaaaagtaatatggtggctttaagtgtagagatgggatggcaaatgctgtgaatgcagaatgtaaaattggtaactaagaaatggcacaaacaccttaagcaatatattttcctagtagatatatatatacacatacatatatacacatatacaaatgtatatttttgcaaaattgttttcaatctagaacttttctattaactaccatgtcttaaaatcaagtctataatcctagcattagtttaatattttgaatatgtaaagacctgtgttaatgctttgttaatgcttttcccactctcatttgttaatgctttcccactctcaggggaaggatttgcattttgagctttatctctaaatgtgacatgcaaagattattcctggtaaaggaggtagctgtctccaaaaatgctattgttgcaatatctacattctatttcatattatgaaagaccttagacataaagtaaaatagtttatcatttactgtgtgatcttcagtaagtctctcaggctctctgagcttgttcatcctttgttttgaaaaaattactcaaccaatccattacagcttaaccaagattaaatgggatgatgttaatgaaagagcttcgccaattaagaagggccatgtaaatgtgggtaacctgattgttttgtcaaaaatgctaaagcggggtggggggtggcgcagtggcttatccctgtaatcccagcactttgggaggtcaagacgggtggatgacctgaggtcaggagtttgagaccagcctggtcaacatggtgaaaccccatctctactaaaaatacaaaaatttgccaggcatggtggcaggtggctgtaatcccagctactcaggaggctgaggcaagagaatcgctggagcctgggaggcggaggttgcagtgagcagaaatcttgccactgcacagcagcctaggcgacaagagcaaaactctgtcaaaagaaaagaaaagaaaatgctgaaggagttactcagggtcaagaaagttttcagaatgtccgtaagataacatcatcatgggacactacctgttgctgggtgctctgcggcttttacactgatgctgattgtgtgagatccagaaaaagaaaatggagttctacatgcccatctcacagcagggtcatcaaatcctgctagtgacacagaagctgacatccagctcccacccgccttcctcccaggttcggggagcaggtagagtgggagccattaggtgggctctgccagtgttgtcatagagtggcaagtcctccatgggatgggagtggcatgtgggagccttctgcatcatgcactatgaaaaaagaaaatttactatggggcaagtggttcatatagttaagtgattgtatatatatatatatatatatatatatatatatatatatatatatatacactatggggcaagtggttcatatagttaagtgattgtatatatatatatatatatatatgtattccagtgtagaaagtattggctgggtctgtaatcaagtattccacagaagtgccttcataggtgctgaaacaggattatgagagtgacagacacaggactgaagacagggagaaaatgtgcatggctgtgagaatatattgctttgattctttgacttctcatgatatatgaaaacaaataaagtgggggggggtgacttcaataatatcacgaacatatttaaaatgaaattctgagcatggagaaaaatttcaaattctggtataaacaaataatctaaaaatatagataaggaaaaaatgttttcatttttttggtcatattgatttgggtcatatatgattgaccaaaaaaaaagatatttctaaaatcctggtgctttttcatttaaaaatagacaaccaaagaggaaaatgaacaatgatggaaattcgtggaagaggaaactaaaatggcaaaatagcatattaaatggcactgagccttggtgtgatcaaaaaaaaaaataaagcaaaatgagatattactgctta

SEQ ID NO: 106233 - DNA, 1667 bp, Homo sapiens
  Payload ID: 867
  Gene Symbol: ADH1B
  Gene Name: alcohol dehydrogenase 1B (class I), beta polypeptide
  ENST ID: ENST00000506651
  CDS Start-End: 313-1320
atgcactcaagcagagaagaaatccacaaagactcacagtctgctggtgggcagagaagacagaaacgacatgagcacagcaggaaaagaaagttgtctgacagaagtttgatgagaggaatttgactcagaagactgaaatatcctttaaccttactataaaatatcttacaaaatactcattgatttcacagcattagaatcatcaaggtaatcaaatgcaaagcagctgtgctatgggaggtaaagaaacccttttccattgaggatgtggaggttgcacctcctaaggcttatgaagttcgcattaagatggtggctgtaggaatctgtcacacagatgaccacgtggttagtggcaacctggtgaccccccttcctgtgattttaggccatgaggcagccggcatcgtggagagtgttggagaaggggtgactacagtcaaaccaggtgataaagtcatcccgctctttactcctcagtgtggaaaatgcagagtttgtaaaaacccggagagcaactactgcttgaaaaatgatctaggcaatcctcgggggaccctgcaggatggcaccaggaggttcacctgcagggggaagcccattcaccacttccttggcaccagcaccttctcccagtacacggtggtggatgagaatgcagtggccaaaattgatgcagcctcgcccctggagaaagtctgcctcattggctgtggattctcgactggttatgggtctgcagttaacgttgccaaggtcaccccaggctctacctgtgctgtgtttggcctgggaggggtcggcctatctgctgttatgggctgtaaagcagctggagcagccagaatcattgcggtggacatcaacaaggacaaatttgcaaaggccaaagagttgggtgccactgaatgcatcaaccctcaagactacaagaaacccattcaggaagtgctaaaggaaatgactgatggaggtgtggatttttcgtttgaagtcatcggtcggcttgacaccatgatggcttccctgttatgttgtcatgaggcatgtggcacaagcgtcatcgtaggggtacctcctgcttcccagaacctctcaataaaccctatgctgctactgactggacgcacctggaagggggctgtttatggtggctttaagagtaaagaaggtatcccaaaacttgtggctgattttatggctaagaagttttcactggatgcgttaataacccatgttttaccttttgaaaaaataaatgaaggatttgacctgcttcactctgggaaaagtatccgtaccgtcctgacgttttgaggcaatagagatgccttcccctgtagcagtcttcagcctcctctaccctacaagatctggagcaacagctaggaaatatcattaattcagctcttcagagatgttatcaataaattacacatgggggctttccaaagaaatggaaattgatgggaaattatttttcaggaaaatttaaaattcaagtgagaagtaaataaagtgttgaacatcagctggggaattgaagccaacaaaccttccttcttaaccattctactgtgtcacctttgccattgaggaaaaatattcctgtgacttcttgcatttttggtatcttcataatctttagtcatcgaatcccagtg

SEQ ID NO: 106234 - DNA, 4059 bp, Homo sapiens
  Payload ID: 867
  Gene Symbol: ADH1B
  Gene Name: alcohol dehydrogenase 1B (class I), beta polypeptide
  ENST ID: ENST00000625860
  CDS Start-End: 189-1196
gcactcaagcagagaagaaatccacaaagactcacagtctgctggtgggcagagaagacagaaacgacatgagcacagcaggaaaagtaatcaaatgcaaagcagctgtgctatgggaggtaaagaaacccttttccattgaggatgtggaggttgcacctcctaaggcttatgaagttcgcattaagatggtggctgtaggaatctgtcacacagatgaccacgtggttagtggcaacctggtgaccccccttcctgtgattttaggccatgaggcagccggcatcgtggagagtgttggagaaggggtgactacagtcaaaccaggtgataaagtcatcccgctctttactcctcagtgtggaaaatgcagagtttgtaaaaacccggagagcaactactgcttgaaaaatgatctaggcaatcctcgggggaccctgcaggatggcaccaggaggttcacctgcagggggaagcccattcaccacttccttggcaccagcaccttctcccagtacacggtggtggatgagaatgcagtggccaaaattgatgcagcctcgcccctggagaaagtctgcctcattggctgtggattctcgactggttatgggtctgcagttaacgttgccaaggtcaccccaggctctacctgtgctgtgtttggcctgggaggggtcggcctatctgctgttatgggctgtaaagcagctggagcagccagaatcattgcggtggacatcaacaaggacaaatttgcaaaggccaaagagttgggtgccactgaatgcatcaaccctcaagactacaagaaacccattcaggaagtgctaaaggaaatgactgatggaggtgtggatttttcgtttgaagtcatcggtcggcttgacaccatgatggcttccctgttatgttgtcatgaggcatgtggcacaagcgtcatcgtaggggtacctcctgcttcccagaacctctcaataaaccctatgctgctactgactggacgcacctggaagggggctgtttatggtggctttaagagtaaagaaggtatcccaaaacttgtggctgattttatggctaagaagttttcactggatgcgttaataacccatgttttaccttttgaaaaaataaatgaaggatttgacctgcttcactctgggaaaagtatccgtaccgtcctgacgttttgaggcaatagagatgccttcccctgtagcagtcttcagcctcctctaccctacaagatctggagcaacagctaggaaatatcattaattcagctcttcagagatgttatcaataaattacacatgggggctttccaaagaaatggaaattgatgggaaattatttttcaggaaaatttaaaattcaagtgagaagtaaataaagtgttgaacatcagctggggaattgaagccaacaaaccttccttcttaaccattctactgtgtcacctttgccattgaggaaaaatattcctgtgacttcttgcatttttggtatcttcataatctttagtcatcgaatcccagtggaggggacccttttacttgccctgaacatacacatgctgggccattgtgattgaagtcttctaactctgtctcagttttcactgtcgacattttcctttttctaataaaaatgtaccaaatccctggggtaaaagctagggtaaggtaaaggatagactcacatttacaagtagtgaaggtccaagagttctaaatacaggaaatttcttaggaactcaaataaaatgccccacattttactacagtaaatggcagtgtttttatgacttttatactatttctttatggtcgatatacaattgattttttaaaataatagcagatttcttgcttcatatgacaaagcctcaattactaattgtaaaaactgaactattcccagaatcatgttcaaaaaatctgtaatttttgctgatgaaagtgcttcattgactaaacagtattagtttgtggctataaatgattatttagatgatgactgaaaatgtgtataaagtaattaaaagtaatatggtggctttaagtgtagagatgggatggcaaatgctgtgaatgcagaatgtaaaattggtaactaagaaatggcacaaacaccttaagcaatatattttcctagtagatatatatatacacatacatatatacacatatacaaatgtatatttttgcaaaattgttttcaatctagaacttttctattaactaccatgtcttaaaatcaagtctataatcctagcattagtttaatattttgaatatgtaaagacctgtgttaatgctttgttaatgcttttcccactctcatttgttaatgctttcccactctcaggggaaggatttgcattttgagctttatctctaaatgtgacatgcaaagattattcctggtaaaggaggtagctgtctccaaaaatgctattgttgcaatatctacattctatttcatattatgaaagaccttagacataaagtaaaatagtttatcatttactgtgtgatcttcagtaagtctctcaggctctctgagcttgttcatcctttgttttgaaaaaattactcaaccaatccattacagcttaaccaagattaaatgggatgatgttaatgaaagagcttcgccaattaagaagggccatgtaaatgtgggtaacctgattgttttgtcaaaaatgctaaagcggggtggggggtggcgcagtggcttatccctgtaatcccagcactttgggaggtcaagacgggtggatgacctgaggtcaggagtttgagaccagcctggtcaacatggtgaaaccccatctctactaaaaatacaaaaatttgccaggcatggtggcaggtggctgtaatcccagctactcaggaggctgaggcaagagaatcgctggagcctgggaggcggaggttgcagtgagcagaaatcttgccactgcacagcagcctaggcgacaagagcaaaactctgtcaaaagaaaagaaaagaaaatgctgaaggagttactcagggtcaagaaagttttcagaatgtccgtaagataacatcatcatgggacactacctgttgctgggtgctctgcggcttttacactgatgctgattgtgtgagatccagaaaaagaaaatggagttctacatgcccatctcacagcagggtcatcaaatcctgctagtgacacagaagctgacatccagctcccacccgccttcctcccaggttcggggagcaggtagagtgggagccattaggtgggctctgccagtgttgtcatagagtggcaagtcctccatgggatgggagtggcatgtgggagccttctgcatcatgcactatgaaaaaagaaaatttactatggggcaagtggttcatatagttaagtgattgtatatatatatatatatatatatatatatatatatatatatatatatacactatggggcaagtggttcatatagttaagtgattgtatatatatatatatatatatatgtattccagtgtagaaagtattggctgggtctgtaatcaagtattccacagaagtgccttcataggtgctgaaacaggattatgagagtgacagacacaggactgaagacagggagaaaatgtgcatggctgtgagaatatattgctttgattctttgacttctcatgatatatgaaaacaaataaagtgggggggggtgacttcaataatatcacgaacatatttaaaatgaaattctgagcatggagaaaaatttcaaattctggtataaacaaataatctaaaaatatagataaggaaaaaatgttttcatttttttggtcatattgatttgggtcatatatgattgaccaaaaaaaaagatatttctaaaatcctggtgctttttcatttaaaaatagacaaccaaagaggaaaatgaacaatgatggaaattcgtggaagaggaaactaaaatggcaaaatagcatattaaatggcactgagccttggtgtgatcaaaaaaaaaaataaagcaaaatgag

SEQ ID NO: 106235 - DNA, 1740 bp, Homo sapiens
  Payload ID: 868
  Gene Symbol: ADH1C
  Gene Name: alcohol dehydrogenase 1C (class I), gamma polypeptide
  Uniprot ID: P00326
  ENST ID: ENST00000515683
  CDS Start-End: 353-1480
gtgggtttgagagaagagaagcaggaacttgagagaggaggaagagagaaagtaattaaaatgtatcgttttaacttaatatttaaccgaatgatagcaaaatcttatctgaaattggaaaagtcaaggttttgagtgctggttcggtgcccatttctttatgatttgatagtctgagaagaatacgacgggtgtggcttaaaaacctagatcacgtgtgtagttggaattgggtgttatatgagcaaacaaaataaatacctgtgcaacatacctgctttatgcactcaagcagagaagaaatccacaagtactcaccagcctcctggtctgcagagaagacagaatcaatatgagcacagcaggaaaagtaatcaaatgcaaagcagctgtgctatgggagttaaagaaacccttttccattgaggaggtagaggttgcacctcctaaggctcatgaagttcgcattaagatggtggctgcaggaatctgtcgttcagatgagcatgtggttagtggcaacctggtgaccccccttcctgtgattttaggccatgaggcagccggcatcgtggaaagtgttggagaaggggtgactacagtcaaaccaggtgataaagtcatcccgctctttactcctcagtgtggaaaatgcagaatttgtaaaaacccagaaagcaactactgcttgaaaaatgatctaggcaatcctcgggggaccctgcaggatggcaccaggaggttcacctgcagcgggaagcccatccaccacttcgtcggcgtcagcaccttctcccagtacacagtggtggatgagaatgcagtggccaaaattgatgcagcctcgcccctggagaaagtctgcctcattggctgtggattttcgactggttatgggtctgcagtcaaagttgccaaggtcaccccagggtctacctgtgctgtgtttggcctgggaggggtcggcctatctgttgttatgggctgtaaagcagctggagcagccagaatcattgctgtggacatcaacaaggacaaatttgcaaaggctaaagagttgggtgccactgaatgcatcaaccctcaagactacaagaaacccattcaggaagtgctaaaggaaatgactgatggaggtgtggatttttcgtttgaagtcatcggtcggcttgacaccatgatggcttccctgttatgttgtcatgaggcatgtggcacaagtgtcattgtaggggtacctcctgattcccagaacctctcaataaaccctatgctgctactgactggacgcacgtggaaaggagctatttttggaggctttaagagtaaagaatctgtccccaaacttgtggctgactttatggctaagaagttttcactggatgcattaataacaaatattttaccttttgaaaaaataaatgaaggatttgacctgcttcgctctggaaagagtatccgtaccgtcctgacgttttgaaacaatacagatgccttcccttgtagcagttttcagcctcctctaccctacatgatctggagcaacagctaggaaatatcattaattctgctcttcagagatgttaaaaataaattacacgtgggagctttccaaagaaatggaaattgatgggaaattatttgtcaagcaaatgtttaaaatccaaatgagaactaaataaagtgttgaacatcaactggggaattgaagccaataaaccttccttcttaaccattcaa

SEQ ID NO: 106236 - DNA, 872 bp, Homo sapiens
  Payload ID: 868
  Gene Symbol: ADH1C
  Gene Name: alcohol dehydrogenase 1C (class I), gamma polypeptide
  ENST ID: ENST00000510055
  CDS Start-End: 296-872
aagaaatccacaagtactcaccagcctcctggtctgcagagaagacagaatcaatatgagcacagcaggaaaaatggagtatctttctattgcccaggttggagtgcaatggtgatctcggctcactgcaacctctgcctcccgggttcaagtgattctcctgcctcagcctcacaagtagctgagtttacaggtaatcaaatgcaaagcagctgtgctatgggagttaaagaaacccttttccattgaggaggtagaggttgcacctcctaaggctcatgaagttcgcattaagatggtggctgcaggaatctgtcgttcagatgagcatgtggttagtggcaacctggtgaccccccttcctgtgattttaggccatgaggcagccggcatcgtggaaagtgttggagaaggggtgactacagtcaaaccaggtgataaagtcatcccgctctttactcctcagtgtggaaaatgcagaatttgtaaaaacccagaaagcaactactgcttgaaaaatgatctaggcaatcctcgggggaccctgcaggatggcaccaggaggttcacctgcagcgggaagcccatccaccacttcgtcggcgtcagcaccttctcccagtacacagtggtggatgagaatgcagtggccaaaattgatgcagcctcgcccctggagaaagtctgcctcattggctgtggattttcgactggttatgggtctgcagtcaaagttgccaaggtcaccccagggtctacctgtgctgtgtttggcctgggaggggtcggcctatctgttgttatgggctgtaaagcagctggagcagccagaatcattgctgtggacatcaacaaggacaaatttgcaaagg

SEQ ID NO: 106237 - DNA, 581 bp, Homo sapiens
  Payload ID: 868
  Gene Symbol: ADH1C
  Gene Name: alcohol dehydrogenase 1C (class I), gamma polypeptide
  ENST ID: ENST00000511397
  CDS Start-End: 72-581
atgcactcaagcagagaagaaatccacaagtactcaccagcctcctggtctgcagagaagacagaatcaatatgagcacagcaggaaaaatggtggctgcaggaatctgtcgttcagatgagcatgtggttagtggcaacctggtgaccccccttcctgtgattttaggccatgaggcagccggcatcgtggaaagtgttggagaaggggtgactacagtcaaaccaggtgataaagtcatcccgctctttactcctcagtgtggaaaatgcagaatttgtaaaaacccagaaagcaactactgcttgaaaaatgatctaggcaatcctcgggggaccctgcaggatggcaccaggaggttcacctgcagcgggaagcccatccaccacttcgtcggcgtcagcaccttctcccagtacacagtggtggatgagaatgcagtggccaaaattgatgcagcctcgcccctggagaaagtctgcctcattggctgtggattttcgactggttatgggtctgcagtcaaagttgccaaggtcaccccagggtctacctgtgctgtgtttggcctgggaggggtc

SEQ ID NO: 106238 - DNA, 1993 bp, Homo sapiens
  Payload ID: 869
  Gene Symbol: ADH4
  Gene Name: alcohol dehydrogenase 4 (class II), pi polypeptide
  Uniprot ID: P08319
  ENST ID: ENST00000265512
  CDS Start-End: 76-1218
acggaactccctgggtaggagtttgaagctttcttaactcagaaagaaacttccaacacagtttcccaaagaaaaatgggcaccaagggcaaagttattaaatgcaaagcagccatcgcctgggaagcaggcaagcccctttgcattgaagaggttgaagtagctccccccaaggctcatgaagttcgcattcagatcattgctacctctctgtgccatactgatgccactgttatcgattctaaatttgagggcctagctttcccagtgatcgttggccatgaggctgcaggtattgtggaaagtattgggccaggagtgaccaacgtcaaaccaggtgacaaagtaattccactttatgcacctctatgtagaaaatgcaagttttgtctgagtccactcacaaatttgtgtgggaaaatcagtaatctcaaaagtcctgctagtgatcaacaactaatggaagacaaaaccagcaggtttacctgcaaaggaaaaccagtttaccatttctttggaaccagtacattctctcagtacactgtggtgtcagatatcaatcttgccaaaatagatgatgatgcaaatttagagagagtttgtctgcttggatgtgggttttcaactggctatggggctgcaatcaacaatgccaaggtcacccctggttcgacttgtgctgtctttggcctaggaggtgtgggtctttctgctgtaatgggttgtaaagcagcaggagcttccagaatcataggtattgacatcaacagtgagaagtttgtgaaggctaaagccctgggagccactgactgcctcaatcctagagacttacataaaccgatccaggaagttatcattgaattgaccaagggaggtgtggattttgcccttgactgtgcaggtggatctgaaaccatgaaagcagccctggactgtacaaccgcaggctggggatcatgtactttcattggagtagctgctggtagcaaaggattgactatttttccagaggagctaataatcggccgtactataaatggaacattctttggtggttggaaaagtgtagattctatcccaaagctggtcactgactataagaataagaaattcaatctggatgcactggtgacccataccctgccttttgacaaaatcagtgaggcatttgacctaatgaaccaaggaaaaagcgtccgaacaatcctcatcttttgaagatgccaggagcaattcagaatactatctgattgaatgtgaacctgcctggttaatttattacctgatttgatgaaccaaggaaagccatgagtttaaacaaatatttacatttaatatgggaacataaaagagctttaaatattatagactttgtacctgttatatatatgaatattccctatgttaaataataataataactagtgtttatgaatagaatcatatcatctttagaaattgtttaaaattagttctgggaagttgaaagtggggaatgaagagataataaataaaactagattggccatatgtttataatttttttagattgggtaatgaatacatggagtttcattatacttttctctccacttttgtctatgttgaaaattttctgggagctaaatgatgagaacacatggacacatgatggggaacaacacacactggggcctgttgagggcagggagtcggcagagagagagcatcaggaagaatagctaatggatgctgggcttcatacctgggtgatgagatgatctgtgcagcaaagcaccatggtacatgtttacctatgtaacaaacctgcacatcctgcacatgtaccctggaacttaataaaagttggaaatttttaaaaagaatgaataagacctggtatttgatagcacaacagggagactatagtcaacagcaatttaattgtatattttaatatgactaaaagagtataatggattgtttgtaacacaaataaatgcttgaggagatg

SEQ ID NO: 106239 - DNA, 946 bp, Homo sapiens
  Payload ID: 869
  Gene Symbol: ADH4
  Gene Name: alcohol dehydrogenase 4 (class II), pi polypeptide
  ENST ID: ENST00000512499
  CDS Start-End: 174-946
agtttcccaaagaaaaatgggcaccaagggcaaaataaatttaataatgatgtaagcctcatttctcagacttttaatgaattctctggggatattgttcaaatgcagattttgatttagtggatttgaggcagggctttcatctctaacaaattcccaagtgatgtgaataaatgcttgtccgaggaccacacttcgagttgcagagatgtaaaacacatctattctccagcaattatctgactcaggttattaaatgcaaagcagccatcgcctgggaagcaggcaagcccctttgcattgaagaggttgaagtagctccccccaaggctcatgaagttcgcattcagatcattgctacctctctgtgccatactgatgccactgttatcgattctaaatttgagggcctagctttcccagtgatcgttggccatgaggctgcaggtattgtggaaagtattgggccaggagtgaccaacgtcaaaccaggtgacaaagtaattccactttatgcacctctatgtagaaaatgcaagttttgtctgagtccactcacaaatttgtgtgggaaaatcagtaatctcaaaagtcctgctagtgatcaacaactaatggaagacaaaaccagcaggtttacctgcaaaggaaaaccagtttaccatttctttggaaccagtacattctctcagtacactgtggtgtcagatatcaatcttgccaaaatagatgatgatgcaaatttagagagagtttgtctgcttggatgtgggttttcaactggctatggggctgcaatcaacaatgccaaggtcacccctggttcgacttgtgctgtctttggcctaggaggtgtgggtctttctgctgtaatgggttgtaaagcagcaggagcttccagaatcataggtattgacatcaacagtgagaagtttgtgaaggctaa

SEQ ID NO: 106240 - DNA, 575 bp, Homo sapiens
  Payload ID: 869
  Gene Symbol: ADH4
  Gene Name: alcohol dehydrogenase 4 (class II), pi polypeptide
  ENST ID: ENST00000509471
  CDS Start-End: 1-348
aatttagagagagtttgtctgcttggatgtgggttttcaactggctatggggctgcaatcaacaatgccaaggtcacccctggttcgacttgtgctgtctttggcctaggaggtgtgggtctttctgctgtaatgggttgtaaagcagcaggagcttccagaatcataggtattgacatcaacagtgagaagtttgtgaaggctaaagccctgggagccactgactgcctcaatcctagagacttacataaaccgatccaggaagttatcattgaattgaccaagggaggtgtggattttgcccttgactgtgcaggtggatctgaaaccatggttggaaaagtgtagattctatcccaaagctggtcactgactataagaataagaaattcaatctggatgcactggtgacccataccctgccttttgacaaaatcagtgaggcatttgacctaatgaaccaaggaaaaagcgtccgaacaatcctcatcttttgaagatgccaggagcaattcagaatactatctgattgaatgtgaacctgcctggttaatttattacctgatttgatgaac

SEQ ID NO: 106241 - DNA, 2151 bp, Homo sapiens
  Payload ID: 869
  Gene Symbol: ADH4
  Gene Name: alcohol dehydrogenase 4 (class II), pi polypeptide
  Uniprot ID: P08319
  ENST ID: ENST00000508393
  CDS Start-End: 167-1366
acggaactccctgggtaggagtttgaagctttcttaactcagaaagaaacttccaacacagtttcccaaagaaaaatgggcaccaagggcaaagtaagcaaattttgatttagtggatttgaggcagggctttcatctctaacaaattcccaagtgatgtgaataaatgcttgtccgaggaccacacttcgagttgcagagatgtaaaacacatctattctccagcaattatctgactcaggttattaaatgcaaagcagccatcgcctgggaagcaggcaagcccctttgcattgaagaggttgaagtagctccccccaaggctcatgaagttcgcattcagatcattgctacctctctgtgccatactgatgccactgttatcgattctaaatttgagggcctagctttcccagtgatcgttggccatgaggctgcaggtattgtggaaagtattgggccaggagtgaccaacgtcaaaccaggtgacaaagtaattccactttatgcacctctatgtagaaaatgcaagttttgtctgagtccactcacaaatttgtgtgggaaaatcagtaatctcaaaagtcctgctagtgatcaacaactaatggaagacaaaaccagcaggtttacctgcaaaggaaaaccagtttaccatttctttggaaccagtacattctctcagtacactgtggtgtcagatatcaatcttgccaaaatagatgatgatgcaaatttagagagagtttgtctgcttggatgtgggttttcaactggctatggggctgcaatcaacaatgccaaggtcacccctggttcgacttgtgctgtctttggcctaggaggtgtgggtctttctgctgtaatgggttgtaaagcagcaggagcttccagaatcataggtattgacatcaacagtgagaagtttgtgaaggctaaagccctgggagccactgactgcctcaatcctagagacttacataaaccgatccaggaagttatcattgaattgaccaagggaggtgtggattttgcccttgactgtgcaggtggatctgaaaccatgaaagcagccctggactgtacaaccgcaggctggggatcatgtactttcattggagtagctgctggtagcaaaggattgactatttttccagaggagctaataatcggccgtactataaatggaacattctttggtggttggaaaagtgtagattctatcccaaagctggtcactgactataagaataagaaattcaatctggatgcactggtgacccataccctgccttttgacaaaatcagtgaggcatttgacctaatgaaccaaggaaaaagcgtccgaacaatcctcatcttttgaagatgccaggagcaattcagaatactatctgattgaatgtgaacctgcctggttaatttattacctgatttgatgaaccaaggaaagccatgagtttaaacaaatatttacatttaatatgggaacataaaagagctttaaatattatagactttgtacctgttatatatatgaatattccctatgttaaataataataataactagtgtttatgaatagaatcatatcatctttagaaattgtttaaaattagttctgggaagttgaaagtggggaatgaagagataataaataaaactagattggccatatgtttataatttttttagattgggtaatgaatacatggagtttcattatacttttctctccacttttgtctatgttgaaaattttctgggagctaaatgatgagaacacatggacacatgatggggaacaacacacactggggcctgttgagggcagggagtcggcagagagagagcatcaggaagaatagctaatggatgctgggcttcatacctgggtgatgagatgatctgtgcagcaaagcaccatggtacatgtttacctatgtaacaaacctgcacatcctgcacatgtaccctggaacttaataaaagttggaaatttttaaaaagaatgaataagacctggtatttgatagcacaacagggagactatagtcaacagcaatttaattgtatattttaatatgactaaaagagtataatggattgtttgtaacacaaataaatgcttgaggagatggacaccccat

SEQ ID NO: 106242 - DNA, 1400 bp, Homo sapiens
  Payload ID: 869
  Gene Symbol: ADH4
  Gene Name: alcohol dehydrogenase 4 (class II), pi polypeptide
  Uniprot ID: P08319
  ENST ID: ENST00000505590
  CDS Start-End: 138-1337
tttgaagctttcttaactcagaaagaaacttccaacacagtttcccaaagaaaaatgggcaccaagggcaaaattttgatttagtggatttgaggcagggctttcatctctaacaaattcccaagtgatgtgaataaatgcttgtccgaggaccacacttcgagttgcagagatgtaaaacacatctattctccagcaattatctgactcaggttattaaatgcaaagcagccatcgcctgggaagcaggcaagcccctttgcattgaagaggttgaagtagctccccccaaggctcatgaagttcgcattcagatcattgctacctctctgtgccatactgatgccactgttatcgattctaaatttgagggcctagctttcccagtgatcgttggccatgaggctgcaggtattgtggaaagtattgggccaggagtgaccaacgtcaaaccaggtgacaaagtaattccactttatgcacctctatgtagaaaatgcaagttttgtctgagtccactcacaaatttgtgtgggaaaatcagtaatctcaaaagtcctgctagtgatcaacaactaatggaagacaaaaccagcaggtttacctgcaaaggaaaaccagtttaccatttctttggaaccagtacattctctcagtacactgtggtgtcagatatcaatcttgccaaaatagatgatgatgcaaatttagagagagtttgtctgcttggatgtgggttttcaactggctatggggctgcaatcaacaatgccaaggtcacccctggttcgacttgtgctgtctttggcctaggaggtgtgggtctttctgctgtaatgggttgtaaagcagcaggagcttccagaatcataggtattgacatcaacagtgagaagtttgtgaaggctaaagccctgggagccactgactgcctcaatcctagagacttacataaaccgatccaggaagttatcattgaattgaccaagggaggtgtggattttgcccttgactgtgcaggtggatctgaaaccatgaaagcagccctggactgtacaaccgcaggctggggatcatgtactttcattggagtagctgctggtagcaaaggattgactatttttccagaggagctaataatcggccgtactataaatggaacattctttggtggttggaaaagtgtagattctatcccaaagctggtcactgactataagaataagaaattcaatctggatgcactggtgacccataccctgccttttgacaaaatcagtgaggcatttgacctaatgaaccaaggaaaaagcgtccgaacaatcctcatcttttgaagatgccaggagcaattcagaatactatctgattgaatgtgaacctgcctggttaatttatta

SEQ ID NO: 106243 - DNA, 1340 bp, Homo sapiens
  Payload ID: 869
  Gene Symbol: ADH4
  Gene Name: alcohol dehydrogenase 4 (class II), pi polypeptide
  ENST ID: ENST00000506705
  CDS Start-End: 138-248
tttgaagctttcttaactcagaaagaaacttccaacacagtttcccaaagaaaaatgggcaccaagggcaaaattttgatttagtggatttgaggcagggctttcatctctaacaaattcccaagtgatgtgaataaatgcttgtccgaggaccacacttcgagttgcagagatgtaaaacacatctattctccagcaattatctgactcagagggaaaaacttgagacattatatcaaggttattaaatgcaaagcagccatcgcctgggaagcaggcaagcccctttgcattgaagaggttgaagtagctccccccaaggctcatgaagttcgcattcagatcattgctacctctctgtgccatactgatgccactgttatcgattctaaatttgagggcctagctttcccagtgatcgttggccatgaggctgcaggtattgtggaaagtattgggccaggagtgaccaacgtcaaaccaggtgacaaagtaattccactttatgcacctctatgtagaaaatgcaagttttgtctgagtccactcacaaatttgtgtgggaaaatcagtaatctcaaaagtcctgctagtgatcaacaactaatggaagacaaaaccagcaggtttacctgcaaaggaaaaccagtttaccatttctttggaaccagtacattctctcagtacactgtggtgtcagatatcaatcttgccaaaatagatgatgatgcaaatttagagagagtttgtctgcttggatgtgggttttcaactggctatggggctgcaatcaacaatgccaaggtcacccctggttcgacttgtgctgtctttggcctaggaggtgtgggtctttctgctgtaatgggttgtaaagcagcaggagcttccagaatcataggtattgacatcaacagtgagaagtttgtgaaggctaaagccctgggagccactgactgcctcaatcctagagacttacataaaccgatccaggaagttatcattgaattgaccaagggaggtgtggattttgcccttgactgtgcaggtggatctgaaaccatgaaagcagccctggactgtacaaccgcaggctggggatcatgtactttcattggagtagctgctggtagcaaaggattgactatttttccagaggagctaataatcggccgtactataaatggaacattctttggtggttggaaaagtgtagattctatcccaaagctggtcactgactataagaataagaaattcaatctggatgcactggtgacccataccctgccttttgacaaaatcagtgaggcatttgacctaatgaaccaaggaaaaag

SEQ ID NO: 106244 - DNA, 489 bp, Homo sapiens
  Payload ID: 869
  Gene Symbol: ADH4
  Gene Name: alcohol dehydrogenase 4 (class II), pi polypeptide
  ENST ID: ENST00000504894
  CDS Start-End: 137-247
acggaactccctgggtaggagtttgaagctttcttaactcagaaagaaacttccaacacagtttcccaaagaaaaatgggcaccaagggcaaagcagggctttcatctctaacaaattcccaagtgatgtgaataaatgcttgtccgaggaccacacttcgagttgcagagatgtaaaacacatctattctccagcaattatctgactcagagggaaaaacttgagacattatatcaaggttattaaatgcaaagcagccatcgcctgggaagcaggcaagcccctttgcattgaagaggttgaagtagctccccccaaggctcatgaagttcgcattcagatcattgctacctctctgtgccatactgatgccactgttatcgattctaaatttgagggcctagctttcccagtgatcgttggccatgaggctgcaggtattgtggaaagtattgggccaggagtgaccaacgtcaaaccaggtgaca

SEQ ID NO: 106245 - DNA, 665 bp, Homo sapiens
  Payload ID: 869
  Gene Symbol: ADH4
  Gene Name: alcohol dehydrogenase 4 (class II), pi polypeptide
  ENST ID: ENST00000504125
  CDS Start-End: 47-665
tttcttaactcagaaagaaacttccaacacagtttcccaaagaaaaatgggcaccaagggcaaagttattaaatgcaaagcagccatcgcctgggaagcaggcaagcccctttgcattgaagaggttgaagtagctccccccaaggctcatgaagttcgcattcagatcattgctacctctctgtgccatactgatgccactgttatcgattctaaatttgagggcctagctttcccagtgatcgttggccatgaggctgcaggtattgtggaaagtattgggccaggagtgaccaacgtcaaaccaggtgacaaagtaattccactttatgcacctctatgtagaaaatgcaagttttgtctgagtccactcacaaatttgtgtgggaaaatcaggtttacctgcaaaggaaaaccagtttaccatttctttggaaccagtacattctctcagtacactgtggtgtcagatatcaatcttgccaaaatagatgatgatgcaaatttagagagagtttgtctgcttggatgtgggttttcaactggctatggggctgcaatcaacaatgccaaggtcacccctggttcgacttgtgctgtctttggcctaggaggtgtgggtctttctgctgtaatgggttgtaaagcagcaggagcttccagaa

SEQ ID NO: 106246 - DNA, 1974 bp, Homo sapiens
  Payload ID: 869
  Gene Symbol: ADH4
  Gene Name: alcohol dehydrogenase 4 (class II), pi polypeptide
  ENST ID: ENST00000629236
  CDS Start-End: 60-1235
aggagtttgaagctttcttaactcagaaagaaacttccaacacagtttcccaaagaaaaatgggcaccaagggcaaagttattaaatgcaaagcagccatcgcctgggaagcaggcaagcccctttgcattgaagaggttgaagtagctccccccaaggctcatgaagttcgcattcagatcattgctacctctctgtgccatactgatgccactgttatcgattctaaatttgagggcctagctttcccagtgatcgttggccatgaggctgcaggtattgtggaaagtattgggccaggagtgaccaacgtcaaaccaggtgacaaagtaattccactttatgcacctctatgtagaaaatgcaagttttgtctgagtccactcacaaatttgtgtgggaaaatcagtaatctcaaaagtcctgctagtgatcaacaactaatggaagacaaaaccagcaggtttacctgcaaaggaaaaccagtttaccatttctttggaaccagtacattctctcagtacactgtggtgtcagatatcaatcttgccaaaatagatgatgatgcaaatttagagagagtttgtctgcttggatgtgggttttcaactggctatggggctgcaatcaacaatgccaaggtcacccctggttcgacttgtgctgtctttggcctaggaggtgtgggtctttctgctgtaatgggttgtaaagcagcaggagcttccagaatcataggtattgacatcaacagtgagaagtttgtgaaggctaaagccctgggagccactgactgcctcaatcctagagacttacataaaccgatccaggaagttatcattgaattgaccaagggaggtgtggattttgcccttgactgtgcaggtggatctgaaaccatgaaagcagccctggactgtacaaccgcaggctggggatcatgtactttcattggagtagctgctggtagcaaaggattgactatttttccagaggagctaataatcggccgtactataaatggaacattctttggtggttggaaaagtgtagattctatcccaaagctggtcactgactataagaataagaaattcaatctggatgcactggtgacccataccctgccttttgacaaaatcagtgaggcatttgacctaatgaaccaaggaaaaagcgtccgaacaatcctcatctttagatgccaggagcaattcagaatactatctgattgaatgtgaacctgcctggttaatttattacctgatttgatgaaccaaggaaagccatgagtttaaacaaatatttacatttaatatgggaacataaaagagctttaaatattatagactttgtacctgttatatatatgaatattccctatgttaaataataataataactagtgtttatgaatagaatcatatcatctttagaaattgtttaaaattagttctgggaagttgaaagtggggaatgaagagataataaataaaactagattggccatatgtttataatttttttagattgggtaatgaatacatggagtttcattatacttttctctccacttttgtctatgttgaaaattttctgggagctaaatgatgagaacacatggacacatgatggggaacaacacacactggggcctgttgagggcagggagtcggcagagagagagcatcaggaagaatagctaatggatgctgggcttcatacctgggtgatgagatgatctgtgcagcaaagcaccatggtacatgtttacctatgtaacaaacctgcacatcctgcacatgtaccctggaacttaataaaagttggaaatttttaaaaagaatgaataagacctggtatttgatagcacaacagggagactatagtcaacagcaatttaattgtatattttaatatgactaaaagagtataatggattgtttgtaacacaaataaatgcttgaggagatg

SEQ ID NO: 106247 - DNA, 2615 bp, Homo sapiens
  Payload ID: 870
  Gene Symbol: ADH5
  Gene Name: alcohol dehydrogenase 5 (class III), chi polypeptide
  Uniprot ID: P11766
  ENST ID: ENST00000296412
  CDS Start-End: 52-1176
gcgcggcccaccccggatgtcagccccccgcgccgaccagaatccgtgaacatggcgaacgaggttatcaagtgcaaggctgcagttgcttgggaggctggaaagcctctctccatagaggagatagaggtggcacccccaaaggctcatgaagttcgaatcaagatcattgccactgcggtttgccacaccgatgcctataccctgagtggagctgatcctgagggttgttttccagtgatcttgggacatgaaggtgctggaattgtggaaagtgttggtgagggagttactaagctgaaggcgggtgacactgtcatcccactttacatcccacagtgtggagaatgcaaattttgtctaaatcctaaaactaacctttgccagaagataagagtcactcaagggaaaggattaatgccagatggtaccagcagatttacttgcaaaggaaagacaattttgcattacatgggaaccagcacattttctgaatacacagttgtggctgatatctctgttgctaaaatagatcctttagcacctttggataaagtctgccttctaggttgtggcatttcaaccggttatggtgctgctgtgaacactgccaagttggagcctggctctgtttgtgccgtctttggtctgggaggagtcggattggcagttatcatgggctgtaaagtggctggtgcttcccggatcattggtgtggacatcaataaagataaatttgcaagggccaaagagtttggagccactgaatgtattaaccctcaggattttagtaaacccatccaggaagtgctcattgagatgaccgatggaggagtggactattcctttgaatgtattggtaatgtgaaggtcatgagagcagcacttgaggcatgtcacaagggctggggcgtcagcgtcgtggttggagtagctgcttcaggtgaagaaattgccactcgtccattccagctggtaacaggtcgcacatggaaaggcactgcctttggaggatggaagagtgtagaaagtgtcccaaagttggtgtctgaatatatgtccaaaaagataaaagttgatgaatttgtgactcacaatctgtcttttgatgaaatcaacaaagcctttgaactgatgcattctggaaagagcattcgaactgttgtaaagatttaattcaaaagagaaaaataatgtccatcctgtcgtgatgtgataggagcagcttaacaggcagggagaagcgcctccaacctcacagcctcgtagagcttcacagctactccagaaaatagggttatgtgtgtcattcatgaatctctataatcaaggacaaggataattcagtcatgaacctgttttctggatgctcctccacataaataattgctagtttattaaggaatattttaacataataaaagtaatttctacatttgtgtggaaattgtcttgttttatgctgtcatcattgtcacggtttgtctgcccattatcttcattctgcaagggaaagggaaaggaagcagggcagtggtgggtgtctgaaacctcagaaacataacgttgaacttttaagggtctcagtccccgttgattaaagaacagatcctagccatcagtgacaaagttaatcaggacccaagtctgcttctgtgatattatcttgaagggaggtactgtgccttgttcatacctgtaccccaaattcctaggatggcatctgcccttcagggggcactaaaatgtattattgaaacagcattctgggcttaaataggtgtatgtatgtgttggttgtgactgtactatttctagtatagtgaactacatactgaatatccaagttctcagcacctacttttgtcaaatcttaacattttgccacttcgagatcacattgccattcctcccctccagaggtaacaattatccacaatttgatgtttatcattcctgtgttgttgtactttcactgtgtataacctaaaccatctactctttagtactgttttatatatttttaagcctcatacttgctcattctacagcttttttcactcattattgtataattatatctgaagctctcgttcattaattttagtcctgtgtagcagaattcaattacgggaactaccataatttatctgttctccagttgaaggcatgaagttgttgccagtttctgtattataacactgtagtggaacattcttctgcattgggctcactgcgtgttacctaagacgtatcacagaataaacacatttagccttatagacattgccaaattgctcttcaaagtaaatgtgagtttttgtgaattacatgagtatggaatggtgttttattatgactttagtttgcattttcctcaattctcgttaaatccttcattctaatggacattttattgtgaagaacctgttcatatcctgtgctcaactttgtattgaattatttttctctgaataatttttaggagttcttttattctagacatcaatcatttgtcagttttatatgttgcaaatatcttctagtctatcttgtgacttttctttttactttatggtattttgttgaataaagttttaatgtagtcacataaa

SEQ ID NO: 106248 - DNA, 623 bp, Homo sapiens
  Payload ID: 870
  Gene Symbol: ADH5
  Gene Name: alcohol dehydrogenase 5 (class III), chi polypeptide
  ENST ID: ENST00000505652
  CDS Start-End: 37-384
gatgtcagccccccgcgccgaccagaatccgtgaacatggcgaacgaggttatcaagtgcaaggctgcagttgcttgggaggctggaaagcctctctccatagaggagatagaggtggcacccccaaaggctcatgaagttcgaatcaagatcattgccactgcggtttgccacaccgatgcctataccctgagtggagctgatcctgagggttgttttccagtgatcttgggacatgaaggtgctggaattgtggaaagtgttggtgagggagttactaagctgaaggcgggtgacactgtcatcccactttacatcccacagtgtggagaatgcaaattttgtctaaatcctaaaactaacctttgccagaagataagataaaagagaaactaaaggggtgtgcccagtatcaccagccgttaagatataaaacagaattttctgtacccattctcttcacataacagcaggctaaatttgccaaaccatgtagtaaggaaagacgtgcttctgagattaaacgaaatcatttttatgaaccactgcccaagtcactcaagggaaaggattaatgccagatggtaccagcagatttacttgcaaaggaaagacaattttgc

SEQ ID NO: 106249 - DNA, 697 bp, Homo sapiens
  Payload ID: 870
  Gene Symbol: ADH5
  Gene Name: alcohol dehydrogenase 5 (class III), chi polypeptide
  ENST ID: ENST00000502590
  CDS Start-End: 5-292
gaacatggcgaacgaggttatcaagtgcaaggctgcagttgcttgggaggctggaaagcctctctccatagaggagatagaggtggcacccccaaaggctcatgaagttcgaatcaagatcattgccactgcggtttgccacaccgatgcctataccctgagtggagctgatcctgagggttgttttccagtgatcttgggacatgaaggtgctggaattgtggaaagtgttggtgagggagttactaagctgaaggcggtgtggagaatgcaaattttgtctaaatcctaaaactaacctttgccagaagataagagtcactcaagggaaaggattaatgccagatggtaccagcagatttacttgcaaaggaaagacaattttgcattacatgggaaccagcacattttctgaatacacagttgtggctgatatctctgttgctaaaatagatcctttagcacctttggataaagtctgccttctaggttgtggcatttcaaccggttatggtgctgctgtgaacactgccaagttggagcctggctctgtttgtgccgtctttggtctgggaggagtcggattggcagttatcatgggctgtaaagtggctggtgcttcccggatcattggtgtggacatcaataaagataaatttgcaagggccaaagagtttggagccactgaatgtattaa

SEQ ID NO: 106250 - DNA, 822 bp, Homo sapiens
  Payload ID: 870
  Gene Symbol: ADH5
  Gene Name: alcohol dehydrogenase 5 (class III), chi polypeptide
  ENST ID: ENST00000512659
  CDS Start-End: 3-173
acatggcgaacgaggttatcaagtgcaaggctgcagttgcttgggaggctggaaagcctctctccatagaggagatagaggtggcacccccaaaggctcatgaagttcgaatcaaggtgacactgtcatcccactttacatcccacagtgtggagaatgcaaattttgtctaaatcctaaaactaacctttgccagaagataagagtcactcaagggaaaggattaatgccagatggtaccagcagatttacttgcaaaggaaagacaattttgcattacatgggaaccagcacattttctgaatacacagttgtggctgatatctctgttgctaaaatagatcctttagcacctttggataaagtctgccttctaggttgtggcatttcaaccggttatggtgctgctgtgaacactgccaagttggagcctggctctgtttgtgccgtctttggtctgggaggagtcggattggcagttatcatgggctgtaaagtggctggtgcttcccggatcattggtgtggacatcaataaagataaatttgcaagggccaaagagtttggagccactgaatgtattaaccctcaggattttagtaaacccatccaggaagtgctcattgagatgaccgatggaggagtggactattcctttgaatgtattggtaatgtgaaggtcatgagagcagcacttgaggcatgtcacaagggctggggcgtcagcgtcgtggttggagtagctgcttcaggtgaagaaattgccactcgtccattccagctggtaacaggtcgcacatggaaaggcactgcctttggagg

SEQ ID NO: 106251 - DNA, 545 bp, Homo sapiens
  Payload ID: 870
  Gene Symbol: ADH5
  Gene Name: alcohol dehydrogenase 5 (class III), chi polypeptide
  ENST ID: ENST00000502386
  CDS Start-End: 14-61
agaatccgtgaacatggcgaacgagttttgcaccaagccggtggtattcagaacagcctgagcaaaagaatttcttcaggcatatgttaagcatgcagatttcttggaccccatgccagacctgctgaatcagattctctcggaacttgtgttcttaacctgcttttgcatatgcactgtagaaggccattaaatatttgatgagtacaactttttaaccaaaagatacttttctatctgaccaggttatcaagtgcaaggctgcagttgcttgggaggctggaaagcctctctccatagaggagatagaggtggcacccccaaaggctcatgaagttcgaatcaagatcattgccactgcggtttgccacaccgatgcctataccctgagtggagctgatcctgagggttgttttccagtgatcttgggacatgaaggtgctggaattgtggaaagtgttggtgagggagttactaagctgaaggcgggtaaggagaatacttgaaccacttgtttaataattttggcttattcctatggggaa

SEQ ID NO: 106252 - DNA, 786 bp, Homo sapiens
  Payload ID: 870
  Gene Symbol: ADH5
  Gene Name: alcohol dehydrogenase 5 (class III), chi polypeptide
  ENST ID: ENST00000503130
  CDS Start-End: 1-786
gttatcaagtgcaaggctgcagttgcttgggaggctggaaagcctctctccatagaggagatagaggtggcacccccaaaggctcatgaagttcgaatcaagatcattgccactgcggtttgccacaccgatgcctataccctgagtggagctgatcctgagggttgttttccagtgatcttgggacatgaaggtgctggaattgtggaaagtgttggtgacactgtcatcccactttacatcccacagtgtggagaatgcaaattttgtctaaatcctaaaactaacctttgccagaagataagagtcactcaagggaaaggattaatgccagatggtaccagcagatttacttgcaaaggaaagacaattttgcattacatgggaaccagcacattttctgaatacacagttgtggctgatatctctgttgctaaaatagatcctttagcacctttggataaagtctgccttctaggttgtggcatttcaaccggttatggtgctgctgtgaacactgccaagttggagcctggctctgtttgtgccgtctttggtctgggaggagtcggattggcagttatcatgggctgtaaagtggctggtgcttcccggatcattggtgtggacatcaataaagataaatttgcaagggccaaagagtttggagccactgaatgtattaaccctcaggattttagtaaacccatccaggaagtgctcattgagatgaccgatggaggagtggactattcctttgaatgtattggtaatgtgaaggtcatg

SEQ ID NO: 106253 - DNA, 1299 bp, Homo sapiens
  Payload ID: 870
  Gene Symbol: ADH5
  Gene Name: alcohol dehydrogenase 5 (class III), chi polypeptide
  ENST ID: ENST00000626055
  CDS Start-End: 52-222
gcgcggcccaccccggatgtcagccccccgcgccgaccagaatccgtgaacatggcgaacgaggttatcaagtgcaaggctgcagttgcttgggaggctggaaagcctctctccatagaggagatagaggtggcacccccaaaggctcatgaagttcgaatcaaggtgacactgtcatcccactttacatcccacagtgtggagaatgcaaattttgtctaaatcctaaaactaacctttgccagaagataagagtcactcaagggaaaggattaatgccagatggtaccagcagatttacttgcaaaggaaagacaattttgcattacatgggaaccagcacattttctgaatacacagttgtggctgatatctctgttgctaaaatagatcctttagcacctttggataaagtctgccttctaggttgtggcatttcaaccggttatggtgctgctgtgaacactgccaagttggagcctggctctgtttgtgccgtctttggtctgggaggagtcggattggcagttatcatgggctgtaaagtggctggtgcttcccggatcattggtgtggacatcaataaagataaatttgcaagggccaaagagtttggagccactgaatgtattaaccctcaggattttagtaaacccatccaggaagtgctcattgagatgaccgatggaggagtggactattcctttgaatgtattggtaatgtgaaggtcatgagagcagcacttgaggcatgtcacaagggctggggcgtcagcgtcgtggttggagtagctgcttcaggtgaagaaattgccactcgtccattccagctggtaacaggtcgcacatggaaaggcactgcctttggaggatggaagagtgtagaaagtgtcccaaagttggtgtctgaatatatgtccaaaaagataaaagttgatgaatttgtgactcacaatctgtcttttgatgaaatcaacaaagcctttgaactgatgcattctggaaagagcattcgaactgttgtaaagatttaattcaaaagagaaaaataatgtccatcctgtcgtgatgtgataggagcagcttaacaggcagggagaagcgcctccaacctcacagcctcgtagagcttcacagctactccagaaaatagggttatgtgtgtcattcatgaatctctataatcaaggacaaggataattcagtcatgaacctgttttctggatgctcctccacataaataattgctagtttattaaggaatattttaacataataaaagtaatttctacatttgtg

SEQ ID NO: 106254 - DNA, 1691 bp, Homo sapiens
  Payload ID: 871
  Gene Symbol: ADH6
  Gene Name: alcohol dehydrogenase 6 (class V)
  Uniprot ID: P28332
  ENST ID: ENST00000237653
  CDS Start-End: 386-1492
tgtattttgaaaacaacagaaaagaaatacttttgtacactctgttagaaattttaagtttggacatttaaaagtccaaatttaaaactcaaaaaaatggataataagaggggacctgtttgattaagggagaaaaaaatagtttgcattttcaccttttgtgctctttcactgagatgagcctatttcagattacacttaggaacttccatcaagcagcgggagagcctacttttcctgtttaataattaccagactacagagaaagctcaggacccagccttctgatctaccagtcgcctgtgtacctttgtactttctacagtgaaagttgctacaggatctccctttctcaataaattcatctgcggtggagaaaatcagcatgagtactacaggccaagtcatcagatgcaaagcagccatactctggaagcctggtgcaccattttctattgaagaggtagaagtggccccaccaaaggcaaaggaagttcgcataaaggttgtggccaccggactgtgtggtacagagatgaaagtgttggggagtaaacacttggacctcttgtatcccaccatcttgggccatgaaggggctggaatcgttgagagtattggagaaggagtaagcacagtgaaaccaggtgacaaagttatcacactctttctgccacagtgtggagaatgtacctcttgcctgaattctgagggcaatttttgtatacaattcaaacagtcaaaaacccaactgatgtctgatggtaccagcaggtttacctgcaagggaaaatcaatatatcactttggtaataccagcaccttctgtgaatacacagtgataaaggaaatctcagttgccaagattgatgcagtcgctcctctagagaaagtatgcctaattagctgtggcttttccactgggtttggtgctgcaatcaatactgccaaggtgactccaggttctacctgtgctgtgtttggcctgggaggagtcggcttgtctgttgtcatgggttgtaaagcagcaggagcagccaggatcattggagtggatgtcaacaaggagaaatttaagaaggcacaggaattgggtgctactgagtgcctcaaccctcaggacttaaagaaacccattcaagaagttttatttgatatgacagatgctggtatagacttctgctttgaggccattggaaatctggacgttctggcagctgccctcgcctcctgcaatgagagctatggggtctgtgtggttgttggggtgttgcctgccagtgttcaactcaaaatcagtggccagttgttcttctcaggacgttctttgaagggttctgtttttggaggctggaagagcagacagcacatccctaaactggttgctgattatatggcagagaagttgaatctagatccactaattactcatactctgaatcttgataaaatcaatgaagcagttgaattaatgaaaactggaaaatggtaaactgcccacataaattttatgtctgtgtgtttgagaccaagagaaagggtgtattggcttgggagtagaagaagggtcgtccctgctgcagaagctgtatactgataattgaagaggctttcaggaatttgtaaagcatctccttcccctctgcattttgttttatttctagctaataaaatacataatcctgaaagta

SEQ ID NO: 106255 - DNA, 3337 bp, Homo sapiens
  Payload ID: 871
  Gene Symbol: ADH6
  Gene Name: alcohol dehydrogenase 6 (class V)
  ENST ID: ENST00000394897
  CDS Start-End: 84-971
gtgtacctttgtactttctacagtgaaagttgctacaggatctccctttctcaataaattcatctgcggtggagaaaatcagcatgagtactacaggccaagtcatcagatgcaaagcagccatactctggaagcctggtgcaccattttctattgaagaggtagaagtggccccaccaaaggcaaaggaagttcgcataaaggttgtggccaccggactgtgtggtacagagatgaaagtgttggggagtaaacacttggacctcttgtatcccaccatcttgggccatgaaggggctggaatcgttgagagtattggagaaggagtaagcacagtgaaaccaggtgacaaagttatcacactctttctgccacagtgtggagaatgtacctcttgcctgaattctgagggcaatttttgtatacaattcaaacagtcaaaaacccaactgatgtctgatggtaccagcaggtttacctgcaagggaaaatcaatatatcactttggtaataccagcaccttctgtgaatacacagtgataaaggaaatctcagttgccaagattgatgcagtcgctcctctagagaaagtatgcctaattagctgtggcttttccactgggtttggtgctgcaatcaatactgccaaggtgactccaggttctacctgtgctgtgtttggcctgggaggagtcggcttgtctgttgtcatgggttgtaaagcagcaggagcagccaggatcattggagtggatgtcaacaaggagaaatttaagaaggcacaggaattgggtgctactgagtgcctcaaccctcaggacttaaagaaacccattcaagaagttttatttgatatgacagatgctggtatagacttctgctttgaggccattggaaatctggacgttctggctggaagagcagacagcacatccctaaactggttgctgattatatggcagagaagttgaatctagatccactaattactcatactctgaatcttgataaaatcaatgaagcagttgaattaatgaaaactggaaaatggtaaactgcccacataaattttatgtctgtgtgtttgagaccaagagaaagggtgtattggcttgggagtagaagaagggtcgtccctgctgcagaagctgtatactgataattgaagaggctttcaggaatttgtaaagcatctccttcccctctgcattttgttttatttctagctaataaaatacataatcctgaaagtatttaagtgttcacctaccgttacttttgccattagcattgtatttccaatatggattttttttttacatgacatattaatggaagtcagcttataaaattgtagctcaagtttaaaaacataagaaggtagttcacaaataggccattgttgtatttgttgttctactttgggggagaagaggaattattcataggattcctaattctgaatcctatctttgacccaaaaaacagaaaccagccataacccagaaactggcattccccacacgagtataagcttgcttacctactttttacccttggagtttcatgtcattttaaaaaatcttcccatggcttatttaatcttctcatttttcacctaaagagaaaaaaaatctagtttactgctctacaaagtgagaatttgaaatccaaaacacaaatgttgctctaaaaatgttccaaccttttttctcttcttctttttttcagtatccgctgtatcctgttactttaagtacaatgtaatacatgcaagacccaaaggatatttcaccaactcaatggcatttgatgtaattttcatgatttagaagaattattcacccaatcccatttctatattctgacttctgattcactccgcagtggacctatatctggcttctgacctaaccatttcatcaaaattgttcttacgtaacccagtgtcaccaaggatcagcctccttttcagagctagattaaggttggcttgaatcactcaactccacatccttcagacataaaaggtcaatgcaagatgctcccattttcatagttcctctacctgtggacctttatattcttgtacactatatgtctctctcacaggcctagacatgaaactctgccattttactctaaagaaacaaaactccgcattaatgagtttattgaagattcaggttaacctgaatcaagttaacccagtctcaaatgctcacttatcctatctccttggcacaaatctctcctctcctggattgccaaagaaaattcaaattattcttcaattagtcaggatgatttgactatcagcagttcatagtacccatcttcataactaagccacctagggatccagcagaaaaaaaagggatgaggggagtcatcatacaggaggtggatcatttagcaggatccacacttcctacaaagcggttgtaatattaaataacaaaactgttttttattccaatcttcacataaaacaggaataattgtatactttcttactaatgtgttccatggagtttttcctccaagaagtggcttaggggaaaatgagccccagtaatgctttgtggcatccaatccttctaccccgaccctttgactttctgccccagcccctcttagttctcctagaattaggactaaggttaagtgccctcttgggatatgacttccttcccttcctcttgatacaaaaagagcctattaccaaccctcatacacacaagagttcccttcctagttgcagactcttctgctccagctggactcccctagctctggactcccactagatcacacaggggtccctgcatgtcagtaaactttggatgaccttgggagaccaaaaaatggaatatcattttttgatctaaacaaaatagtttcctgatttaacactggccaggaaggtgggctgcaccctcagtctctctctcccatcatggttttcacatgatatcaaaggactctcataacagtctgattcttatgagttgggcatcctgtgtttccctttaggggcctgcttccttcaaatagaggagatgggtgctatgaaacctattcactctggacttgggatggctcttctccatcttcccaagtctgagctggagcctccatgcccaactctgctctgctcttctatttcctgacagcagctaaggcatgttcctgttctgcccccaaattgaccttactaacagtgagaacttggaggagtcttcgggtcttgggaaatccaagttttcccggaaacgttttgttgtaaacagtgtccacactctttgctccaataaagctcggttccttaagccac

SEQ ID NO: 106256 - DNA, 2802 bp, Homo sapiens
  Payload ID: 871
  Gene Symbol: ADH6
  Gene Name: alcohol dehydrogenase 6 (class V)
  ENST ID: ENST00000394899
  CDS Start-End: 95-1222
accagtcgcctgtgtacctttgtactttctacagtgaaagttgctacaggatctccctttctcaataaattcatctgcggtggagaaaatcagcatgagtactacaggccaagtcatcagatgcaaagcagccatactctggaagcctggtgcaccattttctattgaagaggtagaagtggccccaccaaaggcaaaggaagttcgcataaaggttgtggccaccggactgtgtggtacagagatgaaagtgttggggagtaaacacttggacctcttgtatcccaccatcttgggccatgaaggggctggaatcgttgagagtattggagaaggagtaagcacagtgaaaccaggtgacaaagttatcacactctttctgccacagtgtggagaatgtacctcttgcctgaattctgagggcaatttttgtatacaattcaaacagtcaaaaacccaactgatgtctgatggtaccagcaggtttacctgcaagggaaaatcaatatatcactttggtaataccagcaccttctgtgaatacacagtgataaaggaaatctcagttgccaagattgatgcagtcgctcctctagagaaagtatgcctaattagctgtggcttttccactgggtttggtgctgcaatcaatactgccaaggtgactccaggttctacctgtgctgtgtttggcctgggaggagtcggcttgtctgttgtcatgggttgtaaagcagcaggagcagccaggatcattggagtggatgtcaacaaggagaaatttaagaaggcacaggaattgggtgctactgagtgcctcaaccctcaggacttaaagaaacccattcaagaagttttatttgatatgacagatgctggtatagacttctgctttgaggccattggaaatctggacgttctggcagctgccctcgcctcctgcaatgagagctatggggtctgtgtggttgttggggtgttgcctgccagtgttcaactcaaaatcagtggccagttgttcttctcaggacgttctttgaagggttctgtttttggaggctggaagagcagacagcacatccctaaactggttgctgattatatggcagagaagttgaatctagatccactaattactcatactctgaatcttgataaaatcaatgaagcagttgaattaatgaaaactggaaaatgtatccgctgtatcctgttactttaagtacaatgtaatacatgcaagacccaaaggatatttcaccaactcaatggcatttgatgtaattttcatgatttagaagaattattcacccaatcccatttctatattctgacttctgattcactccgcagtggacctatatctggcttctgacctaaccatttcatcaaaattgttcttacgtaacccagtgtcaccaaggatcagcctccttttcagagctagattaaggttggcttgaatcactcaactccacatccttcagacataaaaggtcaatgcaagatgctcccattttcatagttcctctacctgtggacctttatattcttgtacactatatgtctctctcacaggcctagacatgaaactctgccattttactctaaagaaacaaaactccgcattaatgagtttattgaagattcaggttaacctgaatcaagttaacccagtctcaaatgctcacttatcctatctccttggcacaaatctctcctctcctggattgccaaagaaaattcaaattattcttcaattagtcaggatgatttgactatcagcagttcatagtacccatcttcataactaagccacctagggatccagcagaaaaaaaagggatgaggggagtcatcatacaggaggtggatcatttagcaggatccacacttcctacaaagcggttgtaatattaaataacaaaactgttttttattccaatcttcacataaaacaggaataattgtatactttcttactaatgtgttccatggagtttttcctccaagaagtggcttaggggaaaatgagccccagtaatgctttgtggcatccaatccttctaccccgaccctttgactttctgccccagcccctcttagttctcctagaattaggactaaggttaagtgccctcttgggatatgacttccttcccttcctcttgatacaaaaagagcctattaccaaccctcatacacacaagagttcccttcctagttgcagactcttctgctccagctggactcccctagctctggactcccactagatcacacaggggtccctgcatgtcagtaaactttggatgaccttgggagaccaaaaaatggaatatcattttttgatctaaacaaaatagtttcctgatttaacactggccaggaaggtgggctgcaccctcagtctctctctcccatcatggttttcacatgatatcaaaggactctcataacagtctgattcttatgagttgggcatcctgtgtttccctttaggggcctgcttccttcaaatagaggagatgggtgctatgaaacctattcactctggacttgggatggctcttctccatcttcccaagtctgagctggagcctccatgcccaactctgctctgctcttctatttcctgacagcagctaaggcatgttcctgttctgcccccaaattgaccttactaacagtgagaacttggaggagtcttcgggtcttgggaaatccaagttttcccggaaacgttttgttgtaaacagtgtccacactctttgctccaataaagctcggttccttaagcca

SEQ ID NO: 106257 - DNA, 511 bp, Homo sapiens
  Payload ID: 871
  Gene Symbol: ADH6
  Gene Name: alcohol dehydrogenase 6 (class V)
  ENST ID: ENST00000512708
  CDS Start-End: 1-207
gagaaatttaagaaggcacaggaattgggtgctactgagtgcctcaaccctcaggacttaaagaaacccattcaagaagttttatttgatatgacagatgctggtatagacttctgctttgaggccattggaaatctggacgttctggctggaagagcagacagcacatccctaaactggttgctgattatatggcagagaagttgaatctagatccactaattactcatactctgaatcttgataaaatcaatgaagcagttgaattaatgaaaactggaaaatgtatccgctgtatcctgttactttaagtacaatgtaatacatgcaagacccaaaggatatttcaccaactcaatggcatttgatgtaattttcatgatttagaagaattattcacccaatcccatttctatattctgacttctgattcactccgcagtggacctatatctggcttctgacctaaccatttcatcaaaattgttcttacgtaacccagtgtcaccaa

SEQ ID NO: 106258 - DNA, 991 bp, Homo sapiens
  Payload ID: 871
  Gene Symbol: ADH6
  Gene Name: alcohol dehydrogenase 6 (class V)
  ENST ID: ENST00000507484
  CDS Start-End: 23-199
atctgcggtggagaaaatcagcatgagtactacaggccaagtcatcagatgcaaagcagccatactctggaagcctggtgcaccattttctattgaagaggtagaagtggccccaccaaaggcaaaggaagttcgcataaaggtgacaaagttatcacactctttctgccacagtgtggagaatgtacctcttgcctgaattctgagggcaatttttgtatacaattcaagtgactccaggttctacctgtgctgtgtttggcctgggaggagtcggcttgtctgttgtcatgggttgtaaagcagcaggagcagccaggatcattggagtggatgtcaacaaggagaaatttaagaaggcacaggaattgggtgctactgagtgcctcaaccctcaggacttaaagaaacccattcaagaagttttatttgatatgacagatgctggtatagacttctgctttgaggccattggaaatctggacgttctggcagctgccctcgcctcctgcaatgagagctatggggtctgtgtggttgttggggtgttgcctgccagtgttcaactcaaaatcagtggccagttgttcttctcaggacgttctttgaagggttctgtttttggaggctggaagagcagacagcacatccctaaactggttgctgattatatggcagagaagttgaatctagatccactaattactcatactctgaatcttgataaaatcaatgaagcagttgaattaatgaaaactggaaaatgtatccgctgtatcctgttactttaagtacaatgtaatacatgcaagacccaaaggatatttcaccaactcaatggcatttgatgtaattttcatgatttagaagaattattcacccaatcccatttctatattctgacttctgattcactccgcagtggacctatatctggcttctgacctaaccatttcatcaaaattgttcttacgtaacccagtgtcaccaa

SEQ ID NO: 106259 - DNA, 863 bp, Homo sapiens
  Payload ID: 871
  Gene Symbol: ADH6
  Gene Name: alcohol dehydrogenase 6 (class V)
  ENST ID: ENST00000508558
  CDS Start-End: 92-863
agtcgcctgtgtacctttgtactttctacagtgaaagttgctacaggatctccctttctcaataaattcatctgcggtggagaaaatcagcatgagtactacaggccaagtcatcagatgcaaagcagccatactctggaagcctggtgcaccattttctattgaagaggtagaagtggccccaccaaaggcaaaggaagttcgcataaaggttgtggccaccggactgtgtggtacagagatgaaagtgttggggagtaaacacttggacctcttgtatcccaccatcttgggccatgaaggggctggaatcgttgagagtattggagaaggagtaagcacagtgaaaccagtgataaaggaaatctcagttgccaagattgatgcagtcgctcctctagagaaagtatgcctaattagctgtggcttttccactgggtttggtgctgcaatcaatactgccaaggtgactccaggttctacctgtgctgtgtttggcctgggaggagtcggcttgtctgttgtcatgggttgtaaagcagcaggagcagccaggatcattggagtggatgtcaacaaggagaaatttaagaaggcacaggaattgggtgctactgagtgcctcaaccctcaggacttaaagaaacccattcaagaagttttatttgatatgacagatgctggtatagacttctgctttgaggccattggaaatctggacgttctggcagctgccctcgcctcctgcaatgagagctatggggtctgtgtggttgttggggtgttgcctgccagtgttcaactcaaaatcagtggccagttgttcttctcaggacgttctttgaagggttctgtttttggag

SEQ ID NO: 106260 - DNA, 2289 bp, Homo sapiens
  Payload ID: 872
  Gene Symbol: ADH7
  Gene Name: alcohol dehydrogenase 7 (class IV), mu or sigma polypeptide
  Uniprot ID: P40394
  ENST ID: ENST00000209665
  CDS Start-End: 242-1402
tttcaatagctttgattatcttgtttttgttagatccctcctcttggtttgatcatagtagttactgtatttctttttataagttggtctgcaaagggtagggcttgcagaccattgcaaagttgtgacggctgtgagtcatattgctgaaggtggaactctgaagccagactatctatgtgaaggcacaagctgctgttatatacaacagagtgaactgagcatcagtcagaaaaagtctatgtttgcagaaatacagatccaagacaaagacaggatgggcactgctggaaaagttattaaatgcaaagcagctgtgctttgggagcagaagcaacccttctccattgaggaaatagaagttgccccaccaaagactaaagaagttcgcattaagattttggccacaggaatctgtcgcacagatgaccatgtgataaaaggaacaatggtgtccaagtttccagtgattgtgggacatgaggcaactgggattgtagagagcattggagaaggagtgactacagtgaaaccaggtgacaaagtcatccctctctttctgccacaatgtagagaatgcaatgcttgtcgcaacccagatggcaacctttgcattaggagcgatattactggtcgtggagtactggctgatggcaccaccagatttacatgcaagggcaaaccagtccaccacttcatgaacaccagtacatttaccgagtacacagtggtggatgaatcttctgttgctaagattgatgatgcagctcctcctgagaaagtctgtttaattggctgtgggttttccactggatatggcgctgctgttaaaactggcaaggtcaaacctggttccacttgcgtcgtctttggcctgggaggagttggcctgtcagtcatcatgggctgtaagtcagctggtgcatctaggatcattgggattgacctcaacaaagacaaatttgagaaggccatggctgtaggtgccactgagtgtatcagtcccaaggactctaccaaacccatcagtgaggtgctgtcagaaatgacaggcaacaacgtgggatacacctttgaagttattgggcatcttgaaaccatgattgatgccctggcatcctgccacatgaactatgggaccagcgtggttgtaggagttcctccatcagccaagatgctcacctatgacccgatgttgctcttcactggacgcacatggaagggatgtgtctttggaggtttgaaaagcagagatgatgtcccaaaactagtgactgagttcctggcaaagaaatttgacctggaccagttgataactcatgttttaccatttaaaaaaatcagtgaaggatttgagctgctcaattcaggacaaagcattcgaacggtcctgacgttttgagatccaaagtggcaggaggtctgtgttgtcatggtgaactggagtttctcttgtgagagttccctcatctgaaatcatgtatctgtctcacaaatacaagcataagtagaagatttgttgaagacatagaacccttataaagaattattaacctttataaacatttaaagtcttgtgagcacctgggaattagtataataacaatgttaatatttttgatttacattttgtaaggctataattgtatcttttaagaaaacatacacttggatttctatgttgaaatggagatttttaagagttttaaccagctgctgcagatatataactcaaaacagatatagcgtataaagatatagtaaatgcatctcctagagtaatattcacttaacacattgaaactattattttttagatttgaatataaatgtattttttaaacacttgttatgagttaagttggattacattttgaaatcagttcattccatgatgcatattactggattagattaagaaagacagaaaagattaagggacgggcacatttttcaacgattaagaatcatcattacataacttggtgaaactgaaaaagtatatcatatgggtacacaaggctatttgccagcatatattaatattttagaaaatattccttttgtaatactgaatataaacatagagctagaatcatattatcatacttatcataatgttcaatttgatacagtagaattgcaagtccctaagtccctattcactgtgcttagtagtgactccatttaataaaaagtgtttttagtttttaacaactacactgatgtatctatatatatctataacatgttaaaaattcttaagaaaattaaaaattatataaaatg

SEQ ID NO: 106261 - DNA, 2516 bp, Homo sapiens
  Payload ID: 872
  Gene Symbol: ADH7
  Gene Name: alcohol dehydrogenase 7 (class IV), mu or sigma polypeptide
  ENST ID: ENST00000437033
  CDS Start-End: 505-1629
ctgttttcatttatatttaattccagaaaccacatcaagtctttgcagaatgaagtagagcattaagaagtagagatgtacacacgcatctctaaaatcagccatgcctaggcaaagcagcttgcacttaaacacccaatacatttttcatgattgtgttgaagtgaagtaacctaacccgtttttatatccttcaaaataaggtggataggaatgctttcagcccttttcaatagctttgattatcttgtttttgttagatccctcctcttggtttgatcatagtagttactgtatttctttttataagttggtctgcaaagggtagggcttgcagaccattgcaaagttgtgacggctgtgagtcatattgctgaaggtggaactctgaagccagactatctatgtgaaggcacaagctgctgttatatacaacagagtgaactgagcatcagtcagaaaaagtctatgtttgcagaaatacagatccaagacaaagacaggatgggcactgctggaaaagttattaaatgcaaagcagctgtgctttgggagcagaagcaacccttctccattgaggaaatagaagttgccccaccaaagactaaagaagttcgcattaagattttggccacaggaatctgtcgcacagatgaccatgtgataaaaggaacaatggtgtccaagtttccagtgattgtgggacatgaggcaactgggattgtagagagcattggagaaggagtgactacagtgaaaccaggtgacaaagtcatccctctctttctgccacaatgtagagaatgcaatgcttgtcgcaacccagatggcaacctttgcattaggagcgatattactggtcgtggagtactggctgatggcaccaccagatttacatgcaagggcaaaccagtccaccacttcatgaacaccagtacatttaccgagtacacagtggtggatgaatcttctgttgctaagattgatgatgcagctcctcctgagaaagtctgtttaattggctgtgggttttccactggatatggcgctgctgttaaaactggcaaggtcaaacctggttccacttgcgtcgtctttggcctgggaggagttggcctgtcagtcatcatgggctgtaagtcagctggtgcatctaggatcattgggattgacctcaacaaagacaaatttgagaaggccatggctgtaggtgccactgagtgtatcagtcccaaggactctaccaaacccatcagtgaggtgctgtcagaaatgacaggcaacaacgtgggatacacctttgaagttattgggcatcttgaaaccatgattgatgccctggcatcctgccacatgaactatgggaccagcgtggttgtaggagttcctccatcagccaagatgctcacctatgacccgatgttgctcttcactggacgcacatggaagggatgtgtctttggaggtttgaaaagcagagatgatgtcccaaaactagtgactgagttcctggcaaagaaatttgacctggaccagttgataactcatgttttaccatttaaaaaaatcagtgaaggatttgagctgctcaattcaggacaaagcattcgaacggtcctgacgttttgagatccaaagtggcaggaggtctgtgttgtcatggtgaactggagtttctcttgtgagagttccctcatctgaaatcatgtatctgtctcacaaatacaagcataagtagaagatttgttgaagacatagaacccttataaagaattattaacctttataaacatttaaagtcttgtgagcacctgggaattagtataataacaatgttaatatttttgatttacattttgtaaggctataattgtatcttttaagaaaacatacacttggatttctatgttgaaatggagatttttaagagttttaaccagctgctgcagatatataactcaaaacagatatagcgtataaagatatagtaaatgcatctcctagagtaatattcacttaacacattgaaactattattttttagatttgaatataaatgtattttttaaacacttgttatgagttaagttggattacattttgaaatcagttcattccatgatgcatattactggattagattaagaaagacagaaaagattaagggacgggcacatttttcaacgattaagaatcatcattacataacttggtgaaactgaaaaagtatatcatatgggtacacaaggctatttgccagcatatattaatattttagaaaatattccttttgtaatactgaatataaacatagagctagaatcatattatcatacttatcataatgttcaatttgatacagtagaattgcaagtccctaagtccctattcactgtgcttagtagtgactccatttaataaaaagtgtttttagtttttaacaactacactgatgtatctatatatatctataacatgttaaaaattcttaagaaaattaaaaattatataaaatg

SEQ ID NO: 106262 - DNA, 1325 bp, Homo sapiens
  Payload ID: 872
  Gene Symbol: ADH7
  Gene Name: alcohol dehydrogenase 7 (class IV), mu or sigma polypeptide
  Uniprot ID: P40394
  ENST ID: ENST00000476959
  CDS Start-End: 31-1215
aattaaacacttggagatattccttgaggaatgaaatgcttggtgagcaggcatacagtgagggaaacactggatatggtgtttcagagaatgtcagtggaagcaggggttattaaatgcaaagcagctgtgctttgggagcagaagcaacccttctccattgaggaaatagaagttgccccaccaaagactaaagaagttcgcattaagattttggccacaggaatctgtcgcacagatgaccatgtgataaaaggaacaatggtgtccaagtttccagtgattgtgggacatgaggcaactgggattgtagagagcattggagaaggagtgactacagtgaaaccaggtgacaaagtcatccctctctttctgccacaatgtagagaatgcaatgcttgtcgcaacccagatggcaacctttgcattaggagcgatattactggtcgtggagtactggctgatggcaccaccagatttacatgcaagggcaaaccagtccaccacttcatgaacaccagtacatttaccgagtacacagtggtggatgaatcttctgttgctaagattgatgatgcagctcctcctgagaaagtctgtttaattggctgtgggttttccactggatatggcgctgctgttaaaactggcaaggtcaaacctggttccacttgcgtcgtctttggcctgggaggagttggcctgtcagtcatcatgggctgtaagtcagctggtgcatctaggatcattgggattgacctcaacaaagacaaatttgagaaggccatggctgtaggtgccactgagtgtatcagtcccaaggactctaccaaacccatcagtgaggtgctgtcagaaatgacaggcaacaacgtgggatacacctttgaagttattgggcatcttgaaaccatgattgatgccctggcatcctgccacatgaactatgggaccagcgtggttgtaggagttcctccatcagccaagatgctcacctatgacccgatgttgctcttcactggacgcacatggaagggatgtgtctttggaggtttgaaaagcagagatgatgtcccaaaactagtgactgagttcctggcaaagaaatttgacctggaccagttgataactcatgttttaccatttaaaaaaatcagtgaaggatttgagctgctcaattcaggacaaagcattcgaacggtcctgacgttttgagatccaaagtggcaggaggtctgtgttgtcatggtgaactggagtttctcttgtgagagttccctcatctgaaatcatgtatctgtctcacaaatacaagcataagtaga

SEQ ID NO: 106263 - DNA, 589 bp, Homo sapiens
  Payload ID: 872
  Gene Symbol: ADH7
  Gene Name: alcohol dehydrogenase 7 (class IV), mu or sigma polypeptide
  ENST ID: ENST00000474027
  CDS Start-End: 267-589
aagctttaacctgcctatcaagccctaccaggtgcaagaactgggctaggtgcaaatgggatgcagagatgcagacacaaattcaatcatccaggaactcacagtcataatctgttattaaatgcaaagcagctgtgctttgggagcagaagcaacccttctccattgaggaaatagaagttgccccaccaaagactaaagaagttcgcattaagattttggccacaggaatctgtcgcacagatgaccatgtgataaaaggaacaatggtgtccaagtttccagtgattgtgggacatgaggcaactgggattgtagagagcattggagaaggagtgactacagtgaaaccaggtgacaaagtcatccctctctttctgccacaatgtagagaatgcaatgcttgtcgcaacccagatggcaacctttgcattaggagcgatattactggtcgtggagtactggctgatggcaccaccagatttacatgcaagggcaaaccagtccaccacttcatgaacaccagtacatttaccgagtacacagtggtggatgaatcttctgttgctaagattgatgatgcagctcc

SEQ ID NO: 106264 - DNA, 1420 bp, Homo sapiens
  Payload ID: 872
  Gene Symbol: ADH7
  Gene Name: alcohol dehydrogenase 7 (class IV), mu or sigma polypeptide
  ENST ID: ENST00000482593
  CDS Start-End: 325-1278
gtctatgtttgcagaaatacagatccaagacaaagacaggatgggcactgctggaaaattttttccataggtcctttgcctgctatgtatctcccaggatgtaagtgtggtatgtggaagtgggaaggagtgttaggagtgaagttgttaacacttcctctgtaaatttgagttattaaatgcaaagcagctgtgctttgggagcagaagcaacccttctccattgaggaaatagaagttgccccaccaaagactaaagaagttcgcattaagattttggccacaggaatctgtcgcacagatgaccatgtgataaaaggaacaatggtgtccaagtttccagtgattgtgggacatgaggcaactgggattgtagagagcattggagaaggagtgactacagtgaaaccaggtgacaaagtcatccctctctttctgccacaatgtagagaatgcaatgcttgtcgcaacccagatggcaacctttgcattaggagcgatattactggtcgtggagtactggctgatggcaccaccagatttacatgcaagggcaaaccagtccaccacttcatgaacaccagtacatttaccgagtacacagtggtggatgaatcttctgttgctaagattgatgatgcagctcctcctgagaaagtctgtttaattggctgtgggttttccactggatatggcgctgctgttaaaactggcaaggtcaaacctggttccacttgcgtcgtctttggcctgggaggagttggcctgtcagtcatcatgggctgtaagtcagctggtgcatctaggatcattgggattgacctcaacaaagacaaatttgagaaggccatggctgtaggtgccactgagtgtatcagtcccaaggactctaccaaacccatcagtgaggtgctgtcagaaatgacaggcaacaacgtgggatacacctttgaagttattgggcatcttgaaaccatgattgatgccctggcatcctgccacatgaactatgggaccagcgtggttgtaggagttcctccatcagccaagatgctcacctatgacccgatgttgctcttcactggacgcacatggaagggatgtgtctttggaggtttgaaaagcagagatgatgtcccaaaactagtgactgagttcctggcaaagaaatttgacctggaccagttgataactcatgttttaccatttaaaaaaatcagtgaaggatttgagctgctcaattcaggacaaagcattcgaacggtcctgacgttttgagatccaaagtggcaggaggtctgtgttgtcatggtgaactggagtttctcttgtgagagttccctcatctgaaatcatgtatctgtctcacaaatacaagcataagtagaagatttgttgaagacatagaacccttataaag

SEQ ID NO: 106265 - DNA, 1830 bp, Homo sapiens
  Payload ID: 873
  Gene Symbol: ADHFE1
  Gene Name: alcohol dehydrogenase, iron containing, 1
  ENST ID: ENST00000276576
  CDS Start-End: 19-135
aagaggactccaagcgccatggccgctgccgcccgagcccgggtcgcgtacttgctgaggcaactgcaacgcgcagcgtgccagtgcccaactcattctcatacttactcccaagatggctgtttcaaatattagatatggagcagcagttacaaaggaagtaggaatggacctaaaaaacatgggtgctaaaaatgtgtgcttgatgacagacaagaacctctccaagctccctcctgtgcaagtagctatggattccctagtgaagaatggcatcccctttacggtttatgataatgtgagagtggaaccaacggattcaagcttcatggaagctattgagtttgcccaaaagggagcttttgatgcctatgttgctgtcggtggtggctctaccatggacacctgtaaggctgctaatctgtatgcatccagccctcattctgatttcctagattatgtcagtgcccccattggcaagggaaagcctgtgtctgtgcctcttaagcctctgattgcagtgccaactacctcaggaaccgggagtgaaactactggggttgccatttttgactatgaacacttgaaagtaaaaattggcatcacttcgagagccatcaaacccacactgggactgattgatcctctgcacaccctccacatgcctgcccgagtggtcgccaacagtggctttgatgtgctttgccatgccctggagtcatacaccaccctgccctaccacctgcggagcccctgcccttcaaatcccatcacacggcctgcgtaccagggcagcaacccaatcagtgacatttgggctatccacgcgctgcggatcgtggctaagtatctgaagagggctgtcagaaatcccgatgatcttgaagcaaggtctcatatgcacttggcaagtgcttttgctggcatcggctttggaaatgctggtgttcatctgtgccatggaatgtcttacccaatttcaggtttagtgaagatgtataaagcaaaggattacaatgtggatcacccactggtgccccatggcctttctgtggtgctcacgtccccagcggtgttcactttcacggcccagatgtttccagagcgacacctggagatggcagaaatactgggagccgacacccgcactgccaggatccaagatgcagggctggtgttggcagacacgctccggaaattcttattcgatctggatgttgatgatggcctagcagctgttggttactccaaagctgatatccccgcactagtgaaaggaacgctgccccaggaaagggtcaccaagcttgcaccctgtccccagtcagaagaggatctggctgctctgtttgaagcttcaatgaaactgtattaattgtcattttaactgaaagaattaccgctggccattgtagtgctgagagcaagagctgatctagctagggctttgtcttttcatctttgcgcataacttacctgttaccagtataggtgggatatacatttatcttgcaggaaattccccaaagctcagagtccagttccttccataaaacaggctggacaaatgaccactatgttagacccccaggctcgacttcaggggtcagtgttcctgtcccaaaccccacacagaatactctgcctctgtttcatgtagcaaatgagcaaaaactcagtatctatcaaaagtgtaaattatatttcctatgcctagtaattcacttcatgtctaaaaatttatctgatagaaacactagcaccagtacatacagaagcatggcaaggatgtttctggcagcacttttctaataataaaagatttgaaac

SEQ ID NO: 106266 - DNA, 1006 bp, Homo sapiens
  Payload ID: 873
  Gene Symbol: ADHFE1
  Gene Name: alcohol dehydrogenase, iron containing, 1
  ENST ID: ENST00000396621
  CDS Start-End: 18-398
agaggactccaagcgccatggccgctgccgcccgagcccgggtcgcgtacttgctgaggcaactgcaacgcgcagcgtgccagtgcccaactcattctcatacttactcccaagcccctggactttcaccttctgggaaaacaacagattatgcctttgagatggctgtttcaaatattagatatggagcagcagttacaaaggaagtaggaatggacctaaaaaacatgggtgctaaaaatgtgtgcttgatgacagacaagaacctctccaagctccctcctgtgcaagtagctatggattccctagtgaagaatggcatcccctttacggtttatgataatgtgagagtggaaccaacggattcaagtgccaactacctcaggaaccgggagtgaaactactggggttgccatttttgactatgaacacttgaaagtaaaaattggcatcacttcgagagccatcaaacccacactgggactgattgatcctctgcacaccctccacatgcctgcccgagtggtcgccaacagtggctttgatgtgctttgccatgccctggagtcatacaccaccctgccctaccacctgcggagcccctgcccttcaaatcccatcacacggcctgcgtaccagggcagcaacccaatcagtgacatttgggctatccacgcgctgcggatcgtggctaagtatctgaagagggccgtcaacagcactgacaaatgaagaagaagaatgagtctcagggcaccttcctggagtggccctcgccatccagggaccagcgcgttgcctcccccggcgcttttacatcacatgagcagctgacagcgtatttattatgcctttgctgaaacagttgatgagaaatatgtttcccttcagttttcatttagaagacaaggcgtcgtttgaataacttgcctgatttttcttcctaccgagtagcatttctttttttttcaccatatctttccctaaggcagctccttattctgta

SEQ ID NO: 106267 - DNA, 1990 bp, Homo sapiens
  Payload ID: 873
  Gene Symbol: ADHFE1
  Gene Name: alcohol dehydrogenase, iron containing, 1
  Uniprot ID: Q8IWW8
  ENST ID: ENST00000396623
  CDS Start-End: 32-1435
gacccgaggagggaagaggactccaagcgccatggccgctgccgcccgagcccgggtcgcgtacttgctgaggcaactgcaacgcgcagcgtgccagtgcccaactcattctcatacttactcccaagcccctggactttcaccttctgggaaaacaacagattatgcctttgagatggctgtttcaaatattagatatggagcagcagttacaaaggaagtaggaatggacctaaaaaacatgggtgctaaaaatgtgtgcttgatgacagacaagaacctctccaagctccctcctgtgcaagtagctatggattccctagtgaagaatggcatcccctttacggtttatgataatgtgagagtggaaccaacggattcaagcttcatggaagctattgagtttgcccaaaagggagcttttgatgcctatgttgctgtcggtggtggctctaccatggacacctgtaaggctgctaatctgtatgcatccagccctcattctgatttcctagattatgtcagtgcccccattggcaagggaaagcctgtgtctgtgcctcttaagcctctgattgcagtgccaactacctcaggaaccgggagtgaaactactggggttgccatttttgactatgaacacttgaaagtaaaaattggcatcacttcgagagccatcaaacccacactgggactgattgatcctctgcacaccctccacatgcctgcccgagtggtcgccaacagtggctttgatgtgctttgccatgccctggagtcatacaccaccctgccctaccacctgcggagcccctgcccttcaaatcccatcacacggcctgcgtaccagggcagcaacccaatcagtgacatttgggctatccacgcgctgcggatcgtggctaagtatctgaagagggctgtcagaaatcccgatgatcttgaagcaaggtctcatatgcacttggcaagtgcttttgctggcatcggctttggaaatgctggtgttcatctgtgccatggaatgtcttacccaatttcaggtttagtgaagatgtataaagcaaaggattacaatgtggatcacccactggtgccccatggcctttctgtggtgctcacgtccccagcggtgttcactttcacggcccagatgtttccagagcgacacctggagatggcagaaatactgggagccgacacccgcactgccaggatccaagatgcagggctggtgttggcagacacgctccggaaattcttattcgatctggatgttgatgatggcctagcagctgttggttactccaaagctgatatccccgcactagtgaaaggaacgctgccccaggaaagggtcaccaagcttgcaccctgtccccagtcagaagaggatctggctgctctgtttgaagcttcaatgaaactgtattaattgtcattttaactgaaagaattaccgctggccattgtagtgctgagagcaagagctgatctagctagggctttgtcttttcatctttgcgcataacttacctgttaccagtataggtgggatatacatttatcttgcaggaaattccccaaagctcagagtccagttccttccataaaacaggctggacaaatgaccactatgttagacccccaggctcgacttcaggggtcagtgttcctgtcccaaaccccacacagaatactctgcctctgtttcatgtagcaaatgagcaaaaactcagtatctatcaaaagtgtaaattatatttcctatgcctagtaattcacttcatgtctaaaaatttatctgatagaaacactagcaccagtacatacagaagcatggcaaggatgtttctggcagcacttttctaataataaaagatttgaaacaaccttaagtattcattattggtatatagatcacttatagtatactagacagtggaatactatggtactgttaataaagatgaagtaaatctcttggaaa

SEQ ID NO: 106268 - DNA, 982 bp, Homo sapiens
  Payload ID: 873
  Gene Symbol: ADHFE1
  Gene Name: alcohol dehydrogenase, iron containing, 1
  ENST ID: ENST00000422166
  CDS Start-End: 13-408
actccaagcgccatggccgctgccgcccgagcccgggtcgcgtacttgctgaggcaactgcaacgcgcagcgtgccagtgcccaactcattctcatacttactcccaagcccctggactttcaccttctgggaaaacaacagattatgcctttgagatggctgtttcaaatattagatatggagcagcagttacaaaggaagtaggaatggacctaaaaaacatgggtgctaaaaatgtgtgcttgatgacagacaagaacctctccaagctccctcctgtgcaagtagctatggattccctagtgaagaatggcatcccctttacggtttatgataatgtgagagtggaaccaacggattcaaggcatcacttcgagagccatcaaacccacactgggactgattgatcctctgcacaccctccacatgcctgcccgagtggtcgccaacagtggctttgatgtgctttgccatgccctggagtcatacaccaccctgccctaccacctgcggagcccctgcccttcaaatcccatcacacggcctgcgtaccagggcagcaacccaatcagtgacatttgggctatccacgcgctgcggatcgtggctaagtatctgaagagggccgtcaacagcactgacaaatgaagaagaagaatgagtctcagggcaccttcctggagtggccctcgccatccagggaccagcgcgttgcctcccccggcgcttttacatcacatgagcagctgacagcgtatttattatgcctttgctgaaacagttgatgagaaatatgtttcccttcagttttcatttagaagacaaggcgtcgtttgaataacttgcctgatttttcttcctaccgagtagcatttctttttttttcaccatatctttccctaaggcagctccttattctgtaggaattgccaatgttgatgtgttattgttaggtatttatatcattcacagggctgtcag

SEQ ID NO: 106269 - DNA, 1979 bp, Homo sapiens
  Payload ID: 873
  Gene Symbol: ADHFE1
  Gene Name: alcohol dehydrogenase, iron containing, 1
  ENST ID: ENST00000419955
  CDS Start-End: 5-109
cgccatggccgctgccgcccgagcccgggtcgcgtacttgctgaggcaactgcaacgcgcagccccctggactttcaccttctgggaaaacaacagattatgcctttgagatggctgtttcaaatattagatatggagcagcagttacaaaggaagtaggaatggacctaaaaaacatgggtgctaaaaatgtgtgcttgatgacagacaagaacctctccaagctccctcctgtgcaagtagctatggattccctagtgaagaatggcatcccctttacggtttatgataatgtgagagtggaaccaacggattcaagtgccaactacctcaggaaccgggagtgaaactactggggttgccatttttgactatgaacacttgaaagtaaaaattggcatcacttcgagagccatcaaacccacactgggactgattgatcctctgcacaccctccacatgcctgcccgagtggtcgccaacagtggctttgatgtgctttgccatgccctggagtcatacaccaccctgccctaccacctgcggagcccctgcccttcaaatcccatcacacggcctgcgtaccagggcagcaacccaatcagtgacatttgggctatccacgcgctgcggatcgtggctaagtatctgaagagggccgtcaacagcactgacaaatgaagaagaagaatgagtctcagggcaccttcctggagtggccctcgccatccagggaccagcgcgttgcctcccccggcgcttttacatcacatgagcagctgacagcgtatttattatgcctttgctgaaacagttgatgagaaatatgtttcccttcagttttcatttagaagacaaggcgtcgtttgaataacttgcctgatttttcttcctaccgagtagcatttctttttttttcaccatatctttccctaaggcagctccttattctgtaggaattgccaatgttgatgtgttattgttaggtatttatatcattcacagggctgtcagaaatcccgatgatcttgaagcaaggtctcatatgcacttggcaagtgcttttgctggcatcggctttggaaatgctggtgttcatctgtgccatggaatgtcttacccaatttcaggtttagtgaagatgtataaagcaaaggattacaatgtggatcacccactggtgccccatggcctttctgtggtgctcacgtccccagcggtgttcactttcacggcccagatgtttccagagcgacacctggagatggcagaaatactgggagccgacacccgcactgccaggatccaagatgcagggctggtgttggcagacacgctccggaaattcttattcgatctggatgttgatgatggcctagcagctgttggttactccaaagctgatatccccgcactagtgaaaggaacgctgccccaggaaagggtcaccaagcttgcaccctgtccccagtcagaagaggatctggctgctctgtttgaagcttcaatgaaactgtattaattgtcattttaactgaaagaattaccgctggccattgtagtgctgagagcaagagctgatctagctagggctttgtcttttcatctttgcgcataacttacctgttaccagtataggtgggatatacatttatcttgcaggaaattccccaaagctcagagtccagttccttccataaaacaggctggacaaatgaccactatgttagacccccaggctcgacttcaggggtcagtgttcctgtcccaaaccccacacagaatactctgcctctgtttcatgtagcaaatgagcaaaaactcagtatctatcaaaagtgtaaattatatttcctatgcctagtaattcacttcatgtctaaaaatttatctgatagaaacactagcaccagtacatacagaagcatggcaaggatgtttctggcagcacttttctaataataaaagatttgaaacaa

SEQ ID NO: 106270 - DNA, 524 bp, Homo sapiens
  Payload ID: 873
  Gene Symbol: ADHFE1
  Gene Name: alcohol dehydrogenase, iron containing, 1
  ENST ID: ENST00000431959
  CDS Start-End: 13-117
actccaagcgccatggccgctgccgcccgagcccgggtcgcgtacttgctgaggcaactgcaacgcgcagccccctggactttcaccttctgggaaaacaacagattatgcctttgagatggctgtttcaaatattagatatggagcagcagttacaaaggaagtaggaatggacctaaaaaacatgggtgctaaaaatgtgtgcttgatgacagacaagaacctctccaagctccctcctgtgcaagtagctatggattccctagtgaagaatggcatcccctttacggtttatgataatgtgagagtggaaccaacggattcaagcttcatggaagctattgagtttgcccaaaagggagcttttgatgcctatgttgctgtcggtggtggctctaccatggacacctgtaaggctgctaatctgtatgcatccagccctcattctgatttcctagattatgtcagtgcccccattggcaagggaaagcctgtgtctgtgcctcttaagcctctgattgcag

SEQ ID NO: 106271 - DNA, 2179 bp, Homo sapiens
  Payload ID: 873
  Gene Symbol: ADHFE1
  Gene Name: alcohol dehydrogenase, iron containing, 1
  ENST ID: ENST00000426810
  CDS Start-End: 17-133
gaggactccaagcgccatggccgctgccgcccgagcccgggtcgcgtacttgctgaggcaactgcaacgcgcagcgtgccagtgcccaactcattctcatacttactcccaagatggctgtttcaaatattagatatggagcagcagttacaaaggaagtaggaatggacctaaaaaacatgggtgctaaaaatgtgtgcttgatgacagacaagaacctctccaagctccctcctgtgcaagtagctatggattccctagtgaagaatggcatcccctttacggtttatgataatgtgagagtggaaccaacggattcaagcttcatggaagctattgagtttgcccaaaagggagcttttgatgcctatgttgctgtcggtggtggctctaccatggacacctgtaaggctgctaatctgtatgcatccagccctcattctgatttcctagattatgtcagtgcccccattggcaagggaaagcctgtgtctgtgcctcttaagcctctgattgcagtgccaactacctcaggaaccgggagtgaaactactggggttgccatttttgactatgaacacttgaaagtaaaaattggcatcacttcgagagccatcaaacccacactgggactgattgatcctctgcacaccctccacatgcctgcccgagtggtcgccaacagtggctttgatgtgctttgccatgccctggagtcatacaccaccctgccctaccacctgcggagcccctgcccttcaaatcccatcacacggcctgcgtaccagggcagcaacccaatcagtgacatttgggctatccacgcgctgcggatcgtggctaagtatctgaagagggccgtcaacagcactgacaaatgaagaagaagaatgagtctcagggcaccttcctggagtggccctcgccatccagggaccagcgcgttgcctcccccggcgcttttacatcacatgagcagctgacagcgtatttattatgcctttgctgaaacagttgatgagaaatatgtttcccttcagttttcatttagaagacaaggcgtcgtttgaataacttgcctgatttttcttcctaccgagtagcatttctttttttttcaccatatctttccctaaggcagctccttattctgtaggaattgccaatgttgatgtgttattgttaggtatttatatcattcacagggctgtcagaaatcccgatgatcttgaagcaaggtctcatatgcacttggcaagtgcttttgctggcatcggctttggaaatgctggtgttcatctgtgccatggaatgtcttacccaatttcaggtttagtgaagatgtataaagcaaaggattacaatgtggatcacccactggtgccccatggcctttctgtggtgctcacgtccccagcggtgttcactttcacggcccagatgtttccagagcgacacctggagatggcagaaatactgggagccgacacccgcactgccaggatccaagatgcagggctggtgttggcagacacgctccggaaattcttattcgatctggatgttgatgatggcctagcagctgttggttactccaaagctgatatccccgcactagtgaaaggaacgctgccccaggaaagggtcaccaagcttgcaccctgtccccagtcagaagaggatctggctgctctgtttgaagcttcaatgaaactgtattaattgtcattttaactgaaagaattaccgctggccattgtagtgctgagagcaagagctgatctagctagggctttgtcttttcatctttgcgcataacttacctgttaccagtataggtgggatatacatttatcttgcaggaaattccccaaagctcagagtccagttccttccataaaacaggctggacaaatgaccactatgttagacccccaggctcgacttcaggggtcagtgttcctgtcccaaaccccacacagaatactctgcctctgtttcatgtagcaaatgagcaaaaactcagtatctatcaaaagtgtaaattatatttcctatgcctagtaattcacttcatgtctaaaaatttatctgatagaaacactagcaccagtacatacagaagcatggcaaggatgtttctggcagcacttttctaataataaaagatttgaaacaa

SEQ ID NO: 106272 - DNA, 1956 bp, Homo sapiens
  Payload ID: 873
  Gene Symbol: ADHFE1
  Gene Name: alcohol dehydrogenase, iron containing, 1
  Uniprot ID: Q8IWW8
  ENST ID: ENST00000415254
  CDS Start-End: 240-1499
aggagggaagaggactccaagcgccatggccgctgccgcccgagcccgggtcgcgtacttgctgaggcaactgcaacgcgcagcatttgaatttttggcggggagaaggaagtgatgcactcaagtatctaccgagacccaaccactggacaaggtgccagtgcccaactcattctcatacttactcccaagcccctggactttcaccttctgggaaaacaacagattatgcctttgagatggctgtttcaaatattagatatggagcagcagttacaaaggaagtaggaatggacctaaaaaacatgggtgctaaaaatgtgtgcttgatgacagacaagaacctctccaagctccctcctgtgcaagtagctatggattccctagtgaagaatggcatcccctttacggtttatgataatgtgagagtggaaccaacggattcaagcttcatggaagctattgagtttgcccaaaagggagcttttgatgcctatgttgctgtcggtggtggctctaccatggacacctgtaaggctgctaatctgtatgcatccagccctcattctgatttcctagattatgtcagtgcccccattggcaagggaaagcctgtgtctgtgcctcttaagcctctgattgcagtgccaactacctcaggaaccgggagtgaaactactggggttgccatttttgactatgaacacttgaaagtaaaaattggcatcacttcgagagccatcaaacccacactgggactgattgatcctctgcacaccctccacatgcctgcccgagtggtcgccaacagtggctttgatgtgctttgccatgccctggagtcatacaccaccctgccctaccacctgcggagcccctgcccttcaaatcccatcacacggcctgcgtaccagggcagcaacccaatcagtgacatttgggctatccacgcgctgcggatcgtggctaagtatctgaagagggctgtcagaaatcccgatgatcttgaagcaaggtctcatatgcacttggcaagtgcttttgctggcatcggctttggaaatgctggtgttcatctgtgccatggaatgtcttacccaatttcaggtttagtgaagatgtataaagcaaaggattacaatgtggatcacccactggtgccccatggcctttctgtggtgctcacgtccccagcggtgttcactttcacggcccagatgtttccagagcgacacctggagatggcagaaatactgggagccgacacccgcactgccaggatccaagatgcagggctggtgttggcagacacgctccggaaattcttattcgatctggatgttgatgatggcctagcagctgttggttactccaaagctgatatccccgcactagtgaaaggaacgctgccccaggaaagggtcaccaagcttgcaccctgtccccagtcagaagaggatctggctgctctgtttgaagcttcaatgaaactgtattaattgtcattttaactgaaagaattaccgctggccattgtagtgctgagagcaagagctgatctagctagggctttgtcttttcatctttgcgcataacttacctgttaccagtataggtgggatatacatttatcttgcaggaaattccccaaagctcagagtccagttccttccataaaacaggctggacaaatgaccactatgttagacccccaggctcgacttcaggggtcagtgttcctgtcccaaaccccacacagaatactctgcctctgtttcatgtagcaaatgagcaaaaactcagtatctatcaaaagtgtaaattatatttcctatgcctagtaattcacttcatgtctaaaaatttatctgatagaaacactagcaccagtacatacagaagcatggcaaggatgtttctggcagcacttttctaataataaaagatttgaaacaa

SEQ ID NO: 106273 - DNA, 515 bp, Homo sapiens
  Payload ID: 873
  Gene Symbol: ADHFE1
  Gene Name: alcohol dehydrogenase, iron containing, 1
  ENST ID: ENST00000443372
  CDS Start-End: 10-117
ccaagcgccatggccgctgccgcccgagcccgggtcgcgtacttgctgaggcaactgcaacgcgcagcatggctgtttcaaatattagatatggagcagcagttacaaaggaagtaggaatggacctaaaaaacatgggtgctaaaaatgtgtgcttgatgacagacaagaacctctccaagctccctcctgtgcaagtagctatggattccctagtgaagaatggcatcccctttacggtttatgataatgtgagagtggaaccaacggattcaagtgccaactacctcaggaaccgggagtgaaactactggggttgccatttttgactatgaacacttgaaagtaaaaattggcatcacttcgagagccatcaaacccacactgggactgattgatcctctgcacaccctccacatgcctgcccgagtggtcgccaacagtggctttgatgtgctttgccatgccctggagtcatacaccaccctgccctaccacctgcggagcccctgccc

SEQ ID NO: 106274 - DNA, 2229 bp, Homo sapiens
  Payload ID: 873
  Gene Symbol: ADHFE1
  Gene Name: alcohol dehydrogenase, iron containing, 1
  Uniprot ID: Q8IWW8
  ENST ID: ENST00000424777
  CDS Start-End: 20-931
gaagaggactccaagcgccatggccgctgccgcccgagcccgggtcgcgtacttgctgaggcaactgcaacgcgcagcgtgccagtgcccaactcattctcatacttactcccaagcccctggactttcaccttctgggaaaacaacagattatgcctttgagatggctgtttcaaatattagatatggagcagcagttacaaaggaagtaggaatggacctaaaaaacatgggtgctaaaaatgtgtgcttgatgacagacaagaacctctccaagctccctcctgtgcaagtagctatggattccctagtgaagaatggcatcccctttacggtttatgataatgtgagagtggaaccaacggattcaagcttcatggaagctattgagtttgcccaaaagggagcttttgatgcctatgttgctgtcggtggtggctctaccatggacacctgtaaggctgctaatctgtatgcatccagccctcattctgatttcctagattatgtcagtgcccccattggcaagggaaagcctgtgtctgtgcctcttaagcctctgattgcagtgccaactacctcaggaaccgggagtgaaactactggggttgccatttttgactatgaacacttgaaagtaaaaattggcatcacttcgagagccatcaaacccacactgggactgattgatcctctgcacaccctccacatgcctgcccgagtggtcgccaacagtggctttgatgtgctttgccatgccctggagtcatacaccaccctgccctaccacctgcggagcccctgcccttcaaatcccatcacacggcctgcgtaccagggcagcaacccaatcagtgacatttgggctatccacgcgctgcggatcgtggctaagtatctgaagagggccgtcaacagcactgacaaatgaagaagaagaatgagtctcagggcaccttcctggagtggccctcgccatccagggaccagcgcgttgcctcccccggcgcttttacatcacatgagcagctgacagcgtatttattatgcctttgctgaaacagttgatgagaaatatgtttcccttcagttttcatttagaagacaaggcgtcgtttgaataacttgcctgatttttcttcctaccgagtagcatttctttttttttcaccatatctttccctaaggcagctccttattctgtaggaattgccaatgttgatgtgttattgttaggtatttatatcattcacagggctgtcagaaatcccgatgatcttgaagcaaggtctcatatgcacttggcaagtgcttttgctggcatcggctttggaaatgctggtgttcatctgtgccatggaatgtcttacccaatttcaggtttagtgaagatgtataaagcaaaggattacaatgtggatcacccactggtgccccatggcctttctgtggtgctcacgtccccagcggtgttcactttcacggcccagatgtttccagagcgacacctggagatggcagaaatactgggagccgacacccgcactgccaggatccaagatgcagggctggtgttggcagacacgctccggaaattcttattcgatctggatgttgatgatggcctagcagctgttggttactccaaagctgatatccccgcactagtgaaaggaacgctgccccaggaaagggtcaccaagcttgcaccctgtccccagtcagaagaggatctggctgctctgtttgaagcttcaatgaaactgtattaattgtcattttaactgaaagaattaccgctggccattgtagtgctgagagcaagagctgatctagctagggctttgtcttttcatctttgcgcataacttacctgttaccagtataggtgggatatacatttatcttgcaggaaattccccaaagctcagagtccagttccttccataaaacaggctggacaaatgaccactatgttagacccccaggctcgacttcaggggtcagtgttcctgtcccaaaccccacacagaatactctgcctctgtttcatgtagcaaatgagcaaaaactcagtatctatcaaaagtgtaaattatatttcctatgcctagtaattcacttcatgtctaaaaatttatctgatagaaacactagcaccagtacatacagaagcatggcaaggatgtttctggcagcacttttctaataataaaagatttgaaacaa

SEQ ID NO: 106275 - DNA, 556 bp, Homo sapiens
  Payload ID: 873
  Gene Symbol: ADHFE1
  Gene Name: alcohol dehydrogenase, iron containing, 1
  ENST ID: ENST00000449512
  CDS Start-End: 13-120
actccaagcgccatggccgctgccgcccgagcccgggtcgcgtacttgctgaggcaactgcaacgcgcagcatggctgtttcaaatattagatatggagcagcagttacaaaggaagtaggaatggacctaaaaaacatgggtgctaaaaatgtgtgcttgatgacagacaagaacctctccaagctccctcctgtgcaagtagctatggattccctagtgaagaatggcatcccctttacggtttatgataatgtgagagtggaaccaacggattcaagcttcatggaagctattgagtttgcccaaaagggagcttttgatgcctatgttgctgtcggtggtggctctaccatggacacctgtaaggctgctaatctgtatgcatccagccctcattctgatttcctagattatgtcagtgcccccattggcaagggaaagcctgtgtctgtgcctcttaagcctctgattgcagtgccaactacctcaggaaccgggagtgaaactactggggttgccatttttgactatgaacacttgaaagtaaaaattgg

SEQ ID NO: 106276 - DNA, 557 bp, Homo sapiens
  Payload ID: 873
  Gene Symbol: ADHFE1
  Gene Name: alcohol dehydrogenase, iron containing, 1
  ENST ID: ENST00000523113
  CDS Start-End: 293-557
aagagaaaaggaggacagcgcccaggaggaaagaggaggaagtaatagtttctaactgtcggacccgtctgtaaaccaaggactatgaatactaaatgttaagttctaggcaattatacggggactcagaaggacctggccgctgccttcattgagtttaaagggacaggattgcccttccgtcaagaaagtatcccctggactttcaccttctgggaaaacaacagattatgcctttgagatggctgtttcaaatattagatatggagcagcagttacaaaggaagtaggaatggacctaaaaaacatgggtgctaaaaatgtgtgcttgatgacagacaagaacctctccaagctccctcctgtgcaagtagctatggattccctagtgaagaatggcatcccctttacggtttatgataatgtgagagtggaaccaacggattcaagcttcatggaagctattgagtttgcccaaaagggagcttttgatgcctatgttgctgtcggtggtggctctaccatggacacctgtaaggctgctaatctgtatgcat

SEQ ID NO: 106277 - DNA, 2107 bp, Homo sapiens
  Payload ID: 874
  Gene Symbol: ALDH1A1
  Gene Name: aldehyde dehydrogenase 1 family, member A1
  Uniprot ID: P00352
  ENST ID: ENST00000297785
  CDS Start-End: 56-1561
ctatcagaaccaaattgctgagccagtcacctgtgttccaggagccgaatcagaaatgtcatcctcaggcacgccagacttacctgtcctactcaccgatttgaagattcaatatactaagatcttcataaacaatgaatggcatgattcagtgagtggcaagaaatttcctgtctttaatcctgcaactgaggaggagctctgccaggtagaagaaggagataaggaggatgttgacaaggcagtgaaggccgcaagacaggcttttcagattggatccccgtggcgtactatggatgcttccgagagggggcgactattatacaagttggctgatttaatcgaaagagatcgtctgctgctggcgacaatggagtcaatgaatggtggaaaactctattccaatgcatatctgaatgatttagcaggctgcatcaaaacattgcgctactgtgcaggttgggctgacaagatccagggccgtacaataccaattgatggaaatttttttacatatacaagacatgaacctattggtgtatgtggccaaatcattccttggaatttcccgttggttatgctcatttggaagatagggcctgcactgagctgtggaaacacagtggttgtcaaaccagcagagcaaactcctctcactgctctccacgtggcatctttaataaaagaggcagggtttcctcctggagtagtgaatattgttcctggttatgggcctacagcaggggcagccatttcttctcacatggatatagacaaagtagccttcacaggatcaacagaggttggcaagttgatcaaagaagctgccgggaaaagcaatctgaagagggtgaccctggagcttggaggaaagagcccttgcattgtgttagctgatgccgacttggacaatgctgttgaatttgcacaccatggggtattctaccaccagggccagtgttgtatagccgcatccaggatttttgtggaagaatcaatttatgatgagtttgttcgaaggagtgttgagcgggctaagaagtatatccttggaaatcctctgaccccaggagtcactcaaggccctcagattgacaaggaacaatatgataaaatacttgacctcattgagagtgggaagaaagaaggggccaaactggaatgtggaggaggcccgtgggggaataaaggctactttgtccagcccacagtgttctctaatgttacagatgagatgcgcattgccaaagaggagatttttggaccagtgcagcaaatcatgaagtttaaatctttagatgacgtgatcaaaagagcaaacaatactttctatggcttatcagcaggagtgtttaccaaagacattgataaagccataacaatctcctctgctctgcaggcaggaacagtgtgggtgaattgctatggcgtggtaagtgcccagtgcccctttggtggattcaagatgtctggaaatggaagagaactgggagagtacggtttccatgaatatacagaggtcaaaacagtcacagtgaaaatctctcagaagaactcataaagaaaatacaagagtggagagaagctcttcaatagctaagcatctccttacagtcactaatatagtagattttaaagacaaaatttttcttttcttgatttttttaaacataagctaaatcatattagtattaatactacccatagaaaacttgacatgtagcttcttctgaaagaattatttgccttctgaaatgtgacccccaagtcctatcctaaataaaaaaagacaaattcggatgtatgatctctctagctttgtcatagttatgtgattttcctttgtagctacttttgcaggataataattttatagaaaaggaacagttgcatttagcttctttcccttagtgactcttgaagtacttaacatacacgttaactgcagagtaaattgctctgttcccagtagttataaagtccttggactgttttgaaaagtttcctaggatgtcatgtctgcttgtcaaaagaaataatccctgtaatatttagctgtaaactgaatataaagcttaataaaaacaaccttgcatgattcttgtta

SEQ ID NO: 106278 - DNA, 822 bp, Homo sapiens
  Payload ID: 874
  Gene Symbol: ALDH1A1
  Gene Name: aldehyde dehydrogenase 1 family, member A1
  ENST ID: ENST00000376939
  CDS Start-End: 57-749
tctatcagaaccaaattgctgagccagtcacctgtgttccaggagccgaatcagaaatgtcatcctcaggcacgccagacttacctgtcctactcaccgatttgaagattcaatatactaagatcttcataaacaatgaatggcatgattcagtgagtggcaagaaatttcctgtctttaatcctgcaactgaggaggagctctgccaggtagaagaaggagataaggaggatgttgacaaggcagtgaaggccgcaagacaggcttttcagattggatccccgtggcgtactatggatgcttccgagagggggcgactattatacaagttggctgatttaatcgaaagagatcgtctgctgctggcgacaatggagtcaatgaatggtggaaaactctattccaatgcatatctgaatgatttagcaggctgcatcaaaacattgcgctactgtgcaggttgggctgacaagatccagggccgtacaataccaattgatggaaatttttttacatatacaagacatgaacctattggtgtatgtggccaaatcattccttggaatttcccgttggttatgctcatttggaagatagggcctgcactgagctgtggaaacacagtggttgtcaaaccagcagagcaaactcctctcactgctctccacgtggcatctttaataaaagaggcagggtttcctcctggagtagtgaatattgttcctggttatggggccagtgttgtatagccgcatccaggatttttgtggaagaatcaatttatgatgagtttgttcgaaggagtgttgagcgggctaagaa

SEQ ID NO: 106279 - DNA, 806 bp, Homo sapiens
  Payload ID: 874
  Gene Symbol: ALDH1A1
  Gene Name: aldehyde dehydrogenase 1 family, member A1
  ENST ID: ENST00000419959
  CDS Start-End: 91-806
agaagtccaggatgggaagagagatctgcagactcccagggaacctacagctttctccttcacagcattgcaggaggagccgaatcagaaatgtcatcctcaggcacgccagacttacctgtcctactcaccgatttgaagattcaatatactaagatcttcataaacaatgaatggcatgattcagtgagtggcaagaaatttcctgtctttaatcctgcaactgaggaggagctctgccaggtagaagaaggagataaggaggatgttgacaaggcagtgaaggccgcaagacaggcttttcagattggatccccgtggcgtactatggatgcttccgagagggggcgactattatacaagttggctgatttaatcgaaagagatcgtctgctgctggcgacaatggagtcaatgaatggtggaaaactctattccaatgcatatctgaatgatttagcaggctgcatcaaaacattgcgctactgtgcaggttgggctgacaagatccagggccgtacaataccaattgatggaaatttttttacatatacaagacatgaacctattggtgtatgtggccaaatcattccttggaatttcccgttggttatgctcatttggaagatagggcctgcactgagctgtggaaacacagtggttgtcaaaccagcagagcaaactcctctcactgctctccacgtggcatctttaataaaagaggcagggtttcctcctggagtagtgaatattgttcctggttatgggcctacagcaggggcagccatttcttctcacatggatat

SEQ ID NO: 106280 - DNA, 805 bp, Homo sapiens
  Payload ID: 874
  Gene Symbol: ALDH1A1
  Gene Name: aldehyde dehydrogenase 1 family, member A1
  ENST ID: ENST00000446946
  CDS Start-End: 197-805
gtggccaggatcgggtctgggaagctcggagatttcactgtgagtggagtcagagggaaggcatttggagcaaaggcttctgtaagagggagtaggatggaaattgatctttgaagaaagcaagacagaagaagggagatggaaagatgaaatcattttaaaattgctggtaacaaacgaaggagccgaatcagaaatgtcatcctcaggcacgccagacttacctgtcctactcaccgatttgaagattcaatatactaagatcttcataaacaatgaatggcatgattcagtgagtggcaagaaatttcctgtctttaatcctgcaactgaggaggagctctgccaggtagaagaaggagataaggaggatgttgacaaggcagtgaaggccgcaagacaggcttttcagattggatccccgtggcgtactatggatgcttccgagagggggcgactattatacaagttggctgatttaatcgaaagagatcgtctgctgctggcgacaatggagtcaatgaatggtggaaaactctattccaatgcatatctgaatgatttagcaggctgcatcaaaacattgcgctactgtgcaggttgggctgacaagatccagggccgtacaataccaattgatggaaatttttttacatatacaagacatgaacctattggtgtatgtggccaaatcattccttggaatttcccgttggttatgctcatttggaagatagggcctgcactgagctgtggaaacacagtggttgtcaaaccagcagagcaaactcctctcactgctctc

SEQ ID NO: 106281 - DNA, 4098 bp, Homo sapiens
  Payload ID: 875
  Gene Symbol: ALDH1A2
  Gene Name: aldehyde dehydrogenase 1 family, member A2
  Uniprot ID: O94788
  ENST ID: ENST00000249750
  CDS Start-End: 769-2325
attctgagcccgaggcgagggggactcgcacccactgccacctctccctgaccctctggccaccatgcacctcggcccggctgaggggagtcggggggtcgggggagagggcgtagctgccgagagcctggcgcccctgcccggaggaggagaacggaggacgccctcccgggtctccggaaaggaagggggacggggttcggtgggtcctgggacggggatgggagggaacgtgggcgagctgggagccgccctccgcagcctggactttcctggcctttctctactccgaagcagcaccgggccgctccggtccccgccagcccctgccagctccgcttccgggggccacgaccctcgctcgacttcggccgctgtgcgcctcccgccgactctgacccagggacccggagaccaagtccggctggccgaggcccgcgggccgcggcgcaagttccgctcccaccgtcgaggactgtggaggcggcgtgggctggtctccgcggccggggggcgggagcgccgggcggacttgaccgtgggcgccaagcgtcccggccgcgcggcgcgggctttatgtaaatggaggctgcgccgggcgtcctaggtaggatggaccagccccccgcgcctcggccctcacgtccaataagaagagccccagcttgacacctgcctatatacaggcgagcgcgcccccgggccgcggaccgcgcgcacagcccgcactgccccacgccgcgggctagggacacccggcccgccaccatgacttccagcaagatagagatgcccggcgaggtgaaggccgaccccgccgccctcatggcgtcgctgcacctcctgccgtcgcccacgcccaatctcgaaattaagtacaccaagatctttataaacaacgagtggcagaactcagagagtgggagagtgttccctgtctataatccagccacaggagaacaggtgtgtgaagttcaagaagcagacaaggcagatatagacaaagcagtgcaggcagcccgcctggctttctctcttggttcagtgtggagaaggatggatgcttcagaaaggggacgtctgttggataagcttgcagacttggtggaacgggacagggcagttcttgcaaccatggaatccctaaatggtggcaaaccattcctgcaagctttttatgtggatttgcagggcgtcatcaaaacctttcgatattacgcaggctgggctgataaaattcatgggatgaccattcctgtagatggagactattttacctttacaagacatgaacccattggagtgtgtggacagatcatcccatggaacttccccctgctgatgtttgcctggaaaatagctccagctttgtgctgtggcaatacagtagttattaagccagcagagcaaacaccactcagtgcactctacatgggagccctcatcaaggaggctggctttcctcccggggtcatcaatattttgccaggatatgggccaacggctggggcagcaatagcttctcacattggcatagacaagattgcattcacagggtctactgaggttggaaagcttatccaagaagcagctggaagaagtaatttgaagagagtaactctggaacttggaggcaaaagtcctaatattatttttgctgatgctgacttggactatgctgtggagcaggcccaccagggtgtgttcttcaatcaaggtcagtgctgcactgcaggctctcgcatcttcgtggaggagtccatctatgaggagtttgtgagaagaagcgtggagcgggccaagaggcgcgtagtggggagtccctttgaccccaccactgagcagggtccccagattgataagaaacagtacaacaagatcttggaactcatccagagtggtgtggctgagggcgccaagctggaatgtggaggcaaaggactgggccgaaaggggtttttcattgagcccacagtgttttccaacgtcactgatgatatgcggattgccaaggaggagatctttggccctgttcaggaaattttgagatttaagacgatggatgaagttatcgaaagagccaataactcagactttggactcgtagcagctgtctttactaatgacatcaacaaggccctcacagtgtcttctgcaatgcaagctgggactgtttggatcaattgttacaatgccttaaatgcccagagcccctttgggggattcaagatgtctggaaatgggagagaaatgggagaatttggcttgcgggagtactcagaagttaagacggtgacagtaaagatcccccagaagaactcctaagaaggccaagaaggaggatgaagcccagcctgcacgtctgtccctctctgctttctctgtagggcccagctctcaggaatacaaagttgagccacggtccttacttaaagattgaaaagataacatgtaggccaggcaggtcactgcacaactaaagcaaaccagctgggtacagtttcttggcactctgtaaggggccaccttaatcataccaaatattggggaaagtgggataaagggaggaggaggagctagcagacacatccagtatctccttctggagcacaggatgaaataagggagctgtattatttcatgtctttgtcacaaagaactttcctctcaaggaaaggtgacctttctcctgtcttcattttcctccttccaggccctcctcgctcacccacccctccctctcttccaaggagatgtcagctgagctcattctggggcagatgtttgggccgggaacaatttttcaaggttgtaaagccaaattatcatttcatgttatccatttcttcaaagcaaaacatgaaatggttttagctagagtcagaccagaatgaaaatgccaggagctggtacactacagatgtagtaagaacctgggatattcctgacccaatctggttttcttttacccataaataacatgaatgaaaaaagattgggacaatagagactggaagtcatcatgtgcagttcaccgcttctgagcttgctgcagttttggggtgtgtgtgtattagattccttctcagttattctggaataaggcaaggagtgggttgtttttcatagctagataagatcttttccaaagtttttcttagaaccaaccaaaaaacaatccgagtaggcccaagaatttgataatgctggatgccttgcagacatcattcagtttctaatattgggcaacaattattattaaatgaattatttctgtagttggaatctgtaccttctgaacctctacaccaataactgctgcaggtgtgattttggtctgtcacactgtacatctatcataatgtgccctgtatctattggcagtgaccttggaaaatctggccaagcctaggggtttccttttccatttgccaagttccattgtgccaggactgccgtgctccactgagctcctctgtcacaccccattcttgcccctcactgggcaggccatggcctacagcttgcagggagtaaagcaggcccgcctccctttcttcccatccacatactcctcttctgctttccagtgactccaccagtttgatgtgggaagtgttagcttcctttccttcttccatcccttcttccatctttccagctgtcaaatccaatccagtctctaacctaaatgcagatcatttatttaaaagtaccaaacataacccagagtatgtggaatatgggcaacatatatatagccttctgtatttaacgatcttctgcttcttaaccgtaccagttttctatttataactcttatctatccatgatgttttaaagtctccacttgctgttatttacaaacgacagtgcattcagcagcccagtgccgtgagccctgacagatgccgtatttctgagtgcttccatgtgaatgctgccctcctgtagcatgtgtccaagtggacatagccactaaccaactagttacctttggactgcaacaaaaaatgtgaaaatgaagatttatttcttttaatttacttaaaaagaaacctctgtgctagcaataaagcatttatattgtgtactcct

SEQ ID NO: 106282 - DNA, 3297 bp, Homo sapiens
  Payload ID: 875
  Gene Symbol: ALDH1A2
  Gene Name: aldehyde dehydrogenase 1 family, member A2
  Uniprot ID: O94788
  ENST ID: ENST00000347587
  CDS Start-End: 89-1531
atacaggcgagcgcgcccccgggccgcggaccgcgcgcacagcccgcactgccccacgccgcgggctagggacacccggcccgccaccatgacttccagcaagatagagatgcccggcgaggtgaaggccgaccccgccgccctcatggcgtcgctgcacctcctgccgtcgcccacgcccaatctcgaaattaagtacaccaagatctttataaacaacgagtggcagaactcagagagtgggagagtgttccctgtctataatccagccacaggagaacaggtgtgtgaagttcaagaagcagacaaggcagatatagacaaagcagtgcaggcagcccgcctggctttctctcttggttcagtgtggagaaggatggatgcttcagaaaggggacgtctgttggataagcttgcagacttggtggaacgggacagggcagttcttgcaaccatggaatccctaaatggtggcaaaccattcctgcaagctttttatgtggatttgcagggcgtcatcaaaacctttcgatattacgcaggctgggctgataaaattcatgggatgaccattcctgtagatggagactattttacctttacaagacatgaacccattggagtgtgtggacagatcatcccatggaacttccccctgctgatgtttgcctggaaaatagctccagctttgtgctgtggcaatacagtagttattaagccagcagagcaaacaccactcagtgcactctacatgggagccctcatcaaggaggttggaaagcttatccaagaagcagctggaagaagtaatttgaagagagtaactctggaacttggaggcaaaagtcctaatattatttttgctgatgctgacttggactatgctgtggagcaggcccaccagggtgtgttcttcaatcaaggtcagtgctgcactgcaggctctcgcatcttcgtggaggagtccatctatgaggagtttgtgagaagaagcgtggagcgggccaagaggcgcgtagtggggagtccctttgaccccaccactgagcagggtccccagattgataagaaacagtacaacaagatcttggaactcatccagagtggtgtggctgagggcgccaagctggaatgtggaggcaaaggactgggccgaaaggggtttttcattgagcccacagtgttttccaacgtcactgatgatatgcggattgccaaggaggagatctttggccctgttcaggaaattttgagatttaagacgatggatgaagttatcgaaagagccaataactcagactttggactcgtagcagctgtctttactaatgacatcaacaaggccctcacagtgtcttctgcaatgcaagctgggactgtttggatcaattgttacaatgccttaaatgcccagagcccctttgggggattcaagatgtctggaaatgggagagaaatgggagaatttggcttgcgggagtactcagaagttaagacggtgacagtaaagatcccccagaagaactcctaagaaggccaagaaggaggatgaagcccagcctgcacgtctgtccctctctgctttctctgtagggcccagctctcaggaatacaaagttgagccacggtccttacttaaagattgaaaagataacatgtaggccaggcaggtcactgcacaactaaagcaaaccagctgggtacagtttcttggcactctgtaaggggccaccttaatcataccaaatattggggaaagtgggataaagggaggaggaggagctagcagacacatccagtatctccttctggagcacaggatgaaataagggagctgtattatttcatgtctttgtcacaaagaactttcctctcaaggaaaggtgacctttctcctgtcttcattttcctccttccaggccctcctcgctcacccacccctccctctcttccaaggagatgtcagctgagctcattctggggcagatgtttgggccgggaacaatttttcaaggttgtaaagccaaattatcatttcatgttatccatttcttcaaagcaaaacatgaaatggttttagctagagtcagaccagaatgaaaatgccaggagctggtacactacagatgtagtaagaacctgggatattcctgacccaatctggttttcttttacccataaataacatgaatgaaaaaagattgggacaatagagactggaagtcatcatgtgcagttcaccgcttctgagcttgctgcagttttggggtgtgtgtgtattagattccttctcagttattctggaataaggcaaggagtgggttgtttttcatagctagataagatcttttccaaagtttttcttagaaccaaccaaaaaacaatccgagtaggcccaagaatttgataatgctggatgccttgcagacatcattcagtttctaatattgggcaacaattattattaaatgaattatttctgtagttggaatctgtaccttctgaacctctacaccaataactgctgcaggtgtgattttggtctgtcacactgtacatctatcataatgtgccctgtatctattggcagtgaccttggaaaatctggccaagcctaggggtttccttttccatttgccaagttccattgtgccaggactgccgtgctccactgagctcctctgtcacaccccattcttgcccctcactgggcaggccatggcctacagcttgcagggagtaaagcaggcccgcctccctttcttcccatccacatactcctcttctgctttccagtgactccaccagtttgatgtgggaagtgttagcttcctttccttcttccatcccttcttccatctttccagctgtcaaatccaatccagtctctaacctaaatgcagatcatttatttaaaagtaccaaacataacccagagtatgtggaatatgggcaacatatatatagccttctgtatttaacgatcttctgcttcttaaccgtaccagttttctatttataactcttatctatccatgatgttttaaagtctccacttgctgttatttacaaacgacagtgcattcagcagcccagtgccgtgagccctgacagatgccgtatttctgagtgcttccatgtgaatgctgccctcctgtagcatgtgtccaagtggacatagccactaaccaactagttacctttggactgcaacaaaaaatgtgaaaatgaagatttatttcttttaatttacttaaaaagaaacctctgtgctagcaataaagcatttatattgtg

SEQ ID NO: 106283 - DNA, 3049 bp, Homo sapiens
  Payload ID: 875
  Gene Symbol: ALDH1A2
  Gene Name: aldehyde dehydrogenase 1 family, member A2
  ENST ID: ENST00000430119
  CDS Start-End: 19-141
gacacccggcccgccaccatgacttccagcaagatagagatgcccggcgaggtgaaggccgaccccgccgccctcatggcgtcgctgcacctcctgccgtcgcccacgcccaatctcgaaattaagtacaccaaggtgtgaaaattggacttgctggcagaatcctttttgggagaagatgaagaatcagtgtgagactgtttggttaaaatccccaataaaactgaaactgatctttataaacaacgagtggcagaactcagagagtgggagagtgttccctgtctataatccagccacaggagaacaggtgtgtgaagttcaagaagcagacaaggcagatatagacaaagcagtgcaggcagcccgcctggctttctctcttggttcagtgtggagaaggatggatgcttcagaaaggggacgtctgttggataagcttgcagacttggtggaacgggacagggcagttcttgcaaccatggaatccctaaatggtggcaaaccattcctgcaagctttttatgtggatttgcagggcgtcatcaaaacctttcgatattacgcaggctgggctgataaaattcatgggatgaccattcctgtagatggagactattttacctttacaagacatgaacccattggagtgtgtggacagatcatcccatggaacttccccctgctgatgtttgcctggaaaatagctccagctttgtgctgtggcaatacagtagttattaagccagcagagcaaacaccactcagtgcactctacatgggagccctcatcaaggaggctggctttcctcccggggtcatcaatattttgccaggatatgggccaacggctggggcagcaatagcttctcacattggcatagacaagattgcattcacagggtctactgaggttggaaagcttatccaagaagcagctggaagaagtaatttgaagagagtaactctggaacttggaggcaaaagtcctaatattatttttgctgatgctgacttggactatgctgtggagcaggcccaccagggtgtgttcttcaatcaaggtcagtgctgcactgcaggctctcgcatcttcgtggaggagtccatctatgaggagtttgtgagaagaagcgtggagcgggccaagaggcgcgtagtggggagtccctttgaccccaccactgagcagggtccccagattgataagaaacagtacaacaagatcttggaactcatccagagtggtgtggctgagggcgccaagctggaatgtggaggcaaaggactgggccgaaaggggtttttcattgagcccacagtgttttccaacgtcactgatgatatgcggattgccaaggaggagatctttggccctgttcaggaaattttgagatttaagacgatggatgaagttatcgaaagagccaataactcagactttggactcgtagcagctgtctttactaatgacatcaacaaggccctcacagtgtcttctgcaatgcaagctgggactgtttggatcaattgttacaatgccttaaatgcccagagcccctttgggggattcaagatgtctggaaatgggagagaaatgggagaatttggcttgcgggagtactcagaagttaagacggtgacagtaaagatcccccagaagaactcctaagaaggccaagaaggaggatgaagcccagcctgcacgtctgtccctctctgctttctctgtagggcccagctctcaggaatacaaagttgagccacggtccttacttaaagattgaaaagataacatgtaggccaggcaggtcactgcacaactaaagcaaaccagctgggtacagtttcttggcactctgtaaggggccaccttaatcataccaaatattggggaaagtgggataaagggaggaggaggagctagcagacacatccagtatctccttctggagcacaggatgaaataagggagctgtattatttcatgtctttgtcacaaagaactttcctctcaaggaaaggtgacctttctcctgtcttcattttcctccttccaggccctcctcgctcacccacccctccctctcttccaaggagatgtcagctgagctcattctggggcagatgtttgggccgggaacaatttttcaaggttgtaaagccaaattatcatttcatgttatccatttcttcaaagcaaaacatgaaatggttttagctagagtcagaccagaatgaaaatgccaggagctggtacactacagatgtagtaagaacctgggatattcctgacccaatctggttttcttttacccataaataacatgaatgaaaaaagattgggacaatagagactggaagtcatcatgtgcagttcaccgcttctgagcttgctgcagttttggggtgtgtgtgtattagattccttctcagttattctggaataaggcaaggagtgggttgtttttcatagctagataagatcttttccaaagtttttcttagaaccaaccaaaaaacaatccgagtaggcccaagaatttgataatgctggatgccttgcagacatcattcagtttctaatattgggcaacaattattattaaatgaattatttctgtagttggaatctgtaccttctgaacctctacaccaataactgctgcaggtgtgattttggtctgtcacactgtacatctatcataatgtgccctgtatctattggcagtgaccttggaaaatctggccaagcctaggggtttccttttccatttgccaagttccattgtgccaggactgccgtgctccactgagctcctctgtcacaccccattcttgcccctcactgggcaggccatggcctacagcttgcagggagtaaagcaggcccgcctccctttcttcccatccacatactcctcttctgctttccagtgactccaccagtttgatgtgggaagtgttagcttcctttccttcttccatcccttcttccatctttccagctgtcaaatccaatccagtctctaacctaaatgcagatcat

SEQ ID NO: 106284 - DNA, 3700 bp, Homo sapiens
  Payload ID: 875
  Gene Symbol: ALDH1A2
  Gene Name: aldehyde dehydrogenase 1 family, member A2
  Uniprot ID: O94788
  ENST ID: ENST00000537372
  CDS Start-End: 434-1927
ggtctccgcggccggggggcgggagcgccgggcggacttgaccgtgggcgccaagcgtcccggccgcgcggcgcgggctttatgtaaatggaggctgcgccgggcgtcctaggtaggatggaccagccccccgcgcctcggccctcacgtccaataagaagagccccagcttgacacctgcctatatacaggcgagcgcgcccccgggccgcggaccgcgcgcacagcccgcactgccccacgccgcgggctagggacacccggcccgccaccatgacttccagcaagatagagatgcccggcgaggtgaaggccgaccccgccgccctcatggcgtcgctgcacctcctgccgtcgcccacgcccaatctcgaaattaagtacaccaaggtgtgaaaattggacttgctggcagaatcctttttgggagaagatgaagaatcagtgtgagactgtttggttaaaatccccaataaaactgaaactgatctttataaacaacgagtggcagaactcagagagtgggagagtgttccctgtctataatccagccacaggagaacaggtgtgtgaagttcaagaagcagacaaggcagatatagacaaagcagtgcaggcagcccgcctggctttctctcttggttcagtgtggagaaggatggatgcttcagaaaggggacgtctgttggataagcttgcagacttggtggaacgggacagggcagttcttgcaaccatggaatccctaaatggtggcaaaccattcctgcaagctttttatgtggatttgcagggcgtcatcaaaacctttcgatattacgcaggctgggctgataaaattcatgggatgaccattcctgtagatggagactattttacctttacaagacatgaacccattggagtgtgtggacagatcatcccatggaacttccccctgctgatgtttgcctggaaaatagctccagctttgtgctgtggcaatacagtagttattaagccagcagagcaaacaccactcagtgcactctacatgggagccctcatcaaggaggctggctttcctcccggggtcatcaatattttgccaggatatgggccaacggctggggcagcaatagcttctcacattggcatagacaagattgcattcacagggtctactgaggttggaaagcttatccaagaagcagctggaagaagtaatttgaagagagtaactctggaacttggaggcaaaagtcctaatattatttttgctgatgctgacttggactatgctgtggagcaggcccaccagggtgtgttcttcaatcaaggtcagtgctgcactgcaggctctcgcatcttcgtggaggagtccatctatgaggagtttgtgagaagaagcgtggagcgggccaagaggcgcgtagtggggagtccctttgaccccaccactgagcagggtccccagattgataagaaacagtacaacaagatcttggaactcatccagagtggtgtggctgagggcgccaagctggaatgtggaggcaaaggactgggccgaaaggggtttttcattgagcccacagtgttttccaacgtcactgatgatatgcggattgccaaggaggagatctttggccctgttcaggaaattttgagatttaagacgatggatgaagttatcgaaagagccaataactcagactttggactcgtagcagctgtctttactaatgacatcaacaaggccctcacagtgtcttctgcaatgcaagctgggactgtttggatcaattgttacaatgccttaaatgcccagagcccctttgggggattcaagatgtctggaaatgggagagaaatgggagaatttggcttgcgggagtactcagaagttaagacggtgacagtaaagatcccccagaagaactcctaagaaggccaagaaggaggatgaagcccagcctgcacgtctgtccctctctgctttctctgtagggcccagctctcaggaatacaaagttgagccacggtccttacttaaagattgaaaagataacatgtaggccaggcaggtcactgcacaactaaagcaaaccagctgggtacagtttcttggcactctgtaaggggccaccttaatcataccaaatattggggaaagtgggataaagggaggaggaggagctagcagacacatccagtatctccttctggagcacaggatgaaataagggagctgtattatttcatgtctttgtcacaaagaactttcctctcaaggaaaggtgacctttctcctgtcttcattttcctccttccaggccctcctcgctcacccacccctccctctcttccaaggagatgtcagctgagctcattctggggcagatgtttgggccgggaacaatttttcaaggttgtaaagccaaattatcatttcatgttatccatttcttcaaagcaaaacatgaaatggttttagctagagtcagaccagaatgaaaatgccaggagctggtacactacagatgtagtaagaacctgggatattcctgacccaatctggttttcttttacccataaataacatgaatgaaaaaagattgggacaatagagactggaagtcatcatgtgcagttcaccgcttctgagcttgctgcagttttggggtgtgtgtgtattagattccttctcagttattctggaataaggcaaggagtgggttgtttttcatagctagataagatcttttccaaagtttttcttagaaccaaccaaaaaacaatccgagtaggcccaagaatttgataatgctggatgccttgcagacatcattcagtttctaatattgggcaacaattattattaaatgaattatttctgtagttggaatctgtaccttctgaacctctacaccaataactgctgcaggtgtgattttggtctgtcacactgtacatctatcataatgtgccctgtatctattggcagtgaccttggaaaatctggccaagcctaggggtttccttttccatttgccaagttccattgtgccaggactgccgtgctccactgagctcctctgtcacaccccattcttgcccctcactgggcaggccatggcctacagcttgcagggagtaaagcaggcccgcctccctttcttcccatccacatactcctcttctgctttccagtgactccaccagtttgatgtgggaagtgttagcttcctttccttcttccatcccttcttccatctttccagctgtcaaatccaatccagtctctaacctaaatgcagatcatttatttaaaagtaccaaacataacccagagtatgtggaatatgggcaacatatatatagccttctgtatttaacgatcttctgcttcttaaccgtaccagttttctatttataactcttatctatccatgatgttttaaagtctccacttgctgttatttacaaacgacagtgcattcagcagcccagtgccgtgagccctgacagatgccgtatttctgagtgcttccatgtgaatgctgccctcctgtagcatgtgtccaagtggacatagccactaaccaactagttacctttggactgcaacaaaaaatgtgaaaatgaagatttatttcttttaatttacttaaaaagaaacctctgtgctagcaataaagcatttatattgtgtactcct

SEQ ID NO: 106285 - DNA, 554 bp, Homo sapiens
  Payload ID: 875
  Gene Symbol: ALDH1A2
  Gene Name: aldehyde dehydrogenase 1 family, member A2
  ENST ID: ENST00000561070
  CDS Start-End: 300-554
attgaagcattattataagctccagagtacacgtcttctgtggattttcagtcgtacttacaatttcatgctcagaagaggcctttagtatatattttgcagtgtcttctgtgaagtcaaatttctgctcagatctttataaacaacgagtggcagaactcagagagtgggagagtgttccctgtctataatccagccacaggagaacaggtgtgtgaagttcaagaagcagacaagatatagacaaagcagtgcaggcagcccgcctggctttctctcttggttcagtgtggagaaggatggatgcttcagaaaggggacgtctgttggataagcttgcagacttggtggaacgggacagggcagttcttgcaaccatggaatccctaaatggtggcaaaccattcctgcaagctttttatgtggatttgcagggcgtcatcaaaacctttcgatattacgcaggctgggctgataaaattcatgggatgaccattcctgtagatggagactattttacctttacaagacatgaacccattggagtgtgtgga

SEQ ID NO: 106286 - DNA, 664 bp, Homo sapiens
  Payload ID: 875
  Gene Symbol: ALDH1A2
  Gene Name: aldehyde dehydrogenase 1 family, member A2
  ENST ID: ENST00000558239
  CDS Start-End: 590-664
agctatagtctggcaggaaaactggactgagtggactagcttggggatcgtcaagactcttgatcttattggaggcagcttggtacattgcaatgagggggagatttgggatcagggaacctgggatggagccatgtctttctcccttcccagctgtgtaaccttggacaagtcacttaacctccaagactcactttcctccttcatcaagtgctgtgtgaagaatgcaggagagtgatttaagcaaagccccctaactgcctggcgtctagtaagtacacaggcagtgtgtacacaaggaaggaaatggcaggctgttcatatgcagcaagatccacacttggccaaacctggggtcacagagatggacatggaatcgagggcagaagatctgggtttgagtccagcagtgctttagatctttataaacaacgagtggcagaactcagagagtgggagagtgttccctgtctataatccagccacaggagaacaggtgtgtgaagttcaagaagcagacaaggcagatatagacaaagcagtgcaggcagcccgcctggctttctctcttggttcagtgtggagaaggatggatgcttcagaaaggggacgtctgttggataagcttgcagacttggtggaacgggacagggcagttcttgca

SEQ ID NO: 106287 - DNA, 1468 bp, Homo sapiens
  Payload ID: 875
  Gene Symbol: ALDH1A2
  Gene Name: aldehyde dehydrogenase 1 family, member A2
  Uniprot ID: O94788
  ENST ID: ENST00000559517
  CDS Start-End: 170-1438
agtacaccactacatgctcatgcttcacttttttcatgacagtggatggttcttcctttatttggagtgtttttcttcagttgtgcctcttcctctctaacaggcagatatagacaaagcagtgcaggcagcccgcctggctttctctcttggttcagtgtggagaaggatggatgcttcagaaaggggacgtctgttggataagcttgcagacttggtggaacgggacagggcagttcttgcaaccatggaatccctaaatggtggcaaaccattcctgcaagctttttatgtggatttgcagggcgtcatcaaaacctttcgatattacgcaggctgggctgataaaattcatgggatgaccattcctgtagatggagactattttacctttacaagacatgaacccattggagtgtgtggacagatcatcccatggaacttccccctgctgatgtttgcctggaaaatagctccagctttgtgctgtggcaatacagtagttattaagccagcagagcaaacaccactcagtgcactctacatgggagccctcatcaaggaggctggctttcctcccggggtcatcaatattttgccaggatatgggccaacggctggggcagcaatagcttctcacattggcatagacaagattgcattcacagggtctactgaggttggaaagcttatccaagaagcagctggaagaagtaatttgaagagagtaactctggaacttggaggcaaaagtcctaatattatttttgctgatgctgacttggactatgctgtggagcaggcccaccagggtgtgttcttcaatcaaggtcagtgctgcactgcaggctctcgcatcttcgtggaggagtccatctatgaggagtttgtgagaagaagcgtggagcgggccaagaggcgcgtagtggggagtccctttgaccccaccactgagcagggtccccagattgataagaaacagtacaacaagatcttggaactcatccagagtggtgtggctgagggcgccaagctggaatgtggaggcaaaggactgggccgaaaggggtttttcattgagcccacagtgttttccaacgtcactgatgatatgcggattgccaaggaggagatctttggccctgttcaggaaattttgagatttaagacgatggatgaagttatcgaaagagccaataactcagactttggactcgtagcagctgtctttactaatgacatcaacaaggccctcacagtgtcttctgcaatgcaagctgggactgtttggatcaattgttacaatgccttaaatgcccagagcccctttgggggattcaagatgtctggaaatgggagagaaatgggagaatttggcttgcgggagtactcagaagttaagacggtgacagtaaagatcccccagaagaactcctaagaaggccaagaaggaggatgaagcccagcc

SEQ ID NO: 106288 - DNA, 1664 bp, Homo sapiens
  Payload ID: 875
  Gene Symbol: ALDH1A2
  Gene Name: aldehyde dehydrogenase 1 family, member A2
  ENST ID: ENST00000558231
  CDS Start-End: 61-1530
agagcagcaggatggcacttggtgtctggatgcctttggagttgcacatacagcttctttatgaaaggaagaaactggaagacaacaaagatctttataaacaacgagtggcagaactcagagagtgggagagtgttccctgtctataatccagccacaggagaacaggtgtgtgaagttcaagaagcagacaaggcagatatagacaaagcagtgcaggcagcccgcctggctttctctcttggttcagtgtggagaaggatggatgcttcagaaaggggacgtctgttggataagcttgcagacttggtggaacgggacagggcagttcttgcaaccatggaatccctaaatggtggcaaaccattcctgcaagctttttatgtggatttgcagggcgtcatcaaaacctttcgatattacgcaggctgggctgataaaattcatgggatgaccattcctgtagatggagactattttacctttacaagacatgaacccattggagtgtgtggacagatcatcccatggaacttccccctgctgatgtttgcctggaaaatagctccagctttgtgctgtggcaatacagtagttattaagccagcagagcaaacaccactcagtgcactctacatgggagccctcatcaaggaggctggctttcctcccggggtcatcaatattttgccaggatatgggccaacggctggggcagcaatagcttctcacattggcatagacaagattgcattcacagggtctactgaggttggaaagcttatccaagaagcagctggaagaagtaatttgaagagagtaactctggaacttggaggcaaaagtcctaatattatttttgctgatgctgacttggactatgctgtggagcaggcccaccagggtgtgttcttcaatcaaggtcagtgctgcactgcaggctctcgcatcttcgtggaggagtccatctatgaggagtttgtgagaagaagcgtggagcgggccaagaggcgcgtagtggggagtccctttgaccccaccactgagcagggtccccagattgataagaaacagtacaacaagatcttggaactcatccagagtggtgtggctgagggcgccaagctggaatgtggaggcaaaggactgggccgaaaggggtttttcattgagcccacagtgttttccaacgtcactgatgatatgcggattgccaaggaggagatctttggccctgttcaggaaattttgagatttaagacgatggatgaagttatcgaaagagccaataactcagactttggactcgtagcagctgtctttactaatgacatcaacaaggccctcacagtgtcttctgcaatgcaagctgggactgtttggatcaattgttacaatgccttaaatgcccagagcccctttgggggattcaagatgtctggaaatgggagagaaatgggagaatttggcttgcgggagtactcagaagttaagacggtgacagtaaagatcccccagaagaactcctaagaaggccaagaaggaggatgaagcccagcctgcacgtctgtccctctctgctttctctgtagggcccagctctcaggaatacaaagttgagccacggtccttacttaaagattgaaaagataacatgtaggcca

SEQ ID NO: 106289 - DNA, 466 bp, Homo sapiens
  Payload ID: 875
  Gene Symbol: ALDH1A2
  Gene Name: aldehyde dehydrogenase 1 family, member A2
  ENST ID: ENST00000558384
  CDS Start-End: 1-73
gggagaatttggcttgcgggagtactcagaagttaagacggtgacagtaaagatcccccagaagaactcctaagaaggccaagaaggaggatgaagcccagcctgcacgtctgtccctctctgctttctctgtagggcccagctctcaggaatacaaagttgagccacggtccttacttaaagattgaaaagataacatgtaggccaggcaggtcactgcacaactaaagcaaaccagctggtgcattcagcagcccagtgccgtgagccctgacagatgccgtatttctgagtgcttccatgtgaatgctgccctcctgtagcatgtgtccaagtggacatagccactaaccaactagttacctttggactgcaacaaaaaatgtgaaaatgaagatttatttcttttaatttacttaaaaagaaacctctgtgctagcaataaagcatttatattgtgtactcc

SEQ ID NO: 106290 - DNA, 577 bp, Homo sapiens
  Payload ID: 875
  Gene Symbol: ALDH1A2
  Gene Name: aldehyde dehydrogenase 1 family, member A2
  ENST ID: ENST00000557967
  CDS Start-End: 551-577
cagcctctagtaacttgtttcttcctggaaaagatgaatctgatcccaattaacttaaataaaacaaaccaaacaaaactctccactaccagcctggcagctagggaggcattattgggtctgaatgtaggaaatcaggaaatacttacaatcaagatgaacgtgcccaagaactcagagagggtttctttcgctaagctgctcttcaagaccagtctctgcttgaagctttttcccttttctgctccctcaggctgcatcttggggcttctctgaggactcctgtttctaccaatacctacctgttgtggtcctcactttcacagccagatgaaaatggacgttttgacaatggctcacagattcctggagatgtctgatctttataaacaacgagtggcagaactcagagagtgggagagtgttccctgtctataatccagccacaggagaacaggtgtgtgaagttcaagaagcagacaaggcagatatagacaaagcagtgcaggcagcccgcctggctttctctcttggttcagtgtggagaaggatggatgcttcagaaaggggacgtctg

SEQ ID NO: 106291 - DNA, 3924 bp, Homo sapiens
  Payload ID: 876
  Gene Symbol: ALDH1A3
  Gene Name: aldehyde dehydrogenase 1 family, member A3
  Uniprot ID: P47895
  ENST ID: ENST00000329841
  CDS Start-End: 533-2071
attcccgagcgccgcgagccggccgaagtcgggcgagcgcgccgtgcggcggctgggagtgggctgcatgtgccgcgcggggagcccgcccgacttcggggaggcagcggggcgccgtggccccgcggctcagctccctgccgggtcgggtgtcccagccctgcgacttccggggcccggcggctcctcggggagctcgtccacaggcagcctccggggcgagagagcgcgcggcgcgggcgccgggacggtccgcggcacgcgggtggagccgccggcgctcgggctcccgcaggggcggcgggcggggcggggtgaggcgggccggccgccctcccctctcctccctcccgcagcccgccctcccttcctccggtcccgcagccaattaggcggccccctcgggcgggaggcgtggggcgctgcataaagcggcggggagctgccaccccgggagcgggctgcgcagtgtccgggccgagccggtgcgccgcagactagggcgcctcgggccagggagcgcggaggagccatggccaccgctaacggggccgtggaaaacgggcagccggacaggaagccgccggccctgccgcgccccatccgcaacctggaggtcaagttcaccaagatatttatcaacaatgaatggcacgaatccaagagtgggaaaaagtttgctacatgtaacccttcaactcgggagcaaatatgtgaagtggaagaaggagataagcccgacgtggacaaggctgtggaggctgcacaggttgccttccagaggggctcgccatggcgccggctggatgccctgagtcgtgggcggctgctgcaccagctggctgacctggtggagagggaccgcgccaccttggccgccctggagacgatggatacagggaagccatttcttcatgcttttttcatcgacctggagggctgtattagaaccctcagatactttgcagggtgggcagacaaaatccagggcaagaccatccccacagatgacaacgtcgtgtgcttcaccaggcatgagcccattggtgtctgtggggccatcactccatggaacttccccctgctgatgctggtgtggaagctggcacccgccctctgctgtgggaacaccatggtcctgaagcctgcggagcagacacctctcaccgccctttatctcggctctctgatcaaagaggccgggttccctccaggagtggtgaacattgtgccaggattcgggcccacagtgggagcagcaatttcttctcaccctcagatcaacaagatcgccttcaccggctccacagaggttggaaaactggttaaagaagctgcgtcccggagcaatctgaagcgggtgacgctggagctgggggggaagaacccctgcatcgtgtgtgcggacgctgacttggacttggcagtggagtgtgcccatcagggagtgttcttcaaccaaggccagtgttgcacggcagcctccagggtgttcgtggaggagcaggtctactctgagtttgtcaggcggagcgtggagtatgccaagaaacggcccgtgggagaccccttcgatgtcaaaacagaacaggggcctcagattgatcaaaagcagttcgacaaaatcttagagctgatcgagagtgggaagaaggaaggggccaagctggaatgcgggggctcagccatggaagacaaggggctcttcatcaaacccactgtcttctcagaagtcacagacaacatgcggattgccaaagaggagattttcgggccagtgcaaccaatactgaagttcaaaagtatcgaagaagtgataaaaagagcgaatagcaccgactatggactcacagcagccgtgttcacaaaaaatctcgacaaagccctgaagttggcttctgccttagagtctggaacggtctggatcaactgctacaacgccctctatgcacaggctccatttggtggctttaaaatgtcaggaaatggcagagaactaggtgaatacgctttggccgaatacacagaagtgaaaactgtcaccatcaaacttggcgacaagaacccctgaaggaaaggcggggctccttcctcaaacatcggacggcggaatgtggcagatgaaatgtgctggaggaaaaaaatgacatttctgaccttcccgggacacattcttctggaggctttacatctactggagttgaatgattgctgttttcctctcactctcctgtttattcaccagactggggatgcctataggttgtctgtgaaatcgcagtcctgcctggggagggagctgttggccatttctgtgtttccctttaaaccagatcctggagacagtgagatactcagggcgttgttaacagggagtggtatttgaagtgtccagcagttgcttgaaatgctttgccgaatctgactccagtaagaatgtgggaaaaccccctgtgtgttctgcaagcagggctcttgcaccagcggtctcctcagggtggacctgcttacagagcaagccacgcctctttccgaggtgaaggtgggaccattccttgggaaaggattcacagtaaggttttttggtttttgttttttgttttcttgtttttaaaaaaaggatttcacagtgagaaagttttggttagtgcataccgtggaagggcgccagggtctttgtggattgcatgttgacattgaccgtgagattcggcttcaaaccaatactgcctttggaatatgacagaatcaatagcccagagagcttagtcaaagacgatatcacggtctaccttaaccaaggcactttcttaagcagaaaatattgttgaggttacctttgctgctaaagatccaatcttctaacgccacaacagcatagcaaatcctaggataattcacctcctcatttgacaaatcagagctgtaattcgctttaacaaattacgcatttctatcacgttcactaacagcttatgataagtctgtgtagtcttccttttctccagttctgttacccaatttagattagtaaagcgtacacaactggaaagactgctgtaataacacagccttgttatttttaagtcctattttgatattaatttctgattagttagtaaataacacctggattctatggaggacctcggtcttcatccaagtggcctgagtatttcactggcaggttgtgaatttttcttttcctctttggggatccaaatgatgatgtgcaatttcatgttttaacttgggaaactgaaagtgttcccatatagcttcaaaaacaaaaacaaatgtgttatccgacggatacttttatggttactaactagtactttcctaattgggaaagtagtgcttaagtttgcaaattaagttggggagggcaataataaaatgagggcccgtaacagaaccagtgtgtgtataacgaaaaccatgtataaaatgggcctatcacccttgtcagagatataaattaccacatttgccttcccttcatcagctaacacttatcacttatactaccaataacttgttaaatcaggatttggcttcatacactgaattttcagtattttatctcaagtagatatagacactaaccttgatagtgatacgttagagggttcctattcttccattgtacgataatgtctttaatatgaaatgctacattatttataattggtagagttattgtatctttttatagttgtaagtacacagaggtggtatatttaaacttctgtaatatactgtatttagaaatggaaatatatatagtgttaggtttcacttcttttaaggtttacccctgtggtgtggtttaaaaatctataggcctgggaattccgatcctagctgcagatcgcatcccacaatgcgagaatgataaaataaaattggatatttgagaaa

SEQ ID NO: 106292 - DNA, 3104 bp, Homo sapiens
  Payload ID: 876
  Gene Symbol: ALDH1A3
  Gene Name: aldehyde dehydrogenase 1 family, member A3
  ENST ID: ENST00000346623
  CDS Start-End: 34-1251
agggcgcctcgggccagggagcgcggaggagccatggccaccgctaacggggccgtggaaaacgggcagccggacaggaagccgccggccctgccgcgccccatccgcaacctggaggtcaagttcaccaagatatttatcaacaatgaatggcacgaatccaagagtgggaaaaagtttgctacatgtaacccttcaactcgggagcaaatatgtgaagtggaagaaggagataagcccgacgtggacaaggctgtggaggctgcacaggttgccttccagaggggctcgccatggcgccggctggatgccctgagtcgtgggcggctgctgcaccagctggctgacctggtggagagggaccgcgccaccttggccgccgggttccctccaggagtggtgaacattgtgccaggattcgggcccacagtgggagcagcaatttcttctcaccctcagatcaacaagatcgccttcaccggctccacagaggttggaaaactggttaaagaagctgcgtcccggagcaatctgaagcgggtgacgctggagctgggggggaagaacccctgcatcgtgtgtgcggacgctgacttggacttggcagtggagtgtgcccatcagggagtgttcttcaaccaaggccagtgttgcacggcagcctccagggtgttcgtggaggagcaggtctactctgagtttgtcaggcggagcgtggagtatgccaagaaacggcccgtgggagaccccttcgatgtcaaaacagaacaggggcctcagattgatcaaaagcagttcgacaaaatcttagagctgatcgagagtgggaagaaggaaggggccaagctggaatgcgggggctcagccatggaagacaaggggctcttcatcaaacccactgtcttctcagaagtcacagacaacatgcggattgccaaagaggagattttcgggccagtgcaaccaatactgaagttcaaaagtatcgaagaagtgataaaaagagcgaatagcaccgactatggactcacagcagccgtgttcacaaaaaatctcgacaaagccctgaagttggcttctgccttagagtctggaacggtctggatcaactgctacaacgccctctatgcacaggctccatttggtggctttaaaatgtcaggaaatggcagagaactaggtgaatacgctttggccgaatacacagaagtgaaaactgtcaccatcaaacttggcgacaagaacccctgaaggaaaggcggggctccttcctcaaacatcggacggcggaatgtggcagatgaaatgtgctggaggaaaaaaatgacatttctgaccttcccgggacacattcttctggaggctttacatctactggagttgaatgattgctgttttcctctcactctcctgtttattcaccagactggggatgcctataggttgtctgtgaaatcgcagtcctgcctggggagggagctgttggccatttctgtgtttccctttaaaccagatcctggagacagtgagatactcagggcgttgttaacagggagtggtatttgaagtgtccagcagttgcttgaaatgctttgccgaatctgactccagtaagaatgtgggaaaaccccctgtgtgttctgcaagcagggctcttgcaccagcggtctcctcagggtggacctgcttacagagcaagccacgcctctttccgaggtgaaggtgggaccattccttgggaaaggattcacagtaaggttttttggtttttgttttttgttttcttgtttttaaaaaaaggatttcacagtgagaaagttttggttagtgcataccgtggaagggcgccagggtctttgtggattgcatgttgacattgaccgtgagattcggcttcaaaccaatactgcctttggaatatgacagaatcaatagcccagagagcttagtcaaagacgatatcacggtctaccttaaccaaggcactttcttaagcagaaaatattgttgaggttacctttgctgctaaagatccaatcttctaacgccacaacagcatagcaaatcctaggataattcacctcctcatttgacaaatcagagctgtaattcgctttaacaaattacgcatttctatcacgttcactaacagcttatgataagtctgtgtagtcttccttttctccagttctgttacccaatttagattagtaaagcgtacacaactggaaagactgctgtaataacacagccttgttatttttaagtcctattttgatattaatttctgattagttagtaaataacacctggattctatggaggacctcggtcttcatccaagtggcctgagtatttcactggcaggttgtgaatttttcttttcctctttggggatccaaatgatgatgtgcaatttcatgttttaacttgggaaactgaaagtgttcccatatagcttcaaaaacaaaaacaaatgtgttatccgacggatacttttatggttactaactagtactttcctaattgggaaagtagtgcttaagtttgcaaattaagttggggagggcaataataaaatgagggcccgtaacagaaccagtgtgtgtataacgaaaaccatgtataaaatgggcctatcacccttgtcagagatataaattaccacatttgccttcccttcatcagctaacacttatcacttatactaccaataacttgttaaatcaggatttggcttcatacactgaattttcagtattttatctcaagtagatatagacactaaccttgatagtgatacgttagagggttcctattcttccattgtacgataatgtctttaatatgaaatgctacattatttataattggtagagttattgtatctttttatagttgtaagtacacagaggtggtatatttaaacttctgtaatatactgtatttagaaatggaaatatatatagtgttaggtttcacttcttttaaggtttacccctgtggtgtggtttaaaaatctataggcctgggaattccgatcctagctgcagatcgcatcccacaatgcgagaatgataaaataaaattggatatttgagaaa

SEQ ID NO: 106293 - DNA, 571 bp, Homo sapiens
  Payload ID: 876
  Gene Symbol: ALDH1A3
  Gene Name: aldehyde dehydrogenase 1 family, member A3
  ENST ID: ENST00000561338
  CDS Start-End: 138-571
gacaaagtctatggctgagtgctccagtctgatctcaggctcccaggatcacgtgggtatcaaacggaggagctgcaggtgagccagtcggcatctttgcaactggctcctgagaccagacgcctcgggtcacaaggatgtctgagtgtgagatatttatcaacaatgaatggcacgaatccaagagtgggaaaaagtttgctacatgtaacccttcaactcgggagcaaatatgtgaagtggaagaaggagataagcccgacgtggacaaggctgtggaggctgcacaggttgccttccagaggggctcgccatggcgccggctggatgccctgagtcgtgggcggctgctgcaccagctggctgacctggtggagagggaccgcgccaccttggccgccctggagacgatggatacagggaagccatttcttcatgcttttttcatcgacctggagggctgtattagaaccctcagatactttgcagggtgggcagacaaaatccagggcaagaccatccccacagatgacaacgtcgtgtgcttcaccaggcatgagcccattggtgt

SEQ ID NO: 106294 - DNA, 1670 bp, Homo sapiens
  Payload ID: 876
  Gene Symbol: ALDH1A3
  Gene Name: aldehyde dehydrogenase 1 family, member A3
  ENST ID: ENST00000557963
  CDS Start-End: 70-378
gcgcagtgtccgggccgagccggtgcgccgcagactagggcgcctcgggccagggagcgcggaggagccatggccaccgctaacggggccgtggaaaacgggcagccggacaggaagccgccggccctgccgcgccccatccgcaacctggaggtcaagttcaccaaggtgaggcgggcgcccctcccacccgacggccgcgggcccctgcgctgggcagccagactcggggcggcgggggcgagggagcagcgggccgggggtccgccgggcgccgccgagacccgagcctccctgcccgggcgcggctctccagaaaccgcacctttcgcgggacgtctcgggcgggatcgcaggcggcggggctcggcgctgtgagcctcgaagccgggaaaccgaggccgtccagcgcccgcgcggggccgggccgcccgcatccctgcgaggccccgacgtgtccctgcgctgcccgctttgatcgcgagtggaggtgcgcgccgcgttgactcggagcgcgctggttttggggagctccctccccaaaaacccctgcgatgatttccagggtggacgagtctggctttgagagggtcggagggtccgagagcgccaagagagagtccgggaggcagatggcggagctgcagttggaagactggggaagcgggtcctccgagcaaagcgcagcgggcgccttccgtgcttagtttatacccggctcagcagcagaacgaggaggagtaggaaggtgctcgcttactgacgaaacctccccggagcccagaggtcccggtgtttacacacaaggcgcgcgctccggaaggtcgcagacctgggcctttgggaagcggtgggtcgcgaggccgcagaagcgcacggttctctgcctcctcgctctgtgggctgggaggctacagcgttggcagaacggcgagattacctgcccggggcagaaaggaataaaagaagatggtgaggcctccgaggcctctgagctggggctgaggagggccgagagacccgggtccgggagcgcgacccgatggaggacacccccaggctgtctggcgtgcgcgtctgtcgtgggccggtgctggggcactttagaggcacaggccaggccgagagccattgccttaactttccccacctttggcttctcttgatttttgcttttacccatagcccccaactccagctgacaccgcacttagagaatttcctcatccgttttactttaagaagtagcaattatctttctcaaagaattttaatcaagcggagaaagttgcagggcactatgtgtggccttcagatttgggtctcttggcacttaattcccaatgtcggctgagcctctgatcacaagacatttaaattaactgttttcagaaggctctgtaatcaacaaagacacgtcgctgtaaactaaacgctggaaattattcttaatgtagttttatttgtaatatcagcttcagagtgaaaattccaacacgaattctgggaagagtgaaaatggtacccgaattttgtaagaccctaaccccaggtgcttggctgctgctactgatggttaagtggggaggttgtttgttttcttttggttgtacaggatttcaaaatactgtatatagaaaccagacagtaaatgtattatggtcctttta

SEQ ID NO: 106295 - DNA, 713 bp, Homo sapiens
  Payload ID: 876
  Gene Symbol: ALDH1A3
  Gene Name: aldehyde dehydrogenase 1 family, member A3
  ENST ID: ENST00000558033
  CDS Start-End: 96-521
gggagctgccaccccgggagcgggctgcgcagtgtccgggccgagccggtgcgccgcagactagggcgcctcgggccagggagcgcggaggagccatggccaccgctaacggggccgtggaaaacgggcagccggacaggaagccgccggccctgccgcgccccatccgcaacctggaggtcaagttcaccaagatatttatcaacaatgaatggcacgaatccaagagtgggaaaaagtttgctacatgtaacccttcaactcgggagcaaatatgtgaagtggaagaaggagataagcccgacgtggacaaggctgtggaggctgcacaggttgccttccagaggggctcgccatggcgccggctggatgccctgagtcgtgggcggctgctgcaccagctggctgacctggtggagagggaccgcgccaccttggccatgacaacgtcgtgtgcttcaccaggcatgagcccattggtgtctgtggggccatcactccatggaacttccccctgctgatgctggtgtggaagctggcacccgccctctgctgtgggaacaccatggtcctgaagcctgcggagcagacacctctcaccgccctttatctcggctctctgatcaaagaggccgggttccctccaggagtggtgaacattgtgccaggattcgggcccacagtgggagcagcaatttcttctcaccctcaga

SEQ ID NO: 106296 - DNA, 3066 bp, Homo sapiens
  Payload ID: 877
  Gene Symbol: ALDH1B1
  Gene Name: aldehyde dehydrogenase 1 family, member B1
  Uniprot ID: P30837
  ENST ID: ENST00000377698
  CDS Start-End: 154-1707
aggcggagcctcattggccgctgagccccgggctgcgcggaggcgggacctgcggccagccctgggcggccatgtggacagagctgggagggccggaaccagaacccaagcgtgatcctgaaccggagcccgagcctgctgcagagtgtcagcatgctgcgcttcctggcaccccggctgcttagcctccagggcaggaccgcccgctactcctcggcagcagccctcccaagccccattctgaacccagacatcccctacaaccagctgttcatcaacaatgaatggcaagatgcagtcagcaagaagaccttcccgacggtcaaccctaccaccggggaggtcattgggcacgtggctgaaggtgaccgggctgatgtggatcgggccgtgaaagcagcccgggaagccttccgcctggggtccccatggcgccggatggatgcctctgagcggggccggctgctgaaccgcctggcagacctagtggagcgggatcgagtctacttggcctcactcgagaccttggacaatgggaagcctttccaagagtcttacgccttggacttggatgaggtcatcaaggtgtatcggtactttgctggctgggctgacaagtggcatggcaagaccatccccatggatggccagcatttctgcttcacccggcatgagcccgttggtgtctgtggccagatcatcccgtggaacttccccttggtcatgcagggttggaaacttgccccggcactcgccacaggcaacactgtggttatgaaggtggcagagcagacccccctctctgccctgtatttggcctccctcatcaaggaggcaggctttccccctggggtggtgaacatcatcacggggtatggcccaacagcaggtgcggccatcgcccagcacgtggatgttgacaaagttgccttcaccggttccaccgaggtgggccacctgatccagaaagcagctggcgattccaacctcaagagagtcaccctggagctgggtggtaagagccccagcatcgtgctggccgatgctgacatggagcatgccgtggagcagtgccacgaagccctgttcttcaacatgggccagtgctgctgtgctggctcccggaccttcgtggaagaatccatctacaatgagtttctcgagagaaccgtggagaaagcaaagcagaggaaagtggggaacccctttgagctggacacccagcaggggcctcaggtggacaaggagcagtttgaacgagtcctaggctacatccagcttggccagaaggagggcgcaaaactcctctgtggcggagagcgtttcggggagcgtggtttcttcatcaagcctactgtctttggtggcgtgcaggatgacatgagaattgccaaagaggagatctttgggcctgtgcagcccctgttcaagttcaagaagattgaggaggtggttgagagggccaacaacaccaggtatggcctggctgcggctgtgttcacccgggatctggacaaggccatgtacttcacccaggcactccaggccgggaccgtgtgggtaaacacctacaacatcgtcacctgccacacgccatttggagggtttaaggaatctggaaacgggagggagctgggtgaggatgggcttaaggcctacacagaggtaaagacggtcaccatcaaggttcctcagaagaactcgtaagagcagctgtcagggaggcccagtcacagtccagcaattccacaaccaccttgacgaatgcttgccaagctgttttaaagccaagaacaccctttctttgttccaaattaactcttagaagaaaccccacaaataaagcaattcaatcaaggctgttctatttaaatcagagatggggaccaggctcagagttctacctatctaacccccaaccacagcccccttggtggcccatgagttgcttccatgaaatcttaggagtctctggaggacagattaaaaaccagtgatctgtaatttgtagctcttcctgctgatccaaggactttcccatgggtgcgcttgatggtttagtggatcgactcaactcagaacacaagcttggaaagtgttaggggttttgaactaggtggatactaaatctcggccccactcttcattggcttaacctaaaaaccagaggtgcttttccttgtctgtgtgccagttgctggctgttttagttgcttgcccttcattttgctactgattttccttaatttgtgggaaggagtaggcaaagaatatgcttacatgattacacctgtaaagtaagcccaaacatcccaaatgtccgtcaactgatgagtggattaataaaatgtttccatggaatattccttggattactcagccataaaaaggaatgaagtactgacacatgctgtgacatcagtgaaccctgaaaacatccttctcagtgaaacaagccagagagatgtacaaggctacagactgtatgattccatttatatgaaatatacatactaggcaaatccatggagatggaacatagattagtggttgccaggggatagaggagtaattgttagtgggcatgggatttgtttttgggaggttttgaaaatgttctggagttgaacaatagtaatggttgcatgatttggtaaaaatactaaaaactatggaattgtttaattatggtatatgaattaatttctttctttttttcttttttttttttttttttgacacggagtctcactctgtcgcccaggctggagtgcagtggtgtgatctcgtctcactgcaacctccgcctcccagattcaagcgattctcctgtctcagcctcctgagtagctgggattataggtacatgccatcacacctggctaatttttgtatttttagtagagatgaggtttcaccattttggccaggctgatcttgaactcctgacctcaggtgatccacccgcctcagcctcccaaagtgctgggattacaggtgggagccacaacacccggccatgaattaactccgttaaaaaataaacgtatacattctgtgagcaaa

SEQ ID NO: 106297 - DNA, 584 bp, Homo sapiens
  Payload ID: 877
  Gene Symbol: ALDH1B1
  Gene Name: aldehyde dehydrogenase 1 family, member B1
  ENST ID: ENST00000635162
  CDS Start-End: 195-584
cctgcggccagccctgggcggccatgtggacagagctgggagggccggaaccagaacccaagcgtgatcctgaaccggagcccgagcctgctgcagagacacggttcttgctatgtgctcaggctggtctcaaactcctggcctcaagcagtccttccacttcggcctaccaaagcgttaccagcagtgtcagcatgctgcgcttcctggcaccccggctgcttagcctccagggcaggaccgcccgctactcctcggcagcagccctcccaagccccattctgaacccagacatcccctacaaccagctgttcatcaacaatgaatggcaagatgcagtcagcaagaagaccttcccgacggtcaaccctaccaccggggaggtcattgggcacgtggctgaaggtgaccgggctgatgtggatcgggccgtgaaagcagcccgggaagccttccgcctggggtccccatggcgccggatggatgcctctgagcggggccggctgctgaaccgcctggcagacctagtggagcgggatcgagtctacttggcctcactcgagaccttggacaatgggaagcct

SEQ ID NO: 106298 - DNA, 3179 bp, Homo sapiens
  Payload ID: 878
  Gene Symbol: ALDH1L1
  Gene Name: aldehyde dehydrogenase 1 family, member L1
  Uniprot ID: O75891
  ENST ID: ENST00000273450
  CDS Start-End: 219-2957
tctgcggcaccaggactgagtagaagggagagagtggagaaggggaattgcagagagaaaaccaggggctgtttttctctcggagaggcgggtaggcactgggcgggcagaagcgccgctatccacccggatgcgcagctgctaaggggccgcctctgcaagcggctgcaaattcccggagggcagcgtctcctttcgctctgctgtgtccgtagcacatggcaggtccttccaaccctcctgctaccatgaagattgcagtgattggacagagcctgtttggccaggaagtttactgccacctgaggaaggagggccacgaagtggtgggtgtgttcactgttccagacaaggatggaaaggccgaccccctgggtctggaagctgagaaggatggagtgccggtattcaagtactcccggtggcgtgcaaaaggacaggctttgcctgatgtggtggcaaaataccaggctttgggggccgagctcaacgtcctgcccttctgcagccaattcatccccatggagataatcagtgccccccggcatggctccatcatctatcacccgtcactgctccctaggcaccgaggggcctcggccatcaactggaccctcattcacggagataagaaaggggggttttccatcttctgggcggatgatggtctggacaccggagacctgctgctgcagaaggagtgtgaggtgctcccggacgacaccgtgagcacgctgtacaaccgcttcctcttccctgaaggcatcaaagggatggtgcaggccgtgaggctgatcgctgagggcaaagcccccagactccctcagcctgaggaaggagccacctatgaggggattcagaagaaggagacagccaagatcaactgggaccagccggcagaggccattcacaactggatccgcgggaacgacaaggtgccgggagcctggacagaggcctgtgaacagaaactgacatttttcaactcaacgctgaacacttcaggcctggtgcccgagggagacgctttgcccatcccaggagcccatcggccaggggtggtcaccaaagcaggactcatcctctttgggaatgatgacaaaatgctgctggtgaagaatattcagctggaggatggcaaaatgatcctggcctcgaacttctttaagggggcagccagcagtgtccttgagctgacagaggcagagctggttactgcggaggctgtgcggagtgtttggcagcggatcctccccaaagtcctggaggttgaagactccactgatttcttcaagtcaggggccgcgtctgtggacgttgtgaggctggtggaggaagtgaaggagctgtgtgatggcctggagttagaaaatgaagatgtgtacatggcatccacctttggggacttcatccagctgttagtgaggaagctgcgaggggacgatgaggagggcgagtgcagcattgactacgtggaaatggcagtgaacaagcgcactgtccgcatgccccaccagctcttcattgggggggagttcgtggatgccgagggcgccaagacctctgagaccatcaatcccaccgatggaagtgtcatctgccaggtatccctggcccaagtcaccgacgtcgacaaggcagtggccgcagccaaggatgcctttgagaatggacggtgggggaagatcagtgcgcgggaccggggccggctgatgtacaggttggcagatctcatggagcagcaccaggaggagctggccaccattgaggccctggatgcgggtgccgtctacacgctggccctgaagacccacgtgggcatgtccatccagaccttccgctactttgctggctggtgtgacaagatccagggctccaccatccccatcaaccaggccagacccaaccgcaacctgaccttgaccaggaaggagcctgttggggtttgtggcatcatcatcccctggaactatcccctgatgatgctgtcctggaagacagctgcctgcctggctgccgggaacacagtggtgatcaagcctgctcaggtgaccccactcacagccttgaagtttgcagagctgacattaaaggccggcattcccaaaggtgtggttaacgtcctcccaggatctggctccctggtcggccagagactctcagaccatcctgatgtgaggaaaatcgggttcacaggctccacagaggtgggcaagcacatcatgaaaagctgtgccataagtaacgtgaagaaggtgtccctggaactgggcgggaagtcacccctcatcatctttgctgactgtgacctcaacaaggctgtgcagatggggatgagttctgttttcttcaacaaaggagagaattgcattgcagcaggccgactctttgtggaggactccattcatgatgagttcgtgcggagagtggtagaagaggtgcggaagatgaaggtgggcaacccgctggacagggacaccgaccacgggccgcagaatcaccatgcccaccttgtgaagctgatggagtactgccagcatggcgtgaaggaaggggccacactggtctgcggcgggaatcaggtccctcggccagggttcttctttgagccaactgttttcacagacgtggaagaccacatgttcatagccaaggaggagtccttcgggcctgtcatgatcatctctcggtttgctgatggggacttggatgccgtgctgtctcgggccaatgccacggaatttggcctggcttctggtgtcttcaccagggacatcaacaaggccctgtatgtcagtgacaagctccaggcaggcactgtgtttgtcaacacgtacaacaagaccgacgtggccgctcccttcggaggattcaaacagtctggatttggcaaagatctaggagaggcggctctgaacgagtacctgcgggtcaagacagtgaccttcgaatactgaagaaaggtctttgtgagaagaaagtccctgcccctccctcgtggctggggccccctccctcttgagcctgggtgcacagcacctcccacctggggggctagtggaagccctcctgcctgcacaccatgtctgcatcttggacgccctctgtccagtcagaagcagcccttggctgggtgaggtgtgcccctcccagggagaataaagcttctgaagagagac

SEQ ID NO: 106299 - DNA, 2797 bp, Homo sapiens
  Payload ID: 878
  Gene Symbol: ALDH1L1
  Gene Name: aldehyde dehydrogenase 1 family, member L1
  Uniprot ID: O75891
  ENST ID: ENST00000393431
  CDS Start-End: 124-1641
ctcctggctcccaggacgggtctgcaccaacctcagtttcggggctgcggctcacagaagtctaacctgcccgggacgcccgcaccaactcctgcgcgcggtccttccaaccctcctgctaccatgaagattgcagtgattggacagagcctgtttggccaggaagtttactgccacctgaggaaggagggccacgaagtggtgggtgtgttcactgttccagacaaggatggaaaggccgaccccctgggtctggaagctgagaaggatggagtgccggtattcaagtactcccggtggcgtgcaaaaggacaggctttgcctgatgtggtggcaaaataccaggctttgggggccgagctcaacgtcctgcccttctgcagccaattcatccccatggagataatcagtgccccccggcatggctccatcatctatcacccgtcactgctccctaggcaccgaggggcctcggccatcaactggaccctcattcacggagataagaaaggggggttttccatcttctgggcggatgatggtctggacaccggagacctgctgctgcagaaggagtgtgaggtgctcccggacgacaccgtgagcacgctgtacaaccgcttcctcttccctgaaggcatcaaagggatggtgcaggccgtgaggctgatcgctgagggcaaagcccccagactccctcagcctgaggaaggagccacctatgaggggattcagaagaaggagacagccaagatcaactgggaccagccggcagaggccattcacaactggatccgcgggaacgacaaggtgccgggagcctggacagaggcctgtgaacagaaactgacatttttcaactcaacgctgaacacttcaggcctggtgcccgagggagacgctttgcccatcccaggagcccatcggccaggggtggtcaccaaagcaggactcatcctctttgggaatgatgacaaaatgctgctggtgaagaatattcagctggaggatggcaaaatgatcctggcctcgaacttctttaagggggcagccagcagtgtccttgagctgacagaggcagagctggttactgcggaggctgtgcggagtgtttggcagcggatcctccccaaagtcctggaggttgaagactccactgatttcttcaagtcaggggccgcgtctgtggacgttgtgaggctggtggaggaagtgaaggagctgtgtgatggcctggagttagaaaatgaagatgtgtacatggcatccacctttggggacttcatccagctgttagtgaggaagctgcgaggggacgatgaggagggcgagtgcagcattgactacgtggaaatggcagtgaacaagcgcactgtccgcatgccccaccagctcttcattgggggggagttcgtggatgccgagggcgccaagacctctgagaccatcaatcccaccgatggaagtgtcatctgccaggtatccctggcccaagtcaccgacgtcgacaaggcagtggccgcagccaaggatgcctttgagaatggacggtgggggaagatcagtgcgcgggaccggggccggctgatgtacagggctccaccatccccatcaaccaggccagacccaaccgcaacctgaccttgaccaggaaggagcctgttggggtttgtggcatcatcatcccctggaactatcccctgatgatgctgtcctggaagacagctgcctgcctggctgccgggaacacagtggtgatcaagcctgctcaggtgaccccactcacagccttgaagtttgcagagctgacattaaaggccggcattcccaaaggtgtggttaacgtcctcccaggatctggctccctggtcggccagagactctcagaccatcctgatgtgaggaaaatcgggttcacaggctccacagaggtgggcaagcacatcatgaaaaggggatgagttctgttttcttcaacaaaggagagaattgcattgcagcaggccgactctttgtggaggactccattcatgatgagttcgtgcggagagtggtagaagaggtgcggaagatgaaggtgggcaacccgctggacagggacaccgaccacgggccgcagaatcaccatgcccaccttgtgaagctgatggagtactgccagcatggcgtgaaggaaggggccacactggtctgcggcgggaatcaggtccctcggccagggttcttctttgagccaactgttttcacagacgtggaagaccacatgttcatagccaaggaggagtccttcgggcctgtcatgatcatctctcggtttgctgatggggacttggatgccgtgctgtctcgggccaatgccacggaatttggcctggcttctggtgtcttcaccagggacatcaacaaggccctgtatgtcagtgacaagctccaggcaggcactgtgtttgtcaacacgtacaacaagaccgacgtggccgctcccttcggaggattcaaacagtctggatttggcaaagatctaggagaggcggctctgaacgagtacctgcgggtcaagacagtgaccttcgaatactgaagaaaggtctttgtgagaagaaagtccctgcccctccctcgtggctggggccccctccctcttgagcctgggtgcacagcacctcccacctggggggctagtggaagccctcctgcctgcacaccatgtctgcatcttggacgccctctgtccagtcagaagcagcccttggctgggtgaggtgtgcccctcccagggagaataaagcttctgaag

SEQ ID NO: 106300 - DNA, 3277 bp, Homo sapiens
  Payload ID: 878
  Gene Symbol: ALDH1L1
  Gene Name: aldehyde dehydrogenase 1 family, member L1
  Uniprot ID: O75891
  ENST ID: ENST00000393434
  CDS Start-End: 351-3059
acagtaagtcttcttgacctaagcgggaaagagcgcaggcccctgcggggttggcttttacatggcatttatagacccgcccggagagggtgcgctgcgctcccgccatagtcccaccaccggtgagcgccgcccccactcggctgactctccgcccgccccgcgcccctcccctcacgggctctggccttaaccagagctcgcggactggcggggacaggtcccacctcctggctcccaggacgggtctgcaccaacctcagtttcggggctgcggctcacagaagtctaacctgcccgggacgcccgcaccaactcctgcgcgcggtccttccaaccctcctgctaccatgaagattgcagtgattggacagagcctgtttggccaggaagtttactgccacctgaggaaggagggccacgaagtggtgggtgtgttcactgttccagacaaggatggaaaggccgaccccctgggtctggaagctgagaaggatggagtgccggtattcaagtactcccggtggcgtgcaaaaggacaggctttgcctgatgtggtggcaaaataccaggctttgggggccgagctcaacgtcctgcccttctgcagccaattcatccccatggagataatcagtgccccccggcatggctccatcatctatcacccgtcactgctccctaggcaccgaggggcctcggccatcaactggaccctcattcacggagataagaaaggggggttttccatcttctgggcggatgatggtctggacaccggagacctgctgctgcagaaggagtgtgaggtgctcccggacgacaccgtgagcacgctgtacaaccgcttcctcttccctgaaggcatcaaagggatggtgcaggccgtgaggctgatcgctgagggcaaagcccccagactccctcagcctgaggaaggagccacctatgaggggattcagaagaaggagacagccaagatcaactgggaccagccggcagaggccattcacaactggatccgcgggaacgacaaggtgccgggagcctggacagaggcctgtgaacagaaactgacatttttcaactcaacgctgaacacttcaggcctggtgcccgagggagacgctttgcccatcccaggagcccatcggccaggggtggtcaccaaagcaggactcatcctctttgggaatgatgacaaaatgctgctggtgaagaatattcagctggaggatggcaaaatgatcctggcctcgaacttctttaagggggcagccagcagtgtccttgagctgacagaggcagagctggttactgcggaggctgtgcggagtgtttggcagcggatcctccccaaagtcctggaggttgaagactccactgatttcttcaagtcaggggccgcgtctgtggacgttgtgaggctggtggaggaagtgaaggagctgtgtgatggcctggagttagaaaatgaagatgtgtacatggcatccacctttggggacttcatccagctgttagtgaggaagctgcgaggggacgatgaggagggcgagtgcagcattgactacgtggaaatggcagtgaacaagcgcactgtccgcatgccccaccagctcttcattgggggggagttcgtggatgccgagggcgccaagacctctgagaccatcaatcccaccgatggaagtgtcatctgccaggtatccctggcccaagtcaccgacgtcgacaaggcagtggccgcagccaaggatgcctttgagaatggacggtgggggaagatcagtgcgcgggaccggggccggctgatgtacaggttggcagatctcatggagcagcaccaggaggagctggccaccattgaggccctggatgcgggtgccgtctacacgctggccctgaagacccacgtgggcatgtccatccagaccttccgctactttgctggctggtgtgacaagatccagggctccaccatccccatcaaccaggccagacccaaccgcaacctgaccttgaccaggaaggagcctgttggggtttgtggcatcatcatcccctggaactatcccctgatgatgctgtcctggaagacagctgcctgcctggctgccgggaacacagtggtgatcaagcctgctcaggtgaccccactcacagccttgaagtttgcagagctgacattaaaggccggcattcccaaaggtgtggttaacgtcctcccaggatctggctccctggtcggccagagactctcagaccatcctgatgtgaggaaaatcgggttcacaggctccacagaggtgggcaagcacatcatgaaaagctgtgccataagtaacgtgaagaaggtgtccctggaactgggcgggaagtcacccctcatcatctttgctgactgtgacctcaacaaggctgtgcagatggggatgagttctgttttcttcaacaaaggagagaattgcattgcagcaggccgactctttgtggaggactccattcatgatgagttcgtgcggagagtggtagaagaggtgcggaagatgaaggtgggcaacccgctggacagggacaccgaccacgggccgcagaatcaccatgcccaccttgtgaagctgatggagtactgccagcatggcgtgaaggaaggggccacactggtctgcggcgggaatcaggtccctcggccagggttcttctttgagccaactgttttcacagacgtggaagaccacatgttcatagccaaggaggagtccttcgggcctgtcatgatcatctctcggtttgctgatggggacttggatgccgtgctgtctcgggccaatgccacggaatttggcctggcttctggtgtcttcaccagggacatcaacaaggccctgtatgtcagtgacaagctccaggcaggcactgtgtttgtcaacacgtacaacaagaccgacgtggccgctcccttcggaggattcaaacagtctggatttggcaaagatctaggagaggcggctctgaacgagtacctgcgggtcaagacagtgaccttcgaatactgaagaaaggtctttgtgagaagaaagtccctgcccctccctcgtggctggggccccctccctcttgagcctgggtgcacagcacctcccacctggggggctagtggaagccctcctgcctgcacaccatgtctgcatcttggacgccctctgtccagtcagaagcagcccttggctgggtgaggtgtgcccctcccagggagaataaagcttctgaagag

SEQ ID NO: 106301 - DNA, 2758 bp, Homo sapiens
  Payload ID: 878
  Gene Symbol: ALDH1L1
  Gene Name: aldehyde dehydrogenase 1 family, member L1
  Uniprot ID: O75891
  ENST ID: ENST00000452905
  CDS Start-End: 135-2540
acaggtcccacctcctggctcccaggacgggtctgcaccaacctcagtttcggggctgcggctcacagaagtctaacctgcccgggacgcccgcaccaactcctgcgcgcggtccttccaaccctcctgctaccatgaagattgcagtgattggacagagcctgtttggccaggaagtttactgccacctgaggaaggagggccacgaagtggtgggtgtgttcactgttccagacaaggatggaaaggccgaccccctgggtctggaagctgagaaggatggagtgccggtattcaagtactcccggtggcgtgcaaaaggacaggctttgcctgatgtggtggcaaaataccaggctttgggggccgagctcaacgtcctgcccttctgcagccaattcatccccatggagataatcagtgccccccggcatggctccatcatctatcacccgtcactgctccctaggcaccgaggggcctcggccattcacaactggatccgcgggaacgacaaggtgccgggagcctggacagaggcctgtgaacagaaactgacatttttcaactcaacgctgaacacttcaggcctggtgcccgagggagacgctttgcccatcccaggagcccatcggccaggggtggtcaccaaagcaggactcatcctctttgggaatgatgacaaaatgctgctggtgaagaatattcagctggaggatggcaaaatgatcctggcctcgaacttctttaagggggcagccagcagtgtccttgagctgacagaggcagagctggttactgcggaggctgtgcggagtgtttggcagcggatcctccccaaagtcctggaggttgaagactccactgatttcttcaagtcaggggccgcgtctgtggacgttgtgaggctggtggaggaagtgaaggagctgtgtgatggcctggagttagaaaatgaagatgtgtacatggcatccacctttggggacttcatccagctgttagtgaggaagctgcgaggggacgatgaggagggcgagtgcagcattgactacgtggaaatggcagtgaacaagcgcactgtccgcatgccccaccagctcttcattgggggggagttcgtggatgccgagggcgccaagacctctgagaccatcaatcccaccgatggaagtgtcatctgccaggtatccctggcccaagtcaccgacgtcgacaaggcagtggccgcagccaaggatgcctttgagaatggacggtgggggaagatcagtgcgcgggaccggggccggctgatgtacaggttggcagatctcatggagcagcaccaggaggagctggccaccattgaggccctggatgcgggtgccgtctacacgctggccctgaagacccacgtgggcatgtccatccagaccttccgctactttgctggctggtgtgacaagatccagggctccaccatccccatcaaccaggccagacccaaccgcaacctgaccttgaccaggaaggagcctgttggggtttgtggcatcatcatcccctggaactatcccctgatgatgctgtcctggaagacagctgcctgcctggctgccgggaacacagtggtgatcaagcctgctcaggtgaccccactcacagccttgaagtttgcagagctgacattaaaggccggcattcccaaaggtgtggttaacgtcctcccaggatctggctccctggtcggccagagactctcagaccatcctgatgtgaggaaaatcgggttcacaggctccacagaggtgggcaagcacatcatgaaaagctgtgccataagtaacgtgaagaaggtgtccctggaactgggcgggaagtcacccctcatcatctttgctgactgtgacctcaacaaggctgtgcagatggggatgagttctgttttcttcaacaaaggagagaattgcattgcagcaggccgactctttgtggaggactccattcatgatgagttcgtgcggagagtggtagaagaggtgcggaagatgaaggtgggcaacccgctggacagggacaccgaccacgggccgcagaatcaccatgcccaccttgtgaagctgatggagtactgccagcatggcgtgaaggaaggggccacactggtctgcggcgggaatcaggtccctcggccagggttcttctttgagccaactgttttcacagacgtggaagaccacatgttcatagccaaggaggagtccttcgggcctgtcatgatcatctctcggtttgctgatggggacttggatgccgtgctgtctcgggccaatgccacggaatttggcctggcttctggtgtcttcaccagggacatcaacaaggccctgtatgtcagtgacaagctccaggcaggcactgtgtttgtcaacacgtacaacaagaccgacgtggccgctcccttcggaggattcaaacagtctggatttggcaaagatctaggagaggcggctctgaacgagtacctgcgggtcaagacagtgaccttcgaatactgaagaaaggtctttgtgagaagaaagtccctgcccctccctcgtggctggggccccctccctcttgagcctgggtgcacagcacctcccacctggggggctagtggaagccctcctgcctgcacaccatgtctgcatcttggacgccctctgtccagtcagaagcagcccttggctgggtgaggtgtgcccctcccagggagaataaagcttctgaagag

SEQ ID NO: 106302 - DNA, 3137 bp, Homo sapiens
  Payload ID: 878
  Gene Symbol: ALDH1L1
  Gene Name: aldehyde dehydrogenase 1 family, member L1
  Uniprot ID: O75891
  ENST ID: ENST00000455064
  CDS Start-End: 351-1868
acagtaagtcttcttgacctaagcgggaaagagcgcaggcccctgcggggttggcttttacatggcatttatagacccgcccggagagggtgcgctgcgctcccgccatagtcccaccaccggtgagcgccgcccccactcggctgactctccgcccgccccgcgcccctcccctcacgggctctggccttaaccagagctcgcggactggcggggacaggtcccacctcctggctcccaggacgggtctgcaccaacctcagtttcggggctgcggctcacagaagtctaacctgcccgggacgcccgcaccaactcctgcgcgcggtccttccaaccctcctgctaccatgaagattgcagtgattggacagagcctgtttggccaggaagtttactgccacctgaggaaggagggccacgaagtggtgggtgtgttcactgttccagacaaggatggaaaggccgaccccctgggtctggaagctgagaaggatggagtgccggtattcaagtactcccggtggcgtgcaaaaggacaggctttgcctgatgtggtggcaaaataccaggctttgggggccgagctcaacgtcctgcccttctgcagccaattcatccccatggagataatcagtgccccccggcatggctccatcatctatcacccgtcactgctccctaggcaccgaggggcctcggccatcaactggaccctcattcacggagataagaaaggggggttttccatcttctgggcggatgatggtctggacaccggagacctgctgctgcagaaggagtgtgaggtgctcccggacgacaccgtgagcacgctgtacaaccgcttcctcttccctgaaggcatcaaagggatggtgcaggccgtgaggctgatcgctgagggcaaagcccccagactccctcagcctgaggaaggagccacctatgaggggattcagaagaaggagacagccaagatcaactgggaccagccggcagaggccattcacaactggatccgcgggaacgacaaggtgccgggagcctggacagaggcctgtgaacagaaactgacatttttcaactcaacgctgaacacttcaggcctggtgcccgagggagacgctttgcccatcccaggagcccatcggccaggggtggtcaccaaagcaggactcatcctctttgggaatgatgacaaaatgctgctggtgaagaatattcagctggaggatggcaaaatgatcctggcctcgaacttctttaagggggcagccagcagtgtccttgagctgacagaggcagagctggttactgcggaggctgtgcggagtgtttggcagcggatcctccccaaagtcctggaggttgaagactccactgatttcttcaagtcaggggccgcgtctgtggacgttgtgaggctggtggaggaagtgaaggagctgtgtgatggcctggagttagaaaatgaagatgtgtacatggcatccacctttggggacttcatccagctgttagtgaggaagctgcgaggggacgatgaggagggcgagtgcagcattgactacgtggaaatggcagtgaacaagcgcactgtccgcatgccccaccagctcttcattgggggggagttcgtggatgccgagggcgccaagacctctgagaccatcaatcccaccgatggaagtgtcatctgccaggtatccctggcccaagtcaccgacgtcgacaaggcagtggccgcagccaaggatgcctttgagaatggacggtgggggaagatcagtgcgcgggaccggggccggctgatgtacagggctccaccatccccatcaaccaggccagacccaaccgcaacctgaccttgaccaggaaggagcctgttggggtttgtggcatcatcatcccctggaactatcccctgatgatgctgtcctggaagacagctgcctgcctggctgccgggaacacagtggtgatcaagcctgctcaggtgaccccactcacagccttgaagtttgcagagctgacattaaaggccggcattcccaaaggtgtggttaacgtcctcccaggatctggctccctggtcggccagagactctcagaccatcctgatgtgaggaaaatcgggttcacaggctccacagaggtgggcaagcacatcatgaaaagctgtgccataagtaacgtgaagaaggtgtccctggaactgggcgggaagtcacccctcatcatctttgctgactgtgacctcaacaaggctgtgcagatggggatgagttctgttttcttcaacaaaggagagaattgcattgcagcaggccgactctttgtggaggactccattcatgatgagttcgtgcggagagtggtagaagaggtgcggaagatgaaggtgggcaacccgctggacagggacaccgaccacgggccgcagaatcaccatgcccaccttgtgaagctgatggagtactgccagcatggcgtgaaggaaggggccacactggtctgcggcgggaatcaggtccctcggccagggttcttctttgagccaactgttttcacagacgtggaagaccacatgttcatagccaaggaggagtccttcgggcctgtcatgatcatctctcggtttgctgatggggacttggatgccgtgctgtctcgggccaatgccacggaatttggcctggcttctggtgtcttcaccagggacatcaacaaggccctgtatgtcagtgacaagctccaggcaggcactgtgtttgtcaacacgtacaacaagaccgacgtggccgctcccttcggaggattcaaacagtctggatttggcaaagatctaggagaggcggctctgaacgagtacctgcgggtcaagacagtgaccttcgaatactgaagaaaggtctttgtgagaagaaagtccctgcccctccctcgtggctggggccccctccctcttgagcctgggtgcacagcacctcccacctggggggctagtggaagccctcctgcctgcacaccatgtctgcatcttggacgccctctgtccagtcagaagcagcccttggctgggtgaggtgtgcccctcccagggagaataaagcttctgaagagagaccgtccac

SEQ ID NO: 106303 - DNA, 615 bp, Homo sapiens
  Payload ID: 878
  Gene Symbol: ALDH1L1
  Gene Name: aldehyde dehydrogenase 1 family, member L1
  ENST ID: ENST00000490367
  CDS Start-End: 83-615
atatctgatatgtgataccatatgggagcaggctctgaaagaacactacaagtagagaggtccttccaaccctcctgctaccatgaagattgcagtgattggacagagcctgtttggccaggaagtttactgccacctgaggaaggagggccacgaagtggtgggtgtgttcactgttccagacaaggatggaaaggccgaccccctgggtctggaagctgagaaggatggagtgccggtattcaagtactcccggtggcgtgcaaaaggacaggctttgcctgatgtggtggcaaaataccaggctttgggggccgagctcaacgtcctgcccttctgcagccaattcatccccatggagataatcagtgccccccggcatggctccatcatctatcacccgtcactgctccctaggcaccgaggggcctcggccatcaactggaccctcattcacggagataagaaaggggggttttccatcttctgggcggatgatggtctggacaccggagacctgctgctgcagaaggagtgtgaggtgctcccggacgacaccgtgagcacgctgtacaaccgcttcctcttccctgaaggcatcaaagggatggtgca

SEQ ID NO: 106304 - DNA, 1010 bp, Homo sapiens
  Payload ID: 878
  Gene Symbol: ALDH1L1
  Gene Name: aldehyde dehydrogenase 1 family, member L1
  ENST ID: ENST00000493803
  CDS Start-End: 135-380
acaggtcccacctcctggctcccaggacgggtctgcaccaacctcagtttcggggctgcggctcacagaagtctaacctgcccgggacgcccgcaccaactcctgcgcgcggtccttccaaccctcctgctaccatgaagattgcagtgattggacagagcctgtttggccaggaagtttactgccacctgaggaaggagggccacgaagtggtgggtgtgttcactgttccagacaaggatggaaaggccgaccccctgggaccctcattcacggagataagaaaggggggttttccatcttctgggcggatgatggtctggacaccggagacctgctgctgcagaaggagtgtgaggtgctcccggacgacaccgtgagcacgctgtacaaccgcttcctcttccctgaaggcatcaaagggatggtgcaggccgtgaggctgatcgctgagggcaaagcccccagactccctcagcctgaggaaggagccacctatgaggggattcagaagaaggagacagccaagatcaactgggaccagccggcagaggccattcacaactggatccgcgggaacgacaaggtgccgggagcctggacagaggcctgtgaacagaaactgacatttttcaactcaacgctgaacacttcaggcctggtgcccgagggagacgctttgcccatcccaggagcccatcggccaggggtggtcaccaaagcaggactcatcctctttgggaatgatgacaaaatggtaagggcacggctgtgggtcacttgcctgctcaaagccacccatgctcctgtccttggactcaggcctcacaggaagaccctaggctcctctggagaaaatggaaaaaaccagacccaggaaggaacactgaccctgatttgtccctgaccacccggctggtcctgagcacagggtgtccgaggcagtttacccacttctctgttctgggaaagctgggctccctacccttcctggctaggcacccatctcc

SEQ ID NO: 106305 - DNA, 2192 bp, Homo sapiens
  Payload ID: 878
  Gene Symbol: ALDH1L1
  Gene Name: aldehyde dehydrogenase 1 family, member L1
  ENST ID: ENST00000473607
  CDS Start-End: 78-221
gcggctcacagaagtctaacctgcccgggacgcccgcaccaactcctgcgcgcggtccttccaaccctcctgctaccatgaagattgcagtgattggacagagcctgtttggccaggaagtttactgccacctgaggaaggagggccacgaagtggtgggtgtgttcactgttccagacaaggatggaaaggccgaccccctggacaccaggacagagtgacagaggaggagaccggagaggagagccagtccagtcagggcccaaacatcacaccagaggctctaacagagaactgaatacaaagaagtgttccttgggtattgaagagtggaaggcagagagcccaaagttattggggacagcgactgcaggaagcagctgccactgtctggaagctgagaaggatggagtgccggtattcaagtactcccggtggcgtgcaaaaggacaggctttgcctgatgtggtggcaaaataccaggctttgggggccgagctcaacgtcctgcccttctgcagccaattcatccccatggagataatcagtgccccccggcatggctccatcatctatcacccgtcactgctccctaggcaccgaggggcctcggccatcaactggaccctcattcacggagataagaaaggggggttttccatcttctgggcggatgatggtctggacaccggagacctgctgctgcagaaggagtgtgaggtgctcccggacgacaccgtgagcacgctgtacaaccgcttcctcttccctgaaggcatcaaagggatggtgcaggccgtgaggctgatcgctgagggcaaagcccccagactccctcagcctgaggaaggagccacctatgaggggattcagaagaaggagacagccaagatcaactgggaccagccggcagaggccattcacaactggatccgcgggaacgacaaggtgccgggagcctggacagaggcctgtgaacagaaactgacatttttcaactcaacgctgaacacttcaggcctggtgcccgagggagacgctttgcccatcccaggagcccatcggccaggggtggtcaccaaagcaggactcatcctctttgggaatgatgacaaaatgctgctggtgaagaatattcagctggaggatggcaaaatgatcctggcctcgaacttctttaagggggcagccagcagtgtccttgagctgacagaggcagagctggttactgcggaggctgtgcggagtgtttggcagcggatcctccccaaagtcctggaggttgaagactccactgatttcttcaagtcaggggccgcgtctgtggacgttgtgaggctggtggaggaagtgaaggagctgtgtgatggcctggagttagaaaatgaagatgtgtacatggcatccacctttggggacttcatccagctgttagtgaggaagctgcgaggggacgatgaggagggcgagtgcagcattgactacgtggaaatggcagtgaacaagcgcactgtccgcatgccccaccagctcttcattgggggggagttcgtggatgccgagggcgccaagacctctgagaccatcaatcccaccgatggaagtgtcatctgccaggtatccctggcccaagtcaccgacgtcgacaaggcagtggccgcagccaaggatgcctttgagaatggacggtgggggaagatcagtgcgcgggaccggggccggctgatgtacaggtgggagcccaacatgtacctgccagccactgccaccatcagcttctgggcagtggcacgggggggacttctgtggaggcccttttacctgccaggaggagctgggtcctggggaggctatgggaccgaggccatcagatgggccaggctggggctccttgcctgaggctcagaaaaggcttctcagaggaagggatatgagaaacaggagacatttcagcagagtgggctcaggggaggtgcctggtggaggtgaggaggtgcggaagccaagggatgcttccaaagtgggcgcaggctgggcctcccaggcagacaaagcacttccctcaccagcctgggctggaggggacttagctcctgcacgcagaagacagcaagggccagagaagggctggcctggtctctgcttgctcagccaggctctgactactggaatctataggtttcacattttct

SEQ ID NO: 106306 - DNA, 1020 bp, Homo sapiens
  Payload ID: 878
  Gene Symbol: ALDH1L1
  Gene Name: aldehyde dehydrogenase 1 family, member L1
  ENST ID: ENST00000460368
  CDS Start-End: 515-1020
acagtaagtcttcttgacctaagcgggaaagagcgcaggcccctgcggggttggcttttacatggcatttatagacccgcccggagagggtgcgctgcgctcccgccatagtcccaccaccggtgagcgccgcccccactcggctgactctccgcccgccccgcgcccctcccctcacgggctctggccttaaccagagctcgcggactggcggggacaggtcccacctcctggctcccaggacgggtctgcaccaacctcagtttcggggctgcggctcacagaagtctaacctgcccgggacgcccgcaccaactcctgcgcgcggtgagtttctgggctctcgagagcgctggactcccggcggaaaggaggctgccccggctgcagctccgggggctccgggggctccaggggctccaggactcggttctcaccgcaagggctcctgcggggcccatcaacttcgccgctgggacgccgggctcggggtccttccaaccctcctgctaccatgaagattgcagtgattggacagagcctgtttggccaggaagtttactgccacctgaggaaggagggccacgaagtggtgggtgtgttcactgttccagacaaggatggaaaggccgaccccctgggtctggaagctgagaaggatggagtgccggtattcaagtactcccggtggcgtgcaaaaggacaggctttgcctgatgtggtggcaaaataccaggctttgggggccgagctcaacgtcctgcccttctgcagccaattcatccccatggagataatcagtgccccccggcatggctccatcatctatcacccgtcactgctccctaggcaccgaggggcctcggccatcaactggaccctcattcacggagataagaaaggggggttttccatcttctgggcggatgatggtctggacaccggagacctgctgctgcagaaggagtgtgaggtgctcccggacgacaccgtgagcacgctgtacaaccgcttcctctt

SEQ ID NO: 106307 - DNA, 689 bp, Homo sapiens
  Payload ID: 878
  Gene Symbol: ALDH1L1
  Gene Name: aldehyde dehydrogenase 1 family, member L1
  ENST ID: ENST00000488356
  CDS Start-End: 219-689
ctttcgctctgctgtgtccgtagcacatggcaggtacttggcccatcaagagtgagagagggtgagcgagtgagtgagtcaccggcttggcgagggtctcctctgacccacttagccttgccagcgctcagaactgccagccctgctgggtgcttgggacttttcaaagccctgggaattctccaagggtccacagtccttccaaccctcctgctaccatgaagattgcagtgattggacagagcctgtttggccaggaagtttactgccacctgaggaaggagggccacgaagtggtgggtgtgttcactgttccagacaaggatggaaaggccgaccccctgggtctggaagctgagaaggatggagtgccggtattcaagtactcccggtggcgtgcaaaaggacaggctttgcctgatgtggtggcaaaataccaggctttgggggccgagctcaacgtcctgcccttctgcagccaattcatccccatggagataatcagtgccccccggcatggctccatcatctatcacccgtcactgctccctaggcaccgaggggcctcggccatcaactggaccctcattcacggagataagaaaggggggttttccatcttctgggcggatgatggtctggacaccggagacctgctgctgcagaaggagtgtgaggtgctcccggac

SEQ ID NO: 106308 - DNA, 3157 bp, Homo sapiens
  Payload ID: 878
  Gene Symbol: ALDH1L1
  Gene Name: aldehyde dehydrogenase 1 family, member L1
  Uniprot ID: O75891
  ENST ID: ENST00000472186
  CDS Start-End: 229-2937
actgcgctcaagtggacggtcgcgcgtgcagagggaggccggatagcagaccccacaacgtggctcctggggccccgctatcgagagctcaggccccgcgggcacttgcctaggagaggaaagaatcttcccaaagtgcagacagagacggaatttaatcaggagtcccagacttggagtttggaggcatgggctctggtgtcaggtccttccaaccctcctgctaccatgaagattgcagtgattggacagagcctgtttggccaggaagtttactgccacctgaggaaggagggccacgaagtggtgggtgtgttcactgttccagacaaggatggaaaggccgaccccctgggtctggaagctgagaaggatggagtgccggtattcaagtactcccggtggcgtgcaaaaggacaggctttgcctgatgtggtggcaaaataccaggctttgggggccgagctcaacgtcctgcccttctgcagccaattcatccccatggagataatcagtgccccccggcatggctccatcatctatcacccgtcactgctccctaggcaccgaggggcctcggccatcaactggaccctcattcacggagataagaaaggggggttttccatcttctgggcggatgatggtctggacaccggagacctgctgctgcagaaggagtgtgaggtgctcccggacgacaccgtgagcacgctgtacaaccgcttcctcttccctgaaggcatcaaagggatggtgcaggccgtgaggctgatcgctgagggcaaagcccccagactccctcagcctgaggaaggagccacctatgaggggattcagaagaaggagacagccaagatcaactgggaccagccggcagaggccattcacaactggatccgcgggaacgacaaggtgccgggagcctggacagaggcctgtgaacagaaactgacatttttcaactcaacgctgaacacttcaggcctggtgcccgagggagacgctttgcccatcccaggagcccatcggccaggggtggtcaccaaagcaggactcatcctctttgggaatgatgacaaaatgctgctggtgaagaatattcagctggaggatggcaaaatgatcctggcctcgaacttctttaagggggcagccagcagtgtccttgagctgacagaggcagagctggttactgcggaggctgtgcggagtgtttggcagcggatcctccccaaagtcctggaggttgaagactccactgatttcttcaagtcaggggccgcgtctgtggacgttgtgaggctggtggaggaagtgaaggagctgtgtgatggcctggagttagaaaatgaagatgtgtacatggcatccacctttggggacttcatccagctgttagtgaggaagctgcgaggggacgatgaggagggcgagtgcagcattgactacgtggaaatggcagtgaacaagcgcactgtccgcatgccccaccagctcttcattgggggggagttcgtggatgccgagggcgccaagacctctgagaccatcaatcccaccgatggaagtgtcatctgccaggtatccctggcccaagtcaccgacgtcgacaaggcagtggccgcagccaaggatgcctttgagaatggacggtgggggaagatcagtgcgcgggaccggggccggctgatgtacaggttggcagatctcatggagcagcaccaggaggagctggccaccattgaggccctggatgcgggtgccgtctacacgctggccctgaagacccacgtgggcatgtccatccagaccttccgctactttgctggctggtgtgacaagatccagggctccaccatccccatcaaccaggccagacccaaccgcaacctgaccttgaccaggaaggagcctgttggggtttgtggcatcatcatcccctggaactatcccctgatgatgctgtcctggaagacagctgcctgcctggctgccgggaacacagtggtgatcaagcctgctcaggtgaccccactcacagccttgaagtttgcagagctgacattaaaggccggcattcccaaaggtgtggttaacgtcctcccaggatctggctccctggtcggccagagactctcagaccatcctgatgtgaggaaaatcgggttcacaggctccacagaggtgggcaagcacatcatgaaaagctgtgccataagtaacgtgaagaaggtgtccctggaactgggcgggaagtcacccctcatcatctttgctgactgtgacctcaacaaggctgtgcagatggggatgagttctgttttcttcaacaaaggagagaattgcattgcagcaggccgactctttgtggaggactccattcatgatgagttcgtgcggagagtggtagaagaggtgcggaagatgaaggtgggcaacccgctggacagggacaccgaccacgggccgcagaatcaccatgcccaccttgtgaagctgatggagtactgccagcatggcgtgaaggaaggggccacactggtctgcggcgggaatcaggtccctcggccagggttcttctttgagccaactgttttcacagacgtggaagaccacatgttcatagccaaggaggagtccttcgggcctgtcatgatcatctctcggtttgctgatggggacttggatgccgtgctgtctcgggccaatgccacggaatttggcctggcttctggtgtcttcaccagggacatcaacaaggccctgtatgtcagtgacaagctccaggcaggcactgtgtttgtcaacacgtacaacaagaccgacgtggccgctcccttcggaggattcaaacagtctggatttggcaaagatctaggagaggcggctctgaacgagtacctgcgggtcaagacagtgaccttcgaatactgaagaaaggtctttgtgagaagaaagtccctgcccctccctcgtggctggggccccctccctcttgagcctgggtgcacagcacctcccacctggggggctagtggaagccctcctgcctgcacaccatgtctgcatcttggacgccctctgtccagtcagaagcagcccttggctgggtgaggtgtgcccctcccagggagaataaagcttctgaagagag

SEQ ID NO: 106309 - DNA, 583 bp, Homo sapiens
  Payload ID: 878
  Gene Symbol: ALDH1L1
  Gene Name: aldehyde dehydrogenase 1 family, member L1
  ENST ID: ENST00000509952
  CDS Start-End: 284-583
gttctgtacctcacttctgatttctgcaagtcacttcctttttttttttgtctataaatttgttctgtccacgaggcaaccctggagtctctctgaatctgctgtgattctgagggctgcccaatttgtgaatcgttcattgctcaattaaacttttttaaatttaatttggctgaagtttttcttttaacatggtgtcagaagcgggatccaaagtacagcttctagcgacccccaggagtactgagtgaacaagcaaggtccttccaaccctcctgctaccatgaagattgcagtgattggacagagcctgtttggccaggaagtttactgccacctgaggaaggagggccacgaagtggtgggtgtgttcactgttccagacaaggatggaaaggccgaccccctgggtctggaagctgagaaggatggagtgccggtattcaagtactcccggtggcgtgcaaaaggacaggctttgcctgatgtggtggcaaaataccaggctttgggggccgagctcaacgtcctgcccttctgcagccaattcatccccatggagataatcagtgccccccggcat

SEQ ID NO: 106310 - DNA, 583 bp, Homo sapiens
  Payload ID: 878
  Gene Symbol: ALDH1L1
  Gene Name: aldehyde dehydrogenase 1 family, member L1
  ENST ID: ENST00000511283
  CDS Start-End: 231-374
ataaatttgttctgtccacgaggcaaccctggagtctctctgaatctgctgtgattctgagggctgcccaatttgtgaatcgttcattgctcaattaaacttttttaaatttaatttggctgaagtttttcttttaacatggtgtcagaagcgggatccaaagtacagcttctagcgacccccaggagtactgagtgaacaagcaaggtccttccaaccctcctgctaccatgaagattgcagtgattggacagagcctgtttggccaggaagtttactgccacctgaggaaggagggccacgaagtggtgggtgtgttcactgttccagacaaggatggaaaggccgaccccctggacaccaggacagagtgacagaggaggagaccggagaggagagccagtccagtcagggcccaaacatcacaccagaggctctaacagagaactgaatacaaagaagtgttccttgggtattgaagagtggaaggcagagagcccaaagttattggggacagcgactgcaggaagcagctgccactgtctggaagctgagaaggatggagtgccggtattcaagtact

SEQ ID NO: 106311 - DNA, 7547 bp, Homo sapiens
  Payload ID: 879
  Gene Symbol: ALDH1L2
  Gene Name: aldehyde dehydrogenase 1 family, member L2
  Uniprot ID: Q3SY69
  ENST ID: ENST00000258494
  CDS Start-End: 142-2913
agcagaggccgagagcggcgagccgcgagccaggcagtccggggcatccagactgcaggccgcgcccaggccgcgcccaggctgcgccgcccgcctgcctcccgcgctgccgcgtcgccagtgctagcgctcctctccagcatgctgcggcggggcagccaggcgctccggcgcttctccactggccgggtttatttcaaaaacaagctgaagttggcactaattggccagagcctctttggacaagaagtctatagccacctccgcaaagagggccaccgagtagtaggggtgttcacagttccagacaaggatggaaaagctgaccctctggctttggctgcagagaaagatgggacccctgtgttcaagcttcctaaatggagggtcaagggcaagaccatcaaagaagtggcagaagcctacagatccgtgggtgcagagctaaatgtgctccctttctgcactcagttcattcccatggatataattgatagtccaaagcacggctctatcatttatcacccatccatcctgcccaggcacagaggagcctctgctatcaattggactctaattatgggagataagaaagctgggttttctgttttctgggctgatgatggcttggatacaggacccatccttcttcagagatcatgtgatgttgaacccaatgatacagtggatgcactttataatcggtttctttttcctgaaggaatcaaggccatggtagaagctgtccaactcatagctgatggaaaagctcctcgtataccccagccagaagaaggggcaacatatgaaggtatccagaaaaaggaaaatgctgagatttcttgggaccagtctgccgaagttttacataactggattcgaggtcatgataaagtccctggagcttggacagagataaatggacagatggtcactttctatggctcgacattactgaatagctctgtgcctcctggagaaccactggaaattaaaggtgccaagaagcctggtctcgttaccaaaaatggacttgttctttttggtaacgatggaaaagcactgacggtgagaaatctgcagtttgaagatggaaaaatgatccctgcctctcagtacttttcaacgggtgagacgtcagtggtagaactgacagctgaagaggtgaaagtggcagagaccatcaaggtcatctgggctggaattttaagcaatgtccccattattgaagactcaacagacttctttaaatctggagcaagctcaatggatgttgccaggctggttgaagagatcagacagaaatgtggtgggcttcagttgcagaatgaagatgtctatatggccaccaagtttgaaggctttatccaaaaggtcgtgaggaaactgagaggagaagatcaagaggtggagctggttgtagattatatttcaaaggaggtcaatgaaatcatggtaaaaatgccataccagtgtttcataaatggacagttcacagatgcagacgatggaaagacttacgacactatcaacccaacagatggatctacaatatgcaaagtatcctacgcttctttggcggatgttgataaagcagtagcagcagcaaaagatgcttttgaaaacggtgaatggggaagaatgaatgcaagagaaagaggaagattgatgtatagacttgcagacctactggaagagaaccaagaagagctggcaactattgaagcccttgattcaggggctgtctataccttggccctgaagacacacattggaatgtctgtgcaaacattcagatattttgctggctggtgcgacaaaattcagggttctactattccaatcaaccaggcccgtccaaatcgcaatctgaccttcaccaagaaagagccactcggtgtctgtgccattattattccctggaactacccgctgatgatgctggcatggaagagtgctgcgtgtttggcagcaggcaataccttagtgctcaagccagcacaggtcacgcccttgactgctttgaagtttgcagaactgtctgtgaaagcaggctttccaaagggggtcatcaacatcattccaggctcaggtggcatagcaggacaacgtctgtctgaacatcctgacatccgcaaacttggtttcactggatccactcctattggcaaacagatcatgaagagctgtgctgttagcaacttgaagaaagtttcccttgagcttggtggcaagtctccacttataatatttaatgactgtgaacttgacaaggctgtgcgaatgggcatgggagcagtatttttcaacaaaggagagaactgtattgctgctgggcggttgttcgtggaagaatccatccacgacgaatttgtgacaagagtggtagaagaaattaaaaagatgaaaattggtgatccacttgacagatccactgatcatgggccccaaaatcataaggctcatctggaaaagctgctgcaatactgtgaaactggagtgaaagaaggggccactttggtgtacgggggaagacaagtccaaaggccaggctttttcatggagccgaccgtgttcacagatgtggaagactacatgtacctcgccaaagaggaatcctttgggcctattatggtcatttctaaattccaaaatggggacatcgatggagtgttgcagcgagcaaatagtacagagtatggtttggcctcaggggtttttacaagagacataaacaaagctatgtatgtgagtgaaaaactggaagcaggaactgtttttattaacacatacaacaagacagatgtggcggccccatttggcggagttaaacaatctggctttggaaaagacttaggtgaggaagctctaaatgaatatctcaaaaccaagacggtgacactggaatattagagcaacaccatcatcaggaaagccttgacagacagccctttacaactctggacacacttaagaagattgggtgtgttgaggcaggaggtgtcagccacaaaccaaaaaatacacagatggaccatgaagagggccaggccatgttaaagcatttacacatgtgcctgagtattttctaatacaccttccagtgatttggagttgttgcattttgactatgttgtatatcatacgtatttctaaaataccaagctgtttctcccctacctagacaaatctattcatggttcccatcttgaagatgtcagtaccatgcagttataatacacaaggtgcatttattggaaactttgtataatatgtacaggtttttaacctctgaactatacatagggggttattaaaaagattttctataagtcttctaaggaacagtataacctgtaaggaatgtgaaggtagttcttttttagtatttggaaataagatacatctttgtgcctttgatattccattttttaacccactgtgatgggtgatcaacctagaaacattatcttgagtacctactaggtaccaggtactatattatgttctgaggagtatagagaatttaatgatatgatggctggcccccacatagtttaaattttagtaaatagcttttgaagcaaattttacatatgatatagtagaaggctgatcctggtcgtatcataccatcttcctatctatgtaactttgggaaactctcgcaactcctctgagcctctgcttccctatgtgtaaaacagggatagtaaatgccttcctcaggacccttaataggagaattcattgcagtaatgtaagtaaagcacctcacattaatgctttgctcatggtaagtactcaaatttaactctgatttcctccgtcaccattcttaaaagatattgagatagtttaattaactagatgaattcatttcccacaacccttttcaatcatcaattcctagatatttttctcatccattgttctgacacaatgcctgatacagcagcactgaaaaatgccacacaatgaaaaatggcaatagtacaaggaaaaggggtgcttttctttgggcagctcgctcgtccttcatgggacatcttactttccatttttctacctattggttctgctgttcactggctgtgtgatcttgggcaagatagtaatctaatatctcagagcctaggttgagtatctataaaatgaaaatcaaatctctatctcagtaggtgttgcaaggattcagtgagataatatacataatgcacttaacaaggcgtttggaccatagcattgaagaaatggaaactattaacagcccatttcccattggcagacagaagtagtcaggtgagtaaattttcaccatctatgtgtgactagaaggcggcaaatttctgaatcacatgagtctccaaaagatagccagaaagttaaattctattaatcctcctttaaaaataaaatttcagtaaacattcctttttctttggctttgaagaagccttagggaatatttgtcattttggagacttggcagaataacatgaggggattgtagggaatcaataaaaactaaacaacaaaatcagagtcagagaacattttcaaaaggaagaataggaggtttgatcccagcatgataaacagagcgaatttggcctggaagcacttttgattatactatagctcatttaccatcccagagtttggcacagctgaaattttaagttggaatgaatattcactgggcccaaaatgacagttcatatttgaataaaagtgacaaaagcctttttataagtaatcacttttaagtgaaatgttttaactgatttcatgtgatttagaatatgatttaatcaaattattttaatgatagatggaatggcagacaaaaacatgcctgtccttctagactgattttactttaccctctaatattcatctcagtagcagtgttttaaatattctctgggctgcaaaactctttgggaatctgataaaagctatgaacactccctgtgtcccgcttctacccccaaaattcatgtgcacacacacaattctgcaagtatcttcaaagggttcacagacctcccaaaggccatgcttgggccccagattaagaactcctttctccatagcaagttttaaacatttcttaccagcttacatttttagatctggctgatcagaatcaaaggctctgtgtaatacataaagttaccaagtgaactggaattggaacatcaccctccccagcctgctaggtgatttacttaacacatagagtaataaaatcatcgctgttgctttagatcacggattattttgctaataatgctaaggatgaagctgtgatcttattatcacctgaatcgggaggtgtggacactttaagcagttccactttccttctaattccccatccccatgcctttgctaaagctgtcccttttgctctaacacccttcctggaccttcctaccctagctgggctaagtgtttctcctcagcgttcccacttgtttcaaacatagcacttaccacttgtactaaaattacttgccttcttaattagatatgaacaaccctccccaactccagtatgggccttctgtcaataataatacgatatgacagctaccatttattaagggcctcctgtatgaaagaccttaggctaagcatgttttaaatgttatttaatcttcacaatctctgaaaaaaatgaagaaatcaacgtgcttttcttactacctctacccctaagccattattacttttttttttttttgagacagagttttgctcttgttgcccaggctgcagtgcagtggtgcaatcttggctcactgcaacctctgcctcttgggttcaagcgattgtcatgccttagccttccaagtagctgggattacaggtgtgtgccactacacctggctaagtagagatggggtttcgccatgttggccaggctggtcttgaactcctgacctcaagtgatccacctgcctccgcctcccaaagtgctgggattacaggcatgaaccactgcacctggcctgttacctctttcctacaattttgctcaagtctcccaactggtcttctggattcctctcttctgcggtcctgttcaaagcttaagtcagacagtgtcacttcactcgtctgtttaaaacctttcaatggcccccatttcacgtagaccaaagtccaacgtatttacctggcctactgatcttgctcctagctacctctgacctcatctcctgtcaatttccctctcattctgttccaccatcctgactgccttgacttcctcaacagaacaagcctgctcctgcctcagggcctctgtccttattcttcctcttcccaggggtgtgctggtaaaatatttaacaaatagttctccgggacgggggagaaaaccctcatttgtagcatttgcaggtatctatgtgtaaatactctcatcaaggctatttttgagccactaatttgccttcactgaatacagagtttgggaagagatgcatgccatcagaacaaatgcaagccagcaccagcacaccactgcctcttcctgcaactcttgtccatacacaacctcatggctggctggctcacttcctgcaggtctctcctcaaatatcatctgatgagagacacattccctgactatgctttctaaaataggccatatgcccccacattcataccccatctgctgtcattctttattctttttataagtgcattattttcatagcacttatcactacctgttgtatattaatcaatgatcttttcccattagaatgtaagtttcatgaacaggtacttgttttaatactgtatctccagtcctaatgtgtaacaggagcccaataaatgtttgctttcaaatggagaggttaagtaacctgctcaaatcacacagctattaagtggcagaacaggttttcaagcaatgcatctggtggttttaactaagtcgagatagtttttattcctaatgcctaaatcagggcctaggtagtgagctgtgggcacatattaagtattggttaaactaaaaataataagcaaaatggacattatctataaaagcttttgtggaaatggctagagctagggtaaggaaacaaatttggttccccatacctgccctccaagaaaataaagctgtcaaggaaaatctgggctaagagtaggatatgagggatgatggataaggcatgagacatgagaaataagggggattaaattattattactattatacaaatgatgcctgagtagatttttaaaatgattaaatacccaatgatgtaaaaaacatttataaaataggaaagtaagactgactcaaccataatttgttgagtcaacccaaaaatctatttggttattttcaaacagaaatagcctacagatgatatctgagattgttccaaactttttctatgaatatgtatactttttttacataattaacataatactgtatattaatttgttacctgctttttcaattaacaatatatcataagcatctatgccaataaacacaattctgcata

SEQ ID NO: 106312 - DNA, 527 bp, Homo sapiens
  Payload ID: 879
  Gene Symbol: ALDH1L2
  Gene Name: aldehyde dehydrogenase 1 family, member L2
  ENST ID: ENST00000548418
  CDS Start-End: 1-277
ggtagaagaaattaaaaagatgaaaattggtgatccacttgacagatccactgatcatgggccccaaaatcataaggctcatctggaaaagctgctgcaatactgtgaaactggagtgaaagaaggggccactttggtgtacgggggaagacaagtccaaaggccaggctttttcatggagccgaccgtgttcacagatgtggaagactacatgtacctcgccaaagaggaatcctttgggcctattatggtcatttctaaattccaaaatgggtaggttcttcagacacaatgtaacttaggttttgactagataagtcatttttcccctttgccactgtgctatatacacagcataagattaatgaacatgtaattttctaccataagaataattaacttaaataattagaagttacgcttttgctaaccatcgtagatcatagtatatttttgcttttcagcttcaattaatggccaacataatgggcttttagctgaataaattttagtttttctgcacttga

SEQ ID NO: 106313 - DNA, 2746 bp, Homo sapiens
  Payload ID: 879
  Gene Symbol: ALDH1L2
  Gene Name: aldehyde dehydrogenase 1 family, member L2
  Uniprot ID: Q3SY69
  ENST ID: ENST00000552270
  CDS Start-End: 23-634
agtgctagcgctcctctccagcatgctgcggcggggcagccaggcgctccggcgcttctccactggccgggtttatttcaaaaacaagctgaagttggcactaattggccagagcctctttggacaagaagtctatagccacctccgcaaagagggccaccgagtagtaggggtgttcacagttccagacaaggatggaaaagctgaccctctggctttggctgcagagaaagatgggacccctgtgttcaagcttcctaaatggagggtcaagggcaagaccatcaaagaagtggcagaagcctacagatccgtgggtgcagagctaaatgtgctccctttctgcactcagttcattcccatggatataattgatagtccaaagcacggctctatcatttatcacccatccatcctgcccaggcacagaggagcctctgctatcaattggactctaattatgggagataagaaagctgggttttctgttttctgggctgatgatggcttggatacaggacccatccttcttcagagatcatgtgatgttgaacccaatgatacagtggatgcactttataatcggtttctttttcctgaaggaatcaaggccatgaagctgtccaactcatagctgatggaaaagctcctcgtataccccagccagaagaaggggcaacatatgaaggtatccagaaaaaggaaaatgctgagatttcttgggaccagtctgccgaagttttacataactggattcgaggtcatgataaagtccctggagcttggacagagataaatggacagatggtcactttctatggctcgacattactgaatagctctgtgcctcctggagaaccactggaaattaaaggtgccaagaagcctggtctcgttaccaaaaatggacttgttctttttggtaacgatggaaaagcactgacggtgagaaatctgcagtttgaagatggaaaaatgatccctgcctctcagtacttttcaacgggtgagacgtcagtggtagaactgacagctgaagaggtgaaagtggcagagaccatcaaggtcatctgggctggaattttaagcaatgtccccattattgaagactcaacagacttctttaaatctggagcaagctcaatggatgttgccaggctggttgaagagatcagacagaaatgtggtgggcttcagttgcagaatgaagatgtctatatggccaccaagtttgaaggctttatccaaaaggtcgtgaggaaactgagaggagaagatcaagaggtggagctggttgtagattatatttcaaaggaggtcaatgaaatcatggtaaaaatgccataccagtgtttcataaatggacagttcacagatgcagacgatggaaagacttacgacactatcaacccaacagatggatctacaatatgcaaagtatcctacgcttctttggcggatgttgataaagcagtagcagcagcaaaagatgcttttgaaaacggtgaatggggaagaatgaatgcaagagaaagaggaagattgatgtatagacttgcagacctactggaagagaaccaagaagagctggcaactattgaagcccttgattcaggggctgtctataccttggccctgaagacacacattggaatgtctgtgcaaacattcagatattttgctggctggtgcgacaaaattcagggttctactattccaatcaaccaggcccgtccaaatcgcaatctgaccttcaccaagaaagagccactcggtgtctgtgccattattattccctggaactacccgctgatgatgctggcatggaagagtgctgcgtgtttggcagcaggcaataccttagtgctcaagccagcacaggtcacgcccttgactgctttgaagtttgcagaactgtctgtgaaagcaggctttccaaagggggtcatcaacatcattccaggctcaggtggcatagcaggacaacgtctgtctgaacatcctgacatccgcaaacttggtttcactggatccactcctattggcaaacagatcatgaagagctgtgctgttagcaacttgaagaaagtttcccttgagcttggtggcaagtctccacttataatatttaatgactgtgaacttgacaaggctgtgcgaatgggcatgggagcagtatttttcaacaaaggagagaactgtattgctgctgggcggttgttcgtggaagaatccatccacgacgaatttgtgacaagagtgatccactgatcatgggccccaaaatcataaggctcatctggaaaagctgctgcaatactgtgaaactggagtgaaagaaggggccactttggtgtacgggggaagacaagtccaaaggccaggctttttcatggagccgaccgtgttcacagatgtggaagactacatgtacctcgccaaagaggaatcctttgggcctattatggtcatttctaaattccaaaatggggacatcgatggagtgttgcagcgagcaaatagtacagagtatggtttggcctcaggggtttttacaagagacataaacaaagctatgtatgtgagtgaaaaactggaagcaggaactgtttttattaacacatacaacaagacagatgtggcggccccatttggcggagttaaacaatctggctttggaaaagacttaggtgaggaagctctaaatgaatatctcaaaaccaagacggtgacactggaatattag

SEQ ID NO: 106314 - DNA, 3153 bp, Homo sapiens
  Payload ID: 880
  Gene Symbol: ALDH16A1
  Gene Name: aldehyde dehydrogenase 16 family, member A1
  Uniprot ID: Q8IZ83
  ENST ID: ENST00000293350
  CDS Start-End: 164-2572
gaaaaagtgtgggcgtggctgctctctgtatcttgtagccccaccccattcccattagccccgcccctttgggctggaaccggaggtgtcgctcttcggacctcaaggttccccttaacacagagcgccccgcagtcttcgcggaaagcgttcggggtaggcgatggctgcgacgcgtgcagggccccgcgcccgcgagatcttcacctcgctggagtacggaccggtgccggagagccacgcatgcgcactggcctggctggacacccaggaccggtgcttgggccactatgtgaatgggaagtggttaaagcctgaacacagaaattcagtgccttgccaggatcccatcacaggagagaacttggccagttgcctgcaggcacaggccgaggatgtggctgcagccgtggaggcagccaggatggcatttaagggctggagtgcgcaccccggcgtcgtccgggcccagcacctgaccaggctggccgaggtgatccagaagcaccagcggctgctgtggaccctggaatccctggtgactgggcgggctgttcgagaggttcgagacggggacgtccagctggcccagcagctgctccactaccatgcaatccaggcatccacccaggaggaggcactggcaggctgggagcccatgggagtaattggcctcatcctgccacccacattctccttccttgagatgatgtggaggatttgccctgccctggctgtgggctgcaccgtggtggccctcgtgcccccggcctccccggcgcccctcctcctggcccagctggcgggggagctgggccccttcccgggaatcctgaatgtcctcagtggccctgcgtccctggtgcccatcctggcctcccagcctggaatccggaaggtggccttctgcggagccccggaggaagggcgtgcccttcgacggagcctggcgggagagtgtgcggagctgggcctggcgctggggacggagtcgctgctgctgctgacggacacggcggacgtagactcggccgtggagggtgtcgtggacgccgcctggtccgaccgcggcccgggtggcctcaggctcctcatccaggagtctgtgtgggatgaagccatgagacggctgcaggagcggatggggcggcttcggagtggccgagggctggatggggccgtggacatgggggcccggggggctgccgcatgtgacctggtccagcgctttgtgcgtgaggcccagagccagggtgcacaggtgttccaggctggtgatgtgccttcggaacgcccattctatcccccaaccttggtctccaacctgcccccagcctccccatgtgcccaggtggaggtgccgtggcctgtggtcgtggcctcccccttccgcacagccaaggaggcactgttggtggccaacgggacgccccgcgggggcagcgccagtgtgtggagcgagaggctggggcaggcgctggagctgggctatgggctccaggtgggcactgtctggatcaacgcccacggcctcagagacccttcggtgcccacaggcggctgcaaggagagtgggtgttcctggcacgggggcccagacgggctgtatgagtatctgcggccctcagggacccctgcccggctgtcctgcctctccaagaacctgaactatgacacctttggcctcgctgttccctcaaccctgccggctgggcctgaaatagggcccagcccagcacccccctatgggctcttcgttgggggccgtttccaggctcctggggcccgaagctccaggcccatccgggattcgtctggcaacctccatggctacgtggctgagggtggagccaaggacatccgaggtgctgtggaggccgctcaccaggctttccctggctgggcgggccagtccccaggagcccgggcagccctgctgtgggccctggcggctgcactggagcgccggaagtctaccctggcctcgaggctggagaggcagggagcggagctcaaggctgcggaggcggaggtggagctgagcgcaagacgacttcgggcgtggggggcccgggtgcaggcccaaggccacaccctgcaggtagccgggctgagaggccctgtgctgcgcctgcgggagccgctgggtgtgctggctgtggtgtgtccggacgagtggcccctgcttgccttcgtgtccctgctggctcccgccctggcctacggcaacactgtggtcatggtgcccagtgcggcctgtcctctgctggccctggaggtctgccaggacatggccaccgtgttcccagcaggcctggccaacgtggtgacaggagaccgggaccatctgacccgctgcctggccttgcaccaagacgtccaggccatgtggtatttcggatcagcccagggttcccagtttgtcgagtgggcctcggcaggaaacctcaaaccggtgtgggcgagcaggggctgcccgcgggcctgggaccaggaggccgagggggcaggcccagagctggggctgcgagtggcgcggaccaaggccctgtggctgcctatgggggactgatgcctgagcgccacctactgcattttggacacctcacaccaaggggagatgcaccccacagacacctgggactttccccttctggttcctgtgtctcccaataaactctctgaccaaccctagctgtgcttctgcgagaagaaagggtgtagcaacttctggcagatatgaggcttttttcttttttttttttttttttgagacaacgtctggctctgtcacccaggctggagcgcagtggcacaatctcggcccactgcagcctcgacctctggggctcaagggatcctcatgcctcagcctcatatgtagctggggccacagacatgcaccaccacacctggctcgaggccattttagttctgaggttgagcagctcaggagccggctccagcacggtgctgtgtttgtgaaacagagaaaggggacccccgaggaccccagacagggccttaggactctcatatcttcttgtcttctccatctggtggctcttgctctctggttttctctaccttttcatggccccagaatccatatgcagtaaaggaactctctggaataaaattaaagtcctccta

SEQ ID NO: 106315 - DNA, 2470 bp, Homo sapiens
  Payload ID: 880
  Gene Symbol: ALDH16A1
  Gene Name: aldehyde dehydrogenase 16 family, member A1
  Uniprot ID: Q8IZ83
  ENST ID: ENST00000455361
  CDS Start-End: 97-2352
tttgggctggaaccggaggtgtcgctcttcggacctcaaggttccccttaacacagagcgccccgcagtcttcgcggaaagcgttcggggtaggcgatggctgcgacgcgtgcagggccccgcgcccgcgagatcttcacctcgctggagtacggaccggtgccggagagccacgcatgcgcactggcctggctggacacccaggaccggtgcttgggccactatgtgaatgggaagtggttaaagcctgaacacagaaattcagtgccttgccaggatcccatcacaggagagaacttggccagttgcctgcaggcacaggccgaggatgtggctgcagccgtggaggcagccaggatggcatttaagggctggagtgcgcaccccggcgtcgtccgggcccagcacctgaccaggctggccgaggtgatccagaagcaccagcggctgctgtggaccctggaatccctggtgactgggcgggctgttcgagaggttcgagacggggacgtccagctggcccagcagctgctccactaccatgcaatccaggcatccacccaggaggaggcactggcaggctgggagcccatgggagtaattggcctcatcctgccacccacattctccttccttgagatgatgtggaggatttgccctgccctggctgtgggctgcaccgtggtggccctcgtgcccccggcctccccggcgcccctcctcctggcccagctggcgggggagctgggccccttcccgggaatcctgaatgtcctcagtggccctgcgtccctggtgcccatcctggcctcccagcctggaatccggaaggtggccttctgcggagccccggagggtggcctcaggctcctcatccaggagtctgtgtgggatgaagccatgagacggctgcaggagcggatggggcggcttcggagtggccgagggctggatggggccgtggacatgggggcccggggggctgccgcatgtgacctggtccagcgctttgtgcgtgaggcccagagccagggtgcacaggtgttccaggctggtgatgtgccttcggaacgcccattctatcccccaaccttggtctccaacctgcccccagcctccccatgtgcccaggtggaggtgccgtggcctgtggtcgtggcctcccccttccgcacagccaaggaggcactgttggtggccaacgggacgccccgcgggggcagcgccagtgtgtggagcgagaggctggggcaggcgctggagctgggctatgggctccaggtgggcactgtctggatcaacgcccacggcctcagagacccttcggtgcccacaggcggctgcaaggagagtgggtgttcctggcacgggggcccagacgggctgtatgagtatctgcggccctcagggacccctgcccggctgtcctgcctctccaagaacctgaactatgacacctttggcctcgctgttccctcaaccctgccggctgggcctgaaatagggcccagcccagcacccccctatgggctcttcgttgggggccgtttccaggctcctggggcccgaagctccaggcccatccgggattcgtctggcaacctccatggctacgtggctgagggtggagccaaggacatccgaggtgctgtggaggccgctcaccaggctttccctggctgggcgggccagtccccaggagcccgggcagccctgctgtgggccctggcggctgcactggagcgccggaagtctaccctggcctcgaggctggagaggcagggagcggagctcaaggctgcggaggcggaggtggagctgagcgcaagacgacttcgggcgtggggggcccgggtgcaggcccaaggccacaccctgcaggtagccgggctgagaggccctgtgctgcgcctgcgggagccgctgggtgtgctggctgtggtgtgtccggacgagtggcccctgcttgccttcgtgtccctgctggctcccgccctggcctacggcaacactgtggtcatggtgcccagtgcggcctgtcctctgctggccctggaggtctgccaggacatggccaccgtgttcccagcaggcctggccaacgtggtgacaggagaccgggaccatctgacccgctgcctggccttgcaccaagacgtccaggccatgtggtatttcggatcagcccagggttcccagtttgtcgagtgggcctcggcaggaaacctcaaaccggtgtgggcgagcaggggctgcccgcgggcctgggaccaggaggccgagggggcaggcccagagctggggctgcgagtggcgcggaccaaggccctgtggctgcctatgggggactgatgcctgagcgccacctactgcattttggacacctcacaccaaggggagatgcaccccacagacacctgggactttccccttctggttcctgtgtctcccaataaactctctgaccaac

SEQ ID NO: 106316 - DNA, 2174 bp, Homo sapiens
  Payload ID: 880
  Gene Symbol: ALDH16A1
  Gene Name: aldehyde dehydrogenase 16 family, member A1
  ENST ID: ENST00000540132
  CDS Start-End: 188-2107
agccccgcccctttgggctggaaccggaggtgtcgctcttcggacctcaaggttccccttaacacagagcgccccgcagtcttcgcggaaagcgttcggggtaggcgatggctgcgacgcgtgcagggccccgcgcccgcgagatcttcacctcgctggagtacggaccggtgccggagagccacgcatgcgcactggagtaattggcctcatcctgccacccacattctccttccttgagatgatgtggaggatttgccctgccctggctgtgggctgcaccgtggtggccctcgtgcccccggcctccccggcgcccctcctcctggcccagctggcgggggagctgggccccttcccgggaatcctgaatgtcctcagtggccctgcgtccctggtgcccatcctggcctcccagcctggaatccggaaggtggccttctgcggagccccggaggaagggcgtgcccttcgacggagcctggcgggagagtgtgcggagctgggcctggcgctggggacggagtcgctgctgctgctgacggacacggcggacgtagactcggccgtggagggtgtcgtggacgccgcctggtccgaccgcggcccgggtggcctcaggctcctcatccaggagtctgtgtgggatgaagccatgagacggctgcaggagcggatggggcggcttcggagtggccgagggctggatggggccgtggacatgggggcccggggggctgccgcatgtgacctggtccagcgctttgtgcgtgaggcccagagccagggtgcacaggtgttccaggctggtgatgtgccttcggaacgcccattctatcccccaaccttggtctccaacctgcccccagcctccccatgtgcccaggtggaggtgccgtggcctgtggtcgtggcctcccccttccgcacagccaaggaggcactgttggtggccaacgggacgccccgcgggggcagcgccagtgtgtggagcgagaggctggggcaggcgctggagctgggctatgggctccaggtgggcactgtctggatcaacgcccacggcctcagagacccttcggtgcccacaggcggctgcaaggagagtgggtgttcctggcacgggggcccagacgggctgtatgagtatctgcggccctcagggacccctgcccggctgtcctgcctctccaagaacctgaactatgacacctttggcctcgctgttccctcaaccctgccggctgggcctgaaatagggcccagcccagcacccccctatgggctcttcgttgggggccgtttccaggctcctggggcccgaagctccaggcccatccgggattcgtctggcaacctccatggctacgtggctgagggtggagccaaggacatccgaggtgctgtggaggccgctcaccaggctttccctggctgggcgggccagtccccaggagcccgggcagccctgctgtgggccctggcggctgcactggagcgccggaagtctaccctggcctcgaggctggagaggcagggagcggagctcaaggctgcggaggcggaggtggagctgagcgcaagacgacttcgggcgtggggggcccgggtgcaggcccaaggccacaccctgcaggtagccgggctgagaggccctgtgctgcgcctgcgggagccgctgggtgtgctggctgtggtgtgtccggacgagtggcccctgcttgccttcgtgtccctgctggctcccgccctggcctacggcaacactgtggtcatggtgcccagtgcggcctgtcctctgctggccctggaggtctgccaggacatggccaccgtgttcccagcaggcctggccaacgtggtgacaggagaccgggaccatctgacccgctgcctggccttgcaccaagacgtccaggccatgtggtatttcggatcagcccagggttcccagtttgtcgagtgggcctcggcaggaaacctcaaaccggtgtgggcgagcaggggctgcccgcgggcctgggaccaggaggccgagggggcaggcccagagctggggctgcgagtggcgcggaccaaggccctgtggctgcctatgggggactgatgcctgagcgccacctactgcattttggacacctcacaccaaggggagatgcaccccacagacacct

SEQ ID NO: 106317 - DNA, 819 bp, Homo sapiens
  Payload ID: 880
  Gene Symbol: ALDH16A1
  Gene Name: aldehyde dehydrogenase 16 family, member A1
  ENST ID: ENST00000600265
  CDS Start-End: 1-492
atcaacgcccacggcctcagagacccttcggtgcccacaggcggctgcaaggagagtgggtgttcctggcacgggggcccagacgggctgtatgagtatctgcggccctcagggacccctgcccggctgtcctgcctctccaagaacctgaactatgacacctttggcctcgctgttccctcaaccctgccggctgggcctgaaatagggcccagcccagcacccccctatgggctcttcgttgggggccgtttccaggctcctggggcccgaagctccaggcccatccgggattcgtctggcaacctccatggctacgtggctgagggtggagccaaggacatccgagctgggcgggccagtccccaggagcccgggcagccctgctgtgggccctggcggctgcactggagcgccggaagtctaccctggcctcgaggctggagaggcagggagcggagctcaaggctgcggaggcggaggtggagctgagcgcaagacgacttcgggcgtggggggcccgggtgcaggcccaaggccacaccctgcaggtagccgggctgagaggccctgtgctgcgcctgcgggagccgctgggtgtgctggctgtggtgtgtccggacgagtggcccctgcttgccttcgtgtccctgctggctcccgccctggcctacggcaacactgtggtcatggtgcccagtgcggcctgtcctctgctggccctggaggtctgccaggacatggccaccgtgttcccagcaggcctggccaacgtggtgacaggagaccgggaccatctgacccgctgcctggccttgc

SEQ ID NO: 106318 - DNA, 2343 bp, Homo sapiens
  Payload ID: 880
  Gene Symbol: ALDH16A1
  Gene Name: aldehyde dehydrogenase 16 family, member A1
  ENST ID: ENST00000593417
  CDS Start-End: 45-356
acagagcgccccgcagtcttcgcggaaagcgttcggggtaggcgatggctgcgacgcgtgcagggccccgcgcccgcgagatcttcacctcgctggagtacggaccggtgccggagagccacgcatgcgcactggctggccgaggtgatccagaagcaccagcggctgctgtggaccctggaatccctggtgactgggcgggctgttcgagaggttcgagacggggacgtccagctggcccagcagctgctccactaccatgcaatccaggcatccacccaggaggaggcactggcaggctgggagcccatgggagtaattggcctcatcctgccacccacattctccttccttgagatgatgtggaggatttgccctgccctggctgtgggctgcaccgtggtggccctcgtgcccccggcctccccggcgcccctcctcctggcccagctggcgggggagctgggccccttcccgggaatcctgaatgtcctcagtggccctgcgtccctggtgcccatcctggcctcccagcctggaatccggaaggtggccttctgcggagccccggaggaagggcgtgcccttcgacggagcctggcgggagagtgtgcggagctgggcctggcgctggggacggagtcgctgctgctgctgacggacacggcggacgtagactcggccgtggagggtgtcgtggacgccgcctggtccgaccgcggcccgggtggcctcaggctcctcatccaggagtctgtgtgggatgaagccatgagacggctgcaggagcggatggggcggcttcggagtggccgagggctggatggggccgtggacatgggggcccggggggctgccgcatgtgacctggtccagcgctttgtgcgtgaggcccagagccagggtgcacaggtgttccaggctggtgatgtgccttcggaacgcccattctatcccccaaccttggtctccaacctgcccccagcctccccatgtgcccaggtggaggtgccgtggcctgtggtcgtggcctcccccttccgcacagccaaggaggcactgttggtggccaacgggacgccccgcgggggcagcgccagtgtgtggagcgagaggctggggcaggcgctggagctgggctatgggctccaggtgggcactgtctggatcaacgcccacggcctcagagacccttcggtgcccacaggcggctgcaaggagagtgggtgttcctggcacgggggcccagacgggctgtatgagtatctgcggccctcagggacccctgcccggctgtcctgcctctccaagaacctgaactatgacacctttggcctcgctgttccctcaaccctgccggctgggcctgaaatagggcccagcccagcacccccctatgggctcttcgttgggggccgtttccaggctcctggggcccgaagctccaggcccatccgggattcgtctggcaacctccatggctacgtggctgagggtggagccaaggacatccgaggtgctgtggaggccgctcaccaggctttccctggctgggcgggccagtccccaggagcccgggcagccctgctgtgggccctggcggctgcactggagcgccggaagtctaccctggcctcgaggctggagaggcagggagcggagctcaaggctgcggaggcggaggtggagctgagcgcaagacgacttcgggcgtggggggcccgggtgcaggcccaaggccacaccctgcaggtagccgggctgagaggccctgtgctgcgcctgcgggagccgctgggtgtgctggctgtggtgtgtccggacgagtggcccctgcttgccttcgtgtccctgctggctcccgccctggcctacggcaacactgtggtcatggtgcccagtgcggcctgtcctctgctggccctggaggtctgccaggacatggccaccgtgttcccagcaggcctggccaacgtggtgacaggagaccgggaccatctgacccgctgcctggccttgcaccaagacgtccaggccatgtggtatttcggatcagcccagggttcccagtttgtcgagtgggcctcggcaggaaacctcaaaccggtgtgggcgagcaggggctgcccgcgggcctgggaccaggaggccgagggggcaggcccagagctggggctgcgagtggcgcggaccaaggccctgtggctgcctatgggggactgatgcctgagcgccacctactgcattttggacacctcacaccaaggggagatgcaccccacagacacctgggactttccccttctggttcctgtgtctcccaataaactctctgaccaaccc

SEQ ID NO: 106319 - DNA, 3337 bp, Homo sapiens
  Payload ID: 881
  Gene Symbol: ALDH18A1
  Gene Name: aldehyde dehydrogenase 18 family, member A1
  Uniprot ID: P54886
  ENST ID: ENST00000371221
  CDS Start-End: 139-2520
gcgggacgtggacggaagaaaaaagagagtgagcgagcgccggaatcagcccggcgtggagtgcggacccgcggtagtgccagggggcgaaggcggcggtggtgaggaagatactttggttagtgaccacatcgcagcatgttgagtcaagtttaccgctgtgggttccagcccttcaaccaacatcttctgccctgggtcaagtgtacaaccgtcttcagatctcattgtatccagccttcagtcatcagacatgttcgttcttggagcaacatcccgtttatcactgtacccctcagtcgtacacatggcaagtccttcgcccaccgcagtgagctgaagcatgccaagagaatcgtggtgaagctcggcagtgccgtggtgacccgaggggatgaatgtggcctggccctggggcgcttggcatctattgttgagcaggtatcagtgctgcagaatcagggcagagagatgatgctggtgaccagtggagccgtagcctttggcaaacaacgcttgcgccatgagatccttctgtctcagagcgtgcggcaggccctccactcggggcagaaccagctgaaagaaatggcaattccagtcttagaggcacgagcctgtgcagctgccggacagagtgggctgatggccttgtatgaggctatgtttacccagtacagcatctgtgctgcccagattttggtgaccaatttggatttccatgatgagcagaagcgccggaacctcaatggaacacttcatgaactccttagaatgaacattgtccccattgtcaacacaaatgatgctgttgtccccccagctgagcccaacagtgacctgcagggggttattagtgttaaagataatgatagcctggctgcccgactggctgtggaaatgaaaactgatctcttgattgttctttcagatgtagaaggcctttttgacagccccccaggttcagatgatgcaaagcttattgatatattttatcccggagatcagcagtctgtgacatttggaaccaagtctagagtgggaatgggtggcatggaagccaaggtgaaagcagccctctgggctttgcaaggtggcacttctgttgttattgccaatggaacccacccaaaggtgtctgggcacgtcatcacagacattgtggaggggaagaaagttggtaccttcttttcagaagtaaagcctgcaggccctactgttgagcagcagggagaaatggcgcgatctggaggaaggatgttggccaccttggaacctgagcagagagcagaaattatccatcatctggctgatctgttgacggaccagcgtgatgagatcctgttagccaacaaaaaagacttggaggaggcagaggggagacttgcagctcctctgctgaaacgtttaagcctctccacatccaaattgaacagcctggccatcggtctgcgacagatcgcagcctcctcccaggacagcgtgggacgtgttttgcgccgcacccgaatcgccaaaaacttggaactggaacaagtgactgtcccaattggagttctgctggtgatctttgaatctcgtcctgactgtctaccccaggtggcagctttggctatcgcaagtggcaatggcttgttactcaaaggagggaaggaggctgcacacagcaaccggattctccacctcctgacccaggaggctctctcaatccatggagtcaaggaggccgtgcaactggtgaataccagagaagaagttgaagatctttgccgcctagacaaaatgatagatctgatcattccacgtggctcttcccagctggtcagagacatccagaaagctgctaaggggattccagtgatggggcacagcgaagggatctgtcacatgtatgtggattccgaggccagtgttgataaggtcaccaggctagtcagagactctaaatgtgaatatccagctgcctgtaatgctttggagactttgttaatccaccgggatctgctcaggacaccattatttgaccagatcattgatatgctgagagtggaacaggtaaaaattcatgcaggccccaaatttgcctcctatctgaccttcagcccctccgaagtgaagtcactccgaactgagtatggggacctggaattatgcattgaagtagtggacaacgttcaggatgccattgaccacatccacaagtatggcagctcccacacggatgtcatcgtcacagaggacgaaaacacagcggagttcttcctgcagcacgtagacagtgcctgtgtgttctggaatgccagcactcgcttttctgatggttaccgctttggactgggagctgaagtgggaatcagtacatcgagaatccacgcccggggaccagtaggacttgagggactgcttactactaagtggctgctgcgagggaaggaccacgtggtctcagatttctcagagcatggaagtttaaaatatcttcatgagaacctccctattcctcagagaaacaccaactgaaaagagccaggaaaacccgggaattttccaaaaggtcttcacgttaaacttgtcttatctcaggagagagcccgctcttgtctcccagttcctggtagggtctgcctgttggaaagtgtacctggatgcttctgggctccgtttggcaatagcagtcttggctgatgtgcacagtctggctcccagctcaccctttttttttaaagtaagaaaatagttgctaccgatagggactttgccaagtccaattatcttctaggattgaaaggtgcattttccccataaaaaaggcgaggaaaacccatggctgctttgtgtcacctcagtgacttacagtcccccttggcatttagttggtactagagccagtcatccttaacaaatcttttcacattttatttctttcacatgtagtcatcttcaaaaaggaaagatttggaattttagaaaaggggcaactcttctttttagcattctcatcagaaagtcacaaaaatcgatggaatcatttccactgggaagattgaccttttgtatttatttgtggggtaaattaataagcattccagatgcttgcagcttcctgcatccaggagatgctgtgttccccgtgatgcagctggaacccaagctgcagcaggagatgcaagtttcaggatgttccccactgagctggaggaatatctacagcagtgatgcttgaaatttttgtatgaattattttgtcgtcctacccttttcctccaaaacaaaaattagaggattattttaatactttggattcttcccccttttttgagaaataaagttttttatg

SEQ ID NO: 106320 - DNA, 3359 bp, Homo sapiens
  Payload ID: 881
  Gene Symbol: ALDH18A1
  Gene Name: aldehyde dehydrogenase 18 family, member A1
  Uniprot ID: P54886
  ENST ID: ENST00000371224
  CDS Start-End: 139-2526
gcgggacgtggacggaagaaaaaagagagtgagcgagcgccggaatcagcccggcgtggagtgcggacccgcggtagtgccagggggcgaaggcggcggtggtgaggaagatactttggttagtgaccacatcgcagcatgttgagtcaagtttaccgctgtgggttccagcccttcaaccaacatcttctgccctgggtcaagtgtacaaccgtcttcagatctcattgtatccagccttcagtcatcagacatgttcgttcttggagcaacatcccgtttatcactgtacccctcagtcgtacacatggcaagtccttcgcccaccgcagtgagctgaagcatgccaagagaatcgtggtgaagctcggcagtgccgtggtgacccgaggggatgaatgtggcctggccctggggcgcttggcatctattgttgagcaggtatcagtgctgcagaatcagggcagagagatgatgctggtgaccagtggagccgtagcctttggcaaacaacgcttgcgccatgagatccttctgtctcagagcgtgcggcaggccctccactcggggcagaaccagctgaaagaaatggcaattccagtcttagaggcacgagcctgtgcagctgccggacagagtgggctgatggccttgtatgaggctatgtttacccagtacagcatctgtgctgcccagattttggtgaccaatttggatttccatgatgagcagaagcgccggaacctcaatggaacacttcatgaactccttagaatgaacattgtccccattgtcaacacaaatgatgctgttgtccccccagctgagcccaacagtgacctgcagggggtaaatgttattagtgttaaagataatgatagcctggctgcccgactggctgtggaaatgaaaactgatctcttgattgttctttcagatgtagaaggcctttttgacagccccccaggttcagatgatgcaaagcttattgatatattttatcccggagatcagcagtctgtgacatttggaaccaagtctagagtgggaatgggtggcatggaagccaaggtgaaagcagccctctgggctttgcaaggtggcacttctgttgttattgccaatggaacccacccaaaggtgtctgggcacgtcatcacagacattgtggaggggaagaaagttggtaccttcttttcagaagtaaagcctgcaggccctactgttgagcagcagggagaaatggcgcgatctggaggaaggatgttggccaccttggaacctgagcagagagcagaaattatccatcatctggctgatctgttgacggaccagcgtgatgagatcctgttagccaacaaaaaagacttggaggaggcagaggggagacttgcagctcctctgctgaaacgtttaagcctctccacatccaaattgaacagcctggccatcggtctgcgacagatcgcagcctcctcccaggacagcgtgggacgtgttttgcgccgcacccgaatcgccaaaaacttggaactggaacaagtgactgtcccaattggagttctgctggtgatctttgaatctcgtcctgactgtctaccccaggtggcagctttggctatcgcaagtggcaatggcttgttactcaaaggagggaaggaggctgcacacagcaaccggattctccacctcctgacccaggaggctctctcaatccatggagtcaaggaggccgtgcaactggtgaataccagagaagaagttgaagatctttgccgcctagacaaaatgatagatctgatcattccacgtggctcttcccagctggtcagagacatccagaaagctgctaaggggattccagtgatggggcacagcgaagggatctgtcacatgtatgtggattccgaggccagtgttgataaggtcaccaggctagtcagagactctaaatgtgaatatccagctgcctgtaatgctttggagactttgttaatccaccgggatctgctcaggacaccattatttgaccagatcattgatatgctgagagtggaacaggtaaaaattcatgcaggccccaaatttgcctcctatctgaccttcagcccctccgaagtgaagtcactccgaactgagtatggggacctggaattatgcattgaagtagtggacaacgttcaggatgccattgaccacatccacaagtatggcagctcccacacggatgtcatcgtcacagaggacgaaaacacagcggagttcttcctgcagcacgtagacagtgcctgtgtgttctggaatgccagcactcgcttttctgatggttaccgctttggactgggagctgaagtgggaatcagtacatcgagaatccacgcccggggaccagtaggacttgagggactgcttactactaagtggctgctgcgagggaaggaccacgtggtctcagatttctcagagcatggaagtttaaaatatcttcatgagaacctccctattcctcagagaaacaccaactgaaaagagccaggaaaacccgggaattttccaaaaggtcttcacgttaaacttgtcttatctcaggagagagcccgctcttgtctcccagttcctggtagggtctgcctgttggaaagtgtacctggatgcttctgggctccgtttggcaatagcagtcttggctgatgtgcacagtctggctcccagctcaccctttttttttaaagtaagaaaatagttgctaccgatagggactttgccaagtccaattatcttctaggattgaaaggtgcattttccccataaaaaaggcgaggaaaacccatggctgctttgtgtcacctcagtgacttacagtcccccttggcatttagttggtactagagccagtcatccttaacaaatcttttcacattttatttctttcacatgtagtcatcttcaaaaaggaaagatttggaattttagaaaaggggcaactcttctttttagcattctcatcagaaagtcacaaaaatcgatggaatcatttccactgggaagattgaccttttgtatttatttgtggggtaaattaataagcattccagatgcttgcagcttcctgcatccaggagatgctgtgttccccgtgatgcagctggaacccaagctgcagcaggagatgcaagtttcaggatgttccccactgagctggaggaatatctacagcagtgatgcttgaaatttttgtatgaattattttgtcgtcctacccttttcctccaaaacaaaaattagaggattattttaatactttggattcttcccccttttttgagaaataaagttttttatgaaaagcctgtgcgtga

SEQ ID NO: 106321 - DNA, 9569 bp, Homo sapiens
  Payload ID: 882
  Gene Symbol: ALDH2
  Gene Name: aldehyde dehydrogenase 2 family (mitochondrial)
  Uniprot ID: P05091
  ENST ID: ENST00000261733
  CDS Start-End: 62-1615
tcagtggccctgagaccctagctctgctctcggtccgctcgctgtccgctagcccgctgcgatgttgcgcgctgccgcccgcttcgggccccgcctgggccgccgcctcttgtcagccgccgccacccaggccgtgcctgcccccaaccagcagcccgaggtcttctgcaaccagattttcataaacaatgaatggcacgatgccgtcagcaggaaaacattccccaccgtcaatccgtccactggagaggtcatctgtcaggtagctgaaggggacaaggaagatgtggacaaggcagtgaaggccgcccgggccgccttccagctgggctcaccttggcgccgcatggacgcatcacacaggggccggctgctgaaccgcctggccgatctgatcgagcgggaccggacctacctggcggccttggagaccctggacaatggcaagccctatgtcatctcctacctggtggatttggacatggtcctcaaatgtctccggtattatgccggctgggctgataagtaccacgggaaaaccatccccattgacggagacttcttcagctacacacgccatgaacctgtgggggtgtgcgggcagatcattccgtggaatttcccgctcctgatgcaagcatggaagctgggcccagccttggcaactggaaacgtggttgtgatgaaggtagctgagcagacacccctcaccgccctctatgtggccaacctgatcaaggaggctggctttccccctggtgtggtcaacattgtgcctggatttggccccacggctggggccgccattgcctcccatgaggatgtggacaaagtggcattcacaggctccactgagattggccgcgtaatccaggttgctgctgggagcagcaacctcaagagagtgaccttggagctgggggggaagagccccaacatcatcatgtcagatgccgatatggattgggccgtggaacaggcccacttcgccctgttcttcaaccagggccagtgctgctgtgccggctcccggaccttcgtgcaggaggacatctatgatgagtttgtggagcggagcgttgcccgggccaagtctcgggtggtcgggaacccctttgatagcaagaccgagcaggggccgcaggtggatgaaactcagtttaagaagatcctcggctacatcaacacggggaagcaagagggggcgaagctgctgtgtggtgggggcattgctgctgaccgtggttacttcatccagcccactgtgtttggagatgtgcaggatggcatgaccatcgccaaggaggagatcttcgggccagtgatgcagatcctgaagttcaagaccatagaggaggttgttgggagagccaacaattccacgtacgggctggccgcagctgtcttcacaaaggatttggacaaggccaattacctgtcccaggccctccaggcgggcactgtgtgggtcaactgctatgatgtgtttggagcccagtcaccctttggtggctacaagatgtcggggagtggccgggagttgggcgagtacgggctgcaggcatacactgaagtgaaaactgtcacagtcaaagtgcctcagaagaactcataagaatcatgcaagcttcctccctcagccattgatggaaagttcagcaagatcagcaacaaaaccaagaaaaatgatccttgcgtgctgaatatctgaaaagagaaatttttcctacaaaatctcttgggtcaagaaagttctagaatttgaattgataaacatggtgggttggctgagggtaagagtatatgaggaaccttttaaacgacaacaatactgctagctttcaggatgatttttaaaaaatagattcaaatgtgttatcctctctctgaaacgcttcctataactcgagtttataggggaagaaaaagctattgtttacaattatatcaccattaaggcaactgctacaccctgctttgtattctgggctaagattcattaaaaactagctgctcttaacttactgggtaactctttgtccatctcaataaccaaaggaaggtgggcatggtggctcacgcctgtaatcccagcactttgggaagccgaggcgggtggatcactcgaggtcaggagtttgagaccagcctggccaacgtagtgaaaccctgtctctcactaaaaatacacaaattaggcagtcatggtggctggcacctgtaatcccagctacttgggaggctgaggcaggaaaattggttgaacctgggaggtggaggttgcagtgagtggagatcatgccactgcactccagcctgggagtcagagcgagactccatctcaaaaaaagtaaataaatgaaatagcctaaggaaatgctggcaggcagtaatgatatggcacactggatatgatttctgcccctcctctgctgtgggtaaacagcttctgtttcatgcatttacttttttattttaattacaccaataagaatgtgcttgaatgtttcatgcatttaatttgtttcatgcatttaacttctggcctgtttacctgtagcaggctctgagatgtgctctagagacagaacctaaacatgatgcccaagagaggggagagatactgaatgtccaatgttctcaaattttttttttttttttttttgagacagggtcttgctctgccatccaggctggagtgcagtggcacgatcatagctcactgctgcctcgacctcctgggctcaaatgatcctcctgcttcagcttcctgggctaatgtttgtattttttgtggagatgggactttgttatgttgcccaggctgttttcaaactcctggactcaagtgatcctcccgccttagcctcctaaggtgctgggattacaggtgtgagccactgtgcccaattcagttctcagtaaaaacttgatcaggccaaatgaaagtgacatgggccaatttcataatagattgatttggaaaccagatgtcaatttacttactttaagtgagatctgtatcttcagtaaccagacctcttgagtctcccacccagaacactatcttcctctagtcaagatacctggcaaaggccgggcacagtggctcacgcctataattccagcactttgggaggccaaggtgggtgggtcacctgaggttgggagttcgagaccagcctgaccaacagggagaaaccccatctctactgaaaatacaaaaaaaaaaaaaaaaactagccgggcatggtggctcatgcctgtaatcccagctactcaggaggctgaggcaggagaattgcttgaacctgggaggcagaggttgcagtgagccaagattgctccattgtactccagcctgggcaacaagagagaaactccgtctcaaaatataaataaataagaaaaagaagaaatggaagctgggttcaagagggcaatcagcagtctctaccatcatgtgaaacaccactctgtgatttgagtcttgacaatgtattttctttttttttttcttcttttttttttgagactgagtctcggtctgtcgcccaggctggagtgcagtgacgtgatcttggctcactgcaacctctgcctcctgggttggagcaattctcctgcctcagcctcctgagtagctgggattacaggtgtgcgccaccatgcctggctaatttttgtatttttagtagagacggggttttgccatgttggccaggctggtgttgaaggcctgacctcaggtaatccacccacctctgcctcccagagtactgggattacaagtgtgagccaccgtgcccggccaactgtagggaccagccccacagggtcggtgggtttttctccccatgtgcggagacgagagattgtagaaataaagacacaagacaaagaggtaaaagaaaagacagctgggcttgggggaccactaccaccaagaggcggagaccggtagaggccccgaatgtctggctgcactgttatttattggatacaaagcaaaaggggcagggtaaagagtgtgagtcatctccaatgacaggtaaggtcacgtgggtcacgtgtccactggacagggggcccttccctgcctggcagccaaggcagagatagacagggagagagagagacagcttacgccattatttctgcgtatcagagacttttagtactttcactaattttgctactgttatctaaaaggcagagccaggtgtacaggatggaacatgaaggcagactaggagcgtgaccactgaagcacagcaccacagggagacggttaggcctccggataactaatgattaatgatattcatatataatcatgtctgtgatctagatctagtataactcttgttgttttatatattttattatactggaacagctcgtgccctcggtctcttgcctcagcacctggatggcttgccgcccacagccaacaatgtgttttcaatatgctccccaaactacagcaaactcctcttaactcgggatttagggtgatgccctacttatgcctaactttatcaccagcttaaccctcatctcattatataggatgatattacttctaggaagattttctatgtatggagggtgcatcatttaagagtattttaggccaggcactgtggctcatgcctgtaatcccagcattttgggaagctgaggtgggtgatttgcttcagcccacgagttcaagatcagcctggccaatatggtgaaaccccatctctacaaaaaaatacaaaaattagctgagcgtggtgatgtgtgcctgtggtcccagttactctggaggctgatgtgggaggatcacttgagcccaggaggtcaaggctgcagtgagctgtgattgcaccacttcactccagcccagagtgagaccccatctctgaaaaaaacacaaaaaacaagaaaagaatactgcaaagaaccttggtaggggtgaattggaaaaagtagagaaatgtaatatttctttcctgctgtactcactgtaactgtgagaggatcggctcttttaaccaacagataagaaaggaaatattagctatgaagaaatgtctatcaagttgattttgacaacctagacacattaatctccttgcacttttagtgacaggaacccattagaaccttaagcagctgtctgaagtaaaaacaaagctctcaggtgatgaaccacctaatctccctgggtattcggatgtgggtcagtcacaggagtattaggtgtaaagccgctgcttctgggtagagcctccacttgtggctgcacagagggcacagagagcttttccttcagcccggagaagcttcctaagtgtgggcgccaccttgtgggacatacattgaactacgacgctatttctccaagaattaacaggacagcccctcccaccggtgtccttccaacgatgttgcatacaatttggctgtacatttggcaggcagtgtaatgagggaatcaaagaccaggatcacatactggaaagaattgaaaacagagactcccaacaaaaacttgtacacggacgttcacagcagcactattcacgacagctcagagatggaatcaacccaaatatcagtcaatagatgaatggacagacaaaatgtgacatatccatgcagtggaatattatttagccataaaaaggaaggaagtgctgatgcatgttgcgatgtggatgaaccttgaaaacatgatgctgagtgaaagaagccagacacaaaaggagaaggactgtatgatttcacttataggaaatatccagaacaggcaaatctatatagagagaaggtcgattgctgggggccctgggaagggaccaagggggagtgacttctaatggtggggtgcccttttggggtgatgaaaatgttttggaaccagatacaggtggtggttgtacaacattgtgaatttactaaatgcaaccaaattgctcacttaaaaacaacaaattcaggccaggtgcagtggctcacacccgtaatcccagcactttgggaggccgaggtgggcggatcacatgaggtcaagagttcgagactagcctggccaacatggtgaaatcccatctcggccgggcgcggtggctcacgcctgtaatcccagcactttgggaggctgaggcgggtggatcacgaggtcaggagatcgagaccatcctggctaacacggtgaaaccccgtctctactaaaaatacaaaaaattagccaggcgtggtggtgggcgcctgtagtcccagctgatcgggaggctaaggcaggagaatggtgtgaacccaggaggcggagcttgcagtgagccgagatcgcgccactgcactctatcctgggtgacagagtgagactctgtctccaaaaaaaaaaaaagaaaccccatctctacccaaaatacaaaaattagctgggcatggtggctggcacctgtaatcccagctactcaggaggctgaggcaggagaattggttgaacctgggaggcagaggttgcagtgagctaagatcgcaccactgcactccagcctgggtgacagaacgagactgtctcaaaaaaaaaaaaaaaaaaaagtggccaggtggtgccatggctcatgcctgtaatctcagcattttgggatactgaggcgggtggattacctgaggccaggagttcgagatcagcctggccaacatgatgaaaacccatctctgctaaaaatacaaaaaattggctgggcttggtagcatgtgcccagctacttgggaggctgagacaggagaatcgcttgaacctgggaggcagaggttgcggttagccaagattgtgccactgcactccatgggtgacacagagagactctgtctcaaaaaaaaaaaaaaaaaagtaaatgctatgttatgtgaatttcacctcaactgaaaaaaacagggtcccagagctggtcaggggaacttggacaaaccacacaacttctgagcttccatttcctcacaatctctgcagtcacttccaactctcatttggcttattctgtgaaggataaaacagagctgacatttgttcatttgtattgattttatttacatttttcaaaaggaaatagatgcagatggtatagaaagtttcagtgaaatgtaaatctgatgcccaatcctgtggccccaagaagtattaactgtgcacccactacatgccaggaactgtacttggagccttctcaagagcttcttaacaatattttcattttttatattttttaatgacagggtctaactccgtcgtccaggctggagtgcagtggtgcgatcatagctcactgcagcctctacctcctaggctcaggtgattcttctgcctcagcctcccaaatagctggtactacaagcatgtgccaccacagtcagctaattatttttggagagtcagggtttcactatgtagctcaggctggtcttcagctcctggcttgaagtgatcctcctgccttggcacatagaaggggttacaatatacatatattagagtgagagcatagatgtgatgcctggcgatatggcttacttatgagacagcacctgacctacagccatctatgactcctactgtatcttccatgccaggagtaagggtgaggatacctggcaataataaaaataataacctgagagtctaatggcttattttttgtagagatggggtctcactgtgttgtttaggctggtcttgaacttctgggctcaagtgatcctcccacctcagcctcctgagtagctgggattataggcgtgcactaccatgcatatatatatatatttttttttttttttgagagagagagagagagatggagtcttgctatgttgctcaggctggtctcgaactcctggcctcaagtcatcctgctggcttggcctctcaagtgctaggattacaggcatgagacactgggcacagccctaatagcttatttttaaagctatatcaaaatgtcatgcacctgaacatttgaagtaacctctctgatagtacggatatttatcccctcaaaatctcatgttaaaatgtaatcttcagtgttggaggtggggcaaggtgtgaggtgttaggatcatgggggtggatccctcatgaatggcttggtgtcctcccccatggtaatgagttcactcaagagctggttgtttaaaaggtgacgtggacctaatccctgttggactgaacaaaaggggacgaacacagcaataaagataaagaccaaagagtatatttggaagaaggggtcagggggctccttgcttctagtgaaaaagggccctgagctttagtgccctttgtatttattgggtaaaggagatagggagaagggggggtggttgtcggtcagcagcttgattcacagcaggctcacaagattgcattctttgaacagtaggctctagatgtctcagtagataacctcaaagagcatggcgccagggagtgattgccctcagcgaaccttctggcggctgaagcagaagtgagtttgcccacattctgcatttatgataaacagtttgctgtttgatcatatagcctcagtggaatgctgagttggtcacaacccatgggcattcagctctctacatttccccctttctgtttatgaattaattgaaagaatgtaaggccaggctgggcagctctcattttctgattggcagtccatccaattttacagactatgaacagaagacagagacaaaacaacattattccaaggactacatataagatgttaatgtggtgctttagacaggtccaagggttgaggctctccaggccttgctggaatttggtctagtcttctaaagaaggctgaaactcttgagtttgtttatttaaatcaagaattttgttttgtaattcaccgatatcaaaggtgatgttggatgtgcaagctccctgcaaatgggctttcacaaggtcccatggatactcactttggttatattctaagttggttacacaaatatgagtgtgattaaaatgatggtgcaattgctgttgcaattgcaagctttgtacttgttctcctaactgtagagccgtggatttcaacaatgccacttcagtttgtaactcagtgttaattttattctgaagtggccatgcttggttggctatacgcatccagttttccatgtactgagttgtttgaatagaactatgcaaagctacagaggacatcacaacggaagttattaatgtgaccaaggaaacaatagcaaaaattatcatgcctaaggctctatgggcacaatgagtaagttgagttagaagatgtttcatgaagtgcaaagcaggtgtggtagcccaaggctgggacagattaacaggaatccatagcccagggatgcgacccaaaattatcaaagtagagacattatgtgtttgcaatgtgctatgattaatgcagtgacataactggcaagatttacaggtcaattggatattgtttacctggagctggtccttcttagttgccaaaaaagacataaggattaaaaagacaaaccat

SEQ ID NO: 106322 - DNA, 1572 bp, Homo sapiens
  Payload ID: 882
  Gene Symbol: ALDH2
  Gene Name: aldehyde dehydrogenase 2 family (mitochondrial)
  Uniprot ID: P05091
  ENST ID: ENST00000416293
  CDS Start-End: 97-1509
attggctgccgcgcggggcggggagcggggtcggctcagtggccctgagaccctagctctgctctcggtccgctcgctgtccgctagcccgctgcgatgttgcgcgctgccgcccgcttcgggccccgcctgggccgccgcctcttgtcagccgccgccacccaggccgtgcctgcccccaaccagcagcccgaggtcttctgcaaccagattttcataaacaatgaatggcacgatgccgtcagcaggaaaacattccccaccgtcaatccgtccactggagaggtcatctgtcaggtagctgaaggggacaaggccttggagaccctggacaatggcaagccctatgtcatctcctacctggtggatttggacatggtcctcaaatgtctccggtattatgccggctgggctgataagtaccacgggaaaaccatccccattgacggagacttcttcagctacacacgccatgaacctgtgggggtgtgcgggcagatcattccgtggaatttcccgctcctgatgcaagcatggaagctgggcccagccttggcaactggaaacgtggttgtgatgaaggtagctgagcagacacccctcaccgccctctatgtggccaacctgatcaaggaggctggctttccccctggtgtggtcaacattgtgcctggatttggccccacggctggggccgccattgcctcccatgaggatgtggacaaagtggcattcacaggctccactgagattggccgcgtaatccaggttgctgctgggagcagcaacctcaagagagtgaccttggagctgggggggaagagccccaacatcatcatgtcagatgccgatatggattgggccgtggaacaggcccacttcgccctgttcttcaaccagggccagtgctgctgtgccggctcccggaccttcgtgcaggaggacatctatgatgagtttgtggagcggagcgttgcccgggccaagtctcgggtggtcgggaacccctttgatagcaagaccgagcaggggccgcaggtggatgaaactcagtttaagaagatcctcggctacatcaacacggggaagcaagagggggcgaagctgctgtgtggtgggggcattgctgctgaccgtggttacttcatccagcccactgtgtttggagatgtgcaggatggcatgaccatcgccaaggaggagatcttcgggccagtgatgcagatcctgaagttcaagaccatagaggaggttgttgggagagccaacaattccacgtacgggctggccgcagctgtcttcacaaaggatttggacaaggccaattacctgtcccaggccctccaggcgggcactgtgtgggtcaactgctatgatgtgtttggagcccagtcaccctttggtggctacaagatgtcggggagtggccgggagttgggcgagtacgggctgcaggcatacactgaagtgaaaactgtcacagtcaaagtgcctcagaagaactcataagaatcatgcaagcttcctccctcagccattgatggaaagttcagcaagatcagcaacaaaacc

SEQ ID NO: 106323 - DNA, 1760 bp, Homo sapiens
  Payload ID: 882
  Gene Symbol: ALDH2
  Gene Name: aldehyde dehydrogenase 2 family (mitochondrial)
  ENST ID: ENST00000548536
  CDS Start-End: 36-275
ctctcggtccgctcgctgtccgctagcccgctgcgatgttgcgcgctgccgcccgcttcgggccccgcctgggccgccgcctcttgtcagccgccgccacccaggccgtgcctgcccccaaccagcagcccgaggtcttctgcaaccagtctagattgaaaatgtcaactccagacatcactgtgcttctggaaactataaagaggaagtgggagctaggacatccccccaccacgccccgcccaagagcgtttacgtgtgttatattttcataaacaatgaatggcacgatgccgtcagcaggaaaacattccccaccgtcaatccgtccactggagaggtcatctgtcaggtagctgaaggggacaaggaagatgtggacaaggcagtgaaggccgcccgggccgccttccagctgggctcaccttggcgccgcatggacgcatcacacaggggccggctgctgaaccgcctggccgatctgatcgagcgggaccggacctacctggcggccttggagaccctggacaatggcaagccctatgtcatctcctacctggtggatttggacatggtcctcaaatgtctccggtattatgccggctgggctgataagtaccacgggaaaaccatccccattgacggagacttcttcagctacacacgccatgaacctgtgggggtgtgcgggcagatcattccgtggaatttcccgctcctgatgcaagcatggaagctgggcccagccttggcaactggaaacgtggttgtgatgaaggtagctgagcagacacccctcaccgccctctatgtggccaacctgatcaaggaggctggctttccccctggtgtggtcaacattgtgcctggatttggccccacggctggggccgccattgcctcccatgaggatgtggacaaagtggcattcacaggctccactgagattggccgcgtaatccaggttgctgctgggagcagcaacctcaagagagtgaccttggagctgggggggaagagccccaacatcatcatgtcagatgccgatatggattgggccgtggaacaggcccacttcgccctgttcttcaaccagggccagtgctgctgtgccggctcccggaccttcgtgcaggaggacatctatgatgagtttgtggagcggagcgttgcccgggccaagtctcgggtggtcgggaacccctttgatagcaagaccgagcaggggccgcaggtggatgaaactcagtttaagaagatcctcggctacatcaacacggggaagcaagagggggcgaagctgctgtgtggtgggggcattgctgctgaccgtggttacttcatccagcccactgtgtttggagatgtgcaggatggcatgaccatcgccaaggaggagatcttcgggccagtgatgcagatcctgaagttcaagaccatagaggaggttgttgggagagccaacaattccacgtacgggctggccgcagctgtcttcacaaaggatttggacaaggccaattacctgtcccaggccctccaggcgggcactgtgtgggtcaactgctatgatgtgtttggagcccagtcaccctttggtggctacaagatgtcggggagtggccgggagttgggcgagtacgggctgcaggcatacactgaagtgaaaactgtcacagtcaaagtgcctcagaagaactcataagaatcatgcaagcttcctccctcagccattgatggaaagttcagcaagatcagca

SEQ ID NO: 106324 - DNA, 580 bp, Homo sapiens
  Payload ID: 882
  Gene Symbol: ALDH2
  Gene Name: aldehyde dehydrogenase 2 family (mitochondrial)
  ENST ID: ENST00000549106
  CDS Start-End: 1-352
ggaacaggcccacttcgccctgttcttcaaccagggccagtgctgctgtgccggctcccggaccttcgtgcaggaggacatctatgatgagtttgtggagcggagcgttgcccgggccaagtctcgggtggtcgggaacccctttgatagcaagaccgagcaggggccgcaggtggatgaaactcagtttaagaagatcctcggctacatcaacacggggaagcaagagggggcgaagctgctgtgtggtgggggcattgctgctgaccgtggttacttcatccagcccactgtgtttggagatgtgcaggatggcatgaccatcgccaaggaggagggtcaactgctatgatgtgtttggagcccagtcaccctttggtggctacaagatgtcggggagtggccgggagttgggcgagtacgggctgcaggcatacactgaagtgaaaactgtcacagtcaaagtgcctcagaagaactcataagaatcatgcaagcttcctccctcagccattgatggaaagttcagcaagatcagcaacaaaaccaagaaaaatgatccttgcgtgctgaatatctg

SEQ ID NO: 106325 - DNA, 1779 bp, Homo sapiens
  Payload ID: 883
  Gene Symbol: ALDH3A1
  Gene Name: aldehyde dehydrogenase 3 family, member A1
  Uniprot ID: P30838
  ENST ID: ENST00000225740
  CDS Start-End: 181-1542
cagaggtccagaggacgccacaccccacatttgaatatttttttttcttgtcacgcaaacttcctgggcaggaactccaagggctcaatggacgggaagcagggtccttaaatacgtcccctcttggctcttgccgttccaggagccccagttaccgggagaggctgtgtcaaaggcgccatgagcaagatcagcgaggccgtgaagcgcgcccgcgccgccttcagctcgggcaggacccgtccgctgcagttccggatccagcagctggaggcgctgcagcgcctgatccaggagcaggagcaggagctggtgggcgcgctggccgcagacctgcacaagaatgaatggaacgcctactatgaggaggtggtgtacgtcctagaggagatcgagtacatgatccagaagctccctgagtgggccgcggatgagcccgtggagaagacgccccagactcagcaggacgagctctacatccactcggagccactgggcgtggtcctcgtcattggcacctggaactaccccttcaacctcaccatccagcccatggtgggcgccatcgctgcagggaactcagtggtcctcaagccctcggagctgagtgagaacatggcgagcctgctggctaccatcatcccccagtacctggacaaggatctgtacccagtaatcaatgggggtgtccctgagaccacggagctgctcaaggagaggttcgaccatatcctgtacacgggcagcacgggggtggggaagatcatcatgacggctgctgccaagcacctgacccctgtcacgctggagctgggagggaagagtccctgctacgtggacaagaactgtgacctggacgtggcctgccgacgcatcgcctgggggaaattcatgaacagtggccagacctgcgtggcccctgactacatcctctgtgacccctcgatccagaaccaaattgtggagaagctcaagaagtcactgaaagagttctacggggaagatgctaagaaatcccgggactatggaagaatcattagtgcccggcacttccagagggtgatgggcctgattgagggccagaaggtggcttatgggggcaccggggatgccgccactcgctacatagcccccaccatcctcacggacgtggacccccagtccccggtgatgcaagaggagatcttcgggcctgtgctgcccatcgtgtgcgtgcgcagcctggaggaggccatccagttcatcaaccagcgtgagaagcccctggccctctacatgttctccagcaacgacaaggtgattaagaagatgattgcagagacatccagtggtggggtggcggccaacgatgtcatcgtccacatcaccttgcactctctgcccttcgggggcgtggggaacagcggcatgggatcctaccatggcaagaagagcttcgagactttctctcaccgccgctcttgcctggtgaggcctctgatgaatgatgaaggcctgaaggtcagataccccccgagcccggccaagatgacccagcactgaggaggggttgctccgcctggcctggccatactgtgtcccatcggagtgcggaccaccctcactggctctcctggccctgggagaatcgctcctgcagccccagcccagccccactcctctgctgacctgctgacctgtgcacaccccactcccacatgggcccaggcctcaccattccaagtctccacccctttctagaccaataaagagacgaatacaattttctaactcagcaaa

SEQ ID NO: 106326 - DNA, 1495 bp, Homo sapiens
  Payload ID: 883
  Gene Symbol: ALDH3A1
  Gene Name: aldehyde dehydrogenase 3 family, member A1
  ENST ID: ENST00000395555
  CDS Start-End: 89-1258
cgggaagcagggtccttaaatacgtcccctcttggctcttgccgttccaggagccccagttaccgggagaggctgtgtcaaaggcgccatgagcaagatcagcgaggccgtgaagcgcgcccgcgccgccttcagctcgggcaggacccgtccgctgcagttccggatccagcagctggaggcgctgcagcgcctgatccaggagcaggagcaggagctggtgggcgcgctggccgcagacctgcacaagaatgaatggaacgcctactatgaggaggtggtgtacgtcctagaggagatcgagtacatgatccagaagctccctgagtgggccgcggatgagcccgtggagaagacgccccagactcagcaggacgagctctacatccactcggagccactgggcgtggtcctcgtcattggcacctggaactaccccttcaacctcaccatccagcccatggtgggcgccatcgctgcagggaactcagtggtcctcaagccctcggagctgagtgagaacatggcgagcctgctggctaccatcatcccccagtacctggacaaggatctgtacccagtaatcaatgggggtgtccctgagaccacggagctgctcaaggagaggttcgaccatatcctgtacacgggcagcacgggggtggggaagatcatcatgacggctgctgccaagcacctgacccctgtcacgctggagctgggagggaagagtccctgctacgtggacaagaactgtgacctggacgtggcctgccgacgcatcgcctgggggaaattcatgaacagtggccagacctgcgtggcccctgactacatcctctgtgacccctcgatccagaaccaaattgtggagaagctcaagaagtcactgaaagagatcttcgggcctgtgctgcccatcgtgtgcgtgcgcagcctggaggaggccatccagttcatcaaccagcgtgagaagcccctggccctctacatgttctccagcaacgacaaggtgattaagaagatgattgcagagacatccagtggtggggtggcggccaacgatgtcatcgtccacatcaccttgcactctctgcccttcgggggcgtggggaacagcggcatgggatcctaccatggcaagaagagcttcgagactttctctcaccgccgctcttgcctggtgaggcctctgatgaatgatgaaggcctgaaggtcagataccccccgagcccggccaagatgacccagcactgaggaggggttgctccgcctggcctggccatactgtgtcccatcggagtgcggaccaccctcactggctctcctggccctgggagaatcgctcctgcagccccagcccagccccactcctctgctgacctgctgacctgtgcacaccccactcccacatgggcccaggcctcaccattccaagtctccacccctttctagaccaataaagagacgaatacaattttctaactcagcaaa

SEQ ID NO: 106327 - DNA, 781 bp, Homo sapiens
  Payload ID: 883
  Gene Symbol: ALDH3A1
  Gene Name: aldehyde dehydrogenase 3 family, member A1
  ENST ID: ENST00000426645
  CDS Start-End: 5-781
cgccatgagcaagatcagcgaggccgtgaagcgcgcccgcgccgccttcagctcgggcaggacccgtccgctgcagttccggatccagcagctggaggcgctgcagcgcctgatccaggagcaggagcaggagctgaatgaatggaacgcctactatgaggaggtggtgtacgtcctagaggagatcgagtacatgatccagaagctccctgagtgggccgcggatgagcccgtggagaagacgccccagactcagcaggacgagctctacatccactcggagccactgggcgtggtcctcgtcattggcacctggaactaccccttcaacctcaccatccagcccatggtgggcgccatcgctgcagggaactcagtggtcctcaagccctcggagctgagtgagaacatggcgagcctgctggctaccatcatcccccagtacctggacaaggatctgtacccagtaatcaatgggggtgtccctgagaccacggagctgctcaaggagaggttcgaccatatcctgtacacgggcagcacgggggtggggaagatcatcatgacggctgctgccaagcacctgacccctgtcacgctggagctgggagggaagagtccctgctacgtggacaagaactgtgacctggacgtggcctgccgacgcatcgcctgggggaaattcatgaacagtggccagacctgcgtggcccctgactacatcctctgtgacccctcgatccagaaccaaattgtggagaagctcaagaagtcactgaaa

SEQ ID NO: 106328 - DNA, 1771 bp, Homo sapiens
  Payload ID: 883
  Gene Symbol: ALDH3A1
  Gene Name: aldehyde dehydrogenase 3 family, member A1
  Uniprot ID: P30838
  ENST ID: ENST00000444455
  CDS Start-End: 176-1537
gctttttagaacaatggcttagccaggagggtggtgctgggtttttctttatcggcttgggtgtggaatcgcggactgcgcccctccaatctgatctggagagtggctgactgcgtgtgcagagctctgggggtgttggtctgggattgtgccatcagctttgcaagcaagcgccatgagcaagatcagcgaggccgtgaagcgcgcccgcgccgccttcagctcgggcaggacccgtccgctgcagttccggatccagcagctggaggcgctgcagcgcctgatccaggagcaggagcaggagctggtgggcgcgctggccgcagacctgcacaagaatgaatggaacgcctactatgaggaggtggtgtacgtcctagaggagatcgagtacatgatccagaagctccctgagtgggccgcggatgagcccgtggagaagacgccccagactcagcaggacgagctctacatccactcggagccactgggcgtggtcctcgtcattggcacctggaactaccccttcaacctcaccatccagcccatggtgggcgccatcgctgcagggaactcagtggtcctcaagccctcggagctgagtgagaacatggcgagcctgctggctaccatcatcccccagtacctggacaaggatctgtacccagtaatcaatgggggtgtccctgagaccacggagctgctcaaggagaggttcgaccatatcctgtacacgggcagcacgggggtggggaagatcatcatgacggctgctgccaagcacctgacccctgtcacgctggagctgggagggaagagtccctgctacgtggacaagaactgtgacctggacgtggcctgccgacgcatcgcctgggggaaattcatgaacagtggccagacctgcgtggcccctgactacatcctctgtgacccctcgatccagaaccaaattgtggagaagctcaagaagtcactgaaagagttctacggggaagatgctaagaaatcccgggactatggaagaatcattagtgcccggcacttccagagggtgatgggcctgattgagggccagaaggtggcttatgggggcaccggggatgccgccactcgctacatagcccccaccatcctcacggacgtggacccccagtccccggtgatgcaagaggagatcttcgggcctgtgctgcccatcgtgtgcgtgcgcagcctggaggaggccatccagttcatcaaccagcgtgagaagcccctggccctctacatgttctccagcaacgacaaggtgattaagaagatgattgcagagacatccagtggtggggtggcggccaacgatgtcatcgtccacatcaccttgcactctctgcccttcgggggcgtggggaacagcggcatgggatcctaccatggcaagaagagcttcgagactttctctcaccgccgctcttgcctggtgaggcctctgatgaatgatgaaggcctgaaggtcagataccccccgagcccggccaagatgacccagcactgaggaggggttgctccgcctggcctggccatactgtgtcccatcggagtgcggaccaccctcactggctctcctggccctgggagaatcgctcctgcagccccagcccagccccactcctctgctgacctgctgacctgtgcacaccccactcccacatgggcccaggcctcaccattccaagtctccacccctttctagaccaataaagagacgaatacaattttctaactcagc

SEQ ID NO: 106329 - DNA, 1359 bp, Homo sapiens
  Payload ID: 883
  Gene Symbol: ALDH3A1
  Gene Name: aldehyde dehydrogenase 3 family, member A1
  ENST ID: ENST00000439102
  CDS Start-End: 244-1359
tgcgtctcccaggtgtggcacgcgtggtttacacaccaagcctggttcagctctgccaagaaaccagcgctttttagaacaatggcttagccaggagggtggtgctgggtttttctttatcggcttgggtgtggaatcgcggactgcgcccctccaatctgatctggagagtggctgactgcgtgtgcagagctctgggggtgttggtctgggattgtgccatcagctttgcaagcaagcgccatgagcaagatcagcgaggccgtgaagcgcgcccgcgccgccttcagctcgggcaggacccgtccgctgcagttccggatccagcagctggaggcgctgcagcgcctgatccaggagcaggagcaggagctggtgggcgcgctggccgcagacctgcacaagaatgaatggaacgcctactatgaggaggtggtgtacgtcctagaggagatcgagtacatgatccagaagctccctgagtgggccgcggatgagcccgtggagaagacgccccagactcagcaggacgagctctacatccactcggagccactgggcgtggtcctcgtcattggcacctggaactaccccttcaacctcaccatccagcccatggtgggcgccatcgctgcagggaactcagtggtcctcaagccctcggagctgagtgagaacatggcgagcctgctggctaccatcatcccccagtacctggacaaggatctgtacccagtaatcaatgggggtgtccctgagaccacggagctgctcaaggagaggttcgaccatatcctgtacacgggcagcacgggggtggggaagatcatcatgacggctgctgccaagcacctgacccctgtcacgctggagctgggagggaagagtccctgctacgtggacaagaactgtgacctggacgtggcctgccgacgcatcgcctgggggaaattcatgaacagtggccagacctgcgtggcccctgactacatcctctgtgacccctcgatccagaaccaaattgtggagaagctcaagaagtcactgaaagagttctacggggaagatgctaagaaatcccgggactatggaagaatcattagtgcccggcacttccagagggtgatgggcctgattgagggccagaaggtggcttatgggggcaccggggatgccgccactcgctacatagcccccaccatcctcacggacgtggacccccagtccccggtgatgcaagaggagatcttcgggcctgtgctgcccatcgtgtgcgtgcgcagcctggaggaggccatccagttcatcaaccagcgtgagaagcccctggccctctacatgttctccagcaacgacaag

SEQ ID NO: 106330 - DNA, 1925 bp, Homo sapiens
  Payload ID: 883
  Gene Symbol: ALDH3A1
  Gene Name: aldehyde dehydrogenase 3 family, member A1
  Uniprot ID: P30838
  ENST ID: ENST00000457500
  CDS Start-End: 331-1692
atcagctttgcaagcaagtaagggagcggaaaaggccgggaaaggccctgccgcgagcacgctgccaagagcccccagcagcagttcggcttaggactcgggttgcggcgggtgtcaccttctcaggggctagcaaggcagccagggcccaggcgtctgagtgaggggcgggagaggaggcgaggcagaaagtggaccttccagcggaaaggccattttccccaaggccgagcccagggaagtcccttcctatagaattcaggcagggtgggaggcagggcgcgctcgtgcccctcagccagctgcaggtgctctctgtccccaggcgccatgagcaagatcagcgaggccgtgaagcgcgcccgcgccgccttcagctcgggcaggacccgtccgctgcagttccggatccagcagctggaggcgctgcagcgcctgatccaggagcaggagcaggagctggtgggcgcgctggccgcagacctgcacaagaatgaatggaacgcctactatgaggaggtggtgtacgtcctagaggagatcgagtacatgatccagaagctccctgagtgggccgcggatgagcccgtggagaagacgccccagactcagcaggacgagctctacatccactcggagccactgggcgtggtcctcgtcattggcacctggaactaccccttcaacctcaccatccagcccatggtgggcgccatcgctgcagggaactcagtggtcctcaagccctcggagctgagtgagaacatggcgagcctgctggctaccatcatcccccagtacctggacaaggatctgtacccagtaatcaatgggggtgtccctgagaccacggagctgctcaaggagaggttcgaccatatcctgtacacgggcagcacgggggtggggaagatcatcatgacggctgctgccaagcacctgacccctgtcacgctggagctgggagggaagagtccctgctacgtggacaagaactgtgacctggacgtggcctgccgacgcatcgcctgggggaaattcatgaacagtggccagacctgcgtggcccctgactacatcctctgtgacccctcgatccagaaccaaattgtggagaagctcaagaagtcactgaaagagttctacggggaagatgctaagaaatcccgggactatggaagaatcattagtgcccggcacttccagagggtgatgggcctgattgagggccagaaggtggcttatgggggcaccggggatgccgccactcgctacatagcccccaccatcctcacggacgtggacccccagtccccggtgatgcaagaggagatcttcgggcctgtgctgcccatcgtgtgcgtgcgcagcctggaggaggccatccagttcatcaaccagcgtgagaagcccctggccctctacatgttctccagcaacgacaaggtgattaagaagatgattgcagagacatccagtggtggggtggcggccaacgatgtcatcgtccacatcaccttgcactctctgcccttcgggggcgtggggaacagcggcatgggatcctaccatggcaagaagagcttcgagactttctctcaccgccgctcttgcctggtgaggcctctgatgaatgatgaaggcctgaaggtcagataccccccgagcccggccaagatgacccagcactgaggaggggttgctccgcctggcctggccatactgtgtcccatcggagtgcggaccaccctcactggctctcctggccctgggagaatcgctcctgcagccccagcccagccccactcctctgctgacctgctgacctgtgcacaccccactcccacatgggcccaggcctcaccattccaagtctccacccctttctagaccaataaagagacgaatacaattttctaactcag

SEQ ID NO: 106331 - DNA, 1587 bp, Homo sapiens
  Payload ID: 883
  Gene Symbol: ALDH3A1
  Gene Name: aldehyde dehydrogenase 3 family, member A1
  ENST ID: ENST00000468746
  CDS Start-End: 89-1279
cgggaagcagggtccttaaatacgtcccctcttggctcttgccgttccaggagccccagttaccgggagaggctgtgtcaaaggcgccatgagcaagatcagcgaggccgtgaagcgcgcccgcgccgccttcagctcgggcaggacccgtccgctgcagttccggatccagcagctggaggcgctgcagcgcctgatccaggagcaggagcaggagctggtgggcgcgctggccgcagacctgcacaagaatgaatggaacgcctactatgaggaggtggtgtacgtcctagaggagatcgagtacatgatccagaagctccctgagtgggccgcggatgagcccgtggagaagacgccccagactcagcaggacgagctctacatccactcggagccactgggcgtggtcctcgtcattggcacctggaactaccccttcaacctcaccatccagcccatggtgggcgccatcgctgcagggaactcagtggtcctcaagccctcggagctgagtgagaacatggcgagcctgctggctaccatcatcccccagtacctggacaaggatctgtacccagtaatcaatgggggtgtccctgagaccacggagctgctcaaggagaggttcgaccatatcctgtacacgggcagcacgggggtggggaagatcatcatgacggctgctgccaagcacctgacccctgtcacgctggagctgggagggaagagtccctgctacgtggacaagaactgtgacctggacgtggcctgccgacgcatcgcctgggggaaattcatgaacagtggccagacctgcgtggcccctgactacatcctctgtgacccctcgatccagaaccaaattgtggagaagctcaagaagtcactgaaagagttctacggggaagatgctaagaaatcccgggactatggaagaatcattagtgcccggcacttccagagggtgatgggcctgattgagggccagaaggtggcttatgggggcaccggggatgccgccactcgctacatagcccccaccatcctcacggacgtggacccccagtccccggtgatgcaagaggagatcttcgggcctgtgctgcccatcgtgtgcgtgcgcagcctggaggaggccatccagttcatcaaccagcgtgagaagcccctggccctctacatgttctccagcaacgacaagggaacagcggcatgggatcctaccatggcaagaagagcttcgagactttctctcaccgccgctcttgcctggtgaggcctctgatgaatgatgaaggcctgaaggtcagataccccccgagcccggccaagatgacccagcactgaggaggggttgctccgcctggcctggccatactgtgtcccatcggagtgcggaccaccctcactggctctcctggccctgggagaatcgctcctgcagccccagcccagccccactcctctgctgacctgctgacctgtgcacaccccactcccacatgggcccaggcctcaccattccaagtctccacccctttctagaccaataaagagacgaatacaattttctaactcagcaaa

SEQ ID NO: 106332 - DNA, 859 bp, Homo sapiens
  Payload ID: 883
  Gene Symbol: ALDH3A1
  Gene Name: aldehyde dehydrogenase 3 family, member A1
  ENST ID: ENST00000574162
  CDS Start-End: 466-859
gcttttccagactccttccttcccaagcatctctggttttcggtgaccacacagacccttggccctcttctcagctattcaacgagagagcagatttatggattggagacccccatcaaaagtccccagcctgtggctccccagggtggagtctgcactcagagccggggccctaagtgtcaagagtcctacatcatctctccagggggtccctgcctctgggaccatcatctctggagcatcctcctggacctctggcagctctgccatcccccaaaccaggaggcagaggtcccagggatccgcggagcagggacaccaaggtggccgtggagtgagaggccctgatgggccgtcagactccatgactggaaggaaggcagcagagccgagtgctaaaggcatgagctgctgacagagatgcatgtgggttcaaaccctgacatgccacctgctaactgcgccatgagcaagatcagcgaggccgtgaagcgcgcccgcgccgccttcagctcgggcaggacccgtccgctgcagttccggatccagcagctggaggcgctgcagcgcctgatccaggagcaggagcaggagctggtgggcgcgctggccgcagacctgcacaagaatgaatggaacgcctactatgaggaggtggtgtacgtcctagaggagatcgagtacatgatccagaagctccctgagtgggccgcggatgagcccgtggagaagacgccccagactcagcaggacgagctctacatccactcggagccactgggcgtggtcctcgtcattggcacctggaactaccccttcaacctcaccatccagcccatggtgggcgccatcgctgcag

SEQ ID NO: 106333 - DNA, 1572 bp, Homo sapiens
  Payload ID: 883
  Gene Symbol: ALDH3A1
  Gene Name: aldehyde dehydrogenase 3 family, member A1
  ENST ID: ENST00000494157
  CDS Start-End: 193-1335
ttttttcttgtcacgcaaacttcctgggcaggaactccaagggctcaatggacgggaagcagggtccttaaatacgtcccctcttggctcttgccgttccaggagccccagttaccgggagaggctgtgtcaaagaatgaatggaacgcctactatgaggaggtggtgtacgtcctagaggagatcgagtacatgatccagaagctccctgagtgggccgcggatgagcccgtggagaagacgccccagactcagcaggacgagctctacatccactcggagccactgggcgtggtcctcgtcattggcacctggaactaccccttcaacctcaccatccagcccatggtgggcgccatcgctgcagggaactcagtggtcctcaagccctcggagctgagtgagaacatggcgagcctgctggctaccatcatcccccagtacctggacaaggatctgtacccagtaatcaatgggggtgtccctgagaccacggagctgctcaaggagaggttcgaccatatcctgtacacgggcagcacgggggtggggaagatcatcatgacggctgctgccaagcacctgacccctgtcacgctggagctgggagggaagagtccctgctacgtggacaagaactgtgacctggacgtggcctgccgacgcatcgcctgggggaaattcatgaacagtggccagacctgcgtggcccctgactacatcctctgtgacccctcgatccagaaccaaattgtggagaagctcaagaagtcactgaaagagttctacggggaagatgctaagaaatcccgggactatggaagaatcattagtgcccggcacttccagagggtgatgggcctgattgagggccagaaggtggcttatgggggcaccggggatgccgccactcgctacatagcccccaccatcctcacggacgtggacccccagtccccggtgatgcaagaggagatcttcgggcctgtgctgcccatcgtgtgcgtgcgcagcctggaggaggccatccagttcatcaaccagcgtgagaagcccctggccctctacatgttctccagcaacgacaaggtgattaagaagatgattgcagagacatccagtggtggggtggcggccaacgatgtcatcgtccacatcaccttgcactctctgcccttcgggggcgtggggaacagcggcatgggatcctaccatggcaagaagagcttcgagactttctctcaccgccgctcttgcctggtgaggcctctgatgaatgatgaaggcctgaaggtcagataccccccgagcccggccaagatgacccagcactgaggaggggttgctccgcctggcctggccatactgtgtcccatcggagtgcggaccaccctcactggctctcctggccctgggagaatcgctcctgcagccccagcccagccccactcctctgctgacctgctgacctgtgcacaccccactcccacatgggcccaggcctcaccattccaagtctccacccctttctagaccaataaagagacgaatacaattttctaactcagcaaa

SEQ ID NO: 106334 - DNA, 587 bp, Homo sapiens
  Payload ID: 883
  Gene Symbol: ALDH3A1
  Gene Name: aldehyde dehydrogenase 3 family, member A1
  ENST ID: ENST00000570414
  CDS Start-End: 364-587
aggagccccagttaccgggagaggctgtgtcaaaggtaatcctcttccctgcattccttattttttctcttgtctaggtggagtctgcactcagagccggggccctaagtgtcaagagtcctacatcatctctccagggggtccctgcctctgggaccatcatctctggagcatcctcctggacctctggcagctctgccatcccccaaaccaggaggcagaggtcccagggatccgcggagcagggacaccaaggtggccgtggagtgagaggccctgatgggccgtcagactccatgactggaaggaaggcagcagagccgagtgctaaaggcatgagctgctgacagagatgcatgcgccatgagcaagatcagcgaggccgtgaagcgcgcccgcgccgccttcagctcgggcaggacccgtccgctgcagttccggatccagcagctggaggcgctgcagcgcctgatccaggagcaggagcaggagctggtgggcgcgctggccgcagacctgcacaagaatgaatggaacgcctactatgaggaggtggtgtacgtcctagaggagatcgagtacatgat

SEQ ID NO: 106335 - DNA, 400 bp, Homo sapiens
  Payload ID: 883
  Gene Symbol: ALDH3A1
  Gene Name: aldehyde dehydrogenase 3 family, member A1
  ENST ID: ENST00000573368
  CDS Start-End: 42-400
ctgccgcgagcacgctgccaagagcccccagcagcagcgccatgagcaagatcagcgaggccgtgaagcgcgcccgcgccgccttcagctcgggcaggacccgtccgctgcagttccggatccagcagctggaggcgctgcagcgcctgatccaggagcaggagcaggagctggtgggcgcgctggccgcagacctgcacaagaatgaatggaacgcctactatgaggaggtggtgtacgtcctagaggagatcgagtacatgatccagaagctccctgagtgggccgcggatgagcccgtggagaagacgccccagactcagcaggacgagctctacatccactcggagccactgggcgtggtcctcgtcattggcacctggaactaccccttcaacct

SEQ ID NO: 106336 - DNA, 3928 bp, Homo sapiens
  Payload ID: 884
  Gene Symbol: ALDH3A2
  Gene Name: aldehyde dehydrogenase 3 family, member A2
  Uniprot ID: P51648
  ENST ID: ENST00000176643
  CDS Start-End: 447-1904
ccggggcgctctcagcaggatggccaacaccttccctccatccctacaccccgccgccccctggcccgtggccgcgctcggctcccgcactgctcactccaccccctacatcccagcccgctgccagagccggggagagggcgggggccgcgtgggcgaggccgtgaacagcggctgtcacgtgggccgcccaggccaataggggtgaggctttgggtcgagctcagtcctcccccggcgcctccgactggcagtgggactcagcgggcgtggaggtcgcggctgagcgagcgagccctgggcgagtgaattgtggctgtgggttgacggtggagacaccccccggagggaggcggagggaagggaggcgaggcctgcacctgcatgcttcccgcctcccactccccagcgcccccggaccgtgcagttctctgcaggaccaggccatggagctcgaagtccggcgggtccgacaggcgttcctgtccggccggtcgcgacctctgcggtttcggctgcagcagctggaggccctgcggaggatggtgcaggagcgcgagaaggatatcctgacggccatcgccgccgacctgtgcaagagtgaattcaatgtgtacagtcaggaagtcattactgtccttggggaaattgattttatgcttgagaatcttcctgaatgggttactgctaaaccagttaagaagaacgtgctcaccatgctggatgaggcctatattcagccacagcctctgggagtggtgctgataatcggagcttggaattaccccttcgttctcaccattcagccactgataggagccatcgctgcaggaaatgctgtgattataaagccttctgaactgagtgaaaatacagccaagatcttggcaaagcttctccctcagtatttagaccaggatctctatattgttattaatggtggtgttgaggaaaccacggagctcctgaagcagcgatttgaccacattttctatacgggaaacactgcggttggcaaaattgtcatggaagctgctgccaagcatctgacccctgtgactcttgaactgggagggaaaagtccatgttatattgataaagattgtgacctggacattgtttgcagacgcataacctggggaaaatacatgaattgtggccaaacctgcattgcacccgactatattctctgtgaagcatccctccaaaatcaaattgtatggaagattaaggaaacagtgaaggaattttatggagaaaatataaaagagtctcctgattatgaaaggatcatcaatcttcgtcattttaagaggatactaagtttgcttgaaggacaaaagatagcttttggtggggagactgatgaggccacacgctacatagccccaacagtacttaccgatgttgatcctaaaaccaaggtgatgcaagaagaaatttttggaccaattcttccaatagtgcctgtgaaaaatgtagatgaggccataaatttcataaatgaacgtgaaaagcctctggctctttatgtattttcgcataaccataagctcatcaaacggatgattgatgagacatccagtggaggtgtcacaggcaatgacgtcattatgcacttcacgctcaactctttcccatttggaggagtgggttccagtgggatgggagcttatcacggaaaacatagttttgatactttttctcatcagcgtccctgtttattaaaaagtttaaagagagaaggtgctaacaaactcagatatcctcccaacagccagtcaaaggtggattggggaaaattttttctcttgaaacggttcaacaaagaaaaactcggtctcctgttgctcactttcctgggtattgtagccgctgtgcttgtcaaggcagaatattactgaagaatgatcctgttcaacctcctagtgcctctactgaattattcctcttttaaatggttaatgaaccaataatttttaaatcataccaaaaatagtaagaaaatatgcaaacactctgtgatcaaacttaaaagtcattgccattcatcattaataaaagttgccatttcaactacgtcccaacattccctaatagggtattcagggaacctgtcttaaattgtgcttatctaaatcttggaactttgagctaggggaggagaatgtattagactaaatacaaactgcggggttgtaagggagtctcagaacctcactgaatccttcactccagttaatggcactgctcacttcctgcctctgctgccaccatcactgtgtgaagctttcaagagcttggtacttcccagggctaccggcagtcctctgtagtccagagaggtgagattagatcttcttggttccctgtgaggtttcaggcactaaaactctatgtggggaagggaggggttactcctcctccaatgggactcaaggacttgacctccaggagtaggcccctggtcagaagtgccatctcaccagtggtcttcattcttcctcattcattctttatcatcctgtgttctgtttagttgcaacaatctcttgtgactaatgtcactcaaagcatcttgtaaatcctagggcttcctggaagttagttgccaaagtcatgcaagcatcacctgtcattcttgtgttggagttatagaattctacatcttataaaacctaactggcatttaaaaaatactgtggccgggcgtggtggctcatgcctgtaatcccagcactttgggaggccgaggtgggaggattgcttgagtccaggaatttgagaccagcctggacaacacagtgagacctcatctctatcaaaaaataaaaattagctagatgtggtggcatgagcctgtgttcccagctgcttaggaggctgaagcaggaggattgattgagcctgcgaggccaaggctgcagcaggctgtgattgcaccactgcacttcagcttgggcaacagagcaagaccctgtctccgaaacaaataaaaaatactgtaataaaagtacttataaacatactaatcctctttcaggaccctaaagttgcaggttagtaggtcttcaaggacaaatctgtaagtttcttatttctgtagtgcaagtaaaatttcactttttgaaactatagagagatccctttctgattagcctacagaacttaaagtgagggaaccatttcctctcacagacaaagaggcctgggatattaggactttggggtttgagagcatcatggggcagacagatggtggatggtctggacaagaagcgagtaagccactgcggttggtcatactgaagggaattgatggcaagaggatcccctgagcaagtcagaagttactctcatcagtcgttcatggtcacaacctgaggtactctgctgagtgggcaaggctgaagaagaggcctgtggaatgcagcattacctgctggacagagcagggcaggcagttctatgccttggagctcctgactgcagggactctgtccccacactcaaaaagactcagctcactcaatgagagaatgtgatttactttatagaacgtataatcaactttgttgaataatttgttctattaaggctgtctaaagtatgtgatgtcttcatcatagtatgaagtgttgaaaattaataacgagcctagtttaggaaaaagctgcttaaaactgtggctctaagagagtaatcataaaataccttagataaaattgcactatggaattttcattgagtatgtttaaattattggcttgtctactaatacacatctgcttcaaaatgaacatatttcataaaattggcatcaattttaatgacgctcctggtatggaacctcagatataccctattggagacaatcctttgatcataaattctccccaactataaatcattttatgtctttatcata

SEQ ID NO: 106337 - DNA, 3828 bp, Homo sapiens
  Payload ID: 884
  Gene Symbol: ALDH3A2
  Gene Name: aldehyde dehydrogenase 3 family, member A2
  Uniprot ID: P51648
  ENST ID: ENST00000339618
  CDS Start-End: 222-1748
agtcctcccccggcgcctccgactggcagtgggactcagcgggcgtggaggtcgcggctgagcgagcgagccctgggcgagtgaattgtggctgtgggttgacggtggagacaccccccggagggaggcggagggaagggaggcgaggcctgcacctgcatgcttcccgcctcccactccccagcgcccccggaccgtgcagttctctgcaggaccaggccatggagctcgaagtccggcgggtccgacaggcgttcctgtccggccggtcgcgacctctgcggtttcggctgcagcagctggaggccctgcggaggatggtgcaggagcgcgagaaggatatcctgacggccatcgccgccgacctgtgcaagagtgaattcaatgtgtacagtcaggaagtcattactgtccttggggaaattgattttatgcttgagaatcttcctgaatgggttactgctaaaccagttaagaagaacgtgctcaccatgctggatgaggcctatattcagccacagcctctgggagtggtgctgataatcggagcttggaattaccccttcgttctcaccattcagccactgataggagccatcgctgcaggaaatgctgtgattataaagccttctgaactgagtgaaaatacagccaagatcttggcaaagcttctccctcagtatttagaccaggatctctatattgttattaatggtggtgttgaggaaaccacggagctcctgaagcagcgatttgaccacattttctatacgggaaacactgcggttggcaaaattgtcatggaagctgctgccaagcatctgacccctgtgactcttgaactgggagggaaaagtccatgttatattgataaagattgtgacctggacattgtttgcagacgcataacctggggaaaatacatgaattgtggccaaacctgcattgcacccgactatattctctgtgaagcatccctccaaaatcaaattgtatggaagattaaggaaacagtgaaggaattttatggagaaaatataaaagagtctcctgattatgaaaggatcatcaatcttcgtcattttaagaggatactaagtttgcttgaaggacaaaagatagcttttggtggggagactgatgaggccacacgctacatagccccaacagtacttaccgatgttgatcctaaaaccaaggtgatgcaagaagaaatttttggaccaattcttccaatagtgcctgtgaaaaatgtagatgaggccataaatttcataaatgaacgtgaaaagcctctggctctttatgtattttcgcataaccataagctcatcaaacggatgattgatgagacatccagtggaggtgtcacaggcaatgacgtcattatgcacttcacgctcaactctttcccatttggaggagtgggttccagtgggatgggagcttatcacggaaaacatagttttgatactttttctcatcagcgtccctgtttattaaaaagtttaaagagagaaggtgctaacaaactcagatatcctcccaacagccagtcaaaggtggattggggaaaattttttctcttgaaacggttcaacaaagaaaaactcggtctcctgttgctcactttcctgggtattgtagccgctgtgcttgtcaagaaataccaagctgtgctgaggagaaaggccctgttgatttttctggtagttcacagactgcgttggtccagtaagcagagatgaacaccagatttcaaaacccagccctgtctgttaagagtgaggcagaatattactgaagaatgatcctgttcaacctcctagtgcctctactgaattattcctcttttaaatggttaatgaaccaataatttttaaatcataccaaaaatagtaagaaaatatgcaaacactctgtgatcaaacttaaaagtcattgccattcatcattaataaaagttgccatttcaactacgtcccaacattccctaatagggtattcagggaacctgtcttaaattgtgcttatctaaatcttggaactttgagctaggggaggagaatgtattagactaaatacaaactgcggggttgtaagggagtctcagaacctcactgaatccttcactccagttaatggcactgctcacttcctgcctctgctgccaccatcactgtgtgaagctttcaagagcttggtacttcccagggctaccggcagtcctctgtagtccagagaggtgagattagatcttcttggttccctgtgaggtttcaggcactaaaactctatgtggggaagggaggggttactcctcctccaatgggactcaaggacttgacctccaggagtaggcccctggtcagaagtgccatctcaccagtggtcttcattcttcctcattcattctttatcatcctgtgttctgtttagttgcaacaatctcttgtgactaatgtcactcaaagcatcttgtaaatcctagggcttcctggaagttagttgccaaagtcatgcaagcatcacctgtcattcttgtgttggagttatagaattctacatcttataaaacctaactggcatttaaaaaatactgtggccgggcgtggtggctcatgcctgtaatcccagcactttgggaggccgaggtgggaggattgcttgagtccaggaatttgagaccagcctggacaacacagtgagacctcatctctatcaaaaaataaaaattagctagatgtggtggcatgagcctgtgttcccagctgcttaggaggctgaagcaggaggattgattgagcctgcgaggccaaggctgcagcaggctgtgattgcaccactgcacttcagcttgggcaacagagcaagaccctgtctccgaaacaaataaaaaatactgtaataaaagtacttataaacatactaatcctctttcaggaccctaaagttgcaggttagtaggtcttcaaggacaaatctgtaagtttcttatttctgtagtgcaagtaaaatttcactttttgaaactatagagagatccctttctgattagcctacagaacttaaagtgagggaaccatttcctctcacagacaaagaggcctgggatattaggactttggggtttgagagcatcatggggcagacagatggtggatggtctggacaagaagcgagtaagccactgcggttggtcatactgaagggaattgatggcaagaggatcccctgagcaagtcagaagttactctcatcagtcgttcatggtcacaacctgaggtactctgctgagtgggcaaggctgaagaagaggcctgtggaatgcagcattacctgctggacagagcagggcaggcagttctatgccttggagctcctgactgcagggactctgtccccacactcaaaaagactcagctcactcaatgagagaatgtgatttactttatagaacgtataatcaactttgttgaataatttgttctattaaggctgtctaaagtatgtgatgtcttcatcatagtatgaagtgttgaaaattaataacgagcctagtttaggaaaaagctgcttaaaactgtggctctaagagagtaatcataaaataccttagataaaattgcactatggaattttcattgagtatgtttaaattattggcttgtctactaatacacatctgcttcaaaatgaacatatttcataaaattggcatcaattttaatgacgctcctggtatggaacctcagatataccctattggagacaatcctttgatcataaattctccccaactataaatcattttatgtctttatcata

SEQ ID NO: 106338 - DNA, 3640 bp, Homo sapiens
  Payload ID: 884
  Gene Symbol: ALDH3A2
  Gene Name: aldehyde dehydrogenase 3 family, member A2
  Uniprot ID: P51648
  ENST ID: ENST00000395575
  CDS Start-End: 159-1616
aataggggtgaggctttgggtcgagctcagtcctcccccggcgcctccgactggcagtgggactcagcgggcgtggaggtcgcggctgagcgagcgagccctgggcgagtgaattgtggctcgcccccggaccgtgcagttctctgcaggaccaggccatggagctcgaagtccggcgggtccgacaggcgttcctgtccggccggtcgcgacctctgcggtttcggctgcagcagctggaggccctgcggaggatggtgcaggagcgcgagaaggatatcctgacggccatcgccgccgacctgtgcaagagtgaattcaatgtgtacagtcaggaagtcattactgtccttggggaaattgattttatgcttgagaatcttcctgaatgggttactgctaaaccagttaagaagaacgtgctcaccatgctggatgaggcctatattcagccacagcctctgggagtggtgctgataatcggagcttggaattaccccttcgttctcaccattcagccactgataggagccatcgctgcaggaaatgctgtgattataaagccttctgaactgagtgaaaatacagccaagatcttggcaaagcttctccctcagtatttagaccaggatctctatattgttattaatggtggtgttgaggaaaccacggagctcctgaagcagcgatttgaccacattttctatacgggaaacactgcggttggcaaaattgtcatggaagctgctgccaagcatctgacccctgtgactcttgaactgggagggaaaagtccatgttatattgataaagattgtgacctggacattgtttgcagacgcataacctggggaaaatacatgaattgtggccaaacctgcattgcacccgactatattctctgtgaagcatccctccaaaatcaaattgtatggaagattaaggaaacagtgaaggaattttatggagaaaatataaaagagtctcctgattatgaaaggatcatcaatcttcgtcattttaagaggatactaagtttgcttgaaggacaaaagatagcttttggtggggagactgatgaggccacacgctacatagccccaacagtacttaccgatgttgatcctaaaaccaaggtgatgcaagaagaaatttttggaccaattcttccaatagtgcctgtgaaaaatgtagatgaggccataaatttcataaatgaacgtgaaaagcctctggctctttatgtattttcgcataaccataagctcatcaaacggatgattgatgagacatccagtggaggtgtcacaggcaatgacgtcattatgcacttcacgctcaactctttcccatttggaggagtgggttccagtgggatgggagcttatcacggaaaacatagttttgatactttttctcatcagcgtccctgtttattaaaaagtttaaagagagaaggtgctaacaaactcagatatcctcccaacagccagtcaaaggtggattggggaaaattttttctcttgaaacggttcaacaaagaaaaactcggtctcctgttgctcactttcctgggtattgtagccgctgtgcttgtcaaggcagaatattactgaagaatgatcctgttcaacctcctagtgcctctactgaattattcctcttttaaatggttaatgaaccaataatttttaaatcataccaaaaatagtaagaaaatatgcaaacactctgtgatcaaacttaaaagtcattgccattcatcattaataaaagttgccatttcaactacgtcccaacattccctaatagggtattcagggaacctgtcttaaattgtgcttatctaaatcttggaactttgagctaggggaggagaatgtattagactaaatacaaactgcggggttgtaagggagtctcagaacctcactgaatccttcactccagttaatggcactgctcacttcctgcctctgctgccaccatcactgtgtgaagctttcaagagcttggtacttcccagggctaccggcagtcctctgtagtccagagaggtgagattagatcttcttggttccctgtgaggtttcaggcactaaaactctatgtggggaagggaggggttactcctcctccaatgggactcaaggacttgacctccaggagtaggcccctggtcagaagtgccatctcaccagtggtcttcattcttcctcattcattctttatcatcctgtgttctgtttagttgcaacaatctcttgtgactaatgtcactcaaagcatcttgtaaatcctagggcttcctggaagttagttgccaaagtcatgcaagcatcacctgtcattcttgtgttggagttatagaattctacatcttataaaacctaactggcatttaaaaaatactgtggccgggcgtggtggctcatgcctgtaatcccagcactttgggaggccgaggtgggaggattgcttgagtccaggaatttgagaccagcctggacaacacagtgagacctcatctctatcaaaaaataaaaattagctagatgtggtggcatgagcctgtgttcccagctgcttaggaggctgaagcaggaggattgattgagcctgcgaggccaaggctgcagcaggctgtgattgcaccactgcacttcagcttgggcaacagagcaagaccctgtctccgaaacaaataaaaaatactgtaataaaagtacttataaacatactaatcctctttcaggaccctaaagttgcaggttagtaggtcttcaaggacaaatctgtaagtttcttatttctgtagtgcaagtaaaatttcactttttgaaactatagagagatccctttctgattagcctacagaacttaaagtgagggaaccatttcctctcacagacaaagaggcctgggatattaggactttggggtttgagagcatcatggggcagacagatggtggatggtctggacaagaagcgagtaagccactgcggttggtcatactgaagggaattgatggcaagaggatcccctgagcaagtcagaagttactctcatcagtcgttcatggtcacaacctgaggtactctgctgagtgggcaaggctgaagaagaggcctgtggaatgcagcattacctgctggacagagcagggcaggcagttctatgccttggagctcctgactgcagggactctgtccccacactcaaaaagactcagctcactcaatgagagaatgtgatttactttatagaacgtataatcaactttgttgaataatttgttctattaaggctgtctaaagtatgtgatgtcttcatcatagtatgaagtgttgaaaattaataacgagcctagtttaggaaaaagctgcttaaaactgtggctctaagagagtaatcataaaataccttagataaaattgcactatggaattttcattgagtatgtttaaattattggcttgtctactaatacacatctgcttcaaaatgaacatatttcataaaattggcatcaattttaatgacgctcctggtatggaacctcagatataccctattggagacaatcctttgatcataaattctccccaactataaatcattttatgtctttatcata

SEQ ID NO: 106339 - DNA, 665 bp, Homo sapiens
  Payload ID: 884
  Gene Symbol: ALDH3A2
  Gene Name: aldehyde dehydrogenase 3 family, member A2
  ENST ID: ENST00000446398
  CDS Start-End: 168-665
gagaagctctgagtaacggacgtgcgaggatgatgcttgtgcaagaaggaaatgaccgctgtcccggctccgcgggagacgaaccccggcttcccgccctcagggactagctctccagggaactgggacgcgcccccggaccgtgcagttctctgcaggaccaggccatggagctcgaagtccggcgggtccgacaggcgttcctgtccggccggtcgcgacctctgcggtttcggctgcagcagctggaggccctgcggaggatggtgcaggagcgcgagaaggatatcctgacggccatcgccgccgacctgtgcaagagtgaattcaatgtgtacagtcaggaagtcattactgtccttggggaaattgattttatgcttgagaatcttcctgaatgggttactgctaaaccagttaagaagaacgtgctcaccatgctggatgaggcctatattcagccacagcctctgggagtggtgctgataatcggagcttggaattaccccttcgttctcaccattcagccactgataggagccatcgctgcaggaaatgctgtgattataaagccttctgaactgagtgaaaatacagccaagatcttggcaaagcttctccctcagtatttagaccaggatctctatattgttattaatggtggt

SEQ ID NO: 106340 - DNA, 3710 bp, Homo sapiens
  Payload ID: 884
  Gene Symbol: ALDH3A2
  Gene Name: aldehyde dehydrogenase 3 family, member A2
  ENST ID: ENST00000472059
  CDS Start-End: 122-670
gacggtggagacaccccccggagggaggcggagggaagggaggcgaggcctgcacctgcatgcttcccgcctcccactccccagcgcccccggaccgtgcagttctctgcaggaccaggccatggagctcgaagtccggcgggtccgacaggcgttcctgtccggccggtcgcgacctctgcggtttcggctgcagcagctggaggccctgcggaggatggtgcaggagcgcgagaaggatatcctgacggccatcgccgccgacctgtgcaagagtgaattcaatgtgtacagtcaggaagtcattactgtccttggggaaattgattttatgcttgagaatcttcctgaatgggttactgctaaaccagttaagaagaacgtgctcaccatgctggatgaggcctatattcagccacagcctctgggagtggtgctgataatcggagcttggaattaccccttcgttctcaccattcagccactgataggagccatcgctgcaggaaatgctgtgattataaagccttctgaactgagtgaaaatacagccaagatcttggcaaagcttctccctcagtatttagaccagccattttgttctaatagctgtgatgatccaatcaagaaagatgaaatggaagacagtgagatgtcaaggattgaataggacgtagaaccagaagatagaggttgaaggatctctatattgttattaatggtggtgttgaggaaaccacggagctcctgaagcagcgatttgaccacattttctatacgggaaacactgcggttggcaaaattgtcatggaagctgctgccaagcatctgacccctgtgactcttgaactgggagggaaaagtccatgttatattgataaagattgtgacctggacattgtttgcagacgcataacctggggaaaatacatgaattgtggccaaacctgcattgcacccgactatattctctgtgaagcatccctccaaaatcaaattgtatggaagattaaggaaacagtgaaggaattttatggagaaaatataaaagagtctcctgattatgaaaggatcatcaatcttcgtcattttaagaggatactaagtttgcttgaaggacaaaagatagcttttggtggggagactgatgaggccacacgctacatagccccaacagtacttaccgatgttgatcctaaaaccaaggtgatgcaagaagaaatttttggaccaattcttccaatagtgcctgtgaaaaatgtagatgaggccataaatttcataaatgaacgtgaaaagcctctggctctttatgtattttcgcataaccataagctcatcaaacggatgattgatgagacatccagtggaggtgtcacaggcaatgacgtcattatgcacttcacgctcaactctttcccatttggaggagtgggttccagtgggatgggagcttatcacggaaaacatagttttgatactttttctcatcagcgtccctgtttattaaaaagtttaaagagagaaggtgctaacaaactcagatatcctcccaacagccagtcaaaggtggattggggaaaattttttctcttgaaacggttcaacaaagaaaaactcggtctcctgttgctcactttcctgggtattgtagccgctgtgcttgtcaaggcagaatattactgaagaatgatcctgttcaacctcctagtgcctctactgaattattcctcttttaaatggttaatgaaccaataatttttaaatcataccaaaaatagtaagaaaatatgcaaacactctgtgatcaaacttaaaagtcattgccattcatcattaataaaagttgccatttcaactacgtcccaacattccctaatagggtattcagggaacctgtcttaaattgtgcttatctaaatcttggaactttgagctaggggaggagaatgtattagactaaatacaaactgcggggttgtaagggagtctcagaacctcactgaatccttcactccagttaatggcactgctcacttcctgcctctgctgccaccatcactgtgtgaagctttcaagagcttggtacttcccagggctaccggcagtcctctgtagtccagagaggtgagattagatcttcttggttccctgtgaggtttcaggcactaaaactctatgtggggaagggaggggttactcctcctccaatgggactcaaggacttgacctccaggagtaggcccctggtcagaagtgccatctcaccagtggtcttcattcttcctcattcattctttatcatcctgtgttctgtttagttgcaacaatctcttgtgactaatgtcactcaaagcatcttgtaaatcctagggcttcctggaagttagttgccaaagtcatgcaagcatcacctgtcattcttgtgttggagttatagaattctacatcttataaaacctaactggcatttaaaaaatactgtggccgggcgtggtggctcatgcctgtaatcccagcactttgggaggccgaggtgggaggattgcttgagtccaggaatttgagaccagcctggacaacacagtgagacctcatctctatcaaaaaataaaaattagctagatgtggtggcatgagcctgtgttcccagctgcttaggaggctgaagcaggaggattgattgagcctgcgaggccaaggctgcagcaggctgtgattgcaccactgcacttcagcttgggcaacagagcaagaccctgtctccgaaacaaataaaaaatactgtaataaaagtacttataaacatactaatcctctttcaggaccctaaagttgcaggttagtaggtcttcaaggacaaatctgtaagtttcttatttctgtagtgcaagtaaaatttcactttttgaaactatagagagatccctttctgattagcctacagaacttaaagtgagggaaccatttcctctcacagacaaagaggcctgggatattaggactttggggtttgagagcatcatggggcagacagatggtggatggtctggacaagaagcgagtaagccactgcggttggtcatactgaagggaattgatggcaagaggatcccctgagcaagtcagaagttactctcatcagtcgttcatggtcacaacctgaggtactctgctgagtgggcaaggctgaagaagaggcctgtggaatgcagcattacctgctggacagagcagggcaggcagttctatgccttggagctcctgactgcagggactctgtccccacactcaaaaagactcagctcactcaatgagagaatgtgatttactttatagaacgtataatcaactttgttgaataatttgttctattaaggctgtctaaagtatgtgatgtcttcatcatagtatgaagtgttgaaaattaataacgagcctagtttaggaaaaagctgcttaaaactgtggctctaagagagtaatcataaaataccttagataaaattgcactatggaattttcattgagtatgtttaaattattggcttgtctactaatacacatctgcttcaaaatgaacatatttcataaaattggcatcaattttaatgacgctcctggtatggaacctcagatataccctattggagacaatcctttgatcataaattctccccaactataaatcattttatgtctttatcata

SEQ ID NO: 106341 - DNA, 607 bp, Homo sapiens
  Payload ID: 884
  Gene Symbol: ALDH3A2
  Gene Name: aldehyde dehydrogenase 3 family, member A2
  ENST ID: ENST00000571537
  CDS Start-End: 1-489
accacggagctcctgaagcagcgatttgaccacattttctatacgggaaacactgcggttggcaaaattgtcatggaagctgctgccaagcatctgacccctgtgactcttgaactgggagggaaaagtccatgttatattgataaagattgtgacctggacattgtttgcagacgcataacctggggaaaatacatgaattgtggccaaacctgcattgcacccgactatattctctgtgaagcatccctccaaaatcaaattgtatggaagattaaggaaacagtgaaggaattttatggagaaaatataaaagagtctcctgattatgaaaggatcatcaatcttcgtcattttaagaggatactaagtttgcttgaaggacaaaagatagcttttggtggggagactgatgaggccacacgctacataggtaatggaaattctccttttcctatgggaagatggcaatttggcagtttttgctgacactacttattaacactagataaactattaaatatatagcatttaattgttaaagtactaaatcctgctttctggtatactgtacctgtagcttttgttataaactatttaaaatgtc

SEQ ID NO: 106342 - DNA, 590 bp, Homo sapiens
  Payload ID: 884
  Gene Symbol: ALDH3A2
  Gene Name: aldehyde dehydrogenase 3 family, member A2
  ENST ID: ENST00000571163
  CDS Start-End: 1-294
atgcaagaagaaatttttggaccaattcttccaatagtgcctgtgaaaaatgtagatgaggccataaatttcataaatgaacgtgaaaagcctctggctctttatgtattttcgcataaccataagctcatcaaacggatgattgatgagacatccagtggaggtgtcacaggcaatgacgtcattatgcacttcacgctcaactctttcccatttggaggagtgggcagaatattactgaagaatgatcctgttcaacctcctagtgcctctactgaattattcctcttttaaatggttaatgaaccaataatttttaaatcataccaaaaatagtaagaaaatatgcaaacactctgtgatcaaacttaaaagtcattgccattcatcattaataaaagttgccatttcaactacgtcccaacattccctaatagggtattcagggaacctgtcttaaattgtgcttatctaaatcttggaactttgagctaggggaggagaatgtattagactaaatacaaactgcggggttgtaagggagtctcagaacctcactgaatccttcactccagttaatggcactgctc

SEQ ID NO: 106343 - DNA, 450 bp, Homo sapiens
  Payload ID: 884
  Gene Symbol: ALDH3A2
  Gene Name: aldehyde dehydrogenase 3 family, member A2
  ENST ID: ENST00000575384
  CDS Start-End: 1-258
ttttctcatcagcgtccctgtttattaaaaagtttaaagagagaaggtgctaacaaactcagatatcctcccaacagccagtcaaaggtggattggggaaaattttttctcttgaaacggttcaacaaagaaaaactcggtctcctgttgctcactttcctgggtattgtagccgctgtgcttgtcaagttcacagactgcgttggtccagtaagcagagatgaacaccagatttcaaaacccagccctgtctgttaagagtgaggctgaatattactgaagaatgatcctgttcaacctcctagtgcctctactgaattattcctcttttaaatggttaatgaaccaataatttttaaatcataccaaaaatagtaagaaaatatgcaaacactctgtgatcaaacttaaaagtcattgccattcatcattaataaaagttgccatttc

SEQ ID NO: 106344 - DNA, 2785 bp, Homo sapiens
  Payload ID: 884
  Gene Symbol: ALDH3A2
  Gene Name: aldehyde dehydrogenase 3 family, member A2
  Uniprot ID: P51648
  ENST ID: ENST00000581518
  CDS Start-End: 250-1776
aataggggtgaggctttgggtcgagctcagtcctcccccggcgcctccgactggcagtgggactcagcgggcgtggaggtcgcggctgagcgagcgagccctgggcgagtgaattgtggctgtgggttgacggtggagacaccccccggagggaggcggagggaagggaggcgaggcctgcacctgcatgcttcccgcctcccactccccagcgcccccggaccgtgcagttctctgcaggaccaggccatggagctcgaagtccggcgggtccgacaggcgttcctgtccggccggtcgcgacctctgcggtttcggctgcagcagctggaggccctgcggaggatggtgcaggagcgcgagaaggatatcctgacggccatcgccgccgacctgtgcaagagtgaattcaatgtgtacagtcaggaagtcattactgtccttggggaaattgattttatgcttgagaatcttcctgaatgggttactgctaaaccagttaagaagaacgtgctcaccatgctggatgaggcctatattcagccacagcctctgggagtggtgctgataatcggagcttggaattaccccttcgttctcaccattcagccactgataggagccatcgctgcaggaaatgctgtgattataaagccttctgaactgagtgaaaatacagccaagatcttggcaaagcttctccctcagtatttagaccaggatctctatattgttattaatggtggtgttgaggaaaccacggagctcctgaagcagcgatttgaccacattttctatacgggaaacactgcggttggcaaaattgtcatggaagctgctgccaagcatctgacccctgtgactcttgaactgggagggaaaagtccatgttatattgataaagattgtgacctggacattgtttgcagacgcataacctggggaaaatacatgaattgtggccaaacctgcattgcacccgactatattctctgtgaagcatccctccaaaatcaaattgtatggaagattaaggaaacagtgaaggaattttatggagaaaatataaaagagtctcctgattatgaaaggatcatcaatcttcgtcattttaagaggatactaagtttgcttgaaggacaaaagatagcttttggtggggagactgatgaggccacacgctacatagccccaacagtacttaccgatgttgatcctaaaaccaaggtgatgcaagaagaaatttttggaccaattcttccaatagtgcctgtgaaaaatgtagatgaggccataaatttcataaatgaacgtgaaaagcctctggctctttatgtattttcgcataaccataagctcatcaaacggatgattgatgagacatccagtggaggtgtcacaggcaatgacgtcattatgcacttcacgctcaactctttcccatttggaggagtgggttccagtgggatgggagcttatcacggaaaacatagttttgatactttttctcatcagcgtccctgtttattaaaaagtttaaagagagaaggtgctaacaaactcagatatcctcccaacagccagtcaaaggtggattggggaaaattttttctcttgaaacggttcaacaaagaaaaactcggtctcctgttgctcactttcctgggtattgtagccgctgtgcttgtcaagaaataccaagctgtgctgaggagaaaggccctgttgatttttctggtagttcacagactgcgttggtccagtaagcagagatgaacaccagatttcaaaacccagccctgtctgttaagagtgaggctgaatattactgaagaatgatcctgttcaacctcctagtgcctctactgaattattcctcttttaaatggttaatgaaccaataatttttaaatcataccaaaaatagtaagaaaatatgcaaacactctgtgatcaaacttaaaagtcattgccattcatcattaataaaagttgccatttcaactacgtcccaacattccctaatagggtattcagggaacctgtcttaaattgtgcttatctaaatcttggaactttgagctaggggaggagaatgtattagactaaatacaaactgcggggttgtaagggagtctcagaacctcactgaatccttcactccagttaatggcactgctcacttcctgcctctgctgccaccatcactgtgtgaagctttcaagagcttggtacttcccagggctaccggcagtcctctgtagtccagagaggtgagattagatcttcttggttccctgtgaggtttcaggcactaaaactctatgtggggaagggaggggttactcctcctccaatgggactcaaggacttgacctccaggagtaggcccctggtcagaagtgccatctcaccagtggtcttcattcttcctcattcattctttatcatcctgtgttctgtttagttgcaacaatctcttgtgactaatgtcactcaaagcatcttgtaaatcctagggcttcctggaagttagttgccaaagtcatgcaagcatcacctgtcattcttgtgttggagttatagaattctacatcttataaaacctaactggcatttaaaaaatactgtggccgggcgtggtggctcatgcctgtaatcccagcactttgggaggccgaggtgggaggattgcttgagtccaggaatttgagaccagcctggacaacacagtgagacctcatctctatcaaaaaataaaaattagctagatgtggtggcatga

SEQ ID NO: 106345 - DNA, 572 bp, Homo sapiens
  Payload ID: 884
  Gene Symbol: ALDH3A2
  Gene Name: aldehyde dehydrogenase 3 family, member A2
  ENST ID: ENST00000573947
  CDS Start-End: 1-189
atttttggaccaattcttccaatagtgcctgtgaaaaatgtagatgaggccataaatttcataaatgaacgtgaaaagcctctggctctttatgtattttcgcataaccataaggttccagtgggatgggagcttatcacggaaaacatagttttgatactttttctcatcagcgtccctgtttattaaaaagtttaaagagagaaggtgctaacaaactcagatatcctcccaacagccagtcaaaggtggattggggaaaattttttctcttgaaacggttcaacaaagaaaaactcggtctcctgttgctcactttcctgggtattgtagccgctgtgcttgtcaaggcagaatattactgaagaatgatcctgttcaacctcctagtgcctctactgaattattcctcttttaaatggttaatgaaccaataatttttaaatcataccaaaaatagtaagaaaatatgcaaacactctgtgatcaaacttaaaagtcattgccattcatcattaataaaagttgccatttcaactacgtcccaacattccctaatagggtattcaggg

SEQ ID NO: 106346 - DNA, 540 bp, Homo sapiens
  Payload ID: 884
  Gene Symbol: ALDH3A2
  Gene Name: aldehyde dehydrogenase 3 family, member A2
  ENST ID: ENST00000580550
  CDS Start-End: 102-540
gtgcaagaaggaaatgaccgctgtcccggctccgcgggagacgaaccccggcttcccgccctcagggactagctctccagggaactgggacggaccaggccatggagctcgaagtccggcgggtccgacaggcgttcctgtccggccggtcgcgacctctgcggtttcggctgcagcagctggaggccctgcggaggatggtgcaggagcgcgagaaggatatcctgacggccatcgccgccgacctgtgcaagagtgaattcaatgtgtacagtcaggaagtcattactgtccttggggaaattgattttatgcttgagaatcttcctgaatgggttactgctaaaccagttaagaagaacgtgctcaccatgctggatgaggcctatattcagccacagcctctgggagtggtgctgataatcggagcttggaattaccccttcgttctcaccattcagccactgataggagccatcgctgcaggaaatgctgtgattataaagccttctgaactgagtgaaaatacagccaagatct

SEQ ID NO: 106347 - DNA, 527 bp, Homo sapiens
  Payload ID: 884
  Gene Symbol: ALDH3A2
  Gene Name: aldehyde dehydrogenase 3 family, member A2
  ENST ID: ENST00000578614
  CDS Start-End: 195-359
agtgggactcagcgggcgtggaggtcgcggctgagcgagcgagccctgggcgagtgaattgtggctgtgggttgacggtggagacaccccccggagggaggcggagggaagggaggcgaggcctgcacctgcatgcttcccgcctcccactccccagcgcccccggaccgtgcagttctctgcaggaccaggccatggagctcgaagtccggcgggtccgacaggcgttcctgtccggccggtcgcgacctctgcggtttcggctgcagcagctggaggccctgcggaggatggtgcaggagcgcgagaaggatatcctgacggccatcgccgccgacctgtgcaaggaaatgctgtgattataaagccttctgaactgagtgaaaatacagccaagatcttggcaaagcttctccctcagtatttagaccaggatctctatattgttattaatggtggtgttgaggaaaccacggagctcctgaagcagcgatttgaccacattttctatacgggaaacactgcgg

SEQ ID NO: 106348 - DNA, 3583 bp, Homo sapiens
  Payload ID: 884
  Gene Symbol: ALDH3A2
  Gene Name: aldehyde dehydrogenase 3 family, member A2
  Uniprot ID: P51648
  ENST ID: ENST00000579855
  CDS Start-End: 100-1557
agtcctcccccggcgcctccgactggcagtgggactcagcgggcgtggaggtcgcggctgagcgagcgagccctgggcgattctctgcaggaccaggccatggagctcgaagtccggcgggtccgacaggcgttcctgtccggccggtcgcgacctctgcggtttcggctgcagcagctggaggccctgcggaggatggtgcaggagcgcgagaaggatatcctgacggccatcgccgccgacctgtgcaagagtgaattcaatgtgtacagtcaggaagtcattactgtccttggggaaattgattttatgcttgagaatcttcctgaatgggttactgctaaaccagttaagaagaacgtgctcaccatgctggatgaggcctatattcagccacagcctctgggagtggtgctgataatcggagcttggaattaccccttcgttctcaccattcagccactgataggagccatcgctgcaggaaatgctgtgattataaagccttctgaactgagtgaaaatacagccaagatcttggcaaagcttctccctcagtatttagaccaggatctctatattgttattaatggtggtgttgaggaaaccacggagctcctgaagcagcgatttgaccacattttctatacgggaaacactgcggttggcaaaattgtcatggaagctgctgccaagcatctgacccctgtgactcttgaactgggagggaaaagtccatgttatattgataaagattgtgacctggacattgtttgcagacgcataacctggggaaaatacatgaattgtggccaaacctgcattgcacccgactatattctctgtgaagcatccctccaaaatcaaattgtatggaagattaaggaaacagtgaaggaattttatggagaaaatataaaagagtctcctgattatgaaaggatcatcaatcttcgtcattttaagaggatactaagtttgcttgaaggacaaaagatagcttttggtggggagactgatgaggccacacgctacatagccccaacagtacttaccgatgttgatcctaaaaccaaggtgatgcaagaagaaatttttggaccaattcttccaatagtgcctgtgaaaaatgtagatgaggccataaatttcataaatgaacgtgaaaagcctctggctctttatgtattttcgcataaccataagctcatcaaacggatgattgatgagacatccagtggaggtgtcacaggcaatgacgtcattatgcacttcacgctcaactctttcccatttggaggagtgggttccagtgggatgggagcttatcacggaaaacatagttttgatactttttctcatcagcgtccctgtttattaaaaagtttaaagagagaaggtgctaacaaactcagatatcctcccaacagccagtcaaaggtggattggggaaaattttttctcttgaaacggttcaacaaagaaaaactcggtctcctgttgctcactttcctgggtattgtagccgctgtgcttgtcaaggcagaatattactgaagaatgatcctgttcaacctcctagtgcctctactgaattattcctcttttaaatggttaatgaaccaataatttttaaatcataccaaaaatagtaagaaaatatgcaaacactctgtgatcaaacttaaaagtcattgccattcatcattaataaaagttgccatttcaactacgtcccaacattccctaatagggtattcagggaacctgtcttaaattgtgcttatctaaatcttggaactttgagctaggggaggagaatgtattagactaaatacaaactgcggggttgtaagggagtctcagaacctcactgaatccttcactccagttaatggcactgctcacttcctgcctctgctgccaccatcactgtgtgaagctttcaagagcttggtacttcccagggctaccggcagtcctctgtagtccagagaggtgagattagatcttcttggttccctgtgaggtttcaggcactaaaactctatgtggggaagggaggggttactcctcctccaatgggactcaaggacttgacctccaggagtaggcccctggtcagaagtgccatctcaccagtggtcttcattcttcctcattcattctttatcatcctgtgttctgtttagttgcaacaatctcttgtgactaatgtcactcaaagcatcttgtaaatcctagggcttcctggaagttagttgccaaagtcatgcaagcatcacctgtcattcttgtgttggagttatagaattctacatcttataaaacctaactggcatttaaaaaatactgtggccgggcgtggtggctcatgcctgtaatcccagcactttgggaggccgaggtgggaggattgcttgagtccaggaatttgagaccagcctggacaacacagtgagacctcatctctatcaaaaaataaaaattagctagatgtggtggcatgagcctgtgttcccagctgcttaggaggctgaagcaggaggattgattgagcctgcgaggccaaggctgcagcaggctgtgattgcaccactgcacttcagcttgggcaacagagcaagaccctgtctccgaaacaaataaaaaatactgtaataaaagtacttataaacatactaatcctctttcaggaccctaaagttgcaggttagtaggtcttcaaggacaaatctgtaagtttcttatttctgtagtgcaagtaaaatttcactttttgaaactatagagagatccctttctgattagcctacagaacttaaagtgagggaaccatttcctctcacagacaaagaggcctgggatattaggactttggggtttgagagcatcatggggcagacagatggtggatggtctggacaagaagcgagtaagccactgcggttggtcatactgaagggaattgatggcaagaggatcccctgagcaagtcagaagttactctcatcagtcgttcatggtcacaacctgaggtactctgctgagtgggcaaggctgaagaagaggcctgtggaatgcagcattacctgctggacagagcagggcaggcagttctatgccttggagctcctgactgcagggactctgtccccacactcaaaaagactcagctcactcaatgagagaatgtgatttactttatagaacgtataatcaactttgttgaataatttgttctattaaggctgtctaaagtatgtgatgtcttcatcatagtatgaagtgttgaaaattaataacgagcctagtttaggaaaaagctgcttaaaactgtggctctaagagagtaatcataaaataccttagataaaattgcactatggaattttcattgagtatgtttaaattattggcttgtctactaatacacatctgcttcaaaatgaacatatttcataaaattggcatcaattttaatgacgctcctggtatggaacctcagatataccctattggagacaatcctttgatcataaattctccccaactataaatcattttatgtctttatcataga

SEQ ID NO: 106349 - DNA, 577 bp, Homo sapiens
  Payload ID: 884
  Gene Symbol: ALDH3A2
  Gene Name: aldehyde dehydrogenase 3 family, member A2
  ENST ID: ENST00000573565
  CDS Start-End: 1-176
gtttaaagagagaaggtgctaacaaactcagatatcctcccaacagccagtcaaaggtggattggggaaaattttttctcttgaaacggttcaacaaagaaaaactcggtctcctgttgctcactttcctgggtattgtagccgctgtgcttgtcaagactgcgttggtccagtaagcagagatgaacaccagatttcaaaacccagccctgtctgttaagagtgaggcagaatattactgaagaatgatcctgttcaacctcctagtgcctctactgaattattcctcttttaaatggttaatgaaccaataatttttaaatcataccaaaaatagtaagaaaatatgcaaacactctgtgatcaaacttaaaagtcattgccattcatcattaataaaagttgccatttcaactacgtcccaacattccctaatagggtattcagggaacctgtcttaaattgtgcttatctaaatcttggaactttgagctaggggaggagaatgtattagactaaatacaaactgcggggttgtaagggagtctcagaacctcactgaatccttcactccagt

SEQ ID NO: 106350 - DNA, 2152 bp, Homo sapiens
  Payload ID: 884
  Gene Symbol: ALDH3A2
  Gene Name: aldehyde dehydrogenase 3 family, member A2
  ENST ID: ENST00000582991
  CDS Start-End: 250-1431
aataggggtgaggctttgggtcgagctcagtcctcccccggcgcctccgactggcagtgggactcagcgggcgtggaggtcgcggctgagcgagcgagccctgggcgagtgaattgtggctgtgggttgacggtggagacaccccccggagggaggcggagggaagggaggcgaggcctgcacctgcatgcttcccgcctcccactccccagcgcccccggaccgtgcagttctctgcaggaccaggccatggagctcgaagtccggcgggtccgacaggcgttcctgtccggccggtcgcgacctctgcggtttcggctgcagcagctggaggccctgcggaggatggtgcaggagcgcgagaaggatatcctgacggccatcgccgccgacctgtgcaagagtgaattcaatgtgtacagtcaggaagtcattactgtccttggggaaattgattttatgcttgagaatcttcctgaatgggttactgctaaaccagttaagaagaacgtgctcaccatgctggatgaggcctatattcagccacagcctctgggagtggtgctgataatcggagcttggaattaccccttcgttctcaccattcagccactgataggagccatcgctgcaggaaatgctgtgattataaagccttctgaactgagtgaaaatacagccaagatcttggcaaagcttctccctcagtatttagaccaggatctctatattgttattaatggtggtgttgaggaaaccacggagctcctgaagcagcgatttgaccacattttctatacgggaaacactgcggttggcaaaattgtcatggaagctgctgccaagcatctgacccctgtgactcttgaactgggagggaaaagtccatgttatattgataaagattgtgacctggacattgtttgcagacgcataacctggggaaaatacatgaattgtggccaaacctgcattgcacccgactatattctctgtgaagcatccctccaaaatcaaattgtatggaagattaaggaaacagtgaaggaattttatggagaaaatataaaagagtctcctgattatgaaaggatcatcaatcttcgtcattttaagaggatactaagtttgcttgaaggacaaaagatagcttttggtggggagactgatgaggccacacgctacatagccccaacagtacttaccgatgttgatcctaaaaccaaggtgatgcaagaagaaatttttggaccaattcttccaatagtgcctgtgaaaaatgtagatgaggccataaatttcataaatgaacgtgaaaagcctctggctctttatgtattttcgcataaccataaggttccagtgggatgggagcttatcacggaaaacatagttttgatactttttctcatcagcgtccctgtttattaaaaagtttaaagagagaaggtgctaacaaactcagatatcctcccaacagccagtcaaaggtggattggggaaaattttttctcttgaaacggttcaacaaagaaaaactcggtctcctgttgctcactttcctgggtattgtagccgctgtgcttgtcaaggctgaatattactgaagaatgatcctgttcaacctcctagtgcctctactgaattattcctcttttaaatggttaatgaaccaataatttttaaatcataccaaaaatagtaagaaaatatgcaaacactctgtgatcaaacttaaaagtcattgccattcatcattaataaaagttgccatttcaactacgtcccaacattccctaatagggtattcagggaacctgtcttaaattgtgcttatctaaatcttggaactttgagctaggggaggagaatgtattagactaaatacaaactgcggggttgtaagggagtctcagaacctcactgaatccttcactccagttaatggcactgctcacttcctgcctctgctgccaccatcactgtgtgaagctttcaagagcttggtacttcccagggctaccggcagtcctctgtagtccagagaggtgagattagatcttcttggttccctgtgaggtttcaggcactaaaactctatgtggggaagggaggggttactcctcctccaatgggactcaaggacttgacc

SEQ ID NO: 106351 - DNA, 400 bp, Homo sapiens
  Payload ID: 884
  Gene Symbol: ALDH3A2
  Gene Name: aldehyde dehydrogenase 3 family, member A2
  ENST ID: ENST00000578696
  CDS Start-End: 1-400
caagcatctgacccctgtgactcttgaactgggagggaaaagtccatgttatattgataaagattgtgacctggacattgtttgcagctgttctggatgttttcccctcagacgcataacctggggaaaatacatgaattgtggccaaacctgcattgcacccgactatattctctgtgaagcatccctccaaaatcaaattgtatggaagattaaggaaacagtgaaggaattttatggagaaaatataaaagagtctcctgattatgaaaggatcatcaatcttcgtcattttaagaggatactaagtttgcttgaaggacaaaagatagcttttggtggggagactgatgaggccacacgctacatagccccaacagtacttaccgatgttgatcct

SEQ ID NO: 106352 - DNA, 573 bp, Homo sapiens
  Payload ID: 884
  Gene Symbol: ALDH3A2
  Gene Name: aldehyde dehydrogenase 3 family, member A2
  ENST ID: ENST00000584332
  CDS Start-End: 194-573
agtcctcccccggcgcctccgactggcagtgggactcagcgggcgtggaggtcgcggctgagcgagcgagccctgggcgagtgaattgtggctgtgggttgacggtggagacaccccccggagggaggcgttcctgtccggccggtcgcgacctctgcggtttcggctgcagcagctggaggccctgcggaggatggtgcaggagcgcgagaaggatatcctgacggccatcgccgccgacctgtgcaagagtgaattcaatgtgtacagtcaggaagtcattactgtccttggggaaattgattttatgcttgagaatcttcctgaatgggttactgctaaaccagttaagaagaacgtgctcaccatgctggatgaggcctatattcagccacagcctctgggagtggtgctgataatcggagcttggaattaccccttcgttctcaccattcagccactgataggagccatcgctgcaggaaatgctgtgattataaagccttctgaactgagtgaaaatacagccaagatcttggcaaagcttctccctcagtatttagaccaggatct

SEQ ID NO: 106353 - DNA, 3822 bp, Homo sapiens
  Payload ID: 884
  Gene Symbol: ALDH3A2
  Gene Name: aldehyde dehydrogenase 3 family, member A2
  ENST ID: ENST00000631291
  CDS Start-End: 447-1628
ccggggcgctctcagcaggatggccaacaccttccctccatccctacaccccgccgccccctggcccgtggccgcgctcggctcccgcactgctcactccaccccctacatcccagcccgctgccagagccggggagagggcgggggccgcgtgggcgaggccgtgaacagcggctgtcacgtgggccgcccaggccaataggggtgaggctttgggtcgagctcagtcctcccccggcgcctccgactggcagtgggactcagcgggcgtggaggtcgcggctgagcgagcgagccctgggcgagtgaattgtggctgtgggttgacggtggagacaccccccggagggaggcggagggaagggaggcgaggcctgcacctgcatgcttcccgcctcccactccccagcgcccccggaccgtgcagttctctgcaggaccaggccatggagctcgaagtccggcgggtccgacaggcgttcctgtccggccggtcgcgacctctgcggtttcggctgcagcagctggaggccctgcggaggatggtgcaggagcgcgagaaggatatcctgacggccatcgccgccgacctgtgcaagagtgaattcaatgtgtacagtcaggaagtcattactgtccttggggaaattgattttatgcttgagaatcttcctgaatgggttactgctaaaccagttaagaagaacgtgctcaccatgctggatgaggcctatattcagccacagcctctgggagtggtgctgataatcggagcttggaattaccccttcgttctcaccattcagccactgataggagccatcgctgcaggaaatgctgtgattataaagccttctgaactgagtgaaaatacagccaagatcttggcaaagcttctccctcagtatttagaccaggatctctatattgttattaatggtggtgttgaggaaaccacggagctcctgaagcagcgatttgaccacattttctatacgggaaacactgcggttggcaaaattgtcatggaagctgctgccaagcatctgacccctgtgactcttgaactgggagggaaaagtccatgttatattgataaagattgtgacctggacattgtttgcagacgcataacctggggaaaatacatgaattgtggccaaacctgcattgcacccgactatattctctgtgaagcatccctccaaaatcaaattgtatggaagattaaggaaacagtgaaggaattttatggagaaaatataaaagagtctcctgattatgaaaggatcatcaatcttcgtcattttaagaggatactaagtttgcttgaaggacaaaagatagcttttggtggggagactgatgaggccacacgctacatagccccaacagtacttaccgatgttgatcctaaaaccaaggtgatgcaagaagaaatttttggaccaattcttccaatagtgcctgtgaaaaatgtagatgaggccataaatttcataaatgaacgtgaaaagcctctggctctttatgtattttcgcataaccataaggttccagtgggatgggagcttatcacggaaaacatagttttgatactttttctcatcagcgtccctgtttattaaaaagtttaaagagagaaggtgctaacaaactcagatatcctcccaacagccagtcaaaggtggattggggaaaattttttctcttgaaacggttcaacaaagaaaaactcggtctcctgttgctcactttcctgggtattgtagccgctgtgcttgtcaaggcagaatattactgaagaatgatcctgttcaacctcctagtgcctctactgaattattcctcttttaaatggttaatgaaccaataatttttaaatcataccaaaaatagtaagaaaatatgcaaacactctgtgatcaaacttaaaagtcattgccattcatcattaataaaagttgccatttcaactacgtcccaacattccctaatagggtattcagggaacctgtcttaaattgtgcttatctaaatcttggaactttgagctaggggaggagaatgtattagactaaatacaaactgcggggttgtaagggagtctcagaacctcactgaatccttcactccagttaatggcactgctcacttcctgcctctgctgccaccatcactgtgtgaagctttcaagagcttggtacttcccagggctaccggcagtcctctgtagtccagagaggtgagattagatcttcttggttccctgtgaggtttcaggcactaaaactctatgtggggaagggaggggttactcctcctccaatgggactcaaggacttgacctccaggagtaggcccctggtcagaagtgccatctcaccagtggtcttcattcttcctcattcattctttatcatcctgtgttctgtttagttgcaacaatctcttgtgactaatgtcactcaaagcatcttgtaaatcctagggcttcctggaagttagttgccaaagtcatgcaagcatcacctgtcattcttgtgttggagttatagaattctacatcttataaaacctaactggcatttaaaaaatactgtggccgggcgtggtggctcatgcctgtaatcccagcactttgggaggccgaggtgggaggattgcttgagtccaggaatttgagaccagcctggacaacacagtgagacctcatctctatcaaaaaataaaaattagctagatgtggtggcatgagcctgtgttcccagctgcttaggaggctgaagcaggaggattgattgagcctgcgaggccaaggctgcagcaggctgtgattgcaccactgcacttcagcttgggcaacagagcaagaccctgtctccgaaacaaataaaaaatactgtaataaaagtacttataaacatactaatcctctttcaggaccctaaagttgcaggttagtaggtcttcaaggacaaatctgtaagtttcttatttctgtagtgcaagtaaaatttcactttttgaaactatagagagatccctttctgattagcctacagaacttaaagtgagggaaccatttcctctcacagacaaagaggcctgggatattaggactttggggtttgagagcatcatggggcagacagatggtggatggtctggacaagaagcgagtaagccactgcggttggtcatactgaagggaattgatggcaagaggatcccctgagcaagtcagaagttactctcatcagtcgttcatggtcacaacctgaggtactctgctgagtgggcaaggctgaagaagaggcctgtggaatgcagcattacctgctggacagagcagggcaggcagttctatgccttggagctcctgactgcagggactctgtccccacactcaaaaagactcagctcactcaatgagagaatgtgatttactttatagaacgtataatcaactttgttgaataatttgttctattaaggctgtctaaagtatgtgatgtcttcatcatagtatgaagtgttgaaaattaataacgagcctagtttaggaaaaagctgcttaaaactgtggctctaagagagtaatcataaaataccttagataaaattgcactatggaattttcattgagtatgtttaaattattggcttgtctactaatacacatctgcttcaaaatgaacatatttcataaaattggcatcaattttaatgacgctcctggtatggaacctcagatataccctattggagacaatcctttgatcataaattctccccaactataaatcattttatgtcttt

SEQ ID NO: 106354 - DNA, 995 bp, Homo sapiens
  Payload ID: 884
  Gene Symbol: ALDH3A2
  Gene Name: aldehyde dehydrogenase 3 family, member A2
  ENST ID: ENST00000626500
  CDS Start-End: 447-995
ccggggcgctctcagcaggatggccaacaccttccctccatccctacaccccgccgccccctggcccgtggccgcgctcggctcccgcactgctcactccaccccctacatcccagcccgctgccagagccggggagagggcgggggccgcgtgggcgaggccgtgaacagcggctgtcacgtgggccgcccaggccaataggggtgaggctttgggtcgagctcagtcctcccccggcgcctccgactggcagtgggactcagcgggcgtggaggtcgcggctgagcgagcgagccctgggcgagtgaattgtggctgtgggttgacggtggagacaccccccggagggaggcggagggaagggaggcgaggcctgcacctgcatgcttcccgcctcccactccccagcgcccccggaccgtgcagttctctgcaggaccaggccatggagctcgaagtccggcgggtccgacaggcgttcctgtccggccggtcgcgacctctgcggtttcggctgcagcagctggaggccctgcggaggatggtgcaggagcgcgagaaggatatcctgacggccatcgccgccgacctgtgcaagagtgaattcaatgtgtacagtcaggaagtcattactgtccttggggaaattgattttatgcttgagaatcttcctgaatgggttactgctaaaccagttaagaagaacgtgctcaccatgctggatgaggcctatattcagccacagcctctgggagtggtgctgataatcggagcttggaattaccccttcgttctcaccattcagccactgataggagccatcgctgcaggaaatgctgtgattataaagccttctgaactgagtgaaaatacagccaagatcttggcaaagcttctccctcagtatttagaccagccattttgttctaatagctgtgatgatccaatcaagaaagatgaaatggaagacagtgagatgtcaaggattgaatag

SEQ ID NO: 106355 - DNA, 1558 bp, Homo sapiens
  Payload ID: 884
  Gene Symbol: ALDH3A2
  Gene Name: aldehyde dehydrogenase 3 family, member A2
  ENST ID: ENST00000630662
  CDS Start-End: 1148-1441
ggctgagcgagcgagccctgggcgagtgaattgtggctgtgggttgacggtggagacaccccccggagggaggcggagggaagggaggcgaggcctgcacctgcatgcttcccgcctcccactccccagcgcccccggaccgtgcagttctctgcaggaccaggccatggagctcgaagtccggcgggtccgacaggcgttcctgtccggccggtcgcgacctctgcggtttcggctgcagcagctggaggccctgcggaggatggtgcaggagcgcgagaaggatatcctgacggccatcgccgccgacctgtgcaagagtgaattcaatgtgtacagtcaggaagtcattactgtccttggggaaattgattttatgcttgagaatcttcctgaatgggttactgctaaaccagttaagaagaacgtgctcaccatgctggatgaggcctatattcagccacagcctctgggagtggtgctgataatcggagcttggaattaccccttcgttctcaccattcagccactgataggagccatcgctgcaggaaatgctgtgattataaagccttctgaactgagtgaaaatacagccaagatcttggcaaagcttctccctcagtatttagaccaggatctctatattgttattaatggtggtgttgaggaaaccacggagctcctgaagcagcgatttgaccacattttctatacgggaaacactgcggttggcaaaattgtcatggaagctgctgccaagcatctgacccctgtgactcttgaactgggagggaaaagtccatgttatattgataaagattgtgacctggacattgtttgcagacgcataacctggggaaaatacatgaattgtggccaaacctgcattgcacccgactatattctctgtgaagcatccctccaaaatcaaattgtatggaagattaaggaaacagtgaaggaattttatggagaaaatataaaagagtctcctgattatgaaaggatcatcaatcttcgtcattttaagaggatactaagtttgcttgaaggacaaaagatagcttttggtggggagactgatgaggccacacgctacatagccccaacagtacttaccgatgttgatcctaaaaccaaggtgatgcaagaagaaatttttggaccaattcttccaatagtgcctgtgaaaaatgtagatgaggccataaatttcataaatgaacgtgaaaagcctctggctctttatgtattttcgcataaccataagctcatcaaacggatgattgatgagacatccagtggaggtgtcacaggcaatgacgtcattatgcacttcacgctcaactctttcccatttggaggagtgggcagaatattactgaagaatgatcctgttcaacctcctagtgcctctactgaattattcctcttttaaatggttaatgaaccaataatttttaaatcataccaaaaatagtaagaaaatatgcaaacactctgtgatcaaacttaaaagtcattgccattcatcattaataaaagttgccatttc

SEQ ID NO: 106356 - DNA, 2786 bp, Homo sapiens
  Payload ID: 885
  Gene Symbol: ALDH3B1
  Gene Name: aldehyde dehydrogenase 3 family, member B1
  Uniprot ID: P43353
  ENST ID: ENST00000342456
  CDS Start-End: 43-1449
gcgggacagccaggaggaagggcagcttggcagagcctcaggatggacccccttggggacacgctgcggcgactgcgggaggccttccacgcggggcgcacgcggccagctgagttccgggctgcgcagctccaaggcctgggccgcttcctgcaagaaaacaagcagcttctgcacgacgcactggcccaggacctgcacaagtcagccttcgagtcggaggtgtctgaggttgccatcagccagggcgaggtcaccctggccctcaggaacctccgggcctggatgaaggacgagcgtgtgcccaagaacctggccacgcagctggactccgccttcatccggaaggagccctttggcctggtcctcatcattgcgccctggaactatccgctgaacctgacgctggtgcccctcgtgggagccctcgctgcagggaactgtgtggtgctgaagccatcggagattagcaagaacgtcgagaagatcctggccgaggtgctgccccaatacgtggaccagagctgctttgctgtggtgctgggcgggccccaggagacggggcagctgctagagcacaggttcgactacatcttcttcacagggagccctcgtgtgggcaagattgttatgactgctgccgccaagcacctgacacctgtcaccctggagctggggggcaagaacccttgctacgtggacgacaactgcgacccccagaccgtggccaaccgcgtggcctggttccgctacttcaacgccggccagacctgcgtggcccccgactacgtcctatgcagccctgagatgcaggagaggctgctgcctgccctgcagagcaccatcacccgtttctatggcgacgacccccagagctccccaaacctgggccgcatcatcaaccagaaacagttccagcggctgcgggcattgctgggctgcggccgtgtggccattgggggccagagcgatgagagcgatcgctacatcgcccccacggtgctggtggatgtgcaggagatggagcctgtgatgcaggaggagatcttcgggcccatcctgcccatcgtgaacgtgcagagcttggacgaggccatcgagttcatcaaccggcgggagaagcccctggccctgtacgccttctccaacagcagccaggtggtcaagcgggtgctgacccagaccagcagcgggggcttctgtgggaacgacggcttcatgcacatgaccctggccagcctgccttttggaggagtgggtgccagtgggatgggccggtaccatggcaagttctccttcgacaccttctcccaccatcgcgcctgcctcctgcgcagcccggggatggagaagctcaacgccctccgctacccgccgcaatcgccgcgccgcctgaggatgctgctggtggccatggaggcccaaggctgcagctgcacactgctctgagcccttccccaggcccaggctgtagaccaccatgacagctgtcgcctgcggctggtggagacggggcctgggctcccgggcccgaggaggaaaaggattgccaaggctccagggcacccctcaaagcagcgcctgcctcctccctcctgggtcttccctctccctgcctcagcctcctccctcagccgctcccaaccatgagagccgaggtgggaggcatgggaaacagtgcagtgactcaccccctgcccccgcaccaaccacccatattcaggagaagaggacagacacggcacctctgagtcacccctctcctgtggagcgggcgtccgaggggccctggcatctgactcaggccacaccatggaatcactgcatccaaggccattcctgccctctctgagtctcagtttttccatttgttcagtggagagaattaaccattgatacctcctggctgggtgaggcggctcacacctgtaatcccagcactttgggaggccgaggcaggcggatcacctgaaatcaggagttcaagatcagcctggctaacatggcgaaaccccgtctctactaaaaatacaaaaattagcctggcgtggtggcgcatgcctgtaatcccagctactcaggaggctaaggcaggagaatcgcttgaacccgggaggtggaggttgccgtgagctgagattgcgtcactgaactccggcctgggtgacagaaggaggctctgccttaaaaaaaaaaaaaaaaaaaacctcctgggactgttgcaaggatgaaatgaaggattgagggattgagggattgctgagctggagctccaggtgtcctatctttctcagtggggtggcacggagcggggccgcctccctcttctctccaggcaggtggggctgtggttatgcgatagggtctcccttccctccagcccatgccagaggagcttgtaactctttatcctcatggtgcccactacgagtcatactcttccccatgctgctcatcctcctgggccccatccactcagccaaagcagaatgcagggtttcctgcctgacaacccttctcacctcccaagtcccacttttgaacaagctgatgattctgaaactggcccaatttcctaacaagccggatgcttgagaaacctacatttggacaatgagaggctgctcctgcggcctgcgggccacctcctcttccttggctcctgctttctttttagactatatcaacctacaactttagtcgggaagagggacaggggtggacctgagtttcgtctcctgtctctctggctgatgtcacctgaataaagccttcttccctggcaa

SEQ ID NO: 106357 - DNA, 818 bp, Homo sapiens
  Payload ID: 885
  Gene Symbol: ALDH3B1
  Gene Name: aldehyde dehydrogenase 3 family, member B1
  ENST ID: ENST00000616697
  CDS Start-End: 1-201
ctggccctcaggaacctccgggcctggatgaaggacgagcgtgtgcccaagaacctggccacgcagctggactccgccttcatccggaaggagccctttggcctggtcctcatcattgcgccctggaactatccgctgaacctgacgctggtgcccctcgtgggagccctcgctgcaggttctgcatctgaaagtgggtgaggctgatgcctgccctgcaggtgtgtggagaccaggagctggctacgcctcctccagctctctccctgcactgccctgcagggaactgtgtggtgctgaagccatcggagattagcaagaacgtcgagaagatcctggccgaggtgctgccccaatacgtggaccagagctgctttgctgtggtgctgggcgggccccaggagacggggcagctgctagagcacaggttcgactacatcttcttcacagggagccctcgtgtgggcaagattgttatgactgctgccgccaagcacctgacacctgtcaccctggagctggggggcaagaacccttgctacgtggacgacaactgcgacccccagaccgtggccaaccgcgtggcctggttccgctacttcaacgccggccagacctgcgtggcccccgactacgtcctatgcagccctgagatgcaggagaggctgctgcctgccctgcagagcaccatcacccgtttctatggcgacgacccccagagctccccaaacctgggccgcatcatcaaccagaaacagttccagcggctgcgggcattgctgggctgcggccgtgtggccattgggggccagagcgat

SEQ ID NO: 106358 - DNA, 603 bp, Homo sapiens
  Payload ID: 885
  Gene Symbol: ALDH3B1
  Gene Name: aldehyde dehydrogenase 3 family, member B1
  ENST ID: ENST00000527514
  CDS Start-End: 1-216
cagagcgatgagagcgatcgctacatcgcccccacggtgctggtggatgtgcaggagatggagcctgtgatgcaggaggagatcttcgggcccatcctgcccatcgtgaacgtgcagagcttggacgaggccatcgagttcatcaaccggcgggagaagcccctggccctgtacgccttctccaacagcagccaggagagaatcccacagaggtgagcctgcctctcacaccacatctggggcacctgagatgcacacgtggctagtgagtggaaccttcactaccgggtcaggacggtatctgccagggtttccctgggaagctactattgtttgtttctttattatttggaagcaagtctctaagcctaccccaccctcaccaggtggaggtaattaagctgtatgctgctctatcatattgttagttattatctagttattttatacattcttttcttattccatttgtggtttggtggaattttgttgtattgccatttgatacctttctcttcctcctttgtatgattgttttatagggcctgtgagttttgtacttttgtgtgtattatggcaaataccaacttgtttttatgttaa

SEQ ID NO: 106359 - DNA, 2280 bp, Homo sapiens
  Payload ID: 885
  Gene Symbol: ALDH3B1
  Gene Name: aldehyde dehydrogenase 3 family, member B1
  Uniprot ID: P43353
  ENST ID: ENST00000614849
  CDS Start-End: 117-1523
ggggctccatcccacacagaggacaggggctctgcagtccttcacccccaccctaactatctaatcacgggccaccggtgtgggcatggtccagaagacctcaccgccctcccaggatggacccccttggggacacgctgcggcgactgcgggaggccttccacgcggggcgcacgcggccagctgagttccgggctgcgcagctccaaggcctgggccgcttcctgcaagaaaacaagcagcttctgcacgacgcactggcccaggacctgcacaagtcagccttcgagtcggaggtgtctgaggttgccatcagccagggcgaggtcaccctggccctcaggaacctccgggcctggatgaaggacgagcgtgtgcccaagaacctggccacgcagctggactccgccttcatccggaaggagccctttggcctggtcctcatcattgcgccctggaactatccgctgaacctgacgctggtgcccctcgtgggagccctcgctgcagggaactgtgtggtgctgaagccatcggagattagcaagaacgtcgagaagatcctggccgaggtgctgccccaatacgtggaccagagctgctttgctgtggtgctgggcgggccccaggagacggggcagctgctagagcacaggttcgactacatcttcttcacagggagccctcgtgtgggcaagattgttatgactgctgccgccaagcacctgacacctgtcaccctggagctggggggcaagaacccttgctacgtggacgacaactgcgacccccagaccgtggccaaccgcgtggcctggttccgctacttcaacgccggccagacctgcgtggcccccgactacgtcctatgcagccctgagatgcaggagaggctgctgcctgccctgcagagcaccatcacccgtttctatggcgacgacccccagagctccccaaacctgggccgcatcatcaaccagaaacagttccagcggctgcgggcattgctgggctgcggccgtgtggccattgggggccagagcgatgagagcgatcgctacatcgcccccacggtgctggtggatgtgcaggagatggagcctgtgatgcaggaggagatcttcgggcccatcctgcccatcgtgaacgtgcagagcttggacgaggccatcgagttcatcaaccggcgggagaagcccctggccctgtacgccttctccaacagcagccaggtggtcaagcgggtgctgacccagaccagcagcgggggcttctgtgggaacgacggcttcatgcacatgaccctggccagcctgccttttggaggagtgggtgccagtgggatgggccggtaccatggcaagttctccttcgacaccttctcccaccatcgcgcctgcctcctgcgcagcccggggatggagaagctcaacgccctccgctacccgccgcaatcgccgcgccgcctgaggatgctgctggtggccatggaggcccaaggctgcagctgcacactgctctgagcccttccccaggcccaggctgtagaccaccatgacagctgtcgcctgcggctggtggagacggggcctgggctcccgggcccgaggaggaaaaggattgccaaggctccagggcacccctcaaagcagcgcctgcctcctccctcctgggtcttccctctccctgcctcagcctcctccctcagccgctcccaaccatgagagccgaggtgggaggcatgggaaacagtgcagtgactcaccccctgcccccgcaccaaccacccatattcaggagaagaggacagacacggcacctctgagtcacccctctcctgtggagcgggcgtccgaggggccctggcatctgactcaggccacaccatggaatcactgcatccaaggccattcctgccctctctgagtctcagtttttccatttgttcagtggagagaattaaccattgatacctcctggctgggtgaggcggctcacacctgtaatcccagcactttgggaggccgaggcaggcggatcacctgaaatcaggagttcaagatcagcctggctaacatggcgaaaccccgtctctactaaaaatacaaaaattagcctggcgtggtggcgcatgcctgtaatcccagctactcaggaggctaaggcaggagaatcgcttgaacccgggaggtggaggttgccgtgagctgagattgcgtcactgaactccggcctgggtgacagaaggaggctctgccttaaaaaaaaaaaaaaaaaaaa

SEQ ID NO: 106360 - DNA, 1594 bp, Homo sapiens
  Payload ID: 885
  Gene Symbol: ALDH3B1
  Gene Name: aldehyde dehydrogenase 3 family, member B1
  ENST ID: ENST00000619675
  CDS Start-End: 52-561
ccaggcagagcgggacagccaggaggaagggcagcttggcagagcctcaggatggacccccttggggacacgctgcggcgactgcgggaggccttccacgcggggcgcacgcggccagctgagttccgggctgcgcagctccaaggcctgggccgcttcctgcaagaaaacaagcagcttctgcacgacgcactggcccaggacctgcacaagtcagccttcgagtcggaggtgtctgaggttgccatcagccagggcgaggtcaccctggccctcaggaacctccgggcctggatgaaggacgagcgtgtgcccaagaacctggccacgcagctggactccgccttcatccggaaggagccctttggcctggtcctcatcattgcgccctggaactatccgctgaacctgacgctggtgcccctcgtgggagccctcgctgcagggaactgtgtggtgctgaagccatcggagattagcaagaacgtcgagaagatcctggccgaggtgctgccccaatacgtggaccagggagccctcgtgtgggcaagattgttatgactgctgccgccaagcacctgacacctgtcaccctggagctggggggcaagaacccttgctacgtggacgacaactgcgacccccagaccgtggccaaccgcgtggcctggttccgctacttcaacgccggccagacctgcgtggcccccgactacgtcctatgcagccctgagatgcaggagaggctgctgcctgccctgcagagcaccatcacccgtttctatggcgacgacccccagagctccccaaacctgggccgcatcatcaaccagaaacagttccagcggctgcgggcattgctgggctgcggccgtgtggccattgggggccagagcgatgagagcgatcgctacatcgcccccacggtgctggtggatgtgcaggagatggagcctgtgatgcaggaggagatcttcgggcccatcctgcccatcgtgaacgtgcagagcttggacgaggccatcgagttcatcaaccggcgggagaagcccctggccctgtacgccttctccaacagcagccaggtggtcaagcgggtgctgacccagaccagcagcgggggcttctgtgggaacgacggcttcatgcacatgaccctggccagcctgccttttggaggagtgggtgccagtgggatgggccggtaccatggcaagttctccttcgacaccttctcccaccatcgcgcctgcctcctgcgcagcccggggatggagaagctcaacgccctccgctacccgccgcaatcgccgcgccgcctgaggatgctgctggtggccatggaggcccaaggctgcagctgcacactgctctgagcccttccccaggcccaggctgtagaccaccatgacagctgtcgcctgcggctggtggagacggggcctgggctcccgggcccgaggaggaaaaggattgccaaggctccagggcacccctcaaagcagcgcctgcctcctccctcctgggtcttccctctccctgcctcagcctcctccctcagccgctcccaaccatgagagccgaggtgggaggc

SEQ ID NO: 106361 - DNA, 1300 bp, Homo sapiens
  Payload ID: 885
  Gene Symbol: ALDH3B1
  Gene Name: aldehyde dehydrogenase 3 family, member B1
  ENST ID: ENST00000615463
  CDS Start-End: 72-764
atttcttaacagcagggccaccaggcagagcgggacagccaggaggaagggcagcttggcagagcctcaggatggacccccttggggacacgctgcggcgactgcgggaggccttccacgcggggcgcacgcggccagctgagttccgggctgcgcagctccaaggcctgggccgcttcctgcaagaaaacaagcagcttctgcacgacgcactggcccaggacctgcacaagtcagccttcgagtcggaggtgtctgaggttgccatcagccagggcgaggtcaccctggccctcaggaacctccgggcctggatgaaggacgagcgtgtgcccaagaacctggccacgcagctggactccgccttcatccggaaggagccctttggcctggtcctcatcattgcgccctggaactatccgctgaacctgacgctggtgcccctcgtgggagccctcgctgcagggaactgtgtggtgctgaagccatcggagattagcaagaacgtcgagaagatcctggccgaggtgctgccccaatacgtggaccagagctgctttgctgtggtgctgggcgggccccaggagacggggcagctgctagagcacaggttcgactacatcttcttcacagggagccctcgtgtgggcaagattgttatgactgctgccgccaagcacccctcaaagcagcgcctgcctcctccctcctgggtcttccctctccctgcctcagcctcctccctcagccgctcccaaccatgagagccgaggtgggaggcatgggaaacagtgcagtgactcaccccctgcccccgcaccaaccacccatattcaggagaagaggacagacacggcacctctgagtcacccctctcctgtggagcgggcgtccgaggggccctggcatctgactcaggccacaccatggaatcactgcatccaaggccattcctgccctctctgagtctcagtttttccatttgttcagtggagagaattaaccattgatacctcctggctgggtgaggcggctcacacctgtaatcccagcactttgggaggccgaggcaggcggatcacctgaaatcaggagttcaagatcagcctggctaacatggcgaaaccccgtctctactaaaaatacaaaaattagcctggcgtggtggcgcatgcctgtaatcccagctactcaggaggctaaggcaggagaatcgcttgaacccgggaggtggaggttgccgtgagctgagattgcgtcactgaactccggcctgggtgacagaaggaggctctgcctt

SEQ ID NO: 106362 - DNA, 2078 bp, Homo sapiens
  Payload ID: 885
  Gene Symbol: ALDH3B1
  Gene Name: aldehyde dehydrogenase 3 family, member B1
  Uniprot ID: P43353
  ENST ID: ENST00000617288
  CDS Start-End: 28-1323
ggaagggcagcttggcagagcctcaggatggacccccttggggacacgctgcggcgactgcgggaggccttccacgcggggcgcacgcggccagctgagttccgggctgcgcagctccaaggcctgggccgcttcctgcaagaaaacaagcagcttctgcacgacgcactggcccaggacctgcacaaggccacgcagctggactccgccttcatccggaaggagccctttggcctggtcctcatcattgcgccctggaactatccgctgaacctgacgctggtgcccctcgtgggagccctcgctgcagggaactgtgtggtgctgaagccatcggagattagcaagaacgtcgagaagatcctggccgaggtgctgccccaatacgtggaccagagctgctttgctgtggtgctgggcgggccccaggagacggggcagctgctagagcacaggttcgactacatcttcttcacagggagccctcgtgtgggcaagattgttatgactgctgccgccaagcacctgacacctgtcaccctggagctggggggcaagaacccttgctacgtggacgacaactgcgacccccagaccgtggccaaccgcgtggcctggttccgctacttcaacgccggccagacctgcgtggcccccgactacgtcctatgcagccctgagatgcaggagaggctgctgcctgccctgcagagcaccatcacccgtttctatggcgacgacccccagagctccccaaacctgggccgcatcatcaaccagaaacagttccagcggctgcgggcattgctgggctgcggccgtgtggccattgggggccagagcgatgagagcgatcgctacatcgcccccacggtgctggtggatgtgcaggagatggagcctgtgatgcaggaggagatcttcgggcccatcctgcccatcgtgaacgtgcagagcttggacgaggccatcgagttcatcaaccggcgggagaagcccctggccctgtacgccttctccaacagcagccaggtggtcaagcgggtgctgacccagaccagcagcgggggcttctgtgggaacgacggcttcatgcacatgaccctggccagcctgccttttggaggagtgggtgccagtgggatgggccggtaccatggcaagttctccttcgacaccttctcccaccatcgcgcctgcctcctgcgcagcccggggatggagaagctcaacgccctccgctacccgccgcaatcgccgcgccgcctgaggatgctgctggtggccatggaggcccaaggctgcagctgcacactgctctgagcccttccccaggcccaggctgtagaccaccatgacagctgtcgcctgcggctggtggagacggggcctgggctcccgggcccgaggaggaaaaggattgccaaggctccagggcacccctcaaagcagcgcctgcctcctccctcctgggtcttccctctccctgcctcagcctcctccctcagccgctcccaaccatgagagccgaggtgggaggcatgggaaacagtgcagtgactcaccccctgcccccgcaccaaccacccatattcaggagaagaggacagacacggcacctctgagtcacccctctcctgtggagcgggcgtccgaggggccctggcatctgactcaggccacaccatggaatcactgcatccaaggccattcctgccctctctgagtctcagtttttccatttgttcagtggagagaattaaccattgatacctcctggctgggtgaggcggctcacacctgtaatcccagcactttgggaggccgaggcaggcggatcacctgaaatcaggagttcaagatcagcctggctaacatggcgaaaccccgtctctactaaaaatacaaaaattagcctggcgtggtggcgcatgcctgtaatcccagctactcaggaggctaaggcaggagaatcgcttgaacccgggaggtggaggttgccgtgagctgagattgcgtcactgaactccggcctgggtgacagaaggaggctctgccttaaaaaaaaaaaaaaaaaa

SEQ ID NO: 106363 - DNA, 709 bp, Homo sapiens
  Payload ID: 885
  Gene Symbol: ALDH3B1
  Gene Name: aldehyde dehydrogenase 3 family, member B1
  ENST ID: ENST00000617449
  CDS Start-End: 77-709
cctgctcaccctcgggggctgtggtggagcagctgtccccaagcccacacccagtcctgcagccgcctccaggtccatggcagaggggagtggtgcgagggtcttcatgatggacccccttggggacacgctgcggcgactgcgggaggccttccacgcggggcgcacgcggccagctgagttccgggctgcgcagctccaaggcctgggccgcttcctgcaagaaaacaagcagcttctgcacgacgcactggcccaggacctgcacaagtcagccttcgagtcggaggtgtctgaggttgccatcagccagggcgaggtcaccctggccctcaggaacctccgggcctggatgaaggacgagcgtgtgcccaagaacctggccacgcagctggactccgccttcatccggaaggagccctttggcctggtcctcatcattgcgccctggaactatccgctgaacctgacgctggtgcccctcgtgggagccctcgctgcagggaactgtgtggtgctgaagccatcggagattagcaagaacgtcgagaagatcctggccgaggtgctgccccaatacgtggaccagagctgctttgctgtggtgctgggcgggccccaggagacggggcagctgctagagcacaggttcgactacatcttcttcacagggagccctcgtgtgggcaagattgttatgactgctgcc

SEQ ID NO: 106364 - DNA, 1231 bp, Homo sapiens
  Payload ID: 885
  Gene Symbol: ALDH3B1
  Gene Name: aldehyde dehydrogenase 3 family, member B1
  ENST ID: ENST00000612297
  CDS Start-End: 5-1060
caggatggacccccttggggacacgctgcggcgactgcgggaggccttccacgcggggcgcacgcggccagctgagttccgggctgcgcagctccaaggcctgggccgcttcctgcaagaaaacaagcagcttctgcacgacgcactggcccaggacctgcacaagtcagccttcgagtcggaggtgtctgaggttgccatcagccagggcgaggtcaccctggccctcaggaacctccgggcctggatgaaggacgagcgtgtgcccaagaacctggccacgcagctggactccgccttcatccggaaggagccctttggcctggtcctcatcattgcgccctggaactatccgctgaacctgacgctggtgcccctcgtgggagccctcgctgcagggaactgtgtggtgctgaagccatcggagattagcaagaacgtcgagaagatcctggccgaggtgctgccccaatacgtggaccagagctccccaaacctgggccgcatcatcaaccagaaacagttccagcggctgcgggcattgctgggctgcggccgtgtggccattgggggccagagcgatgagagcgatcgctacatcgcccccacggtgctggtggatgtgcaggagatggagcctgtgatgcaggaggagatcttcgggcccatcctgcccatcgtgaacgtgcagagcttggacgaggccatcgagttcatcaaccggcgggagaagcccctggccctgtacgccttctccaacagcagccaggtggtcaagcgggtgctgacccagaccagcagcgggggcttctgtgggaacgacggcttcatgcacatgaccctggccagcctgccttttggaggagtgggtgccagtgggatgggccggtaccatggcaagttctccttcgacaccttctcccaccatcgcgcctgcctcctgcgcagcccggggatggagaagctcaacgccctccgctacccgccgcaatcgccgcgccgcctgaggatgctgctggtggccatggaggcccaaggctgcagctgcacactgctctgagcccttccccaggcccaggctgtagaccaccatgacagctgtcgcctgcggctggtggagacggggcctgggctcccgggcccgaggaggaaaaggattgccaaggctccagggcacccctcaaagcagcgcctgcctcctccctcctgggtcttccctctccctgcctca

SEQ ID NO: 106365 - DNA, 2649 bp, Homo sapiens
  Payload ID: 886
  Gene Symbol: ALDH3B2
  Gene Name: aldehyde dehydrogenase 3 family, member B2
  Uniprot ID: P48448
  ENST ID: ENST00000349015
  CDS Start-End: 440-1597
accccattgattaccccattgccaggcgtgggcacgggagttggtttgggagctgccagtctcctgggaggatcgcagtcagcagagcagggctgaggcctgggggtaggagcagagcctgcgcatctggaggcagcatgtccaagaaagggagtggaggtgcagcgaaggacccaggggcagagcccacgctgggatggaccccttcgaggacacgctgcggcggctgcgtgaggccttcaactgagggcgcacgcggccggccgagttccgggctgcgcagctccagggcctgggccacttccttcaagaaaacaagcagcttctgcgcgacgtgctggcccaggacctgcataagccagctttcgaggcagacatatctgagctcatcctttgccagaacgaggttgactacgctctcaagaacctgcaggcctggatgaaggatgaaccacggtccacgaacctgttcatgaagctggactcggtcttcatctggaaggaaccctttggcctggtcctcatcatcgcaccctggaactacccactgaacctgaccctggtgctcctggtgggcgccctcgccgcagggagttgcgtggtgctgaagccgtcagaaatcagccagggcacagagaaggtcctggctgaggtgctgccccagtacctggaccagagctgctttgccgtggtgctgggcggaccccaggagacagggcagctgctagagcacaagttggactacatcttcttcacagggagccctcgtgtgggcaagattgtcatgactgctgccaccaagcacctgacgcctgtcaccctggagctggggggcaagaacccctgctacgtggacgacaactgcgacccccagaccgtggccaaccgcgtggcctggttctgctacttcaatgccggccagacctgcgtggcccctgactacgtcctgtgcagccccgagatgcaggagaggctgctgcccgccctgcagagcaccatcacccgtttctatggcgacgacccccagagctccccaaacctgggccacatcatcaaccagaaacagttccagcggctgcgggcattgctgggctgcagccgcgtggccattgggggccagagcaacgagagcgatcgctacatcgcccccacggtgctggtggacgtgcaggagacggagcctgtgatgcaggaggagatcttcgggcccatcctgcccatcgtgaacgtgcagagcgtggacgaggccatcaagttcatcaaccggcaggagaagcccctggccctgtacgccttctccaacagcagccaggttgtgaaccagatgctggagcggaccagcagcggcagctttggaggcaatgagggcttcacctacatatctctgctgtccgtgccattcgggggagtcggccacagtgggatgggccggtaccacggcaagttcaccttcgacaccttctcccaccaccgcacctgcctgctcgccccctccggcctggagaaattaaaggagatccactacccaccctataccgactggaaccagcagctgttacgctggggcatgggctcccagagctgcaccctcctgtgagcgtcccacccgcctccaacgggtcacacagagaaacctgagtctagccatgaggggcttatgctcccaactcacattgttcctccagaccgcaggttcccccagcctcaggttgctggagctgtcacatgactgcatcctgcctgccagggctgcaaagcaaggtcttgcttctatctgggggacgctgctcgagagaggccaagaggccgcagaacatgccaggtgtcctcactcaccccaccctccccaattccagccctttgccctctcggtcagggttggccagacccagtcacaggggcagtgtcaccctggaaaatacagtgccctgccttcttaggggcatcagccctgaacggttgagagcgtggagccctccaggcctttgctctcccctctaggcacacgcgcacttccatctctgccccatcccaactgcaccagcactgcctcccccagggatcctctcacatcccacactggtctctgcaccacccctctggttcacaccgcaccctgcactcacccacagcagctccatccactgggaaaactggggtttgcatcactccactgcacagtgttagtgggacctgggggcaagtcccttgacttctctgagcctcagtttccttatgtgaaagttgctggaaccaaaatggagtcacttatgccaaactctaataaaatggagtcggggggccacatagaagccctcacacacacatgcccgtaacaggatttatcacaagacacgcctgcatgtagaccagacacagggcgtatggaaagcacgtcctcaagactgtagtattccagatgagctgcagatgcttacctaccacggccgtctccaccagaaaaccatcgccaactcctgcgatcagcttgtgacttacaaaccttgtttaaaagctgcttacatggacttctgtcctttaaaagcttccccttggctgtggccctctgtgtatgcctgggatccttccaagcactcatagcccagataggaatcctctgctcctcccaaataaattcatctgttctgg

SEQ ID NO: 106366 - DNA, 2480 bp, Homo sapiens
  Payload ID: 886
  Gene Symbol: ALDH3B2
  Gene Name: aldehyde dehydrogenase 3 family, member B2
  Uniprot ID: P48448
  ENST ID: ENST00000530069
  CDS Start-End: 270-1427
ggttgcttccccttccaccataactgatggaccccttcgaggacacgctgcggcggctgcgtgaggccttcaactgagggcgcacgcggccggccgagttccgggctgcgcagctccagggcctgggccacttccttcaagaaaacaagcagcttctgcgcgacgtgctggcccaggacctgcataagccagctttcgaggcagacatatctgagctcatcctttgccagaacgaggttgactacgctctcaagaacctgcaggcctggatgaaggatgaaccacggtccacgaacctgttcatgaagctggactcggtcttcatctggaaggaaccctttggcctggtcctcatcatcgcaccctggaactacccactgaacctgaccctggtgctcctggtgggcgccctcgccgcagggagttgcgtggtgctgaagccgtcagaaatcagccagggcacagagaaggtcctggctgaggtgctgccccagtacctggaccagagctgctttgccgtggtgctgggcggaccccaggagacagggcagctgctagagcacaagttggactacatcttcttcacagggagccctcgtgtgggcaagattgtcatgactgctgccaccaagcacctgacgcctgtcaccctggagctggggggcaagaacccctgctacgtggacgacaactgcgacccccagaccgtggccaaccgcgtggcctggttctgctacttcaatgccggccagacctgcgtggcccctgactacgtcctgtgcagccccgagatgcaggagaggctgctgcccgccctgcagagcaccatcacccgtttctatggcgacgacccccagagctccccaaacctgggccacatcatcaaccagaaacagttccagcggctgcgggcattgctgggctgcagccgcgtggccattgggggccagagcaacgagagcgatcgctacatcgcccccacggtgctggtggacgtgcaggagacggagcctgtgatgcaggaggagatcttcgggcccatcctgcccatcgtgaacgtgcagagcgtggacgaggccatcaagttcatcaaccggcaggagaagcccctggccctgtacgccttctccaacagcagccaggttgtgaaccagatgctggagcggaccagcagcggcagctttggaggcaatgagggcttcacctacatatctctgctgtccgtgccattcgggggagtcggccacagtgggatgggccggtaccacggcaagttcaccttcgacaccttctcccaccaccgcacctgcctgctcgccccctccggcctggagaaattaaaggagatccactacccaccctataccgactggaaccagcagctgttacgctggggcatgggctcccagagctgcaccctcctgtgagcgtcccacccgcctccaacgggtcacacagagaaacctgagtctagccatgaggggcttatgctcccaactcacattgttcctccagaccgcaggttcccccagcctcaggttgctggagctgtcacatgactgcatcctgcctgccagggctgcaaagcaaggtcttgcttctatctgggggacgctgctcgagagaggccaagaggccgcagaacatgccaggtgtcctcactcaccccaccctccccaattccagccctttgccctctcggtcagggttggccagacccagtcacaggggcagtgtcaccctggaaaatacagtgccctgccttcttaggggcatcagccctgaacggttgagagcgtggagccctccaggcctttgctctcccctctaggcacacgcgcacttccatctctgccccatcccaactgcaccagcactgcctcccccagggatcctctcacatcccacactggtctctgcaccacccctctggttcacaccgcaccctgcactcacccacagcagctccatccactgggaaaactggggtttgcatcactccactgcacagtgttagtgggacctgggggcaagtcccttgacttctctgagcctcagtttccttatgtgaaagttgctggaaccaaaatggagtcacttatgccaaactctaataaaatggagtcggggggccacatagaagccctcacacacacatgcccgtaacaggatttatcacaagacacgcctgcatgtagaccagacacagggcgtatggaaagcacgtcctcaagactgtagtattccagatgagctgcagatgcttacctaccacggccgtctccaccagaaaaccatcgccaactcctgcgatcagcttgtgacttacaaaccttgtttaaaagctgcttacatggacttctgtcctttaaaagcttccccttggctgtggccctctgtgtatgcctgggatccttccaagcactcatagcccagataggaatcctctgctcctcccaaataaattcatctgttctgga

SEQ ID NO: 106367 - DNA, 561 bp, Homo sapiens
  Payload ID: 886
  Gene Symbol: ALDH3B2
  Gene Name: aldehyde dehydrogenase 3 family, member B2
  ENST ID: ENST00000528756
  CDS Start-End: 278-561
gagctgggatggtgggcagcagggtcacccgaggatggaccccttcgaggacacgctgcggcggctgcgtgaggccttcaactgagggcgcacgcggccggccgagttccgggctgcgcagctccagggcctgggccacttccttcaagaaaacaagcagcttctgcgcgacgtgctggcccaggacctgcataagccagctttcgaggcagacatatctgagctcatcctttgccagaacgaggttgactacgctctcaagaacctgcaggcctggatgaaggatgaaccacggtccacgaacctgttcatgaagctggactcggtcttcatctggaaggaaccctttggcctggtcctcatcatcgcaccctggaactacccactgaacctgaccctggtgctcctggtgggcgccctcgccgcagggagttgcgtggtgctgaagccgtcagaaatcagccagggcacagagaaggtcctggctgaggtgctgccccagtacctggaccagagctgctttgccgtggtgctgggcggaccccaggagacagggcagct

SEQ ID NO: 106368 - DNA, 726 bp, Homo sapiens
  Payload ID: 886
  Gene Symbol: ALDH3B2
  Gene Name: aldehyde dehydrogenase 3 family, member B2
  ENST ID: ENST00000525827
  CDS Start-End: 284-726
agacaccgagcagctataggtcctggcagtgagacaagggatggaccccttcgaggacacgctgcggcggctgcgtgaggccttcaactgagggcgcacgcggccggccgagttccgggctgcgcagctccagggcctgggccacttccttcaagaaaacaagcagcttctgcgcgacgtgctggcccaggacctgcataagccagctttcgaggcagacatatctgagctcatcctttgccagaacgaggttgactacgctctcaagaacctgcaggcctggatgaaggatgaaccacggtccacgaacctgttcatgaagctggactcggtcttcatctggaaggaaccctttggcctggtcctcatcatcgcaccctggaactacccactgaacctgaccctggtgctcctggtgggcgccctcgccgcagggagttgcgtggtgctgaagccgtcagaaatcagccagggcacagagaaggtcctggctgaggtgctgccccagtacctggaccagagctgctttgccgtggtgctgggcggaccccaggagacagggcagctgctagagcacaagttggactacatcttcttcacagggagccctcgtgtgggcaagattgtcatgactgctgccaccaagcacctgacgcctgtcaccctggagctggggggcaagaacccctgctacgtggacgacaactgcgacccccagaccgtggc

SEQ ID NO: 106369 - DNA, 492 bp, Homo sapiens
  Payload ID: 886
  Gene Symbol: ALDH3B2
  Gene Name: aldehyde dehydrogenase 3 family, member B2
  ENST ID: ENST00000531248
  CDS Start-End: 1-385
gagcgatcgctacatcgcccccacggtgctggtggacgtgcaggagacggagcctgtgatgcaggaggagatcttcgggcccatcctgcccatcgtgaacgtgcagagcgtggacgaggccatcaagttcatcaaccggcaggagaagcccctggccctgccacagtgggatgggccggtaccacggcaagttcaccttcgacaccttctcccaccaccgcacctgcctgctcgccccctccggcctggagaaattaaaggagatccactacccaccctataccgactggaaccagcagctgttacgctggggcatgggctcccagagctgcaccctcctgtgagcgtcccacccgcctccaacgggtcacacagagaaacctgagtctagccatgaggggcttatgctcccaactcacattgttcctccagaccgcaggttcccccagcctcaggttgctggagctgtcacatgactgcatcctgcctgcc

SEQ ID NO: 106370 - DNA, 2124 bp, Homo sapiens
  Payload ID: 887
  Gene Symbol: ALDH4A1
  Gene Name: aldehyde dehydrogenase 4 family, member A1
  Uniprot ID: P30038
  ENST ID: ENST00000290597
  CDS Start-End: 31-1722
tccagcgaacagccccgcttctaacccgagatgctgctgccggcgcccgcgctccgccgcgccctgctgtcccgcccctggaccggggccggcctgcggtggaagcacacctcctccctgaaggtggccaacgagcccgtcttagccttcacgcagggcagccctgagcgagatgccctgcaaaaggccttgaaggacctgaagggccggatggaagccatcccatgcgtggtgggggatgaggaggtgtggacgtcggacgtgcagtaccaagtgtcgccttttaaccatggacataaggtggccaagttctgttatgcagacaagagcctgctcaacaaagccattgaggctgccctggctgcccggaaagagtgggacctgaagcctattgcagaccgggcccagatcttcctgaaggcggcagacatgctgagtgggccgcgcagggctgagatcctcgccaagaccatggtgggacagggtaagaccgtgatccaagcggagattgacgctgcagcggaactcatcgacttcttccggttcaatgccaagtatgcggtggagctggaggggcagcagcccatcagcgtgcccccgagcaccaacagcacggtgtaccggggtctggagggcttcgtggcggccatctcgccctttaacttcactgcaatcggcggcaacctggcgggggcaccggccctgatgggcaacgtggtcctatggaagcccagtgacactgccatgctggccagctatgctgtctaccgcatccttcgggaggctggcctgccccccaacatcatccagtttgtgccagctgatgggcccctatttggggacactgtcaccagctcagagcacctctgtggcatcaacttcacaggcagtgtgcccaccttcaaacacctgtggaagcaggtggcccagaacctggaccggttccacaccttcccacgcctggctggagagtgcggcggaaagaacttccacttcgtgcaccgctcggccgacgtggagagcgtggtgagcgggaccctccgctcagccttcgagtacggtggccagaagtgttccgcgtgctcgcgtctctacgtgccgcactcgctgtggccgcagatcaaagggcggctgctggaggagcacagtcggatcaaagtgggcgaccctgcagaggattttgggaccttcttctctgcagtgattgatgccaagtcctttgcccgtatcaagaagtggctggagcacgcacgctcctcacccagcctcaccatcctggccgggggcaagtgtgatgactccgtgggctactttgtggagccctgcatcgtggagagcaaggaccctcaggagcccatcatgaaggaggagatcttcgggcctgtactgtctgtgtacgtctacccggatgacaagtacaaggagacgctgcagctggttgacagcaccaccagctatggcctcacgggggcagtgttctcccaggataaggacgtcgtgcaggaggccacaaaggtgctgaggaatgctgccggcaacttctacatcaacgacaagtccactggctcgatagtgggccagcagccctttgggggggcccgagcctctggaaccaatgacaagccagggggcccacactacatcctgcgctggacgtcgccgcaggtcatcaaggagacacataagcccctgggggactggagctacgcgtacatgcagtgagcccctctcgggctccaccgtccagctgtctgtccgtccagatgcctcctgcttggattctgagtggtcagagatctgtaaagcatgactttcaaggatggttcttaggggactgtgaaagtgttgggtcttcctccaggatgcctgcatgggaccccacccggagctggtgtggccattccccaagtgccactggcccatggatgggggtgggtgctggtgccagctgggctgggtgtgggttctgtgtccttccaggatatgtgtcatttcccatgaggggccggggcaggtggctgggtgggggcacaggctggagtattcttagttctactggttctacactgtgaggtggcaatgggatttgctcagatgccacccaataaaatgcctgttacttaa

SEQ ID NO: 106371 - DNA, 3363 bp, Homo sapiens
  Payload ID: 887
  Gene Symbol: ALDH4A1
  Gene Name: aldehyde dehydrogenase 4 family, member A1
  Uniprot ID: P30038
  ENST ID: ENST00000375341
  CDS Start-End: 259-1950
gggaaaacgcatgcatttcaggacttcgctttcgggttcccttgtcctgtgttgtgtaatgcccccgttatggcactagaaatattttttattagccgaagctaaatatagtgggactttggctgatcccgagctcggaggacagccggggtgatccgtttccccccgaggatcgaggtggtgcgctctggacggggttgtgcattctcgccgcgcccgggcggacgatccagcgaacagccccgcttctaacccgagatgctgctgccggcgcccgcgctccgccgcgccctgctgtcccgcccctggaccggggccggcctgcggtggaagcacacctcctccctgaaggtggccaacgagcccgtcttagccttcacgcagggcagccctgagcgagatgccctgcaaaaggccttgaaggacctgaagggccggatggaagccatcccatgcgtggtgggggatgaggaggtgtggacgtcggacgtgcagtaccaagtgtcgccttttaaccatggacataaggtggccaagttctgttatgcagacaagagcctgctcaacaaagccattgaggctgccctggctgcccggaaagagtgggacctgaagcctattgcagaccgggcccagatcttcctgaaggcggcagacatgctgagtgggccgcgcagggctgagatcctcgccaagaccatggtgggacagggtaagaccgtgatccaagcggagattgacgctgcagcggaactcatcgacttcttccggttcaatgccaagtatgcggtggagctggaggggcagcagcccatcagcgtgcccccgagcaccaacagcacggtgtaccggggtctggagggcttcgtggcggccatctcgccctttaacttcactgcaatcggcggcaacctggcgggggcaccggccctgatgggcaacgtggtcctatggaagcccagtgacactgccatgctggccagctatgctgtctaccgcatccttcgggaggctggcctgccccccaacatcatccagtttgtgccagctgatgggcccctatttggggacactgtcaccagctcagagcacctctgtggcatcaacttcacaggcagtgtgcccaccttcaaacacctgtggaagcaggtggcccagaacctggaccggttccacaccttcccacgcctggctggagagtgcggcggaaagaacttccacttcgtgcaccgctcggccgacgtggagagcgtggtgagcgggaccctccgctcagccttcgagtacggtggccagaagtgttccgcgtgctcgcgtctctacgtgccgcactcgctgtggccgcagatcaaagggcggctgctggaggagcacagtcggatcaaagtgggcgaccctgcagaggattttgggaccttcttctctgcagtgattgatgccaagtcctttgcccgtatcaagaagtggctggagcacgcacgctcctcacccagcctcaccatcctggccgggggcaagtgtgatgactccgtgggctactttgtggagccctgcatcgtggagagcaaggaccctcaggagcccatcatgaaggaggagatcttcgggcctgtactgtctgtgtacgtctacccggatgacaagtacaaggagacgctgcagctggttgacagcaccaccagctatggcctcacgggggcagtgttctcccaggataaggacgtcgtgcaggaggccacaaaggtgctgaggaatgctgccggcaacttctacatcaacgacaagtccactggctcgatagtgggccagcagccctttgggggggcccgagcctctggaaccaatgacaagccagggggcccacactacatcctgcgctggacgtcgccgcaggtcatcaaggagacacataagcccctgggggactggagctacgcgtacatgcagtgagcccctctcgggctccaccgtccagctgtctgtccgtccaggtggccgacctcactgcacagaccccactccagcccctccaccccttcttcatgcacagctgcctttctataatccgggcttgactcccttcttaccactgtattctggcctctcccatgcctcaggctctggtttgagatcgtgctggggaggaacatggccactaccccttatcccatcggccatgtgggaggtatgaccctggtgcctggcaggttctccctctgccctccactgggcccagtggctcagggacctggggaaaggagatggagcagctcttgggatcctttggggaaaaggaggccattctgggccccttggcaaacctcaccactcacagaggctcctggccttgatccctgcccctccaggtgtccagggtaaagtgtaactcagactgacctgtggggcacagggggcaccagctggccttgccctctctggtctgggctgtctaccttcctcactgtatctttgcccagacccacctgggccagtaggcccctgtccccagccacacaccttagatgctggcatgccttactccaggtgcctgtgtttggccgaggcctgtgtgattcccggtctgcaccacatggcggggttggggggccgctggaggccacctgccaaggcgtgggatgggatggtcctgccggtttaggccgtgattctggaaaaccttggatgggccttcgtcctatgtcagccttccctttgatcctcaggccctacctgtagagacctccactcctagagccagtctcagggtctgggatttccctgcaggagctcagccaccactgtgccatggtgacacaggccaaggcagacattggccctcccttctcccagcccccagaggcctggccttgggttcgtcagcatgggccgaggacgttgcctgtagaatcctcctctgcctgggagtggctctgtgtggaccagtccctcactggcccattctttttttgacgcagccaatctgtgaccacgattcctcccacagatgcctcctgcttggattctgagtggtcagagatctgtaaagcatgactttcaaggatggttcttaggggactgtgaaagtgttgggtcttcctccaggatgcctgcatgggaccccacccggagctggtgtggccattccccaagtgccactggcccatggatgggggtgggtgctggtgccagctgggctgggtgtgggttctgtgtccttccaggatatgtgtcatttcccatgaggggccggggcaggtggctgggtgggggcacaggctggagtattcttagttctactggttctacactgtgaggtggcaatgggatttgctcagatgccacccaataaaatgcctgttactt

SEQ ID NO: 106372 - DNA, 844 bp, Homo sapiens
  Payload ID: 887
  Gene Symbol: ALDH4A1
  Gene Name: aldehyde dehydrogenase 4 family, member A1
  ENST ID: ENST00000432718
  CDS Start-End: 202-844
aatgcccccgttatggcactagaaatattttttattagccgaagctaaatatagtgggactttggctgatcccgagctcggaggacagccggggtgatccgtttccccccgaggatcgaggtggtgcgctctggacggggttgtgcattctcgccgcgcccgggcggacgatccagcgaacagccccgcttctaacccgagatgctgctgccggcgcccgcgctccgccgcgccctgctgtcccgcccctggaccggggccggcctgcggtggaagcacacctcctccctgaaggtggccaacgagcccgtcttagccttcacgcagggcagccctgagcgagatgccctgcaaaaggccttgaaggacctgaagggccggatggaagccatcccatgcgtggtgggggatgaggaggtgtggacgtcggacgtgcagtaccaagtgtcgagcctgctcaacaaagccattgaggctgccctggctgcccggaaagagtgggacctgaagcctattgcagaccgggcccagatcttcctgaaggcggcagacatgctgagtgggccgcgcagggctgagatcctcgccaagaccatggtgggacagggtaagaccgtgatccaagcggagattgacgctgcagcggaactcatcgacttcttccggttcaatgccaagtatgcggtggagctggaggggcagcagcccatcagcgtgcccccgagcaccaacagcacggtgtaccggggtctggagggcttcgtggcggccatctcgccctttaacttcactgcaatcggcggcaacctggcgggggcaccggccctgatggtgagatgtgggc

SEQ ID NO: 106373 - DNA, 1940 bp, Homo sapiens
  Payload ID: 887
  Gene Symbol: ALDH4A1
  Gene Name: aldehyde dehydrogenase 4 family, member A1
  Uniprot ID: P30038
  ENST ID: ENST00000538309
  CDS Start-End: 317-1828
gtgccaaggggatctcagctggttcacattctgagactgtgttctggaatgtgctgccctttcagcttagagagaggagtttgggtctttttgggataaagcctgccttgtgggagaagaaagggagagtaacgctttgcatgtggaaaatacttcaacgtggttttgcatctgtgtgtttaaacttcaaacaaccgccctgcggtggaagcacacctcctccctgaaggtggccaacgagcccgtcttagccttcacgcagggcagccctgagcgagatgccctgcaaaaggccttgaaggacctgaagggccggatggaagccatcccatgcgtggtgggggatgaggaggtgtggacgtcggacgtgcagtaccaagtgtcgccttttaaccatggacataaggtggccaagttctgttatgcagacaagagcctgctcaacaaagccattgaggctgccctggctgcccggaaagagtgggacctgaagcctattgcagaccgggcccagatcttcctgaaggcggcagacatgctgagtgggccgcgcagggctgagatcctcgccaagaccatggtgggacagggtaagaccgtgatccaagcggagattgacgctgcagcggaactcatcgacttcttccggttcaatgccaagtatgcggtggagctggaggggcagcagcccatcagcgtgcccccgagcaccaacagcacggtgtaccggggtctggagggcttcgtggcggccatctcgccctttaacttcactgcaatcggcggcaacctggcgggggcaccggccctgatgggcaacgtggtcctatggaagcccagtgacactgccatgctggccagctatgctgtctaccgcatccttcgggaggctggcctgccccccaacatcatccagtttgtgccagctgatgggcccctatttggggacactgtcaccagctcagagcacctctgtggcatcaacttcacaggcagtgtgcccaccttcaaacacctgtggaagcaggtggcccagaacctggaccggttccacaccttcccacgcctggctggagagtgcggcggaaagaacttccacttcgtgcaccgctcggccgacgtggagagcgtggtgagcgggaccctccgctcagccttcgagtacggtggccagaagtgttccgcgtgctcgcgtctctacgtgccgcactcgctgtggccgcagatcaaagggcggctgctggaggagcacagtcggatcaaagtgggcgaccctgcagaggattttgggaccttcttctctgcagtgattgatgccaagtcctttgcccgtatcaagaagtggctggagcacgcacgctcctcacccagcctcaccatcctggccgggggcaagtgtgatgactccgtgggctactttgtggagccctgcatcgtggagagcaaggaccctcaggagcccatcatgaaggaggagatcttcgggcctgtactgtctgtgtacgtctacccggatgacaagtacaaggagacgctgcagctggttgacagcaccaccagctatggcctcacgggggcagtgttctcccaggataaggacgtcgtgcaggaggccacaaaggtgctgaggaatgctgccggcaacttctacatcaacgacaagtccactggctcgatagtgggccagcagccctttgggggggcccgagcctctggaaccaatgacaagccagggggcccacactacatcctgcgctggacgtcgccgcaggtcatcaaggagacacataagcccctgggggactggagctacgcgtacatgcagtgagcccctctcgggctccaccgtccagctgtctgtccgtccaggtggccgacctcactgcacagaccccactccagcccctccaccccttcttcatgcacagctgcctttctat

SEQ ID NO: 106374 - DNA, 2957 bp, Homo sapiens
  Payload ID: 887
  Gene Symbol: ALDH4A1
  Gene Name: aldehyde dehydrogenase 4 family, member A1
  Uniprot ID: P30038
  ENST ID: ENST00000538839
  CDS Start-End: 6-1544
ccgagatgctgctgccggcgcccgcgctccgccgcgccctgctgtcccgcccctggaccggggccggcctgcggtggaagcacacctcctccctgaaggtggccaacgagcccgtcttagccttcacgcagggcagccctgagcgagatgccctgcaaaaggccttgaaggacctgaagggccggatggaagccatcccatgcgtggtgggggatgaggaggtgtggacgtcggacgtgcagtaccaagtgtcgccttttaaccatggacataaggtggccaagttctgttatgcagacaagagcctgctcaacaaagccattgaggctgccctggctgcccggaaagagtgggacctgaagcctattgcagaccgggcccagatcttcctgaaggcggcagacatgctgagtgggccgcgcagggctgagatcctcgccaagaccatggtgggacagggtaagaccgtgatccaagcggagattgacgctgcagcggaactcatcgacttcttccggttcaatgccaagtatgcggtggagctggaggggcagcagcccatcagcgtgcccccgagcaccaacagcacggtgtaccggggtctggagggcttcgtggcggccatctcgccctttaacttcactgcaatcggcggcaacctggcgggggcaccggccctgatgggcaacgtggtcctatggaagcccagtgacactgccatgctggccagctatgctgtctaccgcatccttcgggaggctggcctgccccccaacatcatccagtttgtgccagctgatgggcccctatttggggacactgtcaccagctcagagcacctctgtggcatcaacttcacaggcagtgtgcccaccttcaaacacctgtggaagcaggtggcccagaacctggaccggttccacaccttcccacgcctggctggagagtgcggcggaaagaacttccacttcgtgcaccgctcggccgacgtggagagcgtggtgagcgggaccctccgctcagccttcgagtacggtggccagaagtgttccgcgtgctcgcgtctctacgtgccgcactcgctgtggccgcagatcaaagggcggctgctggaggagcacagtcggatcaaagtgggcgaccctgcagaggattttgggaccttcttctctgcagtgattgatgccaaggagatcttcgggcctgtactgtctgtgtacgtctacccggatgacaagtacaaggagacgctgcagctggttgacagcaccaccagctatggcctcacgggggcagtgttctcccaggataaggacgtcgtgcaggaggccacaaaggtgctgaggaatgctgccggcaacttctacatcaacgacaagtccactggctcgatagtgggccagcagccctttgggggggcccgagcctctggaaccaatgacaagccagggggcccacactacatcctgcgctggacgtcgccgcaggtcatcaaggagacacataagcccctgggggactggagctacgcgtacatgcagtgagcccctctcgggctccaccgtccagctgtctgtccgtccaggtggccgacctcactgcacagaccccactccagcccctccaccccttcttcatgcacagctgcctttctataatccgggcttgactcccttcttaccactgtattctggcctctcccatgcctcaggctctggtttgagatcgtgctggggaggaacatggccactaccccttatcccatcggccatgtgggaggtatgaccctggtgcctggcaggttctccctctgccctccactgggcccagtggctcagggacctggggaaaggagatggagcagctcttgggatcctttggggaaaaggaggccattctgggccccttggcaaacctcaccactcacagaggctcctggccttgatccctgcccctccaggtgtccagggtaaagtgtaactcagactgacctgtggggcacagggggcaccagctggccttgccctctctggtctgggctgtctaccttcctcactgtatctttgcccagacccacctgggccagtaggcccctgtccccagccacacaccttagatgctggcatgccttactccaggtgcctgtgtttggccgaggcctgtgtgattcccggtctgcaccacatggcggggttggggggccgctggaggccacctgccaaggcgtgggatgggatggtcctgccggtttaggccgtgattctggaaaaccttggatgggccttcgtcctatgtcagccttccctttgatcctcaggccctacctgtagagacctccactcctagagccagtctcagggtctgggatttccctgcaggagctcagccaccactgtgccatggtgacacaggccaaggcagacattggccctcccttctcccagcccccagaggcctggccttgggttcgtcagcatgggccgaggacgttgcctgtagaatcctcctctgcctgggagtggctctgtgtggaccagtccctcactggcccattctttttttgacgcagccaatctgtgaccacgattcctcccacagatgcctcctgcttggattctgagtggtcagagatctgtaaagcatgactttcaaggatggttcttaggggactgtgaaagtgttgggtcttcctccaggatgcctgcatgggaccccacccggagctggtgtggccattccccaagtgccactggcccatggatgggggtgggtgctggtgccagctgggctgggtgtgggttctgtgtccttccaggatatgtgtcatttcccatgaggggccggggcaggtggctgggtgggggcacaggctggagtattcttagttctactggttctacactgtgaggtggcaatgggatttgctcagatgccacccaataaaatgcctgttactt

SEQ ID NO: 106375 - DNA, 2266 bp, Homo sapiens
  Payload ID: 888
  Gene Symbol: ALDH5A1
  Gene Name: aldehyde dehydrogenase 5 family, member A1
  Uniprot ID: P51649
  ENST ID: ENST00000348925
  CDS Start-End: 29-1675
gtttcctgtcgccgtcgttgcccgggccatggcgacctgcatttggctgcggagctgtggggcccggcgcctcgggtcgacgtttccaggctgccgcctccgcccccgcgccggcggcctggtccctgcctccgggcctgcgcccggcccggcccagctccgctgctacgctgggcgcctggcgggcctctctgcggcgctgctgcgcaccgacagcttcgtgggcggccgctggctcccggccgccgccaccttccccgtgcaagacccggccagcggcgccgctctgggcatggtagccgactgcggggtgcgagaggcccgcgccgccgtgcgcgctgcctacgaggctttctgccgctggagggaggtctccgccaaggagaggagttcattacttcggaagtggtacaatttaatgatacaaaataaggatgaccttgccagaataatcacagctgaaagtggaaagccactgaaggaggcacatggagaaattctctattccgcctttttcctagagtggttctctgaggaagcccgccgtgtttacggagacattatccacaccccggcaaaggacaggcgggccctggtcctcaagcagcccataggcgtggctgcagtcatcaccccgtggaatttccccagtgccatgatcacccggaaggtgggggccgccctggcagccggctgtactgtcgtggtgaagcctgccgaagacacgcccttctccgccctggccctggctgaggtaaatcagggatttcttcttgatttggatccattgttgcttgcaagccaggctgggattccttcaggtgtatacaatgttattccctgttctcgaaagaatgccaaggaagtaggggaggcaatttgtactgatcctctggtgtccaaaatttcctttactggttcaacaactacaggaaagatcctgttgcaccacgcagcaaactctgtgaaaagggtctctatggagctgggcggccttgctccatttatagtatttgacagtgccaacgtggaccaggctgtagcaggggccatggcatctaaatttaggaacactggacagacttgtgtttgctcaaaccaattcttggtgcaaaggggcatccatgatgcctttgtaaaagcattcgccgaggccatgaagaagaacctgcgcgtaggtaatggatttgaggaaggaactactcagggcccattaattaatgaaaaagcggtagaaaaggtggagaaacaggtgaatgatgccgtttctaaaggtgccaccgttgtgacaggtggaaaacgacaccaacttggaaaaaatttctttgagcctaccctgctgtgcaatgtcacccaggacatgctgtgcactcatgaagagactttcgggcctctggcaccagttatcaagttcgatacagaggaggaggctatagcaatcgctaacgcagctgatgttgggttagcaggttatttttactctcaagacccagcccagatctggagagtggcagagcagctggaagtgggcatggttggcgtcaacgaaggattaatttcctctgtggagtgcccttttggtggagtgaagcagtccggccttgggcgagaggggtccaagtatggcattgatgagtatctggaactcaagtatgtgtgttacgggggcttgtaggattctttggttctttaaaaaaatttaaaaggagacttatctacatatataggtacatgccatccattattttaaataaactaataggttttcagaattatgaatttttcagaactcatccagtccttgtaatcttaaacagatgcaaatcctacccctgcccttaatgtaactagggaccaatatgtgccacgtgcctgtggctgcagactcccagagaaccagcactgggtttacagaatgaggccctggctccccaccacagccccagctgcctcagagcaggcacagcacaaggcaggcccagccccatgggccgtcacaaaggcttgatcactgcctgggcagtggcacaaccatcccccatgtcgctacagaacatgggcccagagcaccttgaaggagacccttgactgtgactggcaggcaggtgaggggcacagcacccctccccggcatctgccagctcagcacagaagacaccgaatgtgcatctggaggtgttgcggcagaggtttgagtgaaccctctttcaaagacaataaatagcacagaattgtccgtgcttctgtgaggcacgaaggagcacct

SEQ ID NO: 106376 - DNA, 5248 bp, Homo sapiens
  Payload ID: 888
  Gene Symbol: ALDH5A1
  Gene Name: aldehyde dehydrogenase 5 family, member A1
  Uniprot ID: P51649
  ENST ID: ENST00000357578
  CDS Start-End: 146-1753
tgtggctctgcaaccttccgccagctcccacgctttccccgcgcgtccccggcgcctcctcgctcctcttgcttccccgcgacccctgcgttcccgtgcgcgcgcgcccgcttgcctgtttcctgtcgccgtcgttgcccgggccatggcgacctgcatttggctgcggagctgtggggcccggcgcctcgggtcgacgtttccaggctgccgcctccgcccccgcgccggcggcctggtccctgcctccgggcctgcgcccggcccggcccagctccgctgctacgctgggcgcctggcgggcctctctgcggcgctgctgcgcaccgacagcttcgtgggcggccgctggctcccggccgccgccaccttccccgtgcaagacccggccagcggcgccgctctgggcatggtagccgactgcggggtgcgagaggcccgcgccgccgtgcgcgctgcctacgaggctttctgccgctggagggaggtctccgccaaggagaggagttcattacttcggaagtggtacaatttaatgatacaaaataaggatgaccttgccagaataatcacagctgaaagtggaaagccactgaaggaggcacatggagaaattctctattccgcctttttcctagagtggttctctgaggaagcccgccgtgtttacggagacattatccacaccccggcaaaggacaggcgggccctggtcctcaagcagcccataggcgtggctgcagtcatcaccccgtggaatttccccagtgccatgatcacccggaaggtgggggccgccctggcagccggctgtactgtcgtggtgaagcctgccgaagacacgcccttctccgccctggccctggctgagcttgcaagccaggctgggattccttcaggtgtatacaatgttattccctgttctcgaaagaatgccaaggaagtaggggaggcaatttgtactgatcctctggtgtccaaaatttcctttactggttcaacaactacaggaaagatcctgttgcaccacgcagcaaactctgtgaaaagggtctctatggagctgggcggccttgctccatttatagtatttgacagtgccaacgtggaccaggctgtagcaggggccatggcatctaaatttaggaacactggacagacttgtgtttgctcaaaccaattcttggtgcaaaggggcatccatgatgcctttgtaaaagcattcgccgaggccatgaagaagaacctgcgcgtaggtaatggatttgaggaaggaactactcagggcccattaattaatgaaaaagcggtagaaaaggtggagaaacaggtgaatgatgccgtttctaaaggtgccaccgttgtgacaggtggaaaacgacaccaacttggaaaaaatttctttgagcctaccctgctgtgcaatgtcacccaggacatgctgtgcactcatgaagagactttcgggcctctggcaccagttatcaagttcgatacagaggaggaggctatagcaatcgctaacgcagctgatgttgggttagcaggttatttttactctcaagacccagcccagatctggagagtggcagagcagctggaagtgggcatggttggcgtcaacgaaggattaatttcctctgtggagtgcccttttggtggagtgaagcagtccggccttgggcgagaggggtccaagtatggcattgatgagtatctggaactcaagtatgtgtgttacgggggcttgtaggattctttggttctttaaaaaaatttaaaaggagacttatctacatatataggtacatgccatccattattttaaataaactaataggttttcagaattatgaatttttcagaactcatccagtccttgtaatcttaaacagatgcaaatcctacccctgcccttaatgtaactagggaccaatatgtgccacgtgcctgtggctgcagactcccagagaaccagcactgggtttacagaatgaggccctggctccccaccacagccccagctgcctcagagcaggcacagcacaaggcaggcccagccccatgggccgtcacaaaggcttgatcactgcctgggcagtggcacaaccatcccccatgtcgctacagaacatgggcccagagcaccttgaaggagacccttgactgtgactggcaggcaggtgaggggcacagcacccctccccggcatctgccagctcagcacagaagacaccgaatgtgcatctggaggtgttgcggcagaggtttgagtgaaccctctttcaaagacaataaatagcacagaattgtccgtgcttctgtgaggcacgaaggagcacctctccctattcctgaaccatattttaattgatgcctttattgtcccaaatttaccacttaaagaattctattttcatttctgtcctgtttgccacttcatttcatttccttgagtaaatgagctgaagtgtaaagcaaagaatagcagaagcagcttggtaggatggaaggcacgcagtggcatggcctggctccttccctgagtggccttgttgccttgggcgtgtgttcagcacctcccatcccatggatacagtggagattccatacaggccttacttagctccttgcgatactgtgagccagagagaaagtaaaagcacttcacaaaaaaatgaaaattctaaggacatacaagagccattgttacgagcagcaccgcccagcccttccttgcctactgtcagtggctttgccaagatgggaggaggccagtgcccacttgcccaccgacctgagcctgagtaagtggctgtcacctgagcctgttctttctgtcctggtgtggtgctgctccctcacctccaaaagagcaaaagtactttcaccacagtcaacccaaaagggaaagaatttctgtaattgccaacccactttgtagaagaggcatgagcccttgaatttcaggcaccttttatctaatgagagtttttacagctcatcattcaaataacgcacaaaaaacaaaagccgctatgaccggcgttgcctctcactttgaaagaaagactccgtaatcttaaacagatgcaaatccaattaggcggccaagtaggtggagacgaagcaccttcctttccccatctctgtctgtgtagactccacttacatcttgtggttattctgggttgtggaaggaaaatgtgaatgaaagtagtgctggatgcaattactcctgaaccccacctaggatttaacatccctcattgagccactgggaagctatggttgagtaactaaaggtctggcaagaccctgggcacacagggagctgcctagcatctggcctggagtgtactagccacattcccaaggtcccaaggagaaggaagagctgaaattcatctcctagtgacagtgccccggccctgtcaagaatcacatactcagcattttgacagttaatgtcttctctttatttgtgtagtttttaggtggttttatataacattttaattacttgtgatttagatgtatccatcctttttctattaagaatacaaatgctgggctgggcacagtggctcacgcctgtaatcccaacaccttgggaggccaaggcaggcagatcacgacatcaggagatcgagaccatcctggctaacacggtgaaaccccgtctctactaaaaatacaaaaaaaattagtcggatgtggtggcaggtgcctgtagtcccagctactctggaggctgaggcaggagaatggcgtgaacccaggaggcggagcttgcagtgagcagagatcacgccactgcactccagcctggatgacagagcgagactccgcctcaaaaaaagaatacaaatgctccaacattattttttataactctggattaccgatgctgagatgtgtgcaggaatacttccaaataaatttttaacattgtaagccagtagattctttggctgggtggcaaattttgagtcttcttgcatatttggctcatgggttcataaattgaggccagagactcattgtatatccttgatcaattttctaattaaaggaaatagcttattgtttagtaaaatggcccttggttgtgggaagaaagagaattatttttaactgaacgtttttgttgttttttaaataaagtagccatatgtaacgggattttaaaaatatatacattttacaacatggactagaaaaggaccattagatcaggggttggcaaactatggcccacgaatcaaacctggcctgccacctgtttttatacaacctgtgagctaagaatggtttatatgttttcaaatgattgggcagaaaatcaaaagaagaacaatatttcatgacacctgaaaattctatgaaattcagatttcagtgtccataaacaaaatgttattagagcatagccacacccattcatttatggtattgtctgggactgctttcttggcagagttgaatagttgggacagggacagtatagcctgcaaagcctaaaagatttactacttgtctccttaaagaaaaagtttgccagctcctgatctagaccaagagggagatattgaccttacttgcatttatccggcattatttcaacacctcctgtgaagaaagtacttttctggcatagctaccgtgagttctcagcaggaacttcccagcgatgataatgtacatgaaattagccacgtaacaagagtctatttgccttgaaaaaacaattatccttgaacttcctccagctatgcagggattctcattaaagagctgatctgcatctgtttatccattttagtagcttttaaatatgattttatgtgaagtgccatttctttattctactaaagagagacagcagaaataaagatcagaagcaaatgtgagcaaatctgttttactgttaacttcaattatgaacttgaaattgtgccacatgactttttcctctaaaaactggatcctagtgttttaattacctgtgtgcagctattttaaatagcattttacttgaataatatgtatgttgtcattgtttcatgctatactttgtgggataaaacttgggaatgagtgtggtaagaaatttataaagttttgcttttaaaacgtggacataactcatttttctagtttttgacaattgtgtgttttagtgtctagtctgcagagagctgtgtgattaataaacgtggaattaacagaatttcctctccctgta

SEQ ID NO: 106377 - DNA, 1699 bp, Homo sapiens
  Payload ID: 888
  Gene Symbol: ALDH5A1
  Gene Name: aldehyde dehydrogenase 5 family, member A1
  ENST ID: ENST00000491546
  CDS Start-End: 131-1654
ttccgccagctcccacgctttccccgcgcgtccccggcgcctcctcgctcctcttgcttccccgcgacccctgcgttcccgtgcgcgcgcgcccgcttgcctgtttcctgtcgccgtcgttgcccgggccatggcgacctgcatttggctgcggagctgtggggcccggcgcctcgggtcgacgtttccaggctgccgcctccgcccccgcgccggcggcctggtccctgcctccgggcctgcgcccggcccggcccagctccgctgctacgctgggcgcctggcgggcctctctgcggcgctgctgcgcaccgacagcttcgtgggcggccgctggctcccggccgccgccaccttccccgtgcaagacccggccagcggcgccgctctgggcatggtagccgactgcggggtgcgagaggcccgcgccgccgtgcgcgctgcctacgaggctttctgccgctggagggaggtctccgccaagggaaagccactgaaggaggcacatggagaaattctctattccgcctttttcctagagtggttctctgaggaagcccgccgtgtttacggagacattatccacaccccggcaaaggacaggcgggccctggtcctcaagcagcccataggcgtggctgcagtcatcaccccgtggaatttccccagtgccatgatcacccggaaggtgggggccgccctggcagccggctgtactgtcgtggtgaagcctgccgaagacacgcccttctccgccctggccctggctgagcttgcaagccaggctgggattccttcaggtgtatacaatgttattccctgttctcgaaagaatgccaaggaagtaggggaggcaatttgtactgatcctctggtgtccaaaatttcctttactggttcaacaactacaggaaagatcctgttgcaccacgcagcaaactctgtgaaaagggtctctatggagctgggcggccttgctccatttatagtatttgacagtgccaacgtggaccaggctgtagcaggggccatggcatctaaatttaggaacactggacagacttgtgtttgctcaaaccaattcttggtgcaaaggggcatccatgatgcctttgtaaaagcattcgccgaggccatgaagaagaacctgcgcgtaggtaatggatttgaggaaggaactactcagggcccattaattaatgaaaaagcggtagaaaaggtggagaaacaggtgaatgatgccgtttctaaaggtgccaccgttgtgacaggtggaaaacgacaccaacttggaaaaaatttctttgagcctaccctgctgtgcaatgtcacccaggacatgctgtgcactcatgaagagactttcgggcctctggcaccagttatcaagttcgatacagaggaggaggctatagcaatcgctaacgcagctgatgttgggttagcaggttatttttactctcaagacccagcccagatctggagagtggcagagcagctggaagtgggcatggttggcgtcaacgaaggattaatttcctctgtggagtgcccttttggtggagtgaagcagtccggccttgggcgagaggggtccaagtatggcattgatgagtatctggaactcaagtatgtgtgttacgggggcttgtaggattctttggttctttaaaaaaatttaaaaggagacttatctaca

SEQ ID NO: 106378 - DNA, 1869 bp, Homo sapiens
  Payload ID: 889
  Gene Symbol: ALDH6A1
  Gene Name: aldehyde dehydrogenase 6 family, member A1
  Uniprot ID: Q02252
  ENST ID: ENST00000350259
  CDS Start-End: 54-1622
agtgcttctgggcagtagaggcgcggggtgcggagctagggcggccgagagccatggcggcgctattggcggcggcggcagtgcgagcccggatcctgcaggtttcttccaaggtgaaatccagtcccacctggtattcagcatcttccttctcttcttcagtgccaactgtaaagctcttcattggtgggaaattcgttgaatccaaaagtgacaaatggatcgatatccacaacccagccaccaatgaggtcattggtcgggtccctcaggccaccaaggcagaaatggatgcagccattgcttcctgcaaacgtgcttttcctgcatgggcagacacttcagtattaagccgccagcagaaagaaattgccaagttaatcacattggaacaagggaagaccctagctgatgctgaaggagatgtatttcgaggccttcaggtggttgagcatgcctgtagtgtgacatccctcatgatgggagagaccatgccatccatcaccaaagacatggacctttattcctaccgtctgcctctgggagtgtgtgcaggcattgctccattcaattttcctgccatgatccccctttggatgtttcccatggccatggtgtgtggaaataccttcctaatgaaaccatctgagcgagtccctggagcaactatgcttcttgctaagttgctccaggattctggtgcccctgatggaacattaaacatcatccatggacagcatgaagctgtaaattttatttgcgatcatccggacatcaaagcaatcagctttgtgggatccaacaaggcaggagagtatatcttcgagagaggatcaagacatggcaagagggttcaagccaatatgggagccaagaaccatggggtagtcatgccagatgccaataaggaaaataccctgaaccagctggttggggcagcatttggagctgctggtcagcgctgcatggctctttcaacagcagtccttgtgggagaagccaagaagtggctgccagagctggtggagcatgccaaaaacctgagagtcaatgcaggagatcagcctggagctgatcttggccctctgatcactccccaggccaaagagcgagtctgtaatctgattgatagtggaacaaaggagggagcttccatccttcttgatggacgaaaaattaaagtgaaaggctatgaaaatggcaactttgttggaccaaccatcatctcgaatgtcaagccaaatatgacctgttacaaagaggagatttttggtccagttcttgtggttctggagacagaaacattggatgaagccatccagattgtaaataacaacccatatggaaatggaactgccatcttcaccaccaatggagccactgctcggaaatatgcccacttggtggatgttggacaggtgggagtgaatgtccccattccagtgcctttgccaatgttctcattcaccggctctcgatcctccttcaggggagacaccaatttctatggcaaacagggcatccaattctacactcagttaaagaccattacttctcagtggaaagaagaagatgctactctttcctcacctgctgttgtcatgcctaccatgggccgttagaaacaagtttgtttaagactgactccatcctgagtaatctccctttatttttgaccagcttcatttgtcagctttgctcagatcagatcgatgggattggaatacattgtaactaaaatcttcctcaggactattaacccccgcaaagtttctatagggaactgcctagtgtaacaatgaaaccagatttctcacttgctcttcatacttctattttgaggtaactgttgtaactatgaaatgctta

SEQ ID NO: 106379 - DNA, 5499 bp, Homo sapiens
  Payload ID: 889
  Gene Symbol: ALDH6A1
  Gene Name: aldehyde dehydrogenase 6 family, member A1
  Uniprot ID: Q02252
  ENST ID: ENST00000553458
  CDS Start-End: 100-1707
ccaatgaggaagcctggcaggatggagggcgaggcctggcagctgtagtgcttctgggcagtagaggcgcggggtgcggagctagggcggccgagagccatggcggcgctattggcggcggcggcagtgcgagcccggatcctgcaggtttcttccaaggtgaaatccagtcccacctggtattcagcatcttccttctcttcttcagtgccaactgtaaagctcttcattggtgggaaattcgttgaatccaaaagtgacaaatggatcgatatccacaacccagccaccaatgaggtcattggtcgggtccctcaggccaccaaggcagaaatggatgcagccattgcttcctgcaaacgtgcttttcctgcatgggcagacacttcagtattaagccgccagcaggtcttgctccgctatcaacaacttattaaagaaaacttgaaagaaattgccaagttaatcacattggaacaagggaagaccctagctgatgctgaaggagatgtatttcgaggccttcaggtggttgagcatgcctgtagtgtgacatccctcatgatgggagagaccatgccatccatcaccaaagacatggacctttattcctaccgtctgcctctgggagtgtgtgcaggcattgctccattcaattttcctgccatgatccccctttggatgtttcccatggccatggtgtgtggaaataccttcctaatgaaaccatctgagcgagtccctggagcaactatgcttcttgctaagttgctccaggattctggtgcccctgatggaacattaaacatcatccatggacagcatgaagctgtaaattttatttgcgatcatccggacatcaaagcaatcagctttgtgggatccaacaaggcaggagagtatatcttcgagagaggatcaagacatggcaagagggttcaagccaatatgggagccaagaaccatggggtagtcatgccagatgccaataaggaaaataccctgaaccagctggttggggcagcatttggagctgctggtcagcgctgcatggctctttcaacagcagtccttgtgggagaagccaagaagtggctgccagagctggtggagcatgccaaaaacctgagagtcaatgcaggagatcagcctggagctgatcttggccctctgatcactccccaggccaaagagcgagtctgtaatctgattgatagtggaacaaaggagggagcttccatccttcttgatggacgaaaaattaaagtgaaaggctatgaaaatggcaactttgttggaccaaccatcatctcgaatgtcaagccaaatatgacctgttacaaagaggagatttttggtccagttcttgtggttctggagacagaaacattggatgaagccatccagattgtaaataacaacccatatggaaatggaactgccatcttcaccaccaatggagccactgctcggaaatatgcccacttggtggatgttggacaggtgggagtgaatgtccccattccagtgcctttgccaatgttctcattcaccggctctcgatcctccttcaggggagacaccaatttctatggcaaacagggcatccaattctacactcagttaaagaccattacttctcagtggaaagaagaagatgctactctttcctcacctgctgttgtcatgcctaccatgggccgttagaaacaagtttgtttaagactgactccatcctgagtaatctccctttatttttgaccagcttcatttgtcagctttgctcagatcagatcgatgggattggaatacattgtaactaaaatcttcctcaggactattaacccccgcaaagtttctatagggaactgcctagtgtaacaatgaaaccagatttctcacttgctcttcatacttctattttgaggtaactgttgtaactatgaaatgcttatctgaaagtagtgcttaaacctgatttctaaaaattatcccattttctgatgatttgaaggggagaaaagccagtgtatgtaaagaaaatgttccagccaggcgcggtggctcacgcctgtaattccatcattttgggaggccacagtgggcagattgcttgagcccaggagttgaagaacgtggcgaaaccccgtatctattatttaaaaaaattgaaaaagtaaaaaaagaaaagggaaaaaaaattttttaaagaagatgttccaataattgcaagaagaactcttagatggggaaacaggacagaaataactcaccgcttttggttgatcctcaaacatagcgctacctaaatgccactgggagagacctcctgcaaagttttctttagcccctcttttatcccacaatacacaagatataatccatttttatatatcccaaagttgtggcaacagcttctttcttttctgctcaatgccactttgtttcctagtaattcatgaccactattaattctatcattgtcactgctcctgcttaagatcacttctcaaggatacctcagtaagcaatggataaatcaactttttgttatatgtgccaagtactaagtttcagggttctcttcagcaatcattaattaatacttcagccattaattcagatgcaaataattttcttttttcttttttttgagatggagtttcactcttgttgcccaggctggagtgcaatggcgtgatctcagctcaccgcaacctccgcctcccaggttcaagcgattctcctgcctcagcccccctagtagctgggattacaggcatgcgccaccacacccagctaattttgtatttttagtagagacggggtttctccgtgttggtcaggctggtctcgaactcctgacctcaggtgatccgcctgcctcggcctcccaaagtgctgggattacaggcatgagccaccacacccagccagatgcaaataattttcttagaaaattatttcaaaagttattttaggcccagaaatcaaggattgttccaaccatgaaaatgggtaagacacctgccttaagcaaatctaacctgctattacttgccaaattttatatattcttttctcttgcctgtatttctaattagtgatttgtttaatgaagaactcttcatgtagagcaattaactgggcctaagaaatttcgaagctttccatgacataaagtggttaaaaaaaaatgctttgacagtcttcttctgccattagttcaactgcctttacgcttttttttttttttttttttttgagatggagtttcactcttgttgcccaggctagagtgcaatggcgtgatcttggctcactgcaacctctgcctcccgggttcaagcaattctcctgcctcagcctcctgagtagctgggatttcaggcatacgccaccatgcctggctaattttgtatttttagtagagacagggtttctccatgttggtcaggctggtctcgaactcccgacctcaggtgatctgcctgccttggcctcccaaagtgctgggattacaggtgtgagccaccacccccagccgcctctatgctttttgtttctttgatatatctaaacttaaggtcagaacagaaattcatgtgctgaacagaatggattctttttgcagtaccaatccaattgaatcctctttttattttcctgcgtccttaccagtcactttgatagtgctaactaacctacactatgggggttattcatgaattaagtatgataaaaaaaaaaaagaccttgaaaatgttgtgtaccctgtggatttgaggcttattactaccacctggctggataaaatgtcaaaaccttcaatcacttaaggtgactggaacttttgtaaaatacacttatgatcctactgggccttttttttttttttttctgctttcctaaatatgaggcaatagaaatttataatttgagactacagtaccccttgttttagctcttatcacagctggcaactggtagtgattttttttgttgttgttttgttttgttttgagatggagtctcgctctgttgcccagggtggagtgcagtggcacgatctcggctcactgcaacctccacctcctgggttcaagtaattctcctgcctcagtctcccgagtagctgggattacaggtgcatgcccccacacccggataattttttgtacttttagtagagacagggtttcaccatgttagccaggatggtctcaatctcctgacctaatgatccgcccacctcggcctcccaaagtgctgggattacaggcgtgaaccaccgcacctggccctggtagtgatatttaatccaatccaacaactataggctgggttaaataaaaggtcattattgtctatattccaagtggaattaaatgtagtcacagagattcctaacattttccttatatttaagggaaatcacttctaaaaaaacacactaatcagaactgtgatgctctaattagaaacaactcatctggccaactatttgctgctcagagtttcttatttcttagatgaaaaaaactcatcagttatattcatgtgatcgcggctaaaaagtcagtattttctttttgttctaatgtggcttcatttgaaatttctcagattctacattgtactaattatgaataacaaattataaattaaaaactcttaaagagaaaaacttggcttaaaaaaatcatttcatatctccttataagcctttgtcctctaggttgtaatgactctgacttcccacctgtgatggaaagctaagagtcacaaggtcactatgtttactcttacgtaaaagatagtacacattttggctaggctgtttacttcaaaaggcaacctataggtttctacacaaaaagaggcacacatttgcatttgcattagtataatatgcatttgtacggatattgctttaaaaatttatgtaatctactaatgctatttattactcattccactgatccctgaagtctctcaactagtagagaaaataaccgtgatttagcaagaagcgacatggggaagggtgacaacaatatacattgtttgattagatacagactccttactgtgtcagactcctgaggttcttttggaatagtgggtagcaccacttcaccagaagagtctgatattgcaatttgctgggtgatgaagattttatcttgaagcttactttcatccctgcaataatgacaaaataacagaaccgtcaacaactctacacacatgaaacctggtttagaataacagacttgtcatattactttcaattagcacattcaagatgcccacaagaaccatcgtgttgggctcatgtttattacttaagcaagagagctcttacccaaattcctttgtttccccactgtcagaaacaacatagtctggaactggaggcctagaactctggttgtatttcctgtagtgggtaaaagtcaacaaagataatgaatgaggcagtgtctcctcatgcct

SEQ ID NO: 106380 - DNA, 1382 bp, Homo sapiens
  Payload ID: 889
  Gene Symbol: ALDH6A1
  Gene Name: aldehyde dehydrogenase 6 family, member A1
  ENST ID: ENST00000555126
  CDS Start-End: 397-1155
ggtggtgggtgcctataatcccagctgcttgggaggctgaggcagagaattgcttgaacctgggaggcggaggttgcagtgagccgaaattgtgccactgcactccagcctgggcaacagagcgagactccgtctcaaaaaaaaaaaaaaaaaaaaagaaaaagtaaaagaaaaacacaggaaaacttcaaatccatagcagtggggaaaggggaaatttgccatgttgagaatccatttgctcctttgtgagtgatcatttattttcttcttaaagctgtaaattttatttgcgatcatccggacatcaaagcaatcagctttgtgggatccaacaaggcaggagagtatatcttcgagagaggatcaagacatggcaagagggttcaagccaatatgggagccaagaaccatggggtagtcatgccagatgccaataaggaaaataccctgaaccagctggttggggcagcatttggagctgctggtcagcgctgcatggctctttcaacagcagtccttgtgggagaagccaagaagtggctgccagagctggtggagcatgccaaaaacctgagagtcaatgcaggagatcagcctggagctgatcttggccctctgatcactccccaggccaaagagcgagtctgtaatctgattgatagtggaacaaaggagggagcttccatccttcttgatggacgaaaaattaaagtgaaaggctatgaaaatggcaactttgttggaccaaccatcatctcgaatgtcaagccaaatatgacctgttacaaagaggagatttttggtccagttcttgtggttctggagacagaaacattggatgaagccatccagattgtaaataacaacccatatggaaatggaactgccatcttcaccaccaatggagccactgctcggaaatatgcccacttggtggatgttggacaggtgggagtgaatgtccccattccagtgcctttgccaatgttctcattcaccggctctcgatcctccttcaggggagacaccaatttctatggcaaacagggcatccaattctacactcagttaaagaccattacttctcagtggaaagaagaagatgctactctttcctcacctgctgttgtcatgcctaccatgggccgttagaaacaagtttgtttaagactgactccatcctgagtaatctccctttatttttgaccagcttcatttgtcagctttgctcagatcagatcgatgggattggaatacattgtaactaaaatcttcctcaggactattaacccccgcaaagtttctatagggaactgcctagtgtaacaatgaaaccagatttctcacttgctcttcatacttctattttgaggtaactg

SEQ ID NO: 106381 - DNA, 4964 bp, Homo sapiens
  Payload ID: 890
  Gene Symbol: ALDH7A1
  Gene Name: aldehyde dehydrogenase 7 family, member A1
  Uniprot ID: P49419
  ENST ID: ENST00000409134
  CDS Start-End: 221-1840
accagatggcagcagcccactcctccctgtagcactcccattgttccaggcaggattcagccgcaggctcctccggaagaccaggggcagacggggcggtggcggggtcgtgcccagtgggaggggtcgggtctgcccaatgggttctcccgggcggggggcggggctctatttcagcagctctcagggccttgggctcatcccgagtcccgggctcagtatgtggcgccttcctcgcgcgctgtgtgtgcacgctgcaaagaccagcaagctctctggaccttggagcaggcctgccgccttcatgtccactctcctcatcaatcagccccagtatgcgtggctgaaagagctggggctccgcgaggaaaacgagggcgtgtataatggaagctggggaggccggggagaggttattacgacctattgccctgctaacaacgagccaatagcaagagtccgacaggccagtgtggcagactatgaagaaactgtaaagaaagcaagagaagcatggaaaatctgggcagatattcctgctccaaaacgaggagaaatagtaagacagattggcgatgccttgcgggagaagatccaagtactaggaagcttggtgtctttggagatggggaaaatcttagtggaaggtgtgggtgaagttcaggagtatgtggatatctgtgactatgctgttggtttatcaaggatgattggaggacctatcttgccttctgaaagatctggccatgcactgattgagcagtggaatcccgtaggcctggttggaatcatcacggcattcaatttccctgtggcagtgtatggttggaacaacgccatcgccatgatctgtggaaatgtctgcctctggaaaggagctccaaccacttccctcattagtgtggctgtcacaaagataatagccaaggttctggaggacaacaagctgcctggtgcaatttgttccttgacttgtggtggagcagatattggcacagcaatggccaaagatgaacgagtgaacctgctgtccttcactgggagcactcaggtgggaaaacaggtgggcctgatggtgcaggagaggtttgggagaagtctgttggaacttggaggaaacaatgccattattgcctttgaagatgcagacctcagcttagttgttccatcagctctcttcgctgctgtgggaacagctggccagaggtgtaccactgcgaggcgactgtttatacatgaaagcatccatgatgaggttgtaaacagacttaaaaaggcctatgcacagatccgagttgggaacccatgggaccctaatgttctctatgggccactccacaccaagcaggcagtgagcatgtttcttggagcagtggaagaagcaaagaaagaaggtggcacagtggtctatgggggcaaggttatggatcgccctggaaattatgtagaaccgacaattgtgacaggtcttggccacgatgcgtccattgcacacacagagacttttgctccgattctctatgtctttaaattcaagaatgaagaagaggtctttgcatggaataatgaagtaaaacagggactttcaagtagcatctttaccaaagatctgggcagaatctttcgctggcttggacctaaaggatcagactgtggcattgtaaatgtcaacattccaacaagtggggctgagattggaggtgcctttggaggagaaaagcacactggtggtggcagggagtctggcagtgatgcctggaaacagtacatgagaaggtctacttgtactatcaactacagtaaagaccttcctctggcccaaggaatcaagtttcagtaaaggtgttttagatgaacatcccttaatttgaggtgttccagcagctgtttttggagaagacaaagaaaattaaagttttccctgaataaatgcattattatgactgtgacagtgactaatccccctatgaccccaaagccctgattaaatcaagagattccttttttaaaaatcaaaataaaattgttacaacatagccatagttactaaaagatgagttaggtggatttttattatgtcaactagttgtacatggctttttaaaagttaatgattattttgtaattagaaaaaaatagtacgtaccagggtaggaatttgggaaaatacagaaccgaggagaaaacagaagtctttgcagtagatacagggtgtctcctgaccaagtgaaggattcaggggcggggggtgaatattgcttgacattacccacctatggcatgtgttggatgtcgtgtgattgaaagggggatgcattcccctgtatgcttggaccacagttcagtattcatgtggaataacttgcagtgcttaaaatgacaacaggcattcatcacagttatggctcttgcttatgaaggctgtgtcaacttggaagagatttctggggtagacagattttgttcctgtgctggagtctgccacctgctggaggactctgaggccaaaattgcccgtgcagagttgtatagaaaatgcgtctggaggctgggcaaggtggcttacgcctataatcccagcactttgagaggccgaggcgggtggatcagtagaggctaggagtttgagaccagcctggccgatatcgtgaaaccccgtctttaccaaaaaatacaaaaattagcccagtgtggtggcaggcacctgtaatcccagctattagggaggctgaggcaggagaattgtgtgaacccaggaggcagaggttgcagtgagcctagattgtgccactgcctgggcaacagtgagatcctgtctacaaaaaaaaaaaaaaaaaaaagtgcatctggatttttttatacaaccttagaccaccttctttagctttaggcgtctgcggttgcccttggatctgttctcaatcctcagtgtgtgtggcagcatgtggtcatagagagctgggcaaagttcactttctctttgctgacagtctcaccttttctcactgggaagctgcacaggagcctttgggctggttcagcccagaggcccctgttctcctgccttcctggcattctctgctccccttctgcatggcacccctctactcctgccaggttagaatggagcagaggcctttgaacaagatgacatttgtagacaacctgatccatcaggatgtggagagatctggacaaatggcaaataatttggggttgaattatggcccagagaagtaagcaaatgaaaaactaaacaattataaatgtatctgggaagcaaaggtattcataatatgtcccatggccagctgcgagcagtatttaactagacatgctgttgtcaatattgaacatgaatcaagccaaatactgatatagctattgagagaaggttggcaggaagaaatcatgggtgagggtatgtgggagtgataatcttagctatagattttaggtaaaactgattctgaaagctttctttgaaacaaatttataatttttcttctacatgtttctagcacaaggactcaattttttttggttataatgttcattaaaacatatgccttcaatttgttcctctttgttcttttttgctgatttagcagatataaatcacttgttagtatttttaactatccaagttaaaatgtacatttgtaagtgttattactggtcttatatttgaaggtgcaaggggtcttgtgctgctcattactggttatcttgagcatttcataactgctgcctcctcctaaatcctgtgttccaaccgctactgctggcaatgcccagcctccattgtggatgcggggaattgtgttcagcatgcttgcttctgccacggcactaaagcctaacttgcttaggatcttgctgtacttggagagagcatccattcgctgagcctagcagccaggctcttgtgactccctgggaagtgggtgaagacctggctcctggctgcagcagtgaggaggcaggccctccaggtgaagacttctcacaatggagggaaggcagttttctcaaaggaaattgagtgctattatgtactctgcttcctactttctctttcagggtgggaatctgttaagcctcctctctctcttgctctgcaaccacagaacacttctttttttttggtgtctcagttttgcccacactggagtgcagtggtgcaatagtggctcactgcagcctccaactcctgggctcaatctatccttccacctcatgctccccagtagctgggactacaggtgcatgccactgtgcccagctgattattatttttttttgtaaagattgggtcatactacattgctcatgctcgtcttgaacttgtggcctcaagcgatcctcctgcctcagcctcttgagttgttgggattacaggagtgtgccaccatgcccagctctgtggaaaattctctgtggcattctgtctcctgaaaatgctgaagggaccaagagggctctgtgtccttcctcttctcttccctggcactttcagaccattttcttgttgccttcattctaacaaaggttgcagattggaaagctgatttggaatgctttttaagtgttttcagtttcaatatttttatgaaattcctatggtctccaacaaacttttttttttttttttttttctacacctggagcttatcctgcagaagcttcctgccaatgattgttttggaggaaattaaaagaaaaccaaacgaaacctctcctatccaaggggaagaactttatccccatattgattgaatataggattctagatttaaaatgttgtaggcagttagagtttgctctttttttttttctattggaaaggtccacaaatgttttattgacatttttgtctttaatccatttggatttggggtacatgttacgatttgtctacgttaatttcccttttaaaaataaaaataattcctcaactccaa

SEQ ID NO: 106382 - DNA, 1031 bp, Homo sapiens
  Payload ID: 890
  Gene Symbol: ALDH7A1
  Gene Name: aldehyde dehydrogenase 7 family, member A1
  ENST ID: ENST00000458249
  CDS Start-End: 1-294
atgtggcgccttcctcgcgcgctgtgtgtgcacgctgcaaagaccagcaagctctctggaccttggagcaggcctgccgccttcatgtccactctcctcatcaatcagccccagtatgcgtggctgaaagagctggggctccgcgaggaaaacgagggcgtgtataatggaagctggggaggccggggagagtttgcaagcttggacgtgccgaaatcttgccatgttgtacgttgggctgtgaactcctttgaggactggattttcagcatttctccattgcccagggcttaacaccgcgcctgatacccattactgctcaaaacaatgttttatagaatacaatggaaaggttattacgacctattgccctgctaacaacgagccaatagcaagagtccgacaggccagtgtggcagactatgaagaaactgtaaagaaagcaagagaagcatggaaaatctgggcagatattcctgctccaaaacgaggagaaatagtaagacagattggcgatgccttgcgggagaagatccaagtactaggaagcttggtgtctttggagatggggaaaatcttagtggaaggtgtgggtgaagttcaggagtatgtggatatctgtgactatgctgttggtttatcaaggatgattggaggacctatcttgccttctgaaagatctggccatgcactgattgagcagtggaatcccgtaggcctggttggaatcatcacggcattcaatttccctgtggcagtgtatggttggaacaacgccatcgccatgatctgtggaaatgtctgcctctggaaaggagctccaaccacttccctcattagtgtggctgtcacaaagataatagccaaggttctggaggacaacaagctgcctggtgcaatttgttccttgacttgtggtggagcagatattggcacagcaatggccaaagatgaacgagtgaacctgctgtccttcactgggagcactcaggtgggaaaacaggtgggcctgatggtgcaggagaggtttg

SEQ ID NO: 106383 - DNA, 4742 bp, Homo sapiens
  Payload ID: 890
  Gene Symbol: ALDH7A1
  Gene Name: aldehyde dehydrogenase 7 family, member A1
  Uniprot ID: P49419
  ENST ID: ENST00000447989
  CDS Start-End: 112-1620
gtagcactcccattgttccaggcaggattcagccgcaggctcctccggaagaccaggggcagacggggcggtggcggggtcgtgcccagtgggaggggtcgggtctgcccaatgggttctcccgggcggggggcggggctctatttcagcagctctcagggccttgggctcatcccgagtcccgggctcagtatgtggcgccttcctcgcgcgctgtgtgtgcacgctgcaaagaccagcaagctctctggaccttggagcaggcctgccgccttcatgtccactctcctcatcaatcagccccagtatgcgtggctgaaagagctggggctccgcgaggaaaacgagggcgtgtataatggaagctggggaggccggggagaggttattacgacctattgccctgctaacaacgagccaatagcaagagtccgacaggccagtgtggcagactatgaagaaactgtaaagaaagcaagagaagcatggaaaatctgggcagatattcctgctccaaaacgaggagaaatagtaagacagattggcgatgccttgcgggagaagatccaagtactaggaagcttggtgtctttggagatggggaaaatcttagtggaaggtgtgggtgaagttcaggagtatgtggatatctgtgactatgctgttggtttatcaaggatgattggaggacctatcttgccttctgaaagatctggccatgcactgattgagcagtggaatcccgtaggcctggttggaatcatcacggcattcaatttccctgtggcagtgtatggttggaacaacgccatcgccatgatctgtggaaatgtctgcctctggaaaggagctccaaccacttccctcattagtgtggctgtcacaaagataatagccaaggttctggaggacaacaagctgcctggtgcaatttgttccttgacttgtggtggagcagatattggcacagcaatggccaaagatgaacgagtgaacctgctgtccttcactgggagcactcaggtgggaaaacaggtgggcctgatggtgcaggagaggtttgggagaagtctgttggaacttggaggaaacaatgccattattgcctttgaagatgcagacctcagcttagttgttccatcagctctcttcgctgctgtgggaacagctggccagaggtgtaccactgcgaggcgactggttatggatcgccctggaaattatgtagaaccgacaattgtgacaggtcttggccacgatgcgtccattgcacacacagagacttttgctccgattctctatgtctttaaattcaagaatgaagaagaggtctttgcatggaataatgaagtaaaacagggactttcaagtagcatctttaccaaagatctgggcagaatctttcgctggcttggacctaaaggatcagactgtggcattgtaaatgtcaacattccaacaagtggggctgagattggaggtgcctttggaggagaaaagcacactggtggtggcagggagtctggcagtgatgcctggaaacagtacatgagaaggtctacttgtactatcaactacagtaaagaccttcctctggcccaaggaatcaagtttcagtaaaggtgttttagatgaacatcccttaatttgaggtgttccagcagctgtttttggagaagacaaagaaaattaaagttttccctgaataaatgcattattatgactgtgacagtgactaatccccctatgaccccaaagccctgattaaatcaagagattccttttttaaaaatcaaaataaaattgttacaacatagccatagttactaaaagatgagttaggtggatttttattatgtcaactagttgtacatggctttttaaaagttaatgattattttgtaattagaaaaaaatagtacgtaccagggtaggaatttgggaaaatacagaaccgaggagaaaacagaagtctttgcagtagatacagggtgtctcctgaccaagtgaaggattcaggggcggggggtgaatattgcttgacattacccacctatggcatgtgttggatgtcgtgtgattgaaagggggatgcattcccctgtatgcttggaccacagttcagtattcatgtggaataacttgcagtgcttaaaatgacaacaggcattcatcacagttatggctcttgcttatgaaggctgtgtcaacttggaagagatttctggggtagacagattttgttcctgtgctggagtctgccacctgctggaggactctgaggccaaaattgcccgtgcagagttgtatagaaaatgcgtctggaggctgggcaaggtggcttacgcctataatcccagcactttgagaggccgaggcgggtggatcagtagaggctaggagtttgagaccagcctggccgatatcgtgaaaccccgtctttaccaaaaaatacaaaaattagcccagtgtggtggcaggcacctgtaatcccagctattagggaggctgaggcaggagaattgtgtgaacccaggaggcagaggttgcagtgagcctagattgtgccactgcctgggcaacagtgagatcctgtctacaaaaaaaaaaaaaaaaaaaagtgcatctggatttttttatacaaccttagaccaccttctttagctttaggcgtctgcggttgcccttggatctgttctcaatcctcagtgtgtgtggcagcatgtggtcatagagagctgggcaaagttcactttctctttgctgacagtctcaccttttctcactgggaagctgcacaggagcctttgggctggttcagcccagaggcccctgttctcctgccttcctggcattctctgctccccttctgcatggcacccctctactcctgccaggttagaatggagcagaggcctttgaacaagatgacatttgtagacaacctgatccatcaggatgtggagagatctggacaaatggcaaataatttggggttgaattatggcccagagaagtaagcaaatgaaaaactaaacaattataaatgtatctgggaagcaaaggtattcataatatgtcccatggccagctgcgagcagtatttaactagacatgctgttgtcaatattgaacatgaatcaagccaaatactgatatagctattgagagaaggttggcaggaagaaatcatgggtgagggtatgtgggagtgataatcttagctatagattttaggtaaaactgattctgaaagctttctttgaaacaaatttataatttttcttctacatgtttctagcacaaggactcaattttttttggttataatgttcattaaaacatatgccttcaatttgttcctctttgttcttttttgctgatttagcagatataaatcacttgttagtatttttaactatccaagttaaaatgtacatttgtaagtgttattactggtcttatatttgaaggtgcaaggggtcttgtgctgctcattactggttatcttgagcatttcataactgctgcctcctcctaaatcctgtgttccaaccgctactgctggcaatgcccagcctccattgtggatgcggggaattgtgttcagcatgcttgcttctgccacggcactaaagcctaacttgcttaggatcttgctgtacttggagagagcatccattcgctgagcctagcagccaggctcttgtgactccctgggaagtgggtgaagacctggctcctggctgcagcagtgaggaggcaggccctccaggtgaagacttctcacaatggagggaaggcagttttctcaaaggaaattgagtgctattatgtactctgcttcctactttctctttcagggtgggaatctgttaagcctcctctctctcttgctctgcaaccacagaacacttctttttttttggtgtctcagttttgcccacactggagtgcagtggtgcaatagtggctcactgcagcctccaactcctgggctcaatctatccttccacctcatgctccccagtagctgggactacaggtgcatgccactgtgcccagctgattattatttttttttgtaaagattgggtcatactacattgctcatgctcgtcttgaacttgtggcctcaagcgatcctcctgcctcagcctcttgagttgttgggattacaggagtgtgccaccatgcccagctctgtggaaaattctctgtggcattctgtctcctgaaaatgctgaagggaccaagagggctctgtgtccttcctcttctcttccctggcactttcagaccattttcttgttgccttcattctaacaaaggttgcagattggaaagctgatttggaatgctttttaagtgttttcagtttcaatatttttatgaaattcctatggtctccaacaaacttttttttttttttttttttctacacctggagcttatcctgcagaagcttcctgccaatgattgttttggaggaaattaaaagaaaaccaaacgaaacctctcctatccaaggggaagaactttatccccatattgattgaatataggattctagatttaaaatgttgtaggcagttagagtttgctctttttttttttctattggaaaggtccacaaatgttttattgacatttttgtctttaatccatttggatttggggtacatgttacgatttgtctacgttaatttcccttttaaaaataaaaataattcctcaactcc

SEQ ID NO: 106384 - DNA, 586 bp, Homo sapiens
  Payload ID: 890
  Gene Symbol: ALDH7A1
  Gene Name: aldehyde dehydrogenase 7 family, member A1
  ENST ID: ENST00000412186
  CDS Start-End: 165-398
tcagccgcaggctcctccggaagaccaggggcagacggggcggtggcggggtcgtgcccagtgggaggggtcgggtctgcccaatgggttctcccgggcggggggcggggctctatttcagcagctctcagggccttgggctcatcccgagtcccgggctcagtatgtggcgccttcctcgcgcgctgtgtgtgcacgctgcaaagaccagcaagctctctggaccttggagcaggcctgccgccttcatgtccactctcctcatcaatcagccccagtatgcgtggctgaaagagctggggctccgcgaggaaaacgagggcgtgtataatggaagctggggaggccggggagagggattacgttttctatacatgatcatcatccttttgttttaaggttattacgacctattgccctgctaacaacgagccaatagcaagagtccgacaggccagtgtggcagactatgaagaaactgtaaagaaagcaagagaagcatggaaaatctgggcagatattcctgctccaaaacgaggagaaatagtaagacagattggcgatgccttgcgggagaagatccaag

SEQ ID NO: 106385 - DNA, 719 bp, Homo sapiens
  Payload ID: 890
  Gene Symbol: ALDH7A1
  Gene Name: aldehyde dehydrogenase 7 family, member A1
  ENST ID: ENST00000510111
  CDS Start-End: 1-719
cgccttcctcgcgcgctgtgtgtgcacgctgcaaagaccagcaagctctctggaccttggagcaggcctgccgccttcatgtccactctcctcatcaatcagccccagtatgcgtggctgaaagagctggggctccgcgaggaaaacgagggcgtgtataatggaagctggggaggccggggagaggttattacgacctattgccctgctaacaacgagccaatagcaagagtccgacaggccagtgtggcagactatgaagaaactgtaaagaaagcaagagaagcatggaaaatctgggcagatgtgtctttggagatggggaaaatcttagtggaaggtgtgggtgaagttcaggagtatgtggatatctgtgactatgctgttggtttatcaaggatgattggaggacctatcttgccttctgaaagatctggccatgcactgattgagcagtggaatcccgtaggcctggttggaatcatcacggcattcaatttccctgtggcagtgtatggttggaacaacgccatcgccatgatctgtggaaatgtctgcctctggaaaggagctccaaccacttccctcattagtgtggctgtcacaaagataatagccaaggttctggaggacaacaagctgcctggtgcaatttgttccttgacttgtggtggagcagatattggcacagcaatggccaaagatgaacgagtgaacct

SEQ ID NO: 106386 - DNA, 1935 bp, Homo sapiens
  Payload ID: 890
  Gene Symbol: ALDH7A1
  Gene Name: aldehyde dehydrogenase 7 family, member A1
  ENST ID: ENST00000553117
  CDS Start-End: 139-1566
aggggcagacggggcggtggcggggtcgtgcccagtgggaggggtcgggtctgcccaatgggttctcccgggcggggggcggggctctatttcagcagctctcagggccttgggctcatcccgagtcccgggctcagtatgtggcgccttcctcgcgcgctgtgtgtgcacgctgcaaagaccagcaagctctctggaccttggagcaggcctgccgccttcatgtccactctcctcatcaatcagccccagtatgcgtggctgaaagagctggggctccgcgaggaaaacgagggcgtgtataatggaagctggggaggccggggagaggttattacgacctattgccctgctaacaacgagccaatagcaagagtccgacaggccagtgtggcagactatgaagaaactgtaaagaaagcaagagaagcatggaaaatctgggcagatattcctgctccaaaacgaggagaaatagtaagacagattggcgatgccttgcgggagaagatccaagtactaggaagcttggtgtctttggagatggggaaaatcttagtggaaggtgtgggtgaagttcaggagtatgtggatatctgtgactatgctgttggtttatcaaggatgattggaggacctatcttgccttctgaaagatctggccatgcactgattgagcagtggaatcccgtaggcctggttggaatcatcacggcattcaatttccctgtggcagtgtatggttggaacaacgccatcgccatgatctgtggaaatgtctgcctctggaaaggagctccaaccacttccctcattagtgtggctgtcacaaagataatagccaaggttctggaggacaacaagctgcctggtgcaatttgttccttgacttgtggtggagcagatattggcacagcaatggccaaagatgaacgagtgaacctgctgtccttcactgggagcactcaggtgggaaaacaggtgggcctgatggtgcaggagaggtttgggagaagtctgttggaacttggaggaaacaatgccattattgcctttgaagatgcagacctcagcttagttgttccatcagctctcttcgctgctgtgggaacagctggccagaggtgtaccactgcgaggcgactggttatggatcgccctggaaattatgtagaaccgacaattgtgacaggtcttggccacgatgcgtccattgcacacacagagacttttgctccgattctctatgtctttaaattcaagaatgaagaagaggtctttgcatggaataatgaagtaaaacagggactttcaagtagcatctttaccaaagatctgggcagaatctttcgctggcttggacctaaaggatcagactgtggcattgtaaatgtcaacattccaacaagtggggctgagattggaggtgcctttggaggagaaaagcacactggtggtggcagggagtctggcagtgatgcctggaaacagtacatgagaaggtctacttgtactatcaactacagtaaagaccttcctctggcccaaggaatcaagtttcagtaaaggtgttttagatgaacatcccttaatttgaggtgttccagcagctgtttttggagaagacaaagaaaattaaagttttccctgaataaatgcattattatgactgtgacagtgactaatccccctatgaccccaaagccctgattaaatcaagagattccttttttaaaaatcaaaataaaattgttacaacatagccatagttactaaaagatgagttaggtggatttttattatgtcaactagttgtacatggctttttaaaagttaatgattattttgtaattagaaaaaaatagtacgtaccagggtaggaatttgggaaaatacagaaccgaggagaaaacagaagtctttgcagtagataca

SEQ ID NO: 106387 - DNA, 446 bp, Homo sapiens
  Payload ID: 890
  Gene Symbol: ALDH7A1
  Gene Name: aldehyde dehydrogenase 7 family, member A1
  ENST ID: ENST00000509270
  CDS Start-End: 22-446
atcccgagtcccgggctcagtatgtggcgccttcctcgcgcgctgtgtgtgcacgctgcaaagaccagcaagctctctggaccttggagcaggcctgccgccttcatgtccactctcctcatcaatcagccccagtatgcgtggctgaaagagctggggctccgcgaggaaaacgagggcgtgtataatggaagctggggaggccggggagagattcctgctccaaaacgaggagaaatagtaagacagattggcgatgccttgcgggagaagatccaagtactaggaagcttggtgtctttggagatggggaaaatcttagtggaaggtgtgggtgaagttcaggagtatgtggatatctgtgactatgctgttggtttatcaaggatgattggaggacctatcttgccttctgaaagatctggccatgcactgattgagcagtg

SEQ ID NO: 106388 - DNA, 970 bp, Homo sapiens
  Payload ID: 890
  Gene Symbol: ALDH7A1
  Gene Name: aldehyde dehydrogenase 7 family, member A1
  ENST ID: ENST00000413020
  CDS Start-End: 21-905
tcccgagtcccgggctcagtatgtggcgccttcctcgcgcgctgtgtgtgcacgctgcaaagaccagcaagctctctggaccttggagcaggcctgccgccttcatgtccactctcctcatcaatcagccccagtatgcgtggctgaaagagctggggctccgcgaggaaaacgagggcgtgtataatggaagctggggaggccggggagaggttattacgacctattgccctgctaacaacgagccaatagcaagagtccgacaggccagtgtggcagactatgaagaaactgtaaagaaagcaagagaagcatggaaaatctgggcagatattcctgctccaaaacgaggagaaatagtaagacagattggcgatgccttgcgggagaagatccaagtactaggaagcttggtgtctttggagatggggaaaatcttagtggaaggtgtgggtgaagttcaggagtatgtggatatctgtgactatgctgttggtttatcaaggatgattggaggacctatcttgccttctgaaagatctggccatgcactgattgagcagtggaatcccgtaggcctggttggaatcatcacggcattcaatttccctgtggcagtgtatggttggaacaacgccatcgccatgatctgtggaaatgtctgcctctggaaaggagctccaaccacttccctcattagtgtggctgtcacaaagataatagccaaggttctggaggacaacaagctgcctggtgcaatttgttccttgacttgtggtggagcagatattggcacagcaatggccaaagatgaacgagtgaacctgctgtccttcactgggagcactcaggtgggaaaacaggtgggcctgatggtgcaggagaggtttgagcaatggaaatgagaagatactctgctgttgtcacatatgctcctgatatcacaaatgaataaaagttattcacatgg

SEQ ID NO: 106389 - DNA, 526 bp, Homo sapiens
  Payload ID: 890
  Gene Symbol: ALDH7A1
  Gene Name: aldehyde dehydrogenase 7 family, member A1
  ENST ID: ENST00000509459
  CDS Start-End: 1-83
aagagctggggctccgcgaggaaaacgagggcgtgtataatggaagctggggaggccggggagaggatctggccatgcactgattgagcagtggaatcccgtaggcctggttggaatcatcacggcattcaatttccctgtggcagtgtatggttggaacaacgccatcgccatgatctgtggaaatgtctgcctctggaaaggagctccaaccacttccctcattagtgtggctgtcacaaagataatagccaaggttctggaggacaacaagctgcctggtgcaatttgttccttgacttgtggtggagcagatattggcacagcaatggccaaagatgaacgagtgaacctgctgtccttcactgggagcactcaggtgggaaaacaggtgggcctgatggtgcaggagaggtttgggagaagtctgttggaacttggaggaaacaatgccattattgctctcttcgctgctgtgggaacagctggccagaggtgtaccactgcgaggcgactgtttatacat

SEQ ID NO: 106390 - DNA, 906 bp, Homo sapiens
  Payload ID: 890
  Gene Symbol: ALDH7A1
  Gene Name: aldehyde dehydrogenase 7 family, member A1
  ENST ID: ENST00000503281
  CDS Start-End: 1-124
gtccactctcctcatcaatcagccccagtatgcgtggctgaaagagctggggctccgcgaggaaaacgagggcgtgtataatggaagctggggaggccggggagaggatctggccatgcactgattgagcagtggaatcccgtaggcctggttggaatcatcacggcattcaatttccctgtggcagtgtatggttggaacaacgccatcgccatgatctgtggaaatgtctgcctctggaaaggagctccaaccacttccctcattagtgtggctgtcacaaagataatagccaaggttctggaggacaacaagctgcctggtgcaatttgttccttgacttgtggtggagcagatattggcacagcaatggccaaagatgaacgagtgaacctgctgtccttcactgggagcactcaggtgggaaaacaggtgggcctgatggtgcaggagaggtttgggagaagtctgttggaacttggaggaaacaatgccattattgcctttgaagatgcagacctcagcttagttgttccatcagctctcttcgctgctgtgggaacagctggccagaggtgtaccactgcgaggcgactgtttatacatgaaagcatccatgatgaggttgtaaacagacttaaaaaggcctatgcacagatccgagttgggaacccatgggaccctaatgttctctatgggccactccacaccaagcaggcagtgagcatgtttcttggagcagtggaagaagcaaagaaagaaggtggcacagtggtctatgggggcaaggttatggatcgccctggaaattatgtagaaccgacaattgtgacaggtcttggccacgatgcgtccattgcacacacagagacttttgctccgattctctatgtctttaaattcaag

SEQ ID NO: 106391 - DNA, 2558 bp, Homo sapiens
  Payload ID: 891
  Gene Symbol: ALDH8A1
  Gene Name: aldehyde dehydrogenase 8 family, member A1
  Uniprot ID: Q9H2A2
  ENST ID: ENST00000265605
  CDS Start-End: 70-1533
agtccagacagtggtggggacaacctgagtgctcagtcgtaaagaggaaaggcagaatttttccttgctatggctggaacaaacgcacttttgatgctggaaaacttcatagatggaaaatttttaccttgtagctcatatatagattcttacgacccatcaacaggggaagtgtattgcagagtgccaaatagtggaaaagacgagatcgaagccgcggtcaaggccgccagagaagcctttcccagctggtcatcccgcagcccccaggagcgctcacgggtcctgaaccaggtggcggatttgctggagcagtccctggaggagtttgcccaggccgagtctaaagaccaagggaaaaccttagcactggcaagaaccatggacattccccggtctgtgcagaacttcaggttcttcgcttcctccagcctgcaccacacgtcagagtgcacgcagatggaccacctgggctgcatgcactacacggtgcgggccccggtgggagtcgctggtctgatcagcccctggaatttgccactctacttgctgacctggaagatagctccagcgatggctgcagggaacactgtgatagccaagcccagtgagctgacttcagtgactgcgtggatgttgtgcaaactcctggataaagcaggtgttccaccaggtgtggtcaatattgtgtttggaaccgggcccagggtgggtgaggccctggtgtcccacccagaggtgcccctgatctccttcaccgggagccagcccaccgctgagcggatcacccagctgagcgctccccactgcaaaaagctctccctggagctggggggcaagaatcctgccatcatctttgaggacgccaacctggatgagtgcattccggcaaccgtcaggtccagctttgccaaccagggtgaaatctgtctctgtaccagcaggatctttgtccagaagagcatctatagtgaatttttaaagagatttgtagaagctaccagaaagtggaaagtcggcattccctctgatccactggtgagcataggtgctctgataagtaaagcacatttggagaaagtcagaagttacgtcaagagagctcttgctgaaggtgcccaaatttggtgcggtgagggagtggataagttgagcctccctgccaggaaccaggcaggctactttatgcttcccacggtgataacagacattaaggatgaatcctgctgcatgacggaagagatatttggtccagtgacgtgtgtcgtcccctttgatagtgaagaggaggtgattgaaagagccaacaacgttaagtatgggctggcggctaccgtgtggtccagcaatgtggggcgcgtccaccgggtggctaagaagctgcagtctggcttggtctggaccaactgctggctcatcagggagctgaaccttcctttcggggggatgaagagttctggaataggtagagagggagccaaggactcttacgacttcttcactgagatcaaaaccatcaccgttaaacactgatctttgctaatggtggagccactatggccaatgcctggctgcaggcatcagttgttcaatgtggtagatgaaaatcatggcatgaattccagctatgccttgacttggcagaaggttatctctagcttatcctcagttcttagtaactttacccactagtgaagagatactgtctattttcaatgtggactcggaaaaaaagacttataagtaggaagatagaacaatgatgccagttgtcaggctcctcccaggttatgttttcatagtgtttctttcatcatcttcattgaactcttgggaatctccagataatcagattatttcatttggtaaattttaaaaaatatgcaatcaggcacagtgcctcatgcctataatcccagcactttgggaggccaaggtgggtggatcacttgagttcaggagttcgagatcagcctaggcaacatggtgaaatcctgtctttaccaaaagtttaaaaattagcttggtgtggtgccctctgcctatagccccagctacttgggaggctgaggtgggaggatcgcttgagcccaggcggttgaggctgcagtgagccatgatcattccactgcatttcagcctgggggatacagtgagaccttgtctttaaaaaaaaaatgctgcaaaaccaaaaataaatagccataatttgccatctttggagagattatggagataatctccttgtctattagccactagcatggctaattgatcattgattggacctcattacataagggggctgtggacgtctttggaatttgttaggggaaggctatgtggtaagctctactaaatgtatctgtacaaggatgaagaaaaacaaaataactactacttttggaggaaacttggaacaagaagagtacatagtttgatccattcctacggtcgagtctaatcaattccatttcttagtgtatgcatctaatgaggcttacaacttgctaaccccaaaagaagcaataaatgttaagcaattttagtaaccagta

SEQ ID NO: 106392 - DNA, 1634 bp, Homo sapiens
  Payload ID: 891
  Gene Symbol: ALDH8A1
  Gene Name: aldehyde dehydrogenase 8 family, member A1
  Uniprot ID: Q9H2A2
  ENST ID: ENST00000349305
  CDS Start-End: 37-519
cagtcgtaaagaggaaaggcagaatttttccttgctatggctggaacaaacgcacttttgatgctggaaaacttcatagatggaaaatttttaccttgtagctcatatatagattcttacgacccatcaacaggggaagtgtattgcagagtgccaaatagtggaaaagacgagatcgaagccgcggtcaaggccgccagagaagcctttcccagctggtcatcccgcagcccccaggagcgctcacgggtcctgaaccaggtggcggatttgctggagcagtccctggaggagtttgcccaggccgagtctaaagaccaagggaaaaccttagcactggcaagaaccatggacattccccggtctgtgcagaacttcaggttcttcgcttcctccagcctgcaccacacgtcagagtgcacgcagatggaccacctgggctgcatgcactacacggtgcgggccccggtgggagtcgttccagggtacacgtgcaggacgtgcaggtttgttacatagctggtctgatcagcccctggaatttgccactctacttgctgacctggaagatagctccagcgatggctgcagggaacactgtgatagccaagcccagtgagctgacttcagtgactgcgtggatgttgtgcaaactcctggataaagcaggtgttccaccaggtgtggtcaatattgtgtttggaaccgggcccagggtgggtgaggccctggtgtcccacccagaggtgcccctgatctccttcaccgggagccagcccaccgctgagcggatcacccagctgagcgctccccactgcaaaaagctctccctggagctggggggcaagaatcctgccatcatctttgaggacgccaacctggatgagtgcattccggcaaccgtcaggtccagctttgccaaccaggtcagaagttacgtcaagagagctcttgctgaaggtgcccaaatttggtgcggtgagggagtggataagttgagcctccctgccaggaaccaggcaggctactttatgcttcccacggtgataacagacattaaggatgaatcctgctgcatgacggaagagatatttggtccagtgacgtgtgtcgtcccctttgatagtgaagaggaggtgattgaaagagccaacaacgttaagtatgggctggcggctaccgtgtggtccagcaatgtggggcgcgtccaccgggtggctaagaagctgcagtctggcttggtctggaccaactgctggctcatcagggagctgaaccttcctttcggggggatgaagagttctggaataggtagagagggagccaaggactcttacgacttcttcactgagatcaaaaccatcaccgttaaacactgatctttgctaatggtggagccactatggccaatgcctggctgcaggcatcagttgttcaatgtggtagatgaaaatcatggcatgaattccagctatgccttgacttggcagaaggttatctctagcttatcctcagttcttagtaactttacccactagtgaagagatactgtctattttcaatgtggactcggaaaaaaagacttataagtaggaagatagaacaatgatgccagttgtcaggctcctcccagg

SEQ ID NO: 106393 - DNA, 2383 bp, Homo sapiens
  Payload ID: 891
  Gene Symbol: ALDH8A1
  Gene Name: aldehyde dehydrogenase 8 family, member A1
  Uniprot ID: Q9H2A2
  ENST ID: ENST00000367845
  CDS Start-End: 63-1364
acagtggtggggacaacctgagtgctcagtcgtaaagaggaaaggcagaatttttccttgctatggctggaacaaacgcacttttgatgctggaaaacttcatagatggaaaatttttaccttgtagctcatatatagattcttacgacccatcaacaggggaagtgtattgcagagtgccaaatagtggaaaagacgagatcgaagccgcggtcaaggccgccagagaagcctttcccagctggtcatcccgcagcccccaggagcgctcacgggtcctgaaccaggtggcggatttgctggagcagtccctggaggagtttgcccaggccgagtctaaagaccaagggaaaaccttagcactggcaagaaccatggacattccccggtctgtgcagaacttcaggttcttcgcttcctccagcctgcaccacacgtcagagtgcacgcagatggaccacctgggctgcatgcactacacggtgcgggccccggtgggagtcgctggtctgatcagcccctggaatttgccactctacttgctgacctggaagatagctccagcgatggctgcagggaacactgtgatagccaagcccagtgagctgacttcagtgactgcgtggatgttgtgcaaactcctggataaagcaggtgttccaccaggtgtggtcaatattgtgtttggaaccgggcccagggtgggtgaggccctggtgtcccacccagaggtgcccctgatctccttcaccgggagccagcccaccgctgagcggatcacccagctgagcgctccccactgcaaaaagctctccctggagctggggggcaagaatcctgccatcatctttgaggacgccaacctggatgagtgcattccggcaaccgtcaggtccagctttgccaaccaggtcagaagttacgtcaagagagctcttgctgaaggtgcccaaatttggtgcggtgagggagtggataagttgagcctccctgccaggaaccaggcaggctactttatgcttcccacggtgataacagacattaaggatgaatcctgctgcatgacggaagagatatttggtccagtgacgtgtgtcgtcccctttgatagtgaagaggaggtgattgaaagagccaacaacgttaagtatgggctggcggctaccgtgtggtccagcaatgtggggcgcgtccaccgggtggctaagaagctgcagtctggcttggtctggaccaactgctggctcatcagggagctgaaccttcctttcggggggatgaagagttctggaataggtagagagggagccaaggactcttacgacttcttcactgagatcaaaaccatcaccgttaaacactgatctttgctaatggtggagccactatggccaatgcctggctgcaggcatcagttgttcaatgtggtagatgaaaatcatggcatgaattccagctatgccttgacttggcagaaggttatctctagcttatcctcagttcttagtaactttacccactagtgaagagatactgtctattttcaatgtggactcggaaaaaaagacttataagtaggaagatagaacaatgatgccagttgtcaggctcctcccaggttatgttttcatagtgtttctttcatcatcttcattgaactcttgggaatctccagataatcagattatttcatttggtaaattttaaaaaatatgcaatcaggcacagtgcctcatgcctataatcccagcactttgggaggccaaggtgggtggatcacttgagttcaggagttcgagatcagcctaggcaacatggtgaaatcctgtctttaccaaaagtttaaaaattagcttggtgtggtgccctctgcctatagccccagctacttgggaggctgaggtgggaggatcgcttgagcccaggcggttgaggctgcagtgagccatgatcattccactgcatttcagcctgggggatacagtgagaccttgtctttaaaaaaaaaatgctgcaaaaccaaaaataaatagccataatttgccatctttggagagattatggagataatctccttgtctattagccactagcatggctaattgatcattgattggacctcattacataagggggctgtggacgtctttggaatttgttaggggaaggctatgtggtaagctctactaaatgtatctgtacaaggatgaagaaaaacaaaataactactacttttggaggaaacttggaacaagaagagtacatagtttgatccattcctacggtcgagtctaatcaattccatttcttagtgtatgcatctaatgaggcttacaacttgctaaccccaaaagaagcaataaatgttaagcaattttagtaa

SEQ ID NO: 106394 - DNA, 1587 bp, Homo sapiens
  Payload ID: 891
  Gene Symbol: ALDH8A1
  Gene Name: aldehyde dehydrogenase 8 family, member A1
  Uniprot ID: Q9H2A2
  ENST ID: ENST00000367847
  CDS Start-End: 32-1345
gtaaagaggaaaggcagaatttttccttgctatggctggaacaaacgcacttttgatgctggaaaacttcatagatggaaaatttttaccttgtagctcatatatagattcttacgacccatcaacaggggaagtgtattgcagagtgccaaatagtggaaaagacgagatcgaagccgcggtcaaggccgccagagaagcctttcccagctggtcatcccgcagcccccaggagcgctcacgggtcctgaaccaggtggcggatttgctggagcagtccctggaggagtttgcccaggccgagtctaaagaccaagggaaaaccttagcactggcaagaaccatggacattccccggtctgtgcagaacttcaggttcttcgcttcctccagcctgcaccacacgtcagagtgcacgcagatggaccacctgggctgcatgcactacacggtgcgggccccggtgggagtcggtgttccaccaggtgtggtcaatattgtgtttggaaccgggcccagggtgggtgaggccctggtgtcccacccagaggtgcccctgatctccttcaccgggagccagcccaccgctgagcggatcacccagctgagcgctccccactgcaaaaagctctccctggagctggggggcaagaatcctgccatcatctttgaggacgccaacctggatgagtgcattccggcaaccgtcaggtccagctttgccaaccagggtgaaatctgtctctgtaccagcaggatctttgtccagaagagcatctatagtgaatttttaaagagatttgtagaagctaccagaaagtggaaagtcggcattccctctgatccactggtgagcataggtgctctgataagtaaagcacatttggagaaagtcagaagttacgtcaagagagctcttgctgaaggtgcccaaatttggtgcggtgagggagtggataagttgagcctccctgccaggaaccaggcaggctactttatgcttcccacggtgataacagacattaaggatgaatcctgctgcatgacggaagagatatttggtccagtgacgtgtgtcgtcccctttgatagtgaagaggaggtgattgaaagagccaacaacgttaagtatgggctggcggctaccgtgtggtccagcaatgtggggcgcgtccaccgggtggctaagaagctgcagtctggcttggtctggaccaactgctggctcatcagggagctgaaccttcctttcggggggatgaagagttctggaataggtagagagggagccaaggactcttacgacttcttcactgagatcaaaaccatcaccgttaaacactgatctttgctaatggtggagccactatggccaatgcctggctgcaggcatcagttgttcaatgtggtagatgaaaatcatggcatgaattccagctatgccttgacttggcagaaggttatctctagcttatcctcagttcttagtaactttacccactagtgaagagatactgtctattttcaatgtggactcggaaaaaaagacttataagtaggaagatagaacaatgatgccagttgtca

SEQ ID NO: 106395 - DNA, 489 bp, Homo sapiens
  Payload ID: 891
  Gene Symbol: ALDH8A1
  Gene Name: aldehyde dehydrogenase 8 family, member A1
  ENST ID: ENST00000534012
  CDS Start-End: 444-489
attagctgggcatggtggcacatgcctgtaatcccagctgctcaggaggctgaggtgggagaatcacttgaaccccggaggcagaggttgcagtgagccaaaattgcgccactgccctccaggctgggctacagagtgagaatccatctaaaaaacaaaacaaaacaaaacaaaaatgaggtgtgtggagacctgaggattctggttttgtccatcccccaaggactaacagctttaaggtgaccctttctcccatttgctcctcaaagatcgaagccgcggtcaaggccgccagagaagcctttcccagctggtcatcccgcagcccccaggagcgctcacgggtcctgaaccaggtggcggatttgctggagcagtccctggaggagtttgcccaggccgagtctaaagaccaagggaaaaccttagcactggcaagaaccatggacattccccggtctgtgcagaacttcaggttcttcgcttcct

SEQ ID NO: 106396 - DNA, 404 bp, Homo sapiens
  Payload ID: 891
  Gene Symbol: ALDH8A1
  Gene Name: aldehyde dehydrogenase 8 family, member A1
  ENST ID: ENST00000460753
  CDS Start-End: 1-404
gaatttttaaagagatttgtagaagctaccagaaagtggaaagtcggcattccctctgatccactggtcagaagttacgtcaagagagctcttgctgaaggtgcccaaatttggtgcggtgagggagtggataagttgagcctccctgccaggaaccaggcaggctactttatgcttcccacggtgataacagacattaaggatgaatcctgctgcatgacggaagagatatttggtccagtgacgtgtgtcgtcccctttgatagtgaagaggaggtgattgaaagagccaacaacgttaagtatgggctggcggctaccgtgtggtccagcaatgtggggcgcgtccaccgggtggctaagaagctgcagtctggcttggtctggaccaactgctggctcat

SEQ ID NO: 106397 - DNA, 2696 bp, Homo sapiens
  Payload ID: 892
  Gene Symbol: ALDH9A1
  Gene Name: aldehyde dehydrogenase 9 family, member A1
  Uniprot ID: P49189
  ENST ID: ENST00000354775
  CDS Start-End: 306-1862
ggatcctaggatgcttacatgcaatgatgaacccgaaaacacttgcaaagtgctacgcaaatattgatcacgaagaaggaagtcctcttcccgcctggagactgtgtggggtatggcggggtggtggggagaatgtggtgtcttgctccaccctcctggcgaggggagggcctggcctggaccgcagaggaatcgagtgactgcccctaaaatctcctagaaccgatcccgcggccccgcccctcccgcggccccgcccctcccgcggcccgtcagcctctgccgcggagctgcgtccgccactcatgtttctccgagcaggcctggccgcgctctccccgcttcttcgcagtcttcggccctctcctgtcgccgccatgagcactggcaccttcgtcgtgtcgcagccgctcaattaccgcggcggggcccgcgtggagccggcggacgcctccggtaccgagaaagctttcgagccagcaaccggccgagtgatagctactttcacatgttcaggagaaaaggaagtaaatttggctgttcaaaatgcaaaggctgcttttaaaatatggagtcaaaaatctggcatggagcgttgccgaatccttttggaggctgccaggataataagggaacgggaggatgaaattgctactatggagtgcatcaacaatggcaagtccatctttgaggcccgcttggacattgacatttcctggcagtgcctggagtattatgcgggcttggctgcatccatggctggtgaacacatccagctcccaggtggatcgtttggttataccagaagagaaccacttggggtatgtgtgggaataggagcatggaactacccctttcagattgcctcttggaagtcggctccagcattagcctgtggtaatgccatggtctttaaaccttctccctttacacctgtttctgcattgctactggctgaaatctacagtgaggctggtgtacctcctgggctcttcaatgtggtgcagggaggggctgccacaggccagtttctgtgtcagcatcccgatgtggccaaagtctccttcactggaagtgtgcccactggcatgaagatcatggagatgtcagctaaaggaatcaaacctgttaccttggaacttggaggcaaatctccactcatcatcttctcagactgtgatatgaacaatgctgtaaagggggcgctgatggccaacttcctcacacaaggccaggtttgctgtaatggcacaagagtatttgtgcagaaagaaattcttgataaatttacagaggaagtggtgaaacagacccaaaggattaaaattggagatccccttctggaagatacaaggatgggtccactcatcaaccgaccacacctggagcgagtccttgggtttgtcaaagtggcaaaggagcagggtgctaaagtgttatgtggtggagatatatatgtacctgaagatcccaaattaaaggatggatattacatgagaccttgtgtattaactaattgcagagacgacatgacctgtgtgaaggaagagatctttgggcctgttatgtccattttatcatttgacactgaagctgaggttctagaaagagccaatgataccacttttggactagcagctggcgtctttaccagggacatccaacgggctcatagagtggtagctgagcttcaggctgggacgtgcttcattaacaactataacgtcagcccagtggagttgccctttggtggatataagaagtcaggatttggcagagagaacggccgtgtgacaatcgaatattattcacagctgaagactgtgtgtgtggagatgggtgatgtggaatctgctttttgaaaacctgcagtgaaacctattgacatggccacgctgtggaatgatgtgaattggccctgtttacagaggcagtacaactgaatgttattttacatccagaattttggcgttcagtataagagaatggttcatgttactctttctctctccatcagcttcctcactgaaaatgtgcattaagtgccttgtagatactaatcaagaaagctgtgattctcctcaaagcgtatttttgtgaaatcttttaagagccagtaacatacttctagagaacaggaaaagagactaggataatacatcttccacacatttggcccactgataatgttaattctctggcgtatttcaaagaacttgttcctggctgatccaagtgcagtggtatttacaactaattgatcacaaccagtttgtagatttctttgttccttctccattcccactgcttcacttgcctagtcttgaagaaaaaaaacaaaaaacaaaaaaaaaccttgttcctttataggttcctggtagaatcagtagagatgatttcagctcattgacatttttttaagctatatccccttgtcattccattgagaaagctgacaactgggatagggaggggattagataatagatggggtcaaattctgtgtgaatgtgaacttgcctagtaagcactttgtctctgttcactactgcgatagaggaaatctatctccctatcttgggtccttgaactacagcctgctgtcttacaccagtggagctaccctttaaatgtacaaattatttgtatgctaatgtaatatggtgaaattaaaataaatcacactgttaattgtt

SEQ ID NO: 106398 - DNA, 580 bp, Homo sapiens
  Payload ID: 893
  Gene Symbol: AOX1
  Gene Name: aldehyde oxidase 1
  ENST ID: ENST00000260930
  CDS Start-End: 1-580
agcaagaatcctaaaggaacttggaaagactgggcacagactgcttttgatgaaagcattaacctttcagctgttggatacttcagaggttatgagtcagacatgaactgggagaaaggcgaaggccagcccttcgaatactttgtttatggagctgcctgttccgaggttgaaatagactgcctgacgggggatcataagaacatcagaacagacattgtcatggatgttggctgcagtataaatccagccattgacataggccagggcattctgcacactcgtggtccagaccaatataaaatccctgccatctgtgacatgcccacggagttgcacattgctttgttgcctccttctcaaaactcaaatactctttattcatctaagggtctgggagagtcgggggtgttcctggggtgttccgtgtttttcgctatccatgacgcagtgagtgcagcacgacaggagagaggcctgcatggacccttgacccttaatagtccactgaccccggagaagattaggatggcctgtgaagacaagttcacaaaaatgattccgagagatgaacctggat

SEQ ID NO: 106399 - DNA, 5074 bp, Homo sapiens
  Payload ID: 893
  Gene Symbol: AOX1
  Gene Name: aldehyde oxidase 1
  Uniprot ID: Q06278
  ENST ID: ENST00000374700
  CDS Start-End: 242-4258
acatagagggcgccagtgacgcccacacacgtgctggtgtcccgggaagagttcctggcaaagagctcaggaacgttggatcttaatcaaggctttctccgtcggggtggatgggttggactttaggctccagcaagccccgccccactcggcgggtcggtgccgccgggtcccaggtgcccgctacttcccagaacctccgcctcccgctccgggccctcgaaccagcgcggacaccacaatggaccgggcgtccgagctgctcttctacgtgaacggccgcaaggtgatagaaaaaaatgtcgatcctgaaacaatgctgttgccttatttgaggaagaagcttcgactcacaggaactaagtatggctgtggaggaggaggctgtggtgcttgtacagtgatgatatcacgatacaaccccatcaccaagaggataaggcatcacccagccaatgcctgtctgattcccatctgttctctgtatggtgctgccgtcaccacagtagaaggcataggaagcacccacaccagaattcatcctgttcaggagaggattgccaagtgtcatggcacccagtgtggcttctgcacacctgggatggtgatgtccatctacacgctgctcaggaaccacccagagcccactctggatcagttaactgatgcccttggtggtaacctgtgccgttgcactggatacaggcccataattgatgcatgcaagactttctgtaaaacttcgggctgctgtcaaagtaaagaaaatggggtttgctgtttggatcaaggaatcaatggattgccagaatttgaggaaggaagtaagacaagtccaaaactcttcgcagaagaggagtttctgccattggatccaacccaggaactgatatttcctcctgagctaatgataatggctgagaaacagtcgcaaaggaccagggtgtttggcagtgagagaatgatgtggttttcccccgtgaccctgaaggaactgctggaatttaaattcaagtatccccaggctcctgttatcatgggaaacacctctgtggggcctgaagtgaaatttaaaggcgtctttcacccagttataatttctcctgatagaattgaagaactgagtgttgtaaaccatgcatataatggactcacccttggtgctggtctcagcctagcccaggtgaaggacattttggctgatgtagtccagaagcttccagaggagaagacacagatgtaccatgctctcctgaagcatttgggaactctggctgggtcccagatcaggaacatggcttctttagggggacacatcattagcaggcatccagattcagatctgaatcccatcctggctgtgggtaactgtaccctcaacttgctatcaaaagaaggaaaacgacagattcctttaaatgagcaattcctcagcaagtgccctaatgcagatcttaagcctcaagaaatcttggtctcagtgaacatcccctactcaaggaagtgggaatttgtgtcagccttccgacaagcccagcgacaggagaatgcgctagcgatagtcaattcaggaatgagagtcttttttggagaaggggatggcattattagagagttatgcatctcatatggaggcgttggtccagccaccatctgtgccaagaattcctgccagaaactcattggaaggcactggaacgaacagatgctggatatagcctgcaggcttattctgaatgaagtctcccttttgggctcggcgccaggtgggaaagtggagttcaagaggactctcatcatcagcttcctcttcaagttctacctggaagtgtcacagattttgaaaaagatggatccagttcactatcctagccttgcagacaagtatgaaagtgctttagaagatcttcattccaaacatcactgcagtacattaaagtaccagaatataggcccaaagcagcatcctgaagacccaattggccaccccatcatgcatctgtctggtgtgaagcatgccacgggggaggccatctactgtgatgacatgcctctggtggaccaggaacttttcttgacttttgtgactagttcaagagctcatgctaagattgtgtctattgatctgtcagaagctctcagcatgcccggtgtggtggacatcatgacagcagaacatcttagtgacgtcaactccttctgcttttttactgaagctgagaaatttctggcgacagataaggtgttctgtgtgggtcagcttgtctgtgctgtgcttgccgattctgaggttcaggcaaagcgagctgctaagcgagtgaagattgtctatcaagacttggagccgctgatactaacaattgaggaaagtatacaacacaactcctccttcaagccagaaaggaaactggaatatggaaatgttgacgaagcatttaaagtggttgatcaaattcttgaaggtgaaatacatatgggaggtcaagaacatttttatatggaaacccaaagcatgcttgtcgttcccaagggagaggatcaagaaatggatgtctacgtgtccacacagtttcccaaatatatacaggacattgttgcctcaaccttgaagctcccagctaacaaggtcatgtgccatgtaaggcgtgttggtggagcgtttggagggaaggtgttaaaaaccggaatcattgcagccgtcactgcatttgccgcaaacaaacatggccgtgcagttcgctgtgttctggaacgaggagaagacatgttaataactggaggccgccatccttaccttggaaagtacaaagctggattcatgaacgatggcagaatcttggccctggacatggagcattacagcaatgcaggcgcctccttggatgaatcattattcgtgatagaaatgggacttctgaaaatggacaatgcttacaagtttcccaatctccgctgccggggttgggcatgcagaaccaaccttccatccaacacagcttttcgtgggtttggctttcctcaggcagcgctgatcaccgaatcttgtatcacggaagttgcagccaaatgtggactatcccctgagaaggtgcgaatcataaacatgtacaaggaaattgatcaaacaccctacaaacaagagatcaatgccaagaacctaatccagtgttggagagaatgtatggccatgtcttcctactccttgaggaaagttgctgtggaaaagttcaatgcagagaattattggaagaagaaaggactggccatggtccccctgaagtttcctgttggccttggctcacgtgctgctggtcaggctgctgccttggttcacatttatcttgatggctctgtgctggtcactcacggtggaattgaaatggggcagggggtccacactaaaatgattcaggtggtcagccgtgaattaagaatgccaatgtcgaatgtccacctgcgtggaacaagcacagaaactgtccctaatgcaaatatctctggaggttctgtggtggcagatctcaacggtttggcagtaaaggatgcctgtcaaactcttctaaaacgcctcgaacccatcatcagcaagaatcctaaaggaacttggaaagactgggcacagactgcttttgatgaaagcattaacctttcagctgttggatacttcagaggttatgagtcagacatgaactgggagaaaggcgaaggccagcccttcgaatactttgtttatggagctgcctgttccgaggttgaaatagactgcctgacgggggatcataagaacatcagaacagacattgtcatggatgttggctgcagtataaatccagccattgacataggccagattgaaggtgcatttattcaaggcatgggactttatacaatagaggaactgaattattctccccagggcattctgcacactcgtggtccagaccaatataaaatccctgccatctgtgacatgcccacggagttgcacattgctttgttgcctccttctcaaaactcaaatactctttattcatctaagggtctgggagagtcgggggtgttcctggggtgttccgtgtttttcgctatccatgacgcagtgagtgcagcacgacaggagagaggcctgcatggacccttgacccttaatagtccactgaccccggagaagattaggatggcctgtgaagacaagttcacaaaaatgattccgagagatgaacctggatcctacgttccttggaatgtacccatctgaatcaaatgcaaacttctggagaaaacagagtgcctcttcccagatggcaatctgtcctatctctgtgctggaagatgctagatctgaaagacagagtttccacagttcagaaatcatcccacagtgttgcttttctatggagctgatttaaagtattccatttagatttgatagatatgcttaagcaatctataaatcattttcaatgttataaacactaattggtttcctctagggtgatatccgtcattactctgtctcttcaatccatccagctaaatggaataggtgatgacttgcatgtgactcctacttggcttctatccaccaacagaaattataccatatagtgaaaggcaattttctaaataatttcattactaatatgaactgtgaagttgtcattttttcatttgtccttttctgctatcaccttcctcttgtcagaatgaatatagacactgtatctaagtgggaccaaagaaaaaatagcgaactttcaccaaagttttcatgaaaacccaaaagctttaaaagttactatcaagaaattgaaaggaaacccacagaataggataaaatatttgtaaatcatatatttgataaaagtcttgtaaccagatacataaagagctcttacaactcaataaaaggcaagtaatttaaaaataggcaaaagaattgctggatggtatggtagttctatttttagtttttaccctaactactctgacttgatcatttaacattctgtgtatgtaacaaaatatcacatgcataaatattatgtatcaataaaattttttaatgggcaaa

SEQ ID NO: 106400 - DNA, 581 bp, Homo sapiens
  Payload ID: 893
  Gene Symbol: AOX1
  Gene Name: aldehyde oxidase 1
  ENST ID: ENST00000454629
  CDS Start-End: 128-581
tttgagcagtgactgggatgcagtgaggagcaagccatgcaaacatctggggagacagcatccaggcagtgggaatggcaggtgcaaaggtcctgaggtgatagaaaaaaatgtcgatcctgaaacaatgctgttgccttatttgaggaagaagcttcgactcacaggaactaagtatggctgtggaggaggaggctgtggtgcttgtacagtgatgatatcacgatacaaccccatcaccaagaggataaggcatcacccagccaatgcctgtctgattcccatctgttctctgtatggtgctgccgtcaccacagtagaaggcataggaagcacccacaccagaattcatcctgttcaggagaggattgccaagtgtcatggcacccagtgtggcttctgcacacctgggatggtgatgtccatctacacgctgctcaggaaccacccagagcccactctggatcagttaactgatgcccttggtggtaacctgtgccgttgcactggatacaggcccataattgatgcatgcaagactttctgtaaaacttcgggctgctgtcaaagtaaagaaaatg

SEQ ID NO: 106401 - DNA, 673 bp, Homo sapiens
  Payload ID: 893
  Gene Symbol: AOX1
  Gene Name: aldehyde oxidase 1
  ENST ID: ENST00000439380
  CDS Start-End: 1-573
tactttgtttatggagctgcctgttccgaggttgaaatagactgcctgacgggggatcataagaacatcagaacagacattgtcatggatgttggctgcagtataaatccagccattgacataggccagattgaaggtgcatttattcaaggcatgggactttatacaatagaggaactgaattattctccccagggcattctgcacactcgtggtccagaccaatataaaatccctgccatctgtgacatgcccacggagttgcacattgctttgttgcctccttctcaaaactcaaatactctttattcatctaagggtctgggagagtcgggggtgttcctggggtgttccgtgtttttcgctatccatgacgcagtgagtgcagcacgacaggagagaggcctgcatggacccttgacccttaatagtccactgaccccggagaagattaggatggcctgtgaagacaagttcacaaaaatgggagcacatggcaagcctgtcaggcggacacaggaacaggtgcttttgatacaacttcacaagattcagccaatgctggtggcataatgtcacattccaaggcgtcagatgaacttggtttgtttgtatgtgaatggaagaacagtaagttttctacattattaataaattcatataaagaaagaaa

SEQ ID NO: 106402 - DNA, 1166 bp, Homo sapiens
  Payload ID: 894
  Gene Symbol: AKR1A1
  Gene Name: aldo-keto reductase family 1, member A1 (aldehyde reductase)
  Uniprot ID: P14550
  ENST ID: ENST00000351829
  CDS Start-End: 96-1073
acttaagctgaggatcgttggatctctggcggggtgcagaactgagcccaggccacagtaccctattcacgctctgtgcttgtgccaagggggcaatggcggcttcctgtgttctactgcacactgggcagaagatgcctctgattggtctgggtacctggaagagtgagcctggtcaggtaaaagcagctgttaagtatgcccttagcgtaggctaccgccacattgattgtgctgctatctacggcaatgagcctgagattggggaggccctgaaggaggacgtgggaccaggcaaggcggtgcctcgggaggagctgtttgtgacatccaagctgtggaacaccaagcaccaccccgaggatgtggagcctgccctccggaagactctggctgacctccagctggagtatctggacctgtacctgatgcactggccttatgcctttgagcggggagacaaccccttccccaagaatgctgatgggactatatgctacgactccacccactacaaggagacttggaaggctctggaggcactggtggctaaggggctggtgcaggcgctgggcctgtccaacttcaacagtcggcagattgatgacatactcagtgtggcctccgtgcgtccagctgtcttgcaggtggaatgccacccatacttggctcaaaatgagctaattgcccactgccaagcacgtggcctggaggtaactgcttatagccctttgggctcctctgatcgtgcatggcgtgatcctgatgagcctgtcctgctggaggaaccagtagtcctggcattggctgaaaagtatggccgatctccagctcagatcttgctcaggtggcaggtccagcggaaagtgatctgcatccccaaaagtatcactccttctcgaatccttcagaacatcaaggtgtttgacttcacctttagcccagaagagatgaagcagctaaatgccctgaacaaaaattggagatatattgtgcctatgcttacggtggatgggaagagagtcccaagggatgcagggcatcctctgtacccctttaatgacccgtactgagaccacagcttcttggcctcccttccagctctgcagctaatgaggtcctgccacaacggaaagagggagttaataaagccattggagcatcca

SEQ ID NO: 106403 - DNA, 1818 bp, Homo sapiens
  Payload ID: 894
  Gene Symbol: AKR1A1
  Gene Name: aldo-keto reductase family 1, member A1 (aldehyde reductase)
  Uniprot ID: P14550
  ENST ID: ENST00000372070
  CDS Start-End: 748-1725
tcttggtgttgcagctgctctctgggcctcagtttgcttgaactaaatgtaacggggccaacttaggtgaactttgggaatccagccaacctgactttagggagagtatggagccacggatggcattgtgaatccggagggccgacaccagaagaacctgcaacgtggcatctgctaccttacttcccccggaaaagcgcctgcggcggcgcctaggcgcgcggtgcaatgtgggccagcaaaaggcgaggctggccccgccccttgcaccgcccacgtggccagcgccacctgcctcattgtgcccaggagttctccaaacccgcgctgcggagtgagtgaccaagttccggccagttcgacctcgaggatccagaggtggagacggtactacctcccagctctgttttccatccccttcaggtccttcctcgggaggcggcgaaggcggtccaccctgcgcgtgatcctttatgcccggcccctgcccctccctccgggtggaacttccccctcaccgccagacttaagctgaggatcgttggatctctggcggggtgcagaactgagcccaggccacagtaccctattcacgctctgtgcttgtgccaaggtttcaagtgatcctcccgcctcagcctgcccaggtgctgagattacatgtatgagccactgcacctggaaaggagccagaaatgtgaagtgctagctgaaggatgagcagcagctagccaggcaaagggggcaatggcggcttcctgtgttctactgcacactgggcagaagatgcctctgattggtctgggtacctggaagagtgagcctggtcaggtaaaagcagctgttaagtatgcccttagcgtaggctaccgccacattgattgtgctgctatctacggcaatgagcctgagattggggaggccctgaaggaggacgtgggaccaggcaaggcggtgcctcgggaggagctgtttgtgacatccaagctgtggaacaccaagcaccaccccgaggatgtggagcctgccctccggaagactctggctgacctccagctggagtatctggacctgtacctgatgcactggccttatgcctttgagcggggagacaaccccttccccaagaatgctgatgggactatatgctacgactccacccactacaaggagacttggaaggctctggaggcactggtggctaaggggctggtgcaggcgctgggcctgtccaacttcaacagtcggcagattgatgacatactcagtgtggcctccgtgcgtccagctgtcttgcaggtggaatgccacccatacttggctcaaaatgagctaattgcccactgccaagcacgtggcctggaggtaactgcttatagccctttgggctcctctgatcgtgcatggcgtgatcctgatgagcctgtcctgctggaggaaccagtagtcctggcattggctgaaaagtatggccgatctccagctcagatcttgctcaggtggcaggtccagcggaaagtgatctgcatccccaaaagtatcactccttctcgaatccttcagaacatcaaggtgtttgacttcacctttagcccagaagagatgaagcagctaaatgccctgaacaaaaattggagatatattgtgcctatgcttacggtggatgggaagagagtcccaagggatgcagggcatcctctgtacccctttaatgacccgtactgagaccacagcttcttggcctcccttccagctctgcagctaatgaggtcctgccacaacggaaagagggagttaataaagccattggagcatcca

SEQ ID NO: 106404 - DNA, 840 bp, Homo sapiens
  Payload ID: 894
  Gene Symbol: AKR1A1
  Gene Name: aldo-keto reductase family 1, member A1 (aldehyde reductase)
  ENST ID: ENST00000434299
  CDS Start-End: 398-840
cccttgcaccgcccacgtggccagcgccacctgcctcattgtgcccaggagttctccaaacccgcgctgcggagtccttcctcgggaggcggcgaaggcggtccaccctgcgcgtgatcctttatgcccggcccctgcccctccctccgggtggaacttccccctcaccgccagacttaagctgaggatcgttggatctctggcggggtgcagaactgagcccaggccacagtaccctattcacgctctgtgcttgtgccaaggtttcaagtgatcctcccgcctcagcctgcccaggtgctgagattacatgtatgagccactgcacctggaaaggagccagaaatgtgaagtgctagctgaaggatgagcagcagctagccaggcaaagggggcaatggcggcttcctgtgttctactgcacactgggcagaagatgcctctgattggtctgggtacctggaagagtgagcctggtcaggtaaaagcagctgttaagtatgcccttagcgtaggctaccgccacattgattgtgctgctatctacggcaatgagcctgagattggggaggccctgaaggaggacgtgggaccaggcaaggcggtgcctcgggaggagctgtttgtgacatccaagctgtggaacaccaagcaccaccccgaggatgtggagcctgccctccggaagactctggctgacctccagctggagtatctggacctgtacctgatgcactggccttatgcctttgagcggggagacaaccccttccccaagaatgctgatgggactatatgctacgactccacccactacaaggagacttggaaggctctgga

SEQ ID NO: 106405 - DNA, 1018 bp, Homo sapiens
  Payload ID: 894
  Gene Symbol: AKR1A1
  Gene Name: aldo-keto reductase family 1, member A1 (aldehyde reductase)
  ENST ID: ENST00000471651
  CDS Start-End: 95-454
cttaagctgaggatcgttggatctctggcggggtgcagaactgagcccaggccacagtaccctattcacgctctgtgcttgtgccaagggggcaatggcggcttcctgtgttctactgcacactgggcagaagatgcctctgattggtctgggtacctggaagagtgagcctggtcaggtaaaagcagctgttaagtatgcccttagcgtaggctaccgccacattgattgtgctgctatctacggcaatgagcctgagattggggaggccctgaaggaggacgtgggaccaggcaaggcggtgcctcgggaggagctgtttgtgacatccaagctgtggaacaccaagcaccaccccgaggatgtggagcctgccctccggaagactctggctgacctccagctggagtatctggacctgtacctgatgcactggccttatgcctttgagtgagccttgccagagcctcatctggggaatcagggggttgagcaggatggtgttagtaacttattgtaagtcacagcagcagagcaggataggaacactcatttgcatgccaagctgaggagcttgacatgggatcttagcctcttctgctacagcagcttagctgtagctacaggagtttaactctggaaaaaggaaggcagtctcacatggtgtgtaccccagggtatgcacctgtaaccctcctgctccctttattcatttagaaaaggtgctgacttttctgttgagcacctggggttacagtaataagtaagtctcagcagaagatgtgagaagagctcaccattagtgccgtgccctgtgctggaagaagggtggataactccctgaggatgagttaaggaagacttcctaggggagaggagatatctacgtctaggaagaggagggggcataggcattccatgtaaacttaacacctgggttacgatctggaaggatgaaaaagcatggctttttttggccaggcgcggtggctcacgcctgtaatcccagcactttggg

SEQ ID NO: 106406 - DNA, 516 bp, Homo sapiens
  Payload ID: 894
  Gene Symbol: AKR1A1
  Gene Name: aldo-keto reductase family 1, member A1 (aldehyde reductase)
  ENST ID: ENST00000481885
  CDS Start-End: 96-516
acttaagctgaggatcgttggatctctggcggggtgcagaactgagcccaggccacagtaccctattcacgctctgtgcttgtgccaagggggcaatggcggcttcctgtgttctactgcacactgggcagaagatgcctctgattggtctgggtacctggaagagtgagcctggtcaggtaaaagcagctgttaagtatgcccttagcgtaggctaccgccacattgattgtgctgctatctacggcaatgagcctgagattggggaggccctgaaggaggacgtgggaccaggcaaggcggtgcctcgggaggagctgtttgtgacatccaagctgtggaacaccaagcaccaccccgaggatgtggagcctgccctccggaagactctggctgacctccagctggagtatctggacctgtacctgatgcactggccttatgcctttgagtggggctgtctctcactcaggcggggagacaaccccttccccaagaatgctgatgggactatat

SEQ ID NO: 106407 - DNA, 1360 bp, Homo sapiens
  Payload ID: 894
  Gene Symbol: AKR1A1
  Gene Name: aldo-keto reductase family 1, member A1 (aldehyde reductase)
  Uniprot ID: P14550
  ENST ID: ENST00000621846
  CDS Start-End: 291-1268
aaaaggcgaggctggccccgccccttgcaccgcccacgtggccagcgccacctgcctcattgtgcccaggagttctccaaacccgcgctgcggagtccttcctcgggaggcggcgaaggcggtccaccctgcgcgtgatcctttatgcccggcccctgcccctccctccgggtggaacttccccctcaccgccagacttaagctgaggatcgttggatctctggcggggtgcagaactgagcccaggccacagtaccctattcacgctctgtgcttgtgccaagggggcaatggcggcttcctgtgttctactgcacactgggcagaagatgcctctgattggtctgggtacctggaagagtgagcctggtcaggtaaaagcagctgttaagtatgcccttagcgtaggctaccgccacattgattgtgctgctatctacggcaatgagcctgagattggggaggccctgaaggaggacgtgggaccaggcaaggcggtgcctcgggaggagctgtttgtgacatccaagctgtggaacaccaagcaccaccccgaggatgtggagcctgccctccggaagactctggctgacctccagctggagtatctggacctgtacctgatgcactggccttatgcctttgagcggggagacaaccccttccccaagaatgctgatgggactatatgctacgactccacccactacaaggagacttggaaggctctggaggcactggtggctaaggggctggtgcaggcgctgggcctgtccaacttcaacagtcggcagattgatgacatactcagtgtggcctccgtgcgtccagctgtcttgcaggtggaatgccacccatacttggctcaaaatgagctaattgcccactgccaagcacgtggcctggaggtaactgcttatagccctttgggctcctctgatcgtgcatggcgtgatcctgatgagcctgtcctgctggaggaaccagtagtcctggcattggctgaaaagtatggccgatctccagctcagatcttgctcaggtggcaggtccagcggaaagtgatctgcatccccaaaagtatcactccttctcgaatccttcagaacatcaaggtgtttgacttcacctttagcccagaagagatgaagcagctaaatgccctgaacaaaaattggagatatattgtgcctatgcttacggtggatgggaagagagtcccaagggatgcagggcatcctctgtacccctttaatgacccgtactgagaccacagcttcttggcctcccttccagctctgcagctaatgaggtcctgccacaacggaaagagggagttaataaagccattggagcatcc

SEQ ID NO: 106408 - DNA, 1409 bp, Homo sapiens
  Payload ID: 895
  Gene Symbol: AKR1B1
  Gene Name: aldo-keto reductase family 1, member B1 (aldose reductase)
  Uniprot ID: P15121
  ENST ID: ENST00000285930
  CDS Start-End: 81-1031
gacctcacgggctatttaaaggtacgcgccgcggccaaggccgcaccgtactgggcgggggtctggggagcgcagcagccatggcaagccgtctcctgctcaacaacggcgccaagatgcccatcctggggttgggtacctggaagtcccctccagggcaggtgactgaggccgtgaaggtggccattgacgtcgggtaccgccacatcgactgtgcccatgtgtaccagaatgagaatgaggtgggggtggccattcaggagaagctcagggagcaggtggtgaagcgtgaggagctcttcatcgtcagcaagctgtggtgcacgtaccatgagaagggcctggtgaaaggagcctgccagaagacactcagcgacctgaagctggactacctggacctctaccttattcactggccgactggctttaagcctgggaaggaatttttcccattggatgagtcgggcaatgtggttcccagtgacaccaacattctggacacgtgggcggccatggaagagctggtggatgaagggctggtgaaagctattggcatctccaacttcaaccatctccaggtggagatgatcttaaacaaacctggcttgaagtataagcctgcagttaaccagattgagtgccacccatatctcactcaggagaagttaatccagtactgccagtccaaaggcatcgtggtgaccgcctacagccccctcggctctcctgacaggccctgggccaagcccgaggacccttctctcctggaggatcccaggatcaaggcgatcgcagccaagcacaataaaactacagcccaggtcctgatccggttccccatgcagaggaacttggtggtgatccccaagtctgtgacaccagaacgcattgctgagaactttaaggtctttgactttgaactgagcagccaggatatgaccaccttactcagctacaacaggaactggagggtctgtgccttgttgagctgtacctcccacaaggattaccccttccatgaagagttttgaagctgtggttgcctgctcgtccccaagtgacctatacctgtgtttcttgcctcatttttttccttgcaaatgtagtatggcctgtgtcactcagcagtgggacagcaacctgtagagtggccagcgagggcgtgtctagcttgatgttggatctcaagagccctgtcagtagagtagaagtctcttccagtttgctttgcccttctttctaccctgctggggaaagtacaacctgaatacccttttctgaccaaagagaagcaaaatctaccaggtcaaaatagtgccactaacggttgagttttgactgcttggaactggaatcctttcagcaagacttctctttgcctcaaataaaaagtgcttttgtgagcttgg

SEQ ID NO: 106409 - DNA, 521 bp, Homo sapiens
  Payload ID: 895
  Gene Symbol: AKR1B1
  Gene Name: aldo-keto reductase family 1, member B1 (aldose reductase)
  ENST ID: ENST00000426422
  CDS Start-End: 37-345
accgtactgggcgggggtctggggagcgcagcagccatggcaagccgtctcctgctcaacaacggcgccaagatgcccatcctggggttgggtacctggaagtcccctccagggcaggtgactgaggccgtgaaggtggccattgacgtcgggtaccgccacatcgactgtgcccatgtgtaccagaatgagaatgaggtgggggtggccattcaggagaagctcagggagcaggtggtgaagcgtgaggagctcttcatcgtcagcaagccaggaagctgccttgtggctggcaatgatgacatgtgccctctcgctggcttagctgtggtgcacgtaccatgagaagggcctggtgaaaggagcctgccagaagacactcagcgacctgaagctggactacctggacctctaccttattcactggccgactggctttaagcctgggaaggaatttttcccattggatgagtcgggcaatgtggttcccagtgacaccaacattctggacacgtgggcgg

SEQ ID NO: 106410 - DNA, 1852 bp, Homo sapiens
  Payload ID: 895
  Gene Symbol: AKR1B1
  Gene Name: aldo-keto reductase family 1, member B1 (aldose reductase)
  ENST ID: ENST00000434222
  CDS Start-End: 41-832
ccgcaccgtactgggcgggggtctggggagcgcagcagccatggcaagccgtctcctgctcaacaacggcgccaagatgcccatcctggggttgggtacctggaagtcccctccagggcaggtgactgaggccgtgaaggtggccattgacgtcgggtaccgccacatcgactgtgcccatgtgtaccagaatgagaatgaggtgggggtggccattcaggagaagctcagggagcaggtggtgaagcgtgaggagctcttcatcgtcagcaagctgtggtgcacgtaccatgagaagggcctggtgaaaggagcctgccagaagacactcagcgacctgaagctggactacctggacctctaccttattcactggccgactggctttaagcctgggaaggaatttttcccattggatgagtcgggcaatgtggttcccagtgacaccaacattctggacacgtgggcggccatggaagagctggtggatgaagggctggtgaaagctattggcatctccaacttcaaccatctccaggtggagatgatcttaaacaaacctggcttgaagtataagcctgcagttaaccagattgagtgccacccatatctcactcaggagaagttaatccagtactgccagtccaaaggcatcgtggtgaccgcctacagccccctcggctctcctgacaggccctgggccaagcccgaggacccttctctcctggaggatcccaggatcaaggcgatcgcagccaagcacaataaaactacagcccaggtacagccacttcaggtgttgctgaccgtccacaactgcctgcattcctgacagtcctgttagccaagaggaggaagtgactgagcctgttacaccctcacaggaagtatggttaggggtcctcaagtacagagtggaaagggcacagatcggggttttagaagactctggcatgggctcttagattaatagtgcctgcccccactactgcaagggtgactgccacgagggccagcgcttgttcattcatgtggaacctcatctgtacaaatgtaagagctcttagccgtgcagggaatgttctttctcctgagtggtagtgtgcatttctagccagtggagggcctcatgtggtctcatgatatgcctgagacactgaagcgtgtggcacagtggctagcgcaggactctggagtcagatctggacctgaatgcgtcgcctacctgttgctagctgtgacctgacatcttggagcccctctctgatcacctgtggagttctagcacgtccttctgcaggtcctgatccggttccccatgcagaggaacttggtggtgatccccaagtctgtgacaccagaacgcattgctgagaactttaaggtctttgactttgaactgagcagccaggatatgaccaccttactcagctacaacaggaactggagggtctgtgccttgttgagctgtacctcccacaaggattaccccttccatgaagagttttgaagctgtggttgcctgctcgtccccaagtgacctatacctgtgtttcttgcctcatttttttccttgcaaatgtagtatggcctgtgtcactcagcagtgggacagcaacctgtagagtggccagcgagggcgtgtctagcttgatgttggatctcaagagccctgtcagtagagtagaagtctcttccagtttgctttgcccttctttctaccctgctggggaaagtacaacctgaatacccttttctgaccaaagagaagcaaaatctaccaggtcaaaatagtgccactaacggttgagttttgactgcttggaactggaatcctttcagcaagacttct

SEQ ID NO: 106411 - DNA, 1590 bp, Homo sapiens
  Payload ID: 896
  Gene Symbol: AKR1B10
  Gene Name: aldo-keto reductase family 1, member B10 (aldose reductase)
  Uniprot ID: O60218
  ENST ID: ENST00000359579
  CDS Start-End: 321-1271
acagtagctcacacctgtaatcccagcactttggaaggccgaggtgggcggatcacctgagctcaggagtttgagaccagcctgtctctactaacaatataaaaattagctgggagtcacggtgggcgcctgtaatcccagctactcgggaggctgaggcaggagaattgcttgaacccaggagacagaggttgtagtgagctgagatcgcaccactgcactctagccttggcaacagtgcaagactgtctcaaaaacagcaacagagagcaggacgtgagacttctacctgctcactcagaatcatttctgcaccaaccatggccacgtttgtggagctcagtaccaaagccaagatgcccattgtgggcctgggcacttggaagtctcctcttggcaaagtgaaagaagcagtgaaggtggccattgatgcaggatatcggcacattgactgtgcctatgtctatcagaatgaacatgaagtgggggaagccatccaagagaagatccaagagaaggctgtgaagcgggaggacctgttcatcgtcagcaagttgtggcccactttctttgagagaccccttgtgaggaaagcctttgagaagaccctcaaggacctgaagctgagctatctggacgtctatcttattcactggccacagggattcaagtctggggatgaccttttccccaaagatgataaaggtaatgccatcggtggaaaagcaacgttcttggatgcctgggaggccatggaggagctggtggatgaggggctggtgaaagcccttggggtctccaatttcagccacttccagatcgagaagctcttgaacaaacctggactgaaatataaaccagtgactaaccaggttgagtgtcacccatacctcacacaggagaaactgatccagtactgccactccaagggcatcaccgttacggcctacagccccctgggctctccggatagaccttgggccaagccagaagacccttccctgctggaggatcccaagattaaggagattgctgcaaagcacaaaaaaaccgcagcccaggttctgatccgtttccatatccagaggaatgtgattgtcatccccaagtctgtgacaccagcacgcattgttgagaacattcaggtctttgactttaaattgagtgatgaggagatggcaaccatactcagcttcaacagaaactggagggcctgtaacgtgttgcaatcctctcatttggaagactatcccttcaatgcagaatattgaggttgaatctcctggtgagattatacaggagattctctttcttcgctgaagtgtgactacctccactcatgtcccattttagccaagcttatttaagatcacagtgaacttagtcctgttatagacgagaatcgaggtgctgttttagacatttatttctgtatgttcaactaggatcagaatatcacagaaaagcatggcttgaataaggaaatgacaattttttccacttatctgatcagaacaaatgtttattaagcatcagaaactctgccaacactgaggatgtaaagatcaataaaaaaaataataatcataa

SEQ ID NO: 106412 - DNA, 1621 bp, Homo sapiens
  Payload ID: 897
  Gene Symbol: AKR1B15
  Gene Name: aldo-keto reductase family 1, member B15
  Uniprot ID: C9JRZ8
  ENST ID: ENST00000457545
  CDS Start-End: 261-1295
cctgaagacgttccagggctccacaggccactgtcttctggaggggaacggatcgactgccggtgcgcccagccaaattcaactcctgagtcctcagtctctagtcccgggaaggtttcaccgagctgccctactccttgtaccccttctagctggccttagcatagctacgtcagcagctattggcacgactgccctgattcaaggagaaactggactaatatcactatctcaacaggatcgaggccatcaagctacagatggtcttacaaatggaaccccaagtgaactcaactaacaacttccaccaaggacccctggaccaacccgttggccctttgactggcctaaagagttcccttctgaaggacactacaagtgcagggccccttcttcgcccctatccagcatctcttctcggcaaagtgaaagaagcggtgaaggtggccattgatgcagaatatcgccacattgactgtgcctatttctatgagaatcaacatgaggtgggagaagccatccaagagaagatccaagagaaggctgtgatgcgggaggacctgttcatcgtcagcaaggtgtggcccactttctttgagagaccccttgtgaggaaagcctttgagaagaccctcaaggacctgaagctgagctatctggacgtctatcttattcactggccacagggattcaagactggggatgactttttccccaaagatgataaaggtaatatgatcagtggaaaaggaacgttcttggatgcctgggaggccatggaggagctggtggacgaggggctggtgaaagcccttggggtctcaaatttcaaccacttccagatcgagaggctcttgaacaaacctggactgaaatataaaccagtgactaaccaggttgagtgtcacccatacctcacgcaggagaaactgatccagtactgccactccaagggcatcaccgttacggcctacagccccctgggctctccggatagaccttgggccaaacctgaggacccttccctgctggaggatcccaagattaaggagattgctgcaaagcacaaaaaaaccacagcccaggttctgatccgtttccatatccagaggaatgtgacagtgatccccaagtctatgacaccagcacacattgttgagaacattcaggtctttgactttaaattgagtgatgaggagatggcaaccatactcagcttcaacagaaactggagggcctttgacttcaaggaattctctcatttggaggactttcccttcgatgcagaatattgaggttgaatctcctggtgagattacacaggggattctctttcttcgctgaagtgtgactgtctccactcaagaactattttagccaagcttatctgagatcacagtgaactttgtcctgttgtagaccagaatggaggtgctgttttagacatgtatttctgtatgttcaactaggataagaatatcacagaaaagcatggcctgaataagcaaatgacaattttttccacttatctgatctgatcaaatgtctgttaagcaccagaaactctgccaacactgaggatgtaaagataaataataaaaaataatgactttaaccaaca

SEQ ID NO: 106413 - DNA, 1035 bp, Homo sapiens
  Payload ID: 897
  Gene Symbol: AKR1B15
  Gene Name: aldo-keto reductase family 1, member B15
  Uniprot ID: C9JRZ8
  ENST ID: ENST00000423958
  CDS Start-End: 1-1035
atggtcttacaaatggaaccccaagtgaactcaactaacaacttccaccaaggacccctggaccaacccgttggccctttgactggcctaaagagttcccttctgaaggacactacaagtgcagggccccttcttcgcccctatccagcatctcttctcggcaaagtgaaagaagcggtgaaggtggccattgatgcagaatatcgccacattgactgtgcctatttctatgagaatcaacatgaggtgggagaagccatccaagagaagatccaagagaaggctgtgatgcgggaggacctgttcatcgtcagcaaggtgtggcccactttctttgagagaccccttgtgaggaaagcctttgagaagaccctcaaggacctgaagctgagctatctggacgtctatcttattcactggccacagggattcaagactggggatgactttttccccaaagatgataaaggtaatatgatcagtggaaaaggaacgttcttggatgcctgggaggccatggaggagctggtggacgaggggctggtgaaagcccttggggtctcaaatttcaaccacttccagatcgagaggctcttgaacaaacctggactgaaatataaaccagtgactaaccaggttgagtgtcacccatacctcacgcaggagaaactgatccagtactgccactccaagggcatcaccgttacggcctacagccccctgggctctccggatagaccttgggccaaacctgaggacccttccctgctggaggatcccaagattaaggagattgctgcaaagcacaaaaaaaccacagcccaggttctgatccgtttccatatccagaggaatgtgacagtgatccccaagtctatgacaccagcacacattgttgagaacattcaggtctttgactttaaattgagtgatgaggagatggcaaccatactcagcttcaacagaaactggagggcctttgacttcaaggaattctctcatttggaggactttcccttcgatgcagaatattga

SEQ ID NO: 106414 - DNA, 858 bp, Homo sapiens
  Payload ID: 898
  Gene Symbol: AKR1C1
  Gene Name: aldo-keto reductase family 1, member C1
  ENST ID: ENST00000380859
  CDS Start-End: 16-633
tgaagattgattgcaatgggagtggtttctctgtttctttgtatagtcgaacagatatttacttcttccaagaagatacaattcagaggaatttttatggcaaaagttcctaaaagtaaagctttagaggccaccaaattggcaattgaagctggcttccgccatattgattctgctcatttatacaataatgaggagcaggttggactggccatccgaagcaagattgcagatggcagtgtgaagagagaagacatattctacacttcaaagctttggtgcaattcccatcgaccagagttggtccgaccagccttggaaaggtcactgaaaaatcttcaattggattatgttgacctctaccttattcattttccagtgtctgtaaagccaggtgaggaagtgatcccaaaagatgaaaatggaaaaatactatttgacacagtggatctctgtgccacatgggaggccgtggagaagtgtaaagatgcaggattggccaagtccatcggggtgtccaacttcaaccgcaggcagctggagatgatcctcaacaagccagggctcaagtacaagcctgtctgcaaccagcctagagataattccatcttttccttgagtcctgactggtgattccaggcctccttgatcaaattgactgtccccaaatgttacacacatttcagcattaaagttactacacttttcccagtaaattacatttttttgttttattttatgttttaaaacttagagtcaatcagtgaagatctacagtggaaatacatatgtataaaattagtgaatttggtataatgatacggtgctgtgataatttaataaaagcattgagaaatt

SEQ ID NO: 106415 - DNA, 6705 bp, Homo sapiens
  Payload ID: 898
  Gene Symbol: AKR1C1
  Gene Name: aldo-keto reductase family 1, member C1
  Uniprot ID: Q04828
  ENST ID: ENST00000380872
  CDS Start-End: 193-1164
ttttcttaggtaagaaacggttgaactggatgcaatttttatcacagcttgtgtaagactgcctctgtccctcctctcacatgccattggttaaccagcagacagtgtgctcaggggcgttgccagctcattgctcttatagcctgtgagggaggaagaaagaaacatttgccagccaggctagtgacagaaatggattcgaaatatcagtgtgtgaagctgaatgatggtcacttcatgcctgtcctgggatttggcacctatgcgcctgcagaggttcctaaaagtaaagctttagaggccaccaaattggcaattgaagctggcttccgccatattgattctgctcatttatacaataatgaggagcaggttggactggccatccgaagcaagattgcagatggcagtgtgaagagagaagacatattctacacttcaaagctttggtgcaattcccatcgaccagagttggtccgaccagccttggaaaggtcactgaaaaatcttcaattggattatgttgacctctaccttattcattttccagtgtctgtaaagccaggtgaggaagtgatcccaaaagatgaaaatggaaaaatactatttgacacagtggatctctgtgccacatgggaggccgtggagaagtgtaaagatgcaggattggccaagtccatcggggtgtccaacttcaaccgcaggcagctggagatgatcctcaacaagccagggctcaagtacaagcctgtctgcaaccaggtggaatgtcatccttacttcaaccagagaaaactgctggatttctgcaagtcaaaagacattgttctggttgcctatagtgctctgggatcccaccgagaagaaccatgggtggacccgaactccccggtgctcttggaggacccagtcctttgtgccttggcaaaaaagcacaagcgaaccccagccctgattgccctgcgctaccagctacagcgtggggttgtggtcctggccaagagctacaatgagcagcgcatcagacagaacgtgcaggtgtttgaattccagttgacttcagaggagatgaaagccatagatggcctaaacagaaatgtgcgatatttgacccttgatatttttgctggcccccctaattatccattttctgatgaatattaacatggagggcattgcatgaggtctgccagaaggccctgcgtgtggatggtgacacagaggatggctctatgctggtgactggacacatcgcctctggttaaatctctcctgcttggtgatttcagcaagctacagcaaagcccattggccagaaaggaaagacaataattttgttttttcattttgaaaaaattaaatgctctctcctaaagattcttcacctactttggtctccataacttctatgttttctttccttctgacacactagtgcccctaaattgtgatttgcctatacgtttagggccggggttggaagatgttaacaaccatttaagattcatttctgcagtgggagtgggtggagtttcaccctctgggaaaggggcaggtgacaggtatttatcagtcagtgcctctctagctcttgtaggaagaagcacacgcaggatggagtctagaggatgagcgatattgactagcaattcatgggctccctccagcagtgcgagggtcagagtttctggagccttgggaggaggcatccctgtgagggggggttagggagatgggagggcaccaggaaaagtgattagaagtcaggtatgggaaggctaaataggacagagtcgagtacatctctgcttggaaaaacatatcaacacccttttttttgaacattatatcttgctcataaaagaaaactttccacattgttttaacaaaccccacagctgagagtcaggcctgaatctttgatgtgtgcccattcacaacgttgaccctattggtttgtggtggggcagggcatcaaagacatcattgactaatcacattcccctgaatagctcatatttagaaaatattcttagattctaaaaatgtactattaatttgtgatattcagtcttttaaatattttatacattaaacaggcatagttacaaatataaaacaaaaatatcccaaagccattatgcatggcactcaagattaaaatgggaaataatacatctaataaatcaaatgttccaagacttcaaaggtcttttggaaacaggctatgtaaaacagcacactggtttcaaactttggtaaattttaagaacaactcttacaaaggcatttaattcttatacataattttcaggggacctaagttaatcagctaatcatgaagacatgattttcattttagaaaacacttttgaaaacttgggataatctcatgccttaatgatcaaagcattatgagaaggacagtggtttttaacctgggcatatgttctaacacatttactctccactattcgtactctggtagccatgttaaccccatcagagattccttctcaagccatgtctcagagctgagaggcatcccagcaagttttgcagctcacagttttttccgtaaattacttattctataaaattggagtaggccataaactttggagggccctagaccaattttttggattatttttcgtcttctatcattccgctgatcttagatattctctgcattaaatattaaatatcacttctaggctgaaaaatccccctaaaaatatttctagctcagatttttcctccaaattctgcaatagaagatcacaatgtgaactctgcatctccatgttaaagtctaatggacattcacacttagcatgtctcaaagaaatctcatgtaaaccatggccatcctgttctaccttaactttctgagtctatggaatgataatttcacatctcataaacttgactgatgtaagtgtcaagaaaagattgacattttgttaaaagttagtagtgaagtgtgtaacgcttaagcaaactttcatatttcaaatctctttagcaagtgtaactcttttttcaagatgtgaaataatcattaggtcagtcatttgtaaatagtacatctgctatggactttttccagttcttcaccatccatttttataaaactcttattgttaaaaaaaaagttactcagaatttcataaagccaaacacctgatttcaggaacacttgagatgtaagaaaattttatagggacctccaatcactaattttcctattttttctctcaaagaaatgctgaagggaggaattcaggttgaatgaaaggaaatagtaacttacagccatatagagttataaagacttcttgtaaatgtgaacatatggtaaaatataaaaacatgtatttttgaaattttggattctactcattattttacttcaatttaagatataaatgtatagaaataagtataattctaagctaatacgtatgcaatgtaggaagctgtaattactgaccaaaactatgtgaagtggagaaaacctggggaagtggatggttttagatgaaactgaagttaaattcatattgatttaaagtaaattgttataactttataaagtttttcatcatcaccacagcaatcacaaagagaataattatgaatatacgcaagaggaaatgagaagggaatccaaatgtcattaaaaaaaaatcacgccacctcacaaaatggtaacagtggatataaaggatagaaagctataaacctggtaggaaaacattgaaaatggcacaagtgactccttccctgtcaccaatgacagtcatgtgttgcataatgcctgggctatcttctgagaatggctttgttaggcaactgtgtcatggtggggacatgatagcattagagagaattctctcaaacactgtcatggccttatcaactatgcttctgtaatattctgaatccttcgctgcctttccaacagtgtttacaacggtttcctaagaaatgaaatccatttcaccaaaccacttttcttgctcatccataagaaacacttctcctttgttaaaattacatcatgagattgcaagcattcagtaacttgcaagctccaatttgaattctagttgtcttgctatttccaccacatctgcaattactttctccactgaaatcttgcattcctccaagtcatccaggagggttgaattcacttctttcaaactcctgttcaagtaaatgttttgccctcctgtcacgaatcatgaatgtttttaatggcatctagaatagtaaatctttttcagaagattttcaattttcttttcccaggttcttcagacaagtcaccatggtagctgtagacttatgaaatgtatttcctgaaccataaaacaagaacatcaaaattactctatgatccatgggaaacagaatgcatgttgtgttagcaggcatggaaagaacagtaatctctttcaacctctgtaagagagttcttggttgattaggtaccttgtcgataggcagttctaatttcaaagaactttttcttttgctgagcagtaagtcttaacagtgggcttaaaatattcagtaaaccattatttaaggagatgtggcttaaatatctaggctttcttgctttatttatagaacacttacagagtagatatagattaaatcttaaggaccctaggattgttagaatagtaaatgaacatcatatgttgtaatatagttagccagggaggggaaagatctctacaagaaataattttaaaaactactcaaagaaatcagagatatcacaaaatgacaaaacaagtacaggggcagcaaaaggtaacagatgtcaactatgagatctcatcaagaactaagaaaatggagaaaagtaccagatggcagatgggaggcagtgtgagcatgcctctcccacttggagattagtgtgtagagatttacattgtgaatttcttttcaagaaccaatgcagagacttaacagatatatgaaaaaatttcacatacactctgaagaagtctcaggcacaatcctactccatgaaataagaaaaaaccatcacatccccagattctgaggggagagagttcactccagagcatacatccccactggggatctggaaattcaggccacaagagaaggctttgatcctgtgcggacaagtgccttgagcagaatccacaggggagagctggaagtgcatggcagatatgagcacagaagctgggtgtccagccttgtgggcagaccgggagggatgtggcctgaaagccatggttattatctcagcgtgtaagctgatgatctgaggctggtcagagttctgtgcgcagactgcctggatgtaaacctggcactgttagcagagcactgcatgaatgaaaggaatgaaaatagccttgccaactgcataggtgctgggtgaggctcactgtggggggcgcacggcaagctattcaacattacgtacaggcatttgaggtcggggcatggaaaaatactgaggcagtgtgtgtatgttatttgtgctgagaatgaaactccttgaccttgaaaacaggacagggagtggtgtgtgtgctgtgataaggaatgctgaaaacggtctcctgagaatgcggtttgagtgcttttacaaggccacaggtgtctcacgacctgacctcataaagccatctagtggatgtttgtggcttaacaagccccttcaataagtacttggcggagggatgctggggggaccttcttagaagagctgcgccccacccccctccctggacagcccagctacaattgtctgagaactcactgcaagctgtaagcggcccactacttcccactcccttttttgaactcttctgtgcagcagaggcaattaaactctcctctggaacattaccccagcagcctgagaaccaccccttggcgctcacaggggctgcagcctgccttatccaaggacagttagagtgcagacccacctaaccctggacccactggtggtacccatccacccatcctggtagcttaacacaaagatacacttttaggagcttcatagcccctcttcccccattgcctgagaaaccactttccctgggcaacttagggcaagctcaaatcccactgctaccaccacagctggtgctcttttgcaagtgccacctcctagctggagaccaaccagcacagtccacacagcacctcaaggaagaataaatagaactgttcccaggaaggagaaaatgcctgcatgagctcagctgttaccactgcgtaccacaccctgaccagtcagaggtcttgagtcggtccgcatgacaagttcaccgctcgcataaccagcattcaagaaagccagcacactaagcctatctacagccagggagtctcagagtctacgtcactcccctgccacctcaatcagagctggtgctggtatccactgctgggagacttgtgctgaggtgaagcctgggctggatggctggaggatgaagaactgcacggaggagatggaggcacccagacagatgccccatggacatcctgaagcagagctgcctcactgccctgcacacacatgagagcgcagccaggaacagaaggactgggcaacattcaggcggagcccaggccaattttctaaacatggaatatgagttaaataaatggcttcgtattaaa

SEQ ID NO: 106416 - DNA, 994 bp, Homo sapiens
  Payload ID: 898
  Gene Symbol: AKR1C1
  Gene Name: aldo-keto reductase family 1, member C1
  ENST ID: ENST00000434459
  CDS Start-End: 1-975
atggattcgaaatatcagtgtgtgaagctgaatgatggtcacttcatgcctgtcctgggatttggcacctatgcgcctgcagaggttcctaaaagtaaagctttagaggccaccaaattggcaattgaagctggcttccgccatattgattctgctcatttatacaataatgaggagcaggttggactggccatccgaagcaagattgcagatggcagtgtgaagagagaagacatattctacacttcaaagctttggtgcaattcccatcgaccagagttggtccgaccagccttggaaaggtcactgaaaaatcttcaattggattatgttgacctctaccttattcattttccagtgtctgtaaagccaggtgaggaagtgatcccaaaagatgaaaatggaaaaatactatttgacacagtggatctctgtgccacatgggaggtgatggagaagtgtaaagatgcaggattggccaagtccatcggggtgtccaacttcaaccgcaggcagctggagatgatcctcaacaagccagggctcaagtacaagcctgtctgcaaccaggtggaatgtcatccttacttcaaccagagaaaactgctggatttctgcaagtcaaaagacattgttctggttgcctatagtgctctgggatcccaccgagaagaaccatgggtggacccgaactccccggtgctcttggaggacccagtcctttgtgccttggcaaaaaagcacaagcgaaccccagccctgattgccctgcgctaccagctacagcgtggggttgtggtcctggccaagagctacaatgagcagcgcatcagacagaacgtgcaggtgtttgaattccagttgacttcagaggagatgaaagccatagatggcctaaacagaaatgtgcgatatttgacccttgatatgtattttgctagccaccctaattatccatattcagatgaatattaacatggagggctttgcctga

SEQ ID NO: 106417 - DNA, 744 bp, Homo sapiens
  Payload ID: 898
  Gene Symbol: AKR1C1
  Gene Name: aldo-keto reductase family 1, member C1
  ENST ID: ENST00000442997
  CDS Start-End: 1-744
attcgaaatatcagtgtgtgaagctgaatgatggtcacttcatgcctgtcctgggatttggcacctatgcgcctgcagaggttggactggccatccgaagcaagattgcagatggcagtgtgaagagagaagacatattctacacttcaaagctttggtgcaattcccatcgaccagagttggtccgaccagccttggaaaggtcactgaaaaatcttcaattggattatgttgacctctaccttattcattttccagtgtctgtaaagccaggtgaggaagtgatcccaaaagatgaaaatggaaaaatactatttgacacagtggatctctgtgccacatgggaggccgtggagaagtgtaaagatgcaggattggccaagtccatcggggtgtccaacttcaaccgcaggcagctggagatgatcctcaacaagccagggctcaagtacaagcctgtctgcaaccaggtggaatgtcatccttacttcaaccagagaaaactgctggatttctgcaagtcaaaagacattgttctggttgcctatagtgctctgggatcccaccgagaagaaccatgggtggacccgaactccccggtgctcttggaggacccagtcctttgtgccttggcaaaaaagcacaagcgaaccccagccctgattgccctgcgctaccagctacagcgtggggttgtggtcctggccaagagctacaatgagcagcgcatcagacagaacgtgc

SEQ ID NO: 106418 - DNA, 3756 bp, Homo sapiens
  Payload ID: 899
  Gene Symbol: AKR1C2
  Gene Name: aldo-keto reductase family 1, member C2
  Uniprot ID: P52895
  ENST ID: ENST00000380753
  CDS Start-End: 189-1160
ttttcttaggtaagaaacggttgaactggatgcaatttttatcacagcttgtgtaagactgcctctgtccctcctctcacatgccattggttaaccagcagacagtgtgctcaggggcgttgccagctcattgctcttatagcctgtgagggaggaagaaacatttgctaaccaggccagtgacagaaatggattcgaaataccagtgtgtgaagctgaatgatggtcacttcatgcctgtcctgggatttggcacctatgcgcctgcagaggttcctaaaagtaaagctctagaggccgtcaaattggcaatagaagccgggttccaccatattgattctgcacatgtttacaataatgaggagcaggttggactggccatccgaagcaagattgcagatggcagtgtgaagagagaagacatattctacacttcaaagctttggagcaattcccatcgaccagagttggtccgaccagccttggaaaggtcactgaaaaatcttcaattggactatgttgacctctatcttattcattttccagtgtctgtaaagccaggtgaggaagtgatcccaaaagatgaaaatggaaaaatactatttgacacagtggatctctgtgccacatgggaggccatggagaagtgtaaagatgcaggattggccaagtccatcggggtgtccaacttcaaccacaggctgctggagatgatcctcaacaagccagggctcaagtacaagcctgtctgcaaccaggtggaatgtcatccttacttcaaccagagaaaactgctggatttctgcaagtcaaaagacattgttctggttgcctatagtgctctgggatcccatcgagaagaaccatgggtggacccgaactccccggtgctcttggaggacccagtcctttgtgccttggcaaaaaagcacaagcgaaccccagccctgattgccctgcgctaccagctgcagcgtggggttgtggtcctggccaagagctacaatgagcagcgcatcagacagaacgtgcaggtgtttgaattccagttgacttcagaggagatgaaagccatagatggcctaaacagaaatgtgcgatatttgacccttgatatttttgctggcccccctaattatccattttctgatgaatattaacatggagggcattgcatgaggtctgccagaaggccctgcgtgtggatggtgacacagaggatggctctatgctggtgactggacacatcgcctctggttaaatctctcctgcttggcgacttcagtaagctacagctaagcccatcggccggaaaagaaagacaataattttgtttttcattttgaaaaaattaaatgctctctcctaaagattcttcacctactttggtctccataacttctatgttttctctccttctgacacactagtgcccccaaattgtgatttgcctatacgtttagggccggggttggaagatgttaacaaccatttaagattcatttctgcagtgggagtgggtggagtttcaccctctgggaaaggggcaggtgacaggtatttatcagtcagtgcctctctagctcttgtaggaagaagcacacgcaggatggagtctagaggatgagcgatattgactagcaattcatgggctccctccagcagtgcgagggtcagagtttctggagccttgggaggaggcatccctgtgagggggggttagggagatgggagggcaccaggaaaagtgattagaagtcaggtatgggaaggctaaataggacagagtcgagtacatctctgcttggaaaaacatatcaacacccttttttttgatcattatatcttgttcataaaagaaaactttccacattgttttaacaaaccccacagctgagagtcaggcctgaatctttgatgtgtgcccattcacaacgttgaccctattggtttgtggtggggcaggacatcgaagatatcattgactcatcacattcccctgaatagctcatatttagaaaatattcttagattgtaaaaatgtactgttcatttgttatatgcaatcttttaaatgttttatactttaaacaaggcatagttacaagtataaaacataaatatcccaaagccattatgcatggcactcaagattaaaatgggaaataatacatctaataaatcaaatgttccaagacttcaaatgtcttttggaaacaggctatgtaaaacagcacactggtttcaaactttggtaaattttaagaagaactcttacaaaggcatttaattcttatacataattttcaggggaactaatcaaatcagctaatcatgaagacatgattttcgttttagaaaacacttttgaaaacttgggataatctcatgtcttaatgatcaaagcattatgagaaggacagtggttttttacctgggcacactttctaacacatttactctccactattcgtactctggtagccatgttaaccccatcagagattccttctcaagccatgtctcagagctgataggcatcccagcaagttttgcagctcacaatttttctgtaaattacttattctataaaattggaagaggccataaactttggagggccctagaccaattttttggattatttctggtctactctcattccgttgatgatcttagatattctctgcattaaatatcacctctaggctgagaaatccaccaaaaaatatttctagctcagcgttttcctccaaatcttcaatggaagatcataatgtgaactctgcatctccatgttaaagtttaatggacattcacacttagcatgtctcaaagaaatctcatgtaaaccatggccatcctgttctaccttaactttctgagtctatggaatgataatttcacatctcataaacttgactgatgtaagtgtcaagaaaagattgacattttgttaaaacttcgtagccaagtgtgtaacgcttaagcagactttcatatttcaaatctctatagcacgtgtaactcttttttcaagatgtgaaataatcattaggtcagtcatttgtaaatagtacggctgctgtgggctttttccagttcttcaccatccatttttataaaactcttattgttaaaaaaaaaaagttactcagaatttcataaagccaaacacctgatttcaggaacacttgagatgtaagaaaattttatagggacctccaatcactaattttcctattttttctctcaaagaaatgctgaagggaggaattcaggttgaatgaaaggaaatagtaacttacagccatatagagttataaagacttcttgtaaatgtgaacatatggtaaaatataaaaacatgtatttttgaaattttggattctactcattattttacttcaatttaagatataaatgtatagaaataagtataattctaagctaatacgtatgcaatgtaggaagctgtaattactgaccaaaactatgtgaagtggagaaaacctggggaagtggatggttttagatgaaactgaagttaaattcatattgatttaaagtaaattgtcataactttataaagtttttcatcatcaccacagcaatcacaaagagaataattatgaatatacgcaagaggaaatgagaagggaatccaaatgtcattaaaaaaaaatcacgccacctcacaaaatggtaacagtggatataaaggatagaaagctataaacctggtaggaaaacatt

SEQ ID NO: 106419 - DNA, 991 bp, Homo sapiens
  Payload ID: 899
  Gene Symbol: AKR1C2
  Gene Name: aldo-keto reductase family 1, member C2
  ENST ID: ENST00000407674
  CDS Start-End: 1-972
atggatcccaaatatcagtgtgtggagctaaatgatggtcatttcatgcctgtattaggatttggcacctgtgtacctccagaggttcctaggaatagagttgtggaggttacaaaattagcaatagaagctggtttcttccatattgattctgctcatttatacaataatgaggagcaggttggactggccatccgaagcaagattgcagatggcagtgtgaagagagaagacatattctacacttcaaagctttggagcaattcccatcgaccagagttggtccgaccagccttggaaaggtcactgaaaaatcttcaattggactatgttgacctctatcttattcattttccagtgtctgtaaagccaggtgaggaagtgatcccaaaagatgaaaatggaaaaatactatttgacacagtggatctctgtgccacatgggaggccatggagaagtgtaaagatgcaggattggccaagtccatcggggtgtccaacttcaaccacaggctgctggagatgatcctcaacaagccagggctcaagtacaagcctgtctgcaaccaggtggaatgtcatccttacttcaaccagagaaaactgctggatttctgcaagtcaaaagacattgttctggttgcctatagtgctctgggatcccatcgagaagaaccatgggtggacccgaactccccggtgctcttggaggacccagtcctttgtgccttggcaaaaaagcacaagcgaaccccagccctgattgccctgcgctaccagctgcagcgtggggttgtggtcctggccaagagctacaatgagcagcgcatcagacagaacgtgcaggtgtttgaattccagttgacttcagaggagatgaaagccatagatggcctaaacagaaatgtgcgatatttgacccttgatattcttgctggccaccctgattatccattttcaggtgaatattaacatggaggactttgtatga

SEQ ID NO: 106420 - DNA, 1481 bp, Homo sapiens
  Payload ID: 899
  Gene Symbol: AKR1C2
  Gene Name: aldo-keto reductase family 1, member C2
  ENST ID: ENST00000421196
  CDS Start-End: 26-919
tttgctaaccaggccagtgacagaaatggattcgaaataccagtgtgtgaagctgaatgatggtcacttcatgcctgtcctgggatttggcacctatgcgcctgcagaggttcctaaaagtaaagctctagaggccgtcaaattggcaatagaagccgggttccaccatattgattctgcacatgtttacaataatgaggagcaggttggactggccatccgaagcaagattgcagatggcagtgtgaagagagaagacatattctacacttcaaagctttggagcaattcccatcgaccagagttggtccgaccagccttggaaaggtcactgaaaaatcttcaattggactatgttgacctctatcttattcattttccagtgtctgtaaaggccatggagaagtgtaaagatgcaggattggccaagtccatcggggtgtccaacttcaaccacaggctgctggagatgatcctcaacaagccagggctcaagtacaagcctgtctgcaaccaggtggaatgtcatccttacttcaaccagagaaaactgctggatttctgcaagtcaaaagacattgttctggttgcctatagtgctctgggatcccatcgagaagaaccatgggtggacccgaactccccggtgctcttggaggacccagtcctttgtgccttggcaaaaaagcacaagcgaaccccagccctgattgccctgcgctaccagctgcagcgtggggttgtggtcctggccaagagctacaatgagcagcgcatcagacagaacgtgcaggtgtttgaattccagttgacttcagaggagatgaaagccatagatggcctaaacagaaatgtgcgatatttgacccttgatatttttgctggcccccctaattatccattttctgatgaatattaacatggagggcattgcatgaggtctgccagaaggccctgcgtgtggatggtgacacagaggatggctctatgctggtgactggacacatcgcctctggttaaatctctcctgcttggcgacttcagtaagctacagctaagcccatcggccggaaaagaaagacaataattttgtttttcattttgaaaaaattaaatgctctctcctaaagattcttcacctactttggtctccataacttctatgttttctctccttctgacacactagtgcccccaaattgtgatttgcctatacgtttagggccggggttggaagatgttaacaaccatttaagattcatttctgcagtgggagtgggtggagtttcaccctctgggaaaggggcaggtgacaggtatttatcagtcagtgcctctctagctcttgtaggaagaagcacacgcaggatggagtctagaggatgagcgatattgactagcaattcatgggctccctccagcagtgcgagggtcagagtttctggagccttgggaggaggcatccctgtgagggggggtta

SEQ ID NO: 106421 - DNA, 1098 bp, Homo sapiens
  Payload ID: 899
  Gene Symbol: AKR1C2
  Gene Name: aldo-keto reductase family 1, member C2
  Uniprot ID: P52895
  ENST ID: ENST00000455190
  CDS Start-End: 180-599
gtaagaaacggttgaactggatgcaatttttatcacagcttgtgtaagactgcctctgtccctcctctcacatgccattggttaaccagcagacagtgtgctcaggggcgttgccagctcattgctcttatagcctgtgagggaggaagaaacatttgctaaccaggccagtgacagaaatggattcgaaataccagtgtgtgaagctgaatgatggtcacttcatgcctgtcctgggatttggcacctatgcgcctgcagaggttcctaaaagtaaagctctagaggccgtcaaattggcaatagaagccgggttccaccatattgattctgcacatgtttacaataatgaggagcaggttggactggccatccgaagcaagattgcagatggcagtgtgaagagagaagacatattctacacttcaaagctttggagcaattcccatcgaccagagttggtccgaccagccttggaaaggtcactgaaaaatcttcaattggactatgttgacctctatcttattcattttccagtgtctgtaaaggaggacatagggattttaacatggaagaagagccctaaacataactcctaattcctttctatggaacagaaagcaattttgaatccatacttccgtgattgcatgtctacaagaaaagagagtgcagaatcctcaaagcctctgcctcaaaaacttgaggaaatgacaatcatctccttgaaggcacaaggtcttatttatgattcctgatttcacctcttgggatgttcacagacacagagtttcatgaagctgtggtgtccagaaaacctgctgcacatagggtgcacaatgagtttccatcttcttgcctcttttcaaggggcaagaactcagtccgggaatgtcttaaactacaaaccttcatgggaaaccttgttgcttctgcttcctctcttttcacactggaggttttatttttgcttagccatgaattcttgtgtcattcataacttttgtcttaaggtactgaaaactagtcaggctagttaatgcaaaagggtatattagatatgataatgggaaatcaaagccagggctacattaagaa

SEQ ID NO: 106422 - DNA, 745 bp, Homo sapiens
  Payload ID: 899
  Gene Symbol: AKR1C2
  Gene Name: aldo-keto reductase family 1, member C2
  ENST ID: ENST00000604507
  CDS Start-End: 144-745
tctcctgccagccaagtgaagacatgcttacttccccttcaccttccttcatgatgacagtgtgctcaggggcgttgccagctcattgctcttatagcctgtgagggaggaagaaacatttgctaaccaggccagtgacagaaatggattcgaaataccagtgtgtgaagctgaatgatggtcacttcatgcctgtcctgggatttggcacctatgcgcctgcagaggttcctaaaagtaaagctctagaggccgtcaaattggcaatagaagccgggttccaccatattgattctgcacatgtttacaataatgaggagcaggttggactggccatccgaagcaagattgcagatggcagtgtgaagagagaagacatattctacacttcaaagctttggagcaattcccatcgaccagagttggtccgaccagccttggaaaggtcactgaaaaatcttcaattggactatgttgacctctatcttattcattttccagtgtctgtaaagccaggtgaggaagtgatcccaaaagatgaaaatggaaaaatactatttgacacagtggatctctgtgccacatgggaggccatggagaagtgtaaagatgcaggattggccaagtccatcggggtgtccaacttcaaccacaggctgctggagatgatcctcaacaagccagggctcaagtacaagcctgtctgcaaccaggtggaatgtcatccttacttcaaccagagaaa

SEQ ID NO: 106423 - DNA, 1807 bp, Homo sapiens
  Payload ID: 900
  Gene Symbol: AKR1C3
  Gene Name: aldo-keto reductase family 1, member C3
  Uniprot ID: P42330
  ENST ID: ENST00000380554
  CDS Start-End: 653-1624
ccctcatcaggattacagctttatcaggactgcatcttcttcagaaatgaatatttctcttacaacgcaaagaaagaaaaatcaaaataaattttctgattgaaaatgtaaaaaggcaaatatttttacagttttaactttaattttttattgaggaccaactatttgaaaaattctcattagtcattcctttaaattatgtgtatgtgagagaaagacgtaagatggttaattatttcaaatgatgcagtataaagaaggggcattatcacggcagaaacgaaaaaagatatttgtagctggaggtttttatagtctaacatatggttgctatttgttctacaaatccttttgaataatttaatatagagatttagaatagaaaataatactttagatagaaattaatgagtttattataaccatatattataataatttacttaggaattctctttgataagaaacaaatgaactgaatgcaattttctccacagaccatataagactgcctatgtacctcctcctacatgccattggttaaccatcagtcagtttgcaggggtggggggaggggtttcctgcccattgtttttgtaatctctgaggagaagcagcagcaaacatttgctagtcagacaagtgacagggaatggattccaaacaccagtgtgtaaagctaaatgatggccacttcatgcctgtattgggatttggcacctatgcacctccagaggttccgagaagtaaagctttggaggtcacaaaattagcaatagaagctgggttccgccatatagattctgctcatttatacaataatgaggagcaggttggactggccatccgaagcaagattgcagatggcagtgtgaagagagaagacatattctacacttcaaagctttggtccacttttcatcgaccagagttggtccgaccagccttggaaaactcactgaagaaagctcaattggactatgttgacctctatcttattcattctccaatgtctctaaagccaggtgaggaactttcaccaacagatgaaaatggaaaagtaatatttgacatagtggatctctgtaccacctgggaggccatggagaagtgtaaggatgcaggattggccaagtccattggggtgtcaaacttcaaccgcaggcagctggagatgatcctcaacaagccaggactcaagtacaagcctgtctgcaaccaggtagaatgtcatccgtatttcaaccggagtaaattgctagatttctgcaagtcgaaagatattgttctggttgcctatagtgctctgggatctcaacgagacaaacgatgggtggacccgaactccccggtgctcttggaggacccagtcctttgtgccttggcaaaaaagcacaagcgaaccccagccctgattgccctgcgctaccagctgcagcgtggggttgtggtcctggccaagagctacaatgagcagcgcatcagacagaacgtgcaggtttttgagttccagttgactgcagaggacatgaaagccatagatggcctagacagaaatctccactattttaacagtgatagttttgctagccaccctaattatccatattcagatgaatattaacatggagggctttgcctgatgtctaccagaagccctgtgtgtggatggtgacgcagaggacgtctctatgccggtgactggacatatcacctctacttaaatccgtcctgtttagcgacttcagtcaactacagctgagtccataggccagaaagacaataaatttttatcattttgaaataa

SEQ ID NO: 106424 - DNA, 636 bp, Homo sapiens
  Payload ID: 900
  Gene Symbol: AKR1C3
  Gene Name: aldo-keto reductase family 1, member C3
  ENST ID: ENST00000602997
  CDS Start-End: 171-636
tgctagccagctgagtgacagtgatggattcaaaacatcagtgtttgaagctaaatgatggtcacttcatgcctgtcctgggatttggcacctatgcacctccagagaatcatctcttttgaaaaatcgattcatcaaatgaatcttcagccaacaactgttcaagaaggatgcaaatatcacaggttccgagaagtaaagctttggaggtcacaaaattagcaatagaagctgggttccgccatatagattctgctcatttatacaataatgaggagcaggttggactggccatccgaagcaagattgcagatggcagtgtgaagagagaagacatattctacacttcaaagctttggtccacttttcatcgaccagagttggtccgaccagccttggaaaactcactgaagaaagctcaattggactatgttgacctctatcttattcattctccaatgtctctaaagccaggtgaggaactttcaccaacagatgaaaatggaaaagtaatatttgacatagtggatctctgtaccacctgggaggccatggagaagtgtaaggatgcaggattggccaagtccattggggtgtcaaacttcaaccgcaggcagctggagatgatcctcaaca

SEQ ID NO: 106425 - DNA, 1405 bp, Homo sapiens
  Payload ID: 900
  Gene Symbol: AKR1C3
  Gene Name: aldo-keto reductase family 1, member C3
  ENST ID: ENST00000605149
  CDS Start-End: 326-1228
tttttgctgaacattccccttagtaaaatggcaggatggtttgcttgccattgaaactaaccaaacatttaatccttttccctttagagaaaaaagaaaaaaaaaggtgcagctcactgccagtgcccatttagttttacattaacatgttccttgaggttgaagcaaatctgaccgattttcaatgtaaaaataacatataaaaactgttctcggagttatttctaaacagaactaagatcagaattctttgaatcatcagaatcatctcttttgaaaaatcgattcatcaaatgaatcttcagccaacaactgttcaagaaggatgcaaatatcacaggttccgagaagtaaagctttggaggtcacaaaattagcaatagaagctgggttccgccatatagattctgctcatttatacaataatgaggagcaggttggactggccatccgaagcaagattgcagatggcagtgtgaagagagaagacatattctacacttcaaagctttggtccacttttcatcgaccagagttggtccgaccagccttggaaaactcactgaagaaagctcaattggactatgttgacctctatcttattcattctccaatgtctctaaagccaggtgaggaactttcaccaacagatgaaaatggaaaagtaatatttgacatagtggatctctgtaccacctgggaggccatggagaagtgtaaggatgcaggattggccaagtccattggggtgtcaaacttcaaccgcaggcagctggagatgatcctcaacaagccaggactcaagtacaagcctgtctgcaaccaggtagaatgtcatccgtatttcaaccggagtaaattgctagatttctgcaagtcgaaagatattgttctggttgcctatagtgctctgggatctcaacgagacaaacgatgggtggacccgaactccccggtgctcttggaggacccagtcctttgtgccttggcaaaaaagcacaagcgaaccccagccctgattgccctgcgctaccagctgcagcgtggggttgtggtcctggccaagagctacaatgagcagcgcatcagacagaacgtgcaggtttttgagttccagttgactgcagaggacatgaaagccatagatggcctagacagaaatctccactattttaacagtgatagttttgctagccaccctaattatccatattcagatgaatattaacatggagggctttgcctgatgtctaccagaagccctgtgtgtggatggtgacgcagaggacgtctctatgccggtgactggacatatcacctctacttaaatccgtcctgtttagcgacttcagtcaactacagctgagtccataggccagaaagacaataaatttttatcattttg

SEQ ID NO: 106426 - DNA, 972 bp, Homo sapiens
  Payload ID: 901
  Gene Symbol:
  Gene Name: aldo-keto reductase family 1, member C3 [Source:EntrezGene
  Acc:8644]
  ENST ID: ENST00000439082
  CDS Start-End: 1-972
atggattcaaaacatcagtgtttgaagctaaatgatggtcacttcatgcctgtcctgggatttggcacctatgcacctccagaggttccgagaagtaaagctttggaggtcacaaaattagcaatagaagctgggttccgccatatagattctgctcatttatacaataatgaggagcaggttggactggccatccgaagcaagattgcagatggcagtgtgaagagagaagacatattctacacttcaaagctttggtccacttttcatcgaccagagttggtccgaccagccttggaaaactcactgaagaaagctcaattggactatgttgacctctatcttattcattctccaatgtctctaaagccaggtgaggaactttcaccaacagatgaaaatggaaaagtaatatttgacatagtggatctctgtaccacctgggaggccatggagaagtgtaaggatgcaggattggccaagtccattggggtgtcaaacttcaaccgcaggcagctggagatgatcctcaacaagccaggactcaagtacaagcctgtctgcaaccaggtagaatgtcatccgtatttcaaccggagtaaattgctagatttctgcaagtcgaaagatattgttctggttgcctatagtgctctgggatctcaacgagacaaacgatgggtggacccgaactccccggtgctcttggaggacccagtcctttgtgccttggcaaaaaagcacaagcgaaccccagccctgattgccctgcgctaccagctgcagcgtggggttgtggtcctggccaagagctacaatgagcagcgcatcagacagaacgtgcaggtttttgagttccagttgactgcagaggacatgaaagccatagatggcctagacagaaatctccactattttaacagtgatagttttgctagccaccctaattatccatattcagatgaatattaa

SEQ ID NO: 106427 - DNA, 1192 bp, Homo sapiens
  Payload ID: 902
  Gene Symbol: AKR1C4
  Gene Name: aldo-keto reductase family 1, member C4
  Uniprot ID: P17516
  ENST ID: ENST00000263126
  CDS Start-End: 34-1005
acaggatctgcttagtgaaagaagtggcaagcaatggatcccaaatatcagcgtgtagagctaaatgatggtcacttcatgcccgtattgggatttggcacctatgcacctccagaggttccgaggaacagagctgtagaggtcaccaaattagcaatagaagctggcttccgccatattgattctgcttatttatacaataatgaggagcaggttggactggccatccgaagcaagattgcagatggcagtgtgaagagagaagacatattctacacttcaaagctttggtgcactttctttcaaccacagatggtccaaccagccttggaaagctcactgaaaaaacttcaactggactatgttgacctctatcttcttcatttcccaatggctctcaagccaggtgagacgccactaccaaaagatgaaaatggaaaagtaatattcgacacagtggatctctctgccacatgggaggtcatggagaagtgtaaggatgcaggattggccaagtccatcggggtgtcaaacttcaactgcaggcagctggagatgatcctcaacaagccaggactcaagtacaagcctgtctgcaaccaggtagaatgtcatccttacctcaaccagagcaaactgctggatttctgcaagtcaaaagacattgttctggttgcccacagtgctctgggaacccaacgacataaactatgggtggacccaaactccccagttcttttggaggacccagttctttgtgccttagcaaagaaacacaaacaaaccccagccctgattgccctgcgctaccagctgcagcgtggggttgtggtcctggccaagagctacaatgagcagcggatcagagagaacatccaggtttttgaattccagttgacatcagaggatatgaaagttctagatggtctaaacagaaattatcgatatgttgtcatggattttcttatggaccatcctgattatccattttcagatgaatattagcatagagggtgttgcacgacatctagcagaaggccctgtgtgtggatggtgatgcagaggatgtctctatgctggtgactggacacacagcctctggttaaatccctcccctcctgcttggcaacttcagctagctagatatatccatggtccagaaagcaaacataataaatttttatcttgaagt

SEQ ID NO: 106428 - DNA, 1414 bp, Homo sapiens
  Payload ID: 902
  Gene Symbol: AKR1C4
  Gene Name: aldo-keto reductase family 1, member C4
  Uniprot ID: P17516
  ENST ID: ENST00000380448
  CDS Start-End: 254-1225
aggaagaagtgaatagaagaaaagagggtgttgcaaatcaaaagcacatagagatatcatcttacaccagtcagaatggctattcttaaaatgtcagacaacaacagatattggattgccacatcatcaggaccacaccttcatcaggaatgaatattcctactacaattaaagaagaaacaaaattaatttgttggtgaaaaacatgttgctgaaggaaacaggatctgcttagtgaaagaagtggcaagcaatggatcccaaatatcagcgtgtagagctaaatgatggtcacttcatgcccgtattgggatttggcacctatgcacctccagaggttccgaggaacagagctgtagaggtcaccaaattagcaatagaagctggcttccgccatattgattctgcttatttatacaataatgaggagcaggttggactggccatccgaagcaagattgcagatggcagtgtgaagagagaagacatattctacacttcaaagctttggtgcactttctttcaaccacagatggtccaaccagccttggaaagctcactgaaaaaacttcaactggactatgttgacctctatcttcttcatttcccaatggctctcaagccaggtgagacgccactaccaaaagatgaaaatggaaaagtaatattcgacacagtggatctctctgccacatgggaggtcatggagaagtgtaaggatgcaggattggccaagtccatcggggtgtcaaacttcaactgcaggcagctggagatgatcctcaacaagccaggactcaagtacaagcctgtctgcaaccaggtagaatgtcatccttacctcaaccagagcaaactgctggatttctgcaagtcaaaagacattgttctggttgcccacagtgctctgggaacccaacgacataaactatgggtggacccaaactccccagttcttttggaggacccagttctttgtgccttagcaaagaaacacaaacaaaccccagccctgattgccctgcgctaccagctgcagcgtggggttgtggtcctggccaagagctacaatgagcagcggatcagagagaacatccaggtttttgaattccagttgacatcagaggatatgaaagttctagatggtctaaacagaaattatcgatatgttgtcatggattttcttatggaccatcctgattatccattttcagatgaatattagcatagagggtgttgcacgacatctagcagaaggccctgtgtgtggatggtgatgcagaggatgtctctatgctggtgactggacacacagcctctggttaaatccctcccctcctgcttggcaacttcagctagctagatatatccatggtccagaaagcaaacataataaatttttatcttgaagtaa

SEQ ID NO: 106429 - DNA, 2347 bp, Homo sapiens
  Payload ID: 903
  Gene Symbol: AKR1D1
  Gene Name: aldo-keto reductase family 1, member D1
  Uniprot ID: P51857
  ENST ID: ENST00000242375
  CDS Start-End: 43-1023
cctgtggtgttcagaatcactcctacagtcaggttctccacaatggatctcagtgctgcaagtcaccgcatacctctaagtgatggaaacagcattcccatcatcggacttggtacctactcagaacctaaatcgacccctaagggagcctgtgcaacatcggtgaaggttgctattgacacagggtaccgacatattgatggggcctacatctaccaaaatgaacacgaagttggggaggccatcagggagaagatagcagaaggaaaggtgcggagggaagatatcttctactgtggaaagctatgggctacaaatcatgtcccagagatggtccgcccaaccctggagaggacactcagggtcctccagctagattatgtggatctttacatcattgaagtacccatggcctttaagccaggagatgaaatataccctagagatgagaatggcaaatggttatatcacaagtcaaatctgtgtgccacttgggaggcgatggaagcttgcaaagacgctggcttggtgaaatccctgggagtgtccaattttaaccgcaggcagctggagctcatcctgaacaagccaggactcaaacacaagccagtcagcaaccaggttgagtgccatccgtatttcacccagccaaaactcttgaaattttgccaacaacatgacattgtcattactgcatatagccctttggggaccagtaggaatccaatctgggtgaatgtttcttctccacctttgttaaaggatgcacttctaaactcattggggaaaaggtacaataagacagcagctcaaattgttttgcgtttcaacatccagcgaggggtggttgtcattcctaaaagctttaatcttgaaaggatcaaagaaaattttcagatctttgacttttctctcactgaagaagaaatgaaggacattgaagccttgaataaaaatgtccgctttgtagaattgctcatgtggcgcgatcatcctgaatacccatttcatgatgaatactgactgcagggagttcctgaacagatttttcactcccacgagtgccaagacggtgcaatgggtagtcccctagatgtgaaaatgaagagagagggttttaccatcctgagaagaaataatgatggaaacatgtttaatgtttgtgcagtgtaaatgactttgactcagtcacattgaagtaaaaatattaaaatctgttgaaataactcttaggaaattatcaactaattttttcagatcagtatcttctagattccagacagaaaaaaattacacttcagaaaagacatcaaaggcaacatatgacaacaagtaatttatgaatctgggtagtagcgttggtaatctgagttctttaagggttaacaggacaacgaagtgcatgtggcagtgtgctggcagtggccttgaggctttggaccattggttacaaaacagacacagccaagataagatccacacacacattattaacaaggaagtgatttgctgcaccttgagttgagagggctacatgtagaaaagtcttaaaatagagctaaacaccacagtggtcaacaaagccatcataatgttggtgtttgtttccctccaatgtatgtatgtttagtttttatccaacctgaggaatgaaaacttaactggatctctcttgcatccttaaagggcctgagtctcaacatggctgctgatccatacttacacatcttactgtcaatcttgcctacattgattatagaaccactattacgtgaaaaggcttgaaacaaccaacatatacaaataaaaccctgccttgtaaaatagtaaaagagaagccatatattggcttttcttcttaacttgggagatatattgaaacaaggtgctttataagattattgtacttaagactttaatagtgttacttggatagcttatatgaattttgagaattttatatgaattttgagaaagcaagttcaaaagaactctggtaattttcctgtatgtacaatttaaagagtgaataagattattagaattcagcaatagagatatatctattttcaattcaactacagaaatatattttattggccgggtgcggtggctcatgcctataatcccagcactttgggaggccaaggtgggcagatcaggaggtcaggagatcgagaccatcttggctaacaaggtgaaaccccgtctctactaaaaatacaaaaaattagccaggcgcggtggcgggggcctgtaatcccagctactcaggaggctgaggcagaagaatggcatgaacccgggaggaggagcttgcagtgagccgagatagcgccactgcagt

SEQ ID NO: 106430 - DNA, 1236 bp, Homo sapiens
  Payload ID: 903
  Gene Symbol: AKR1D1
  Gene Name: aldo-keto reductase family 1, member D1
  Uniprot ID: P51857
  ENST ID: ENST00000432161
  CDS Start-End: 88-960
tttctttgatggaataggccctaggacacctttctaaaaagactccctgtggtgttcagaatcactcctacagtcaggttctccacaatggatctcagtgctgcaagtcaccgcatacctctaagtgatggaaacagcattcccatcatcggacttggtacctactcagaacctaaatcgacccctaagggagcctgtgcaacatcggtgaaggttgctattgacacagggtaccgacatattgatggggcctacatctaccaaaatgaacacgaagttggggaggccatcagggagaagatagcagaaggaaaggtgcggagggaagatatcttctactgtggaaagctatgggctacaaatcatgtcccagagatggtccgcccaaccctggagaggacactcagggtcctccagctagattatgtggatctttacatcattgaagtacccatggcctttaagccaggagatgaaatataccctagagatgagaatggcaaatggttatatcacaagtcaaatctgtgtgccacttgggaggcgatggaagcttgcaaagacgctggcttggtgaaatccctgggagtgtccaattttaaccgcaggcagctggagctcatcctgaacaagccaggactcaaacacaagccagtcagcaaccaggttgagtgccatccgtatttcacccagccaaaactcttgaaattttgccaacaacatgacattgtcattactgcatatagccctttggggaccagtaggaatccaatctgggtgaatgtttcttctccacctttgttaaaggatgcacttctaaactcattggggaaaaggtacaataagacagcagctcaaattgttttgcgtttcaacatccagcgaggggtggttgtcattcctaaaagctttaatcttgaaaggatcaaagaaaattttcaggtggcgcgatcatcctgaatacccatttcatgatgaatactgactgcagggagttcctgaacagatttttcactcccacgagtgccaagacggtgcaatgggtagtcccctagatgtgaaaatgaagagagagggttttaccatcctgagaagaaataatgatggaaacatgtttaatgtttgtgcagtgtaaatgactttgactcagtcacattgaagtaaaaatattaaaatctgttgaaataactcttaggaaattatcaactaattttttcagatcagtatcttctagat

SEQ ID NO: 106431 - DNA, 290 bp, Homo sapiens
  Payload ID: 903
  Gene Symbol: AKR1D1
  Gene Name: aldo-keto reductase family 1, member D1
  ENST ID: ENST00000438242
  CDS Start-End: 2-290
aatggatctcagtgctgcaagtcaccgcatacctctaagtgatggaaacagcattcccatcatcggacttggtacctactcagaacctaaatcgctatgggctacaaatcatgtcccagagatggtccgcccaaccctggagaggacactcagggtcctccagctagattatgtggatctttacatcattgaagtacccatggcctttaagccaggagatgaaatataccctagagatgagaatggcaaatggttatatcacaagtcaaatctgtgtgccacttgggagg

SEQ ID NO: 106432 - DNA, 2234 bp, Homo sapiens
  Payload ID: 903
  Gene Symbol: AKR1D1
  Gene Name: aldo-keto reductase family 1, member D1
  Uniprot ID: P51857
  ENST ID: ENST00000411726
  CDS Start-End: 53-910
aaaaagactccctgtggtgttcagaatcactcctacagtcaggttctccacaatggatctcagtgctgcaagtcaccgcatacctctaagtgatggaaacagcattcccatcatcggacttggtacctactcagaacctaaatcgacccctaagggagcctgtgcaacatcggtgaaggttgctattgacacagggtaccgacatattgatggggcctacatctaccaaaatgaacacgaagttggggaggccatcagggagaagatagcagaaggaaaggtgcggagggaagatatcttctactgtggaaagctatgggctacaaatcatgtcccagagatggtccgcccaaccctggagaggacactcagggtcctccagctagattatgtggatctttacatcattgaagtacccatggcctttaagccaggagatgaaatataccctagagatgagaatggcaaatggttatatcacaagtcaaatctgtgtgccacttgggaggttgagtgccatccgtatttcacccagccaaaactcttgaaattttgccaacaacatgacattgtcattactgcatatagccctttggggaccagtaggaatccaatctgggtgaatgtttcttctccacctttgttaaaggatgcacttctaaactcattggggaaaaggtacaataagacagcagctcaaattgttttgcgtttcaacatccagcgaggggtggttgtcattcctaaaagctttaatcttgaaaggatcaaagaaaattttcagatctttgacttttctctcactgaagaagaaatgaaggacattgaagccttgaataaaaatgtccgctttgtagaattgctcatgtggcgcgatcatcctgaatacccatttcatgatgaatactgactgcagggagttcctgaacagatttttcactcccacgagtgccaagacggtgcaatgggtagtcccctagatgtgaaaatgaagagagagggttttaccatcctgagaagaaataatgatggaaacatgtttaatgtttgtgcagtgtaaatgactttgactcagtcacattgaagtaaaaatattaaaatctgttgaaataactcttaggaaattatcaactaattttttcagatcagtatcttctagattccagacagaaaaaaattacacttcagaaaagacatcaaaggcaacatatgacaacaagtaatttatgaatctgggtagtagcgttggtaatctgagttctttaagggttaacaggacaacgaagtgcatgtggcagtgtgctggcagtggccttgaggctttggaccattggttacaaaacagacacagccaagataagatccacacacacattattaacaaggaagtgatttgctgcaccttgagttgagagggctacatgtagaaaagtcttaaaatagagctaaacaccacagtggtcaacaaagccatcataatgttggtgtttgtttccctccaatgtatgtatgtttagtttttatccaacctgaggaatgaaaacttaactggatctctcttgcatccttaaagggcctgagtctcaacatggctgctgatccatacttacacatcttactgtcaatcttgcctacattgattatagaaccactattacgtgaaaaggcttgaaacaaccaacatatacaaataaaaccctgccttgtaaaatagtaaaagagaagccatatattggcttttcttcttaacttgggagatatattgaaacaaggtgctttataagattattgtacttaagactttaatagtgttacttggatagcttatatgaattttgagaattttatatgaattttgagaaagcaagttcaaaagaactctggtaattttcctgtatgtacaatttaaagagtgaataagattattagaattcagcaatagagatatatctattttcaattcaactacagaaatatattttattggccgggtgcggtggctcatgcctataatcccagcactttgggaggccaaggtgggcagatcaggaggtcaggagatcgagaccatcttggctaacaaggtgaaaccccgtctctactaaaaatacaaaaaattagccaggcgcggtggcgggggcctgtaatcccagctactcaggaggctgaggcagaagaatggcatgaacccgggaggaggagcttgcagtgagccgagatagcgccactgcagt

SEQ ID NO: 106433 - DNA, 1566 bp, Homo sapiens
  Payload ID: 904
  Gene Symbol: AKR1E2
  Gene Name: aldo-keto reductase family 1, member E2
  Uniprot ID: Q96JD6
  ENST ID: ENST00000298375
  CDS Start-End: 72-1034
cagtagctcgcgcggtgcctgtcggtagtcgcgtgcggggcggcggggcggcggggcggccggcggcggccatgggagatatcccagccgtgggcctcagctcctggaaggcttctccagggaaagtgaccgaggcagtgaaagaggccattgacgcagggtaccggcacttcgactgtgcttacttttaccacaatgagagggaggttggagcagggatccgttgcaagatcaaggaaggcgctgtaagacgggaggatctgttcattgccactaagctgtggtgcacctgccataagaagtccttggtggaaacagcatgcagaaagagtctcaaggccttgaagctgaactatttggacctctacctcatacactggcccatgggtttcaagcctcctcatccagaatggatcatgagctgcagtgaactttccttctgcctctcacatcctcgagtgcaggacttgcctctggacgagagcaacatggttattcccagtgacacggacttcctggacacgtgggaggccatggaggacctggtgatcaccgggctggtgaagaacatcggggtgtcaaacttcaaccatgaacagcttgagaggcttttgaataagcctgggttgaggttcaagccactaaccaaccagattgagtgccacccatatcttactcagaagaatctgatcagtttttgccaatccagagatgtgtccgtgactgcttaccgtcctcttggtggctcgtgtgagggggttgacctgatagacaaccctgtgatcaagaggattgcaaaggagcacggcaagtctcctgctcagattttgatccgatttcaaatccagaggaatgtgatagtgatccccggatctatcaccccaagtcacattaaagagaatatccaggtgtttgattttgaattaacacagcacgatatggataacatcctcagcctaaacaggaatctccgactggccatgttccccataactaaaaatcacaaagactatcctttccacatagaatactgaggacgcttccccttccttgtttctgctcagcccagatgcacagacactattggcaatgttgaccctcctctgtcatcacagcgccagggcagctgtgcctgggacaggagccacacagtcagagggggatgtaagagccaccttctctgacaaatctggagaattgagtgtgttctaagtgaaggcaatggggtttctccaagacagcctgtgtggcctctactctgaacaaatacactgatgagtcatcagtgaaatttgccttcacattttaagaaaactttatcttatggagttatttaagccatctacagagctgaggaaacagtgtaatgtgtctctgccccattgcgcagctccacccattgtgccccaggccagcccgcgtcacctacacttccttctgtgccctgccagtgacccccaggttattctaaagcagagtccttcccttcccccagtgagaaggaaaatgggataagtctgggacactgtttcagttcaataaagaggcttttttcttccttaaaaa

SEQ ID NO: 106434 - DNA, 1036 bp, Homo sapiens
  Payload ID: 904
  Gene Symbol: AKR1E2
  Gene Name: aldo-keto reductase family 1, member E2
  Uniprot ID: Q96JD6
  ENST ID: ENST00000334019
  CDS Start-End: 30-821
gcggggcggcggggcggccggcggcggccatgggagatatcccagccgtgggcctcagctcctggaaggcttctccagggaaagtgaccgaggcagtgaaagaggccattgacgcagggtaccggcacttcgactgtgcttacttttaccacaatgagagggaggttggagcagggatccgttgcaagatcaaggaaggcgctgtaagacgggaggatctgttcattgccactaagctgtggtgcacctgccataagaagtccttggtggaaacagcatgcagaaagagtctcaaggccttgaagctgaactatttggacctctacctcatacactggcccatgggtttcaagcctcctcatccagaatggatcatgagctgcagtgaactttccttctgcctctcacatcctcgagtgcaggacttgcctctggacgagagcaacatggttattcccagtgacacggacttcctggacacgtgggaggccatggaggacctggtgatcaccgggctggtgaagaacatcggggtgtcaaacttcaaccatgaacagcttgagaggcttttgaataagcctgggttgaggttcaagccactaaccaaccagattttgatccgatttcaaatccagaggaatgtgatagtgatccccggatctatcaccccaagtcacattaaagagaatatccaggtgtttgattttgaattaacacagcacgatatggataacatcctcagcctaaacaggaatctccgactggccatgttccccataactaaaaatcacaaagactatcctttccacatagaatactgaggacgcttccccttccttgtttctgctcagcccagatgcacagacactattggcaatgttgaccctcctctgtcatcacagcgccagggcagctgtgcctgggacaggagccacacagtcagagggggatgtaagagccaccttctctgacaaatctggagaattgagtgtgttctaagtgaaggcaatggggtttctccaagacagcctgtgtg

SEQ ID NO: 106435 - DNA, 913 bp, Homo sapiens
  Payload ID: 904
  Gene Symbol: AKR1E2
  Gene Name: aldo-keto reductase family 1, member E2
  Uniprot ID: Q96JD6
  ENST ID: ENST00000345253
  CDS Start-End: 30-698
gcggggcggcggggcggccggcggcggccatgggagatatcccagccgtgggcctcagctcctggaaggcttctccagggaaagtgaccgaggcagtgaaagaggccattgacgcagggtaccggcacttcgactgtgcttacttttaccacaatgagagggaggttggagcagggatccgttgcaagatcaaggaaggcgctgtaagacgggaggatctgttcattgccactaagctgtggtgcacctgccataagaagtccttggtggaaacagcatgcagaaagagtctcaaggccttgaagctgaactatttggacctctacctcatacactggcccatgggtttcaagcctcctcatccagaatggatcatgagctgcagtgaactttccttctgcctctcacatcctcgagtgcaggacttgcctctggacgagagcaacatggttattcccagtgacacggacttcctggacacgtgggagattttgatccgatttcaaatccagaggaatgtgatagtgatccccggatctatcaccccaagtcacattaaagagaatatccaggtgtttgattttgaattaacacagcacgatatggataacatcctcagcctaaacaggaatctccgactggccatgttccccataactaaaaatcacaaagactatcctttccacatagaatactgaggacgcttccccttccttgtttctgctcagcccagatgcacagacactattggcaatgttgaccctcctctgtcatcacagcgccagggcagctgtgcctgggacaggagccacacagtcagagggggatgtaagagccaccttctctgacaaatctggagaattgagtgtgttctaagtgaaggcaatggggtttctccaagacagcctgtgtg

SEQ ID NO: 106436 - DNA, 381 bp, Homo sapiens
  Payload ID: 904
  Gene Symbol: AKR1E2
  Gene Name: aldo-keto reductase family 1, member E2
  ENST ID: ENST00000487985
  CDS Start-End: 1-170
gagatgtgtccgtgactgcttaccgtcctcttggtggctcgtgtgagggggttgacctgatagacaaccctgtgatcaagaggattgcaaaggagcacgattttgatccgatttcaaatccagaggaatgtgatagtgatccccggatctatcaccccaagtcacattaaagagaatatccaggtgtttgattttgaattaacacagcacgatatggataacatcctcagcctaaacaggaatctccgactggccatgttccccatgtaaatatggctccttctttttaaaacagagggaagaatatacagattgaatgattggtgtctgaataggtatttatcatacacattttagattaattaaactttctcattataa

SEQ ID NO: 106437 - DNA, 844 bp, Homo sapiens
  Payload ID: 904
  Gene Symbol: AKR1E2
  Gene Name: aldo-keto reductase family 1, member E2
  Uniprot ID: Q96JD6
  ENST ID: ENST00000532248
  CDS Start-End: 30-782
gcggggcggcggggcggccggcggcggccatgggagatatcccagccgtgggcctcagctcctggaaggcttctccagggaaagtgaccgaggcagtgaaagaggccattgacgcagggtaccggcacttcgactgtgcttacttttaccacaatgagagggaggttggagcagggatccgttgcaagatcaaggaaggcgctgtaagacgggaggatctgttcattgccactaagctgtggtgcacctgccataagaagtccttggtggaaacagcatgcagaaagagtctcaaggccttgaagctgaactatttggacctctacctcatacactggcccatgggtttcaagcctcctcatccagaatggatcatgagctgcagtgaactttccttctgcctctcacatcctcgagtgcaggacttgcctctggacgagagcaacatggttattcccagtgacacggacttcctggacacgtgggaggccatggaggacctggtgatcaccgggctggtgaagaacatcggggtgtcaaacttcaaccatgaacagcttgagaggcttttgaataagcctgggttgaggttcaagccactaaccaaccagattttgatccgatttcaaatccagaggaatgtgatagtgatccccggatctatcaccccaagtcacattaaagagaatatccaggtgtttgattttgaattaacacagcacgatatggataacatcctcagcctaaacaggaatctccgactggccatgttccccatgtaaatatggctccttctttttaaaacagagggaagaatatacagattgaatgattggtgtctgaa

SEQ ID NO: 106438 - DNA, 506 bp, Homo sapiens
  Payload ID: 904
  Gene Symbol: AKR1E2
  Gene Name: aldo-keto reductase family 1, member E2
  ENST ID: ENST00000525572
  CDS Start-End: 1-112
gagtctcaaggccttgaagctgaactatttggacctctacctcatacactggcccatgggtttcaaggtaccgttcacctcctcatccagaatggatcatgagctgcagtgaactttccttctgcctctcacatcctcgagtgcaggacttgcctctggacgagagcaacatggttattcccagtgacacggacttcctggacacgtgggaggccatggaggacctggtgatcaccgggctggtgaagaacatcggggtgtcaaacttcaaccatgaacagcttgagaggcttttgaataagcctgggttgaggttcaagccactaaccaaccagattgagtgccacccatatcttactcagaagaatctgatcagtttttgccaatccagagatgtgtccgtgactgcttaccgtcctcttggtggctcgtgtgagggggttgacctgatagacaaccctgtgatcaagaggattgcaaaggagcacggcaagtctcctgctcag

SEQ ID NO: 106439 - DNA, 1626 bp, Homo sapiens
  Payload ID: 904
  Gene Symbol: AKR1E2
  Gene Name: aldo-keto reductase family 1, member E2
  ENST ID: ENST00000474119
  CDS Start-End: 375-986
atgcttccagccattgtcggagtgtcagccgtcacaaggcacttccagccagtcgcaacggcgggtcgccagcgccgcagtagctcgcgcggtgcctgtcggcttctccagggaaagtgaccgaggcagtgaaagaggccattgacgcagggtaccggcacttcgactgtgcttacttttaccacaatgagagggaggttggagcagggatccgttgcaagatcaaggaaggcgctgtaagacgggaggatctgttcattgccactaagctgtggtgcacctgccataagaagtccttggtggaaacagcatgcagaaagagtctcaaggccttgaagctgaactatttggacctctacctcatacactggcccatgggtttcaagcctcctcatccagaatggatcatgagctgcagtgaactttccttctgcctctcacatcctcgagtgcaggacttgcctctggacgagagcaacatggttattcccagtgacacggacttcctggacacgtgggaggccatggaggacctggtgatcaccgggctggtgaagaacatcggggtgtcaaacttcaaccatgaacagcttgagaggcttttgaataagcctgggttgaggttcaagccactaaccaaccagattgagtgccacccatatcttactcagaagaatctgatcagtttttgccaatccagagatgtgtccgtgactgcttaccgtcctcttggtggctcgtgtgagggggttgacctgatagacaaccctgtgatcaagaggattgcaaaggagcacggcaagtctcctgctcagattttgatccgatttcaaatccagaggaatgtgatagtgatccccggatctatcaccccaagtcacattaaagagaatatccaggtgtttgattttgaattaacacagcacgatatggataacatcctcagcctaaacaggaatctccgactggccatgttccccatgtaaatatggctccttctttttaaaacagagggaagaatatacagattgaatgattggtgtctgaatagaactaaaaatcacaaagactatcctttccacatagaatactgaggacgcttccccttccttgtttctgctcagcccagatgcacagacactattggcaatgttgaccctcctctgtcatcacagcgccagggcagctgtgcctgggacaggagccacacagtcagagggggatgtaagagccaccttctctgacaaatctggagaattgagtgtgttctaagtgaaggcaatggggtttctccaagacagcctgtgtggcctctactctgaacaaatacactgatgagtcatcagtgaaatttgccttcacattttaagaaaactttatcttatggagttatttaagccatctacagagctgaggaaacagtgtaatgtgtctctgccccattgcgcagctccacccattgtgccccaggccagcccgcgtcacctacacttccttctgtgccctgccagtgacccccaggttattctaaagcagagtccttcccttcccccagtgagaaggaaaatgggataagtctgggacactgtttcagttcaataaagaggcttttttcttccttaaaaa

SEQ ID NO: 106440 - DNA, 754 bp, Homo sapiens
  Payload ID: 904
  Gene Symbol: AKR1E2
  Gene Name: aldo-keto reductase family 1, member E2
  ENST ID: ENST00000533295
  CDS Start-End: 159-754
cccacagtgaactgtgctctatttactgtacttcccacagttcagtgtccaaactgagcactgttgccgtgaagatgtcagggtgaacgaggagccctgtgatctcctgaggttcaagagagacttcagaagatggtgagctcctgagggcaaggcccatgcaggtcattttcagcactgcaccctggcctaacttgccccgtgcacaggcttctccagggaaagtgaccgaggcagtgaaagaggccattgacgcagggtaccggcacttcgactgtgcttacttttaccacaatgagagggaggttggagcagggatccgttgcaagatcaaggaaggcgctgtaagacgggaggatctgttcattgccactaagctgtggtgcacctgccataagaagtccttggtggaaacagcatgcagaaagagtctcaaggccttgaagctgaactatttggacctctacctcatacactggcccatgggtttcaagcctcctcatccagaatggatcatgagctgcagtgaactttccttctgcctctcacatcctcgagtgcaggacttgcctctggacgagagcaacatggttattcccagtgacacggacttcctggacacgtgggaggccatggaggacctggtgatcaccgggctggtgaagaacatcggggtgtcaaacttcaaccatgaacagcttgagaggcttttgaataagcctgggttgaggttcaagccactaaccaaccaggt

SEQ ID NO: 106441 - DNA, 1655 bp, Homo sapiens
  Payload ID: 904
  Gene Symbol: AKR1E2
  Gene Name: aldo-keto reductase family 1, member E2
  Uniprot ID: Q96JD6
  ENST ID: ENST00000463345
  CDS Start-End: 92-1015
acggcgggtcgccagcgccgcagtagctcgcgcggtgcctgtcggtagtcgcgtgcggggcggcggggcggcggggcggccggcggcggccatgggagatatcccagccgtgggcctcagctcctggaaggcttctccagggaaagtgaccgaggcagtgaaagaggccattgacgcagggtaccggcacttcgactgtgcttacttttaccacaatgagagggaggttggagcagggatccgttgcaagatcaaggaaggcgctgtaagacgggaggatctgttcattgccactaagctgtggtgcacctgccataagaagtccttggtggaaacagcatgcagaaagagtctcaaggccttgaagctgaactatttggacctctacctcatacactggcccatgggtttcaagcctcctcatccagaatggatcatgagctgcagtgaactttccttctgcctctcacatcctcgagtgcaggacttgcctctggacgagagcaacatggttattcccagtgacacggacttcctggacacgtgggaggccatggaggacctggtgatcaccgggctggtgaagaacatcggggtgtcaaacttcaaccatgaacagcttgagaggcttttgaataagcctgggttgaggttcaagccactaaccaaccagattgagtgccacccatatcttactcagaagaatctgatcagtttttgccaatccagagatgtgtccgtgactgcttaccgtcctcttggtggctcgtgtgagggggttgacctgatagacaaccctgtgatcaagaggattgcaaaggagcacggcaagtctcctgctcagattttgatccgatttcaaatccagaggaatgtgatagtgatccccggatctatcaccccaagtcacattaaagagaatatccaggtgtttgattttgaattaacacagcacgatatggataacatcctcagcctaaacaggaatctccgactggccatgttccccatgtaaatatggctccttctttttaaaacagagggaagaatatacagattgaatgattggtgtctgaatagaactaaaaatcacaaagactatcctttccacatagaatactgaggacgcttccccttccttgtttctgctcagcccagatgcacagacactattggcaatgttgaccctcctctgtcatcacagcgccagggcagctgtgcctgggacaggagccacacagtcagagggggatgtaagagccaccttctctgacaaatctggagaattgagtgtgttctaagtgaaggcaatggggtttctccaagacagcctgtgtggcctctactctgaacaaatacactgatgagtcatcagtgaaatttgccttcacattttaagaaaactttatcttatggagttatttaagccatctacagagctgaggaaacagtgtaatgtgtctctgccccattgcgcagctccacccattgtgccccaggccagcccgcgtcacctacacttccttctgtgccctgccagtgacccccaggttattctaaagcagagtccttcccttcccccagtgagaaggaaaatgggataagtctgggacactgtttcagttcaataaagaggcttttttcttccttaaaaa

SEQ ID NO: 106442 - DNA, 1362 bp, Homo sapiens
  Payload ID: 905
  Gene Symbol: AKR7A2
  Gene Name: aldo-keto reductase family 7, member A2
  Uniprot ID: O43488
  ENST ID: ENST00000235835
  CDS Start-End: 23-1102
ccaacgcgcaggcgccgctgctatgctgagtgccgcgtctcgcgtagtctcccgcgccgccgtccactgcgcgcttcgctctccgccgcccgaggcccgcgcgctcgccatgtcccggccaccgccaccgcgggtcgcctcggtgctgggcaccatggagatggggcgccgcatggacgcgcccgccagcgccgcggccgtgcgcgcctttctggagcgcggccacaccgaactggacacggccttcatgtacagcgacggccagtccgagaccatcctgggcggcctggggctcgggctgggcggtggcgactgcagagtgaaaattgccaccaaggccaacccttgggatggaaaatcactaaagcctgacagtgtccggtcccagctggagacgtcattgaagaggctgcagtgtccccaagtggacctcttctacctacacgcacctgaccacggcaccccggtggaagagacgctgcatgcctgccagcggctgcaccaggagggcaagttcgtggagcttggcctctccaactatgctagctgggaagtggccgagatctgtaccctctgcaagagcaatggctggatcctgcccactgtgtaccagggcatgtacaacgccaccacccggcaggtggaaacggagctcttcccctgcctcaggcactttggactgaggttctatgcctacaaccctctggctgggggcctgctgactggcaagtacaagtatgaggacaaggacgggaaacagcctgtgggccgcttctttgggaatagctgggctgagacctacaggaatcgcttctggaaggagcaccacttcgaggccattgcgttggtggagaaggccctgcaggccgcatatggcgccagcgcccccagtgtgacctcggctgccctccggtggatgtaccaccactcacagctgcagggtgcccacggggacgcggtcatcctgggcatgtccagcctggagcagctggagcagaacttggcagcaacagaggaagggcccctggagccggctgtcgtggatgcctttaatcaagcctggcatttggttgctcacgaatgtcccaactacttccgctaggcccatcatggctcaggctgcccaaggcttttctgtcacctcttttgttctctcacactgaccagtcttggccttaagctgacttagaagggtttttctgaattgtctagatccatgcattatttttctagcttcctgccttgctccctattcactttacactgtgaaaggtggggggtgagtcccacttgagcgcttcctgttgaataaagcaggcacttgacctggctgtagcctaggtcttgagtgaaccccaaaaa

SEQ ID NO: 106443 - DNA, 1171 bp, Homo sapiens
  Payload ID: 905
  Gene Symbol: AKR7A2
  Gene Name: aldo-keto reductase family 7, member A2
  ENST ID: ENST00000330072
  CDS Start-End: 1-945
cgcgccgccgtccactgcgcgcttcgctctccgccgcccgaggcccgcgcgctcgccatgtcccggccaccgccaccgcgggtcgcctcggtgctgggcaccatggagatggggcgccgcatggacgcgcccgccagcgccgcggccgtgcgcgcctttctggagcgcggccacaccgaactggacacggccttcatgtacagcgacggccagtccgagaccatcctgggcggcctggggctcgggctgggcggtggcgactgcagagtgaaaattgccaccaaggccaacccttgggatggaaaatcactaaagcctgacagtgtccggtcccagctggagacgtcattgaagaggctgcagtgtccccaagtggacctcttctacctacacgcacctgaccacggcaccccggtggaagagacgctgcatgcctgccagcggctgcaccaggagggcatgtacaacgccaccacccggcaggtggaaacggagctcttcccctgcctcaggcactttggactgaggttctatgcctacaaccctctggctgggggcctgctgactggcaagtacaagtatgaggacaaggacgggaaacagcctgtgggccgcttctttgggaatagctgggctgagacctacaggaatcgcttctggaaggagcaccacttcgaggccattgcgttggtggagaaggccctgcaggccgcatatggcgccagcgcccccagtgtgacctcggctgccctccggtggatgtaccaccactcacagctgcagggtgcccacggggacgcggtcatcctgggcatgtccagcctggagcagctggagcagaacttggcagcaacagaggaagggcccctggagccggctgtcgtggatgcctttaatcaagcctggcatttggttgctcacgaatgtcccaactacttccgctaggcccatcatggctcaggctgcccaaggcttttctgtcacctcttttgttctctcacactgaccagtcttggccttaagctgacttagaagggtttttctgaattgtctagatccatgcattatttttctagcttcctgccttgctccctattcactttacactgtgaaaggtggggggtgagtcccacttgagcgcttcctgttgaataaagcaggcacttgacct

SEQ ID NO: 106444 - DNA, 488 bp, Homo sapiens
  Payload ID: 905
  Gene Symbol: AKR7A2
  Gene Name: aldo-keto reductase family 7, member A2
  ENST ID: ENST00000481966
  CDS Start-End: 1-168
ggcaccccggtggaagagacgctgcatgcctgccagcggctgcaccaggagggcaagttcgtggagcttggcctctccaactatgctagctgggaagtggccgagatctgtaccctctgcaagagcaatggctggatcctgcccactgtgtaccagggggcctgctgactggcaagtacaagtatgaggacaaggacgggaaacagcctgtgggccgcttctttgggaatagctgggctgagacctacaggaatcgcttctggaaggagcaccacttcgaggccattgcgttggtggagaaggccctgcaggccgcatatggcgccagcgcccccagtgtgacctcggctgccctccggtggatgtaccaccactcacagctgcagggtgcccacggggacgcggtcatcctgggcatgtccagcctggagcagctggagcagaacttggcagcaacagaggaagggcccctggagccggctgtcgtg

SEQ ID NO: 106445 - DNA, 725 bp, Homo sapiens
  Payload ID: 905
  Gene Symbol: AKR7A2
  Gene Name: aldo-keto reductase family 7, member A2
  ENST ID: ENST00000489286
  CDS Start-End: 1-617
cggccttcatgtacagcgacggccagtccgagaccatcctgggcggcctggggctcgggctgggcggtggcgactgcagagtgaaaattgccaccaaggccaacccttgggatggaaaatcactaaagcctgacagtgtccggtcccagctggagacgtcattgaagaggctgcagtgtccccaagtggacctcttctacctacacgcacctgaccacggcaccccggtggaagagacgctgcatgcctgccagcggctgcaccaggagggcaagttcgtggagcttggcctctccaactatgctagctgggaagtggccgagatctgtaccctctgcaagagcaatggctggatcctgcccactgtgtaccagcttctggaaggagcaccacttcgaggccattgcgttggtggagaaggccctgcaggccgcatatggcgccagcgcccccagtgtgacctcggctgccctccggtggatgtaccaccactcacagctgcagggtgcccacggggacgcggtcatcctgggcatgtccagcctggagcagctggagcagaacttggcagcaacagaggaagggcccctggagccggctgtcgtggatgcctttaatcaagcctggcatttggttgctcacgaatgtcccaactacttccgctaggcccatcatggctcaggctgcccaaggcttttctgtcacctcttttgttctctcacact

SEQ ID NO: 106446 - DNA, 1710 bp, Homo sapiens
  Payload ID: 906
  Gene Symbol: AKR7A3
  Gene Name: aldo-keto reductase family 7, member A3 (aflatoxin aldehyde reductase)
  Uniprot ID: O95154
  ENST ID: ENST00000361640
  CDS Start-End: 542-1537
ttcttttctttcaacactttaaccatgtcactccatggggacgctgtcttgagcctttggtaagcctcattctccaggaccacacggcaggcgcgacagccctaggtccaccccaccccgtaagcgctccctccgggaggagacagaaacccaggacagctccggggcaaggccgaggaaggagggacgacggggcagggaggcccgaagagtccccgccttttgggatagtcgccacccttggaccccctcacccttggggacgttgaggagtgttaaaatctccaagacgcgagtcaccggtacgaagccacagccatttcgctgcttgctcggtgcaagtgcagaaggtcctagtagccgagcgtggagtcgagctcgtgggcggcgtcgggcaccttcggccgcgccctcagctgcacccgccggtgggcggggcccgagcccgtctctaaagccacgaggccgcccgctccgagcctggtgcttccgaccgctgcgcgcggctcctgggctgtcacagtctcccgttgccgccgtcatgtcccggcagctgtcgcgggcccggccagccacggtgctgggcgccatggagatggggcgccgcatggacgcgcccaccagcgccgcagtcacgcgcgccttcctggagcgcggccacaccgagatagacacggccttcgtgtacagcgagggccagtccgagaccatccttggcggcctggggctccggctgggcggcagcgactgcagagtgaaaattgataccaaggccattccactgtttgggaactccctgaagcctgacagtctccggttccagctggagacgtcactgaagcggctgcagtgtccccgagtggacctcttctacctgcatatgccagaccacagcaccccggtggaagagacactgcgtgcctgccaccagctgcaccaggagggcaagttcgtggagcttggcctctccaactatgcagcctgggaagtggccgagatctgtaccctctgcaagagcaacggctggatcctgcccactgtgtaccagggcatgtacaatgccatcacccggcaggtggaaacggagctcttcccctgcctcaggcactttggactgaggttctatgccttcaaccctctggctgggggcctgctgaccggcaagtacaagtatgaggacaagaatgggaaacagcccgtgggccgcttctttgggaatacctgggcagagatgtacaggaatcgctactggaaggagcaccactttgagggcattgccctggtggagaaggccctgcaggccgcgtatggcgccagcgcccccagcatgacctcggccaccctccggtggatgtaccaccactcacagctgcagggtgcccacggggacgcggtcatcctgggcatgtccagcctggagcagctggagcagaacttggcagcggcagaggaagggcccctggagccggctgtcgtggacgcctttaatcaagcctggcatttggttactcacgaatgtcccaactacttccgctaggcccatcgtttctcaggctgcccaaggctcttctgtaacatcttttgttactcacattttctttaatttagaactgcctcagtaaattcttagggatggaagtatttggacaaaaacctaatagaagagtcaccaccaaatgaagaataaaactcccagggtgctgtgtgtta

SEQ ID NO: 106447 - DNA, 1984 bp, Homo sapiens
  Payload ID: 907
  Gene Symbol: AKR7L
  Gene Name: aldo-keto reductase family 7-like (gene/pseudogene)
  ENST ID: ENST00000457194
  CDS Start-End: 1-617
cggccttcctgtacagcgacggccagtccgagaccatccttggcggcctggggctccgaatgggcagcagcgactgcagagtgaaaattgctaccaaggccaatccatggattgggaactccctgaagcctgacagtgtccgatcccagctggagacgtcactgaagcggctgcagtgtccctgagtggacctcttctatctacatgcacctgaccacagcgccccggtggaagagacactgcgtgcctgccaccagctgcaccaggagggcaagttcgtggagcttggcctctccaactatgccgcctgggaagtggccgagatctgtaccctctgcaagagcaacggctggatcctgcccactgtgtaccagcttctggaaggagcaccacttcgagggcattgccctggtggagaaggccctgcaggccgcgtatggcgccagcgctcccagcatgacctcggccgccctccggtggatgtaccaccactcacagctgcagggtgcccacggggacgcggtcatcctgggcatgtccagcctggagcagctggagcagaacttggcagcggcagaggaagggcccctggagccggctgtcgtggacgcctttaatcaagcctggcatttgtttgcccacgaatgtcccaactacttcatctaagctcattgtggctcaggctgcccaaggcttttctgtcaactcttttgctctctcccgctttgtctaatttagaactgcctcactaaattcttagggatggaagtatttggaaaaaaacctaacagtagagtcaccacctaaggaagaataaaatctcccagggtgctgtgtgttagtctgtttgcgttgctataaaagaatacctgagactgggtcatgtataaagaaaagaggtttctttggctcacagttctgcagtctgtacaagagggtgtggtgccggcatctgctcttggtgagggcctcaggaagcttagaatcatggcagaaggggaaacggagccagcgtgtcacatggtgagagagggagcaagagacagacaggggaggaaattcacacactgatggtggggatgtaaaatggtacaaccagtttggaaaacagtttggcagtttctcaaaggattaaacataaaattaccataggattcagcagttccacttgtgggtatgtagccaagagaaatgaaaacatatctccccacaaaaaaacttgggtatgagatttcacattatcattgctcataatagccaataagtaaaaacaacccaaatgtccaagaatgaataaatggataaacaaaatatggtatatttatacaacagactattattcggccattaaaaaaaaaaaagagtggctgacacctgtaatctcagcactttgagaggccaaggcagtaggactgattgaagacaggagttccagaccagtctgggaaacaaagcgagaccctgtctccactaaacataaaaacaaaattactggggccccatggcacacacctgtagtcccagctgctcgggaagctgagatgggcggattgcttgagcccaggtattcaagtctggagtgagctatgactgtgccactgcactccagcctgggcgacagagcaaaccctgtttccaaacaaacaaacaaacaaacaaatacacagacagaagtagttaaacatctacaaggtaagtgcatcttgaagacgtgttaagttaaagaagccaattacaaaaggtttcacgttgtatgatttcgtttatatgaaatgtccagaataggcaaatctgtttgagagagagaaagtagatgagtacttgcctaggactgggaggaggattgcgaggaaatggagattcactgctaatgagtacagggtttcttttgggggcgcttatgaagatgctctgaaattgattgtgatggttgtacaactctgaatacatgaaacagcattaaacatcactttaagtaagtcaa

SEQ ID NO: 106448 - DNA, 1240 bp, Homo sapiens
  Payload ID: 907
  Gene Symbol: AKR7L
  Gene Name: aldo-keto reductase family 7-like (gene/pseudogene)
  Uniprot ID: Q8NHP1
  ENST ID: ENST00000420396
  CDS Start-End: 78-1070
gccgcccgctccgagcctggtgcttccgaccgctgcgcgcggctcctgggctgtcacagtctcccgttgccgccgtcatgtcccggcagctgtcgcgggcccggccagccacggtgctgggcgccatggagatggggcgccgcatggacgcgcccaccagcgccgcagtcacgcgcgccttcctggagcgcggccacaccgagatagacacggccttcctgtacagcgacggccagtccgagaccatccttggcggcctggggctccgaatgggcagcagcgactgcagagtgaaaattgctaccaaggccaatccatggattgggaactccctgaagcctgacagtgtccgatcccagctggagacgtcactgaagcggctgcagtgtcccgtggacctcttctatctacatgcacctgaccacagcgccccggtggaagagacactgcgtgcctgccaccagctgcaccaggagggcaagttcgtggagcttggcctctccaactatgccgcctgggaagtggccgagatctgtaccctctgcaagagcaacggctggatcctgcccactgtgtaccagggcatgtacagcgccaccacccggcaggtggaaacggagctcttcccctgcctcaggcactttggactgaggttctatgcctacaaccctctggctgggggcctgctgaccggcaagtacaagtatgaggacaaggacgggaaacagcccgtgggccgcttctttgggactcagtgggcagagatctacaggaatcacttctggaaggagcaccacttcgagggcattgccctggtggagaaggccctgcaggccgcgtatggcgccagcgctcccagcatgacctcggccgccctccggtggatgtaccaccactcacagctgcagggtgcccacggggacgcggtcatcctgggcatgtccagcctggagcagctggagcagaacttggcagcggcagaggaagggcccctggagccggctgtcgtggacgcctttaatcaagcctggcatttgtttgcccacgaatgtcccaactacttcatctaagctcattgtggctcaggctgcccaaggcttttctgtcaactcttttgctctctcccgctttgtctaatttagaactgcctcactaaattcttagggatggaagtatttggaaaaaaacctaacagtagagtcaccacctaaggaagaataaaatctcccagggtgctgtg

SEQ ID NO: 106449 - DNA, 1313 bp, Homo sapiens
  Payload ID: 907
  Gene Symbol: AKR7L
  Gene Name: aldo-keto reductase family 7-like (gene/pseudogene)
  ENST ID: ENST00000429712
  CDS Start-End: 121-1116
accaccggtgggcgcggcccgagccagtccctaaagccacgaggccgcccgctccgagcctggtgcttccgaccgctgcgcgcggctcctgggctgtcacagtctcccgttgccgccgtcatgtcccggcagctgtcgcgggcccggccagccacggtgctgggcgccatggagatggggcgccgcatggacgcgcccaccagcgccgcagtcacgcgcgccttcctggagcgcggccacaccgagatagacacggccttcctgtacagcgacggccagtccgagaccatccttggcggcctggggctccgaatgggcagcagcgactgcagagtgaaaattgctaccaaggccaatccatggattgggaactccctgaagcctgacagtgtccgatcccagctggagacgtcactgaagcggctgcagtgtccctgagtggacctcttctatctacatgcacctgaccacagcgccccggtggaagagacactgcgtgcctgccaccagctgcaccaggagggcaagttcgtggagcttggcctctccaactatgccgcctgggaagtggccgagatctgtaccctctgcaagagcaacggctggatcctgcccactgtgtaccagggcatgtacagcgccaccacccggcaggtggaaacggagctcttcccctgcctcaggcactttggactgaggttctatgcctacaaccctctggctgggggcctgctgaccggcaagtacaagtatgaggacaaggacgggaaacagcccgtgggccgcttctttgggactcagtgggcagagatctacaggaatcacttctggaaggagcaccacttcgagggcattgccctggtggagaaggccctgcaggccgcgtatggcgccagcgctcccagcatgacctcggccgccctccggtggatgtaccaccactcacagctgcagggtgcccacggggacgcggtcatcctgggcatgtccagcctggagcagctggagcagaacttggcagcggcagaggaagggcccctggagccggctgtcgtggacgcctttaatcaagcctggcatttgtttgcccacgaatgtcccaactacttcatctaagctcattgtggctcaggctgcccaaggcttttctgtcaactcttttgctctctcccgctttgtctaatttagaactgcctcactaaattcttagggatggaagtatttggaaaaaaacctaacagtagagtcaccacctaaggaagaataaaatctcccagggtgctgtgtgttagtctgtttgcgttgctataaaa

SEQ ID NO: 106450 - DNA, 2384 bp, Homo sapiens
  Payload ID: 908
  Gene Symbol: ALDOA
  Gene Name: aldolase A, fructose-bisphosphate
  Uniprot ID: P04075
  ENST ID: ENST00000338110
  CDS Start-End: 1088-2182
aaacaccgctctggtcaccatggcaacagcgggatgccgcgaacggcttctgggcggggccggtccctcggacgattggacctagcttggcgcggaatccgtgaattgcccgcggcccgagggtgcagctcccggactgactggctctgcccttccccatggacgcctcctctagcccgtggaatccaaccccggctcctgtcagcagccctcccctgctgctccccatccctgccatcgtcttcatcgctgtgggcatctatttgttgctgctgggtctagtcctgctgactaggaactgcctgctggcccagggctgctgcgcggacggtagctccccctgcaggaagcaaggttcctccgggcccccagactgctgctggacctgtgcagaagcctgcaactttcctctgcctagcccggcccacttcctggatgcttgctgcccccagcccaccagagctgactgggcacctcgctgcccccgctgctgcccactctgcgactgtgcctgtacgtgccagctccccgactgccagagcctcaactgtctctgcttcgagatcaagctccgatgaggacccagggcccctgccctctggggagcggccagcccccagggcccatgtgccctcctccctgaagagcctttccccacgccactggaaccacagatggcctgccgagcacccaggcctgggaactggaagtggcagcgcagggcctggctccctgcagggcaggactcttggccggctggacggcagctcctctggagggccagaaaagagaggggctagtgctcgggcaggtgccctggcttcccttcccctccacacgtcaacgattctatttgaagttgggcaggggggtggcgctgctcaccacacacaagtgttataggaggagtctggcccttgagtaccgggtacgcaggggtgcctcaaccacactccgtccacggactctccgttattttaggaggtccctggccaaagatttatttctcttgacaaccaagggcctccgtctggatttccaaggaagaatttcctctgaagcaccggaacttgctactaccagcaccatgccctaccaatatccagcactgaccccggagcagaagaaggagctgtctgacatcgctcaccgcatcgtggcacctggcaagggcatcctggctgcagatgagtccactgggagcattgccaagcggctgcagtccattggcaccgagaacaccgaggagaaccggcgcttctaccgccagctgctgctgacagctgacgaccgcgtgaacccctgcattgggggtgtcatcctcttccatgagacactctaccagaaggcggatgatgggcgtcccttcccccaagttatcaaatccaagggcggtgttgtgggcatcaaggtagacaagggcgtggtccccctggcagggacaaatggcgagactaccacccaagggttggatgggctgtctgagcgctgtgcccagtacaagaaggacggagctgacttcgccaagtggcgttgtgtgctgaagattggggaacacaccccctcagccctcgccatcatggaaaatgccaatgttctggcccgttatgccagtatctgccagcagaatggcattgtgcccatcgtggagcctgagatcctccctgatggggaccatgacttgaagcgctgccagtatgtgaccgagaaggtgctggctgctgtctacaaggctctgagtgaccaccacatctacctggaaggcaccttgctgaagcccaacatggtcaccccaggccatgcttgcactcagaagttttctcatgaggagattgccatggcgaccgtcacagcgctgcgccgcacagtgccccccgctgtcactgggatcaccttcctgtctggaggccagagtgaggaggaggcgtccatcaacctcaatgccattaacaagtgccccctgctgaagccctgggccctgaccttctcctacggccgagccctgcaggcctctgccctgaaggcctggggcgggaagaaggagaacctgaaggctgcgcaggaggagtatgtcaagcgagccctggccaacagccttgcctgtcaaggaaagtacactccgagcggtcaggctggggctgctgccagcgagtccctcttcgtctctaaccacgcctattaagcggaggtgttcccaggctgcccccaacactccaggccctgccccctcccactcttgaagaggaggccgcctcctcggggctccaggctggcttgcccgcgctctttcttccctcgtgacagtggtgtgtggtgtcgtctgtgaatgctaagtccatcaccctttccggcacactgccaaataaacagctatttaaggggga

SEQ ID NO: 106451 - DNA, 1447 bp, Homo sapiens
  Payload ID: 908
  Gene Symbol: ALDOA
  Gene Name: aldolase A, fructose-bisphosphate
  ENST ID: ENST00000395240
  CDS Start-End: 173-1279
ccccttccgaggctaaatcggctgcgttcctctcggaacgcgccgcagaaggggtcctggtgacgagtcccgcgttctctccttgaatccactcgccagcccgccgccctctgccgccgcaccctgcacacccgcccctctcctgtgccaggaacttgctactaccagcaccatgccctaccaatatccagcactgaccccggagcagaagaaggagctgtctgacatcgctcaccgcatcgtggcacctggcaagggcatcctggctgcagatgagtccactgggagcattgccaagcggctgcagtccattggcaccgagaacaccgaggagaaccggcgcttctaccgccagctgctgctgacagctgacgaccgcgtgaacccctgcattgggggtgtcatcctcttccatgagacactctaccagaaggcggatgatgggcgtcccttcccccaagttatcaaatccaagggcggtgttgtgggcatcaaggtagacaagggcgtggtccccctggcagggacaaatggcgagactaccacccaagggttggatgggctgtctgagcgctgtgcccagtacaagaaggacggagctgacttcgccaagtggcgttgtgtgctgaagattggggaacacaccccctcagccctcgccatcatggaaaatgccaatgttctggcccgttatgccagtatctgccagcaggtgggcctgcagaatggcattgtgcccatcgtggagcctgagatcctccctgatggggaccatgacttgaagcgctgccagtatgtgaccgagaaggtgctggctgctgtctacaaggctctgagtgaccaccacatctacctggaaggcaccttgctgaagcccaacatggtcaccccaggccatgcttgcactcagaagttttctcatgaggagattgccatggcgaccgtcacagcgctgcgccgcacagtgccccccgctgtcactgggatcaccttcctgtctggaggccagagtgaggaggaggcgtccatcaacctcaatgccattaacaagtgccccctgctgaagccctgggccctgaccttctcctacggccgagccctgcaggcctctgccctgaaggcctggggcgggaagaaggagaacctgaaggctgcgcaggaggagtatgtcaagcgagccctggccaacagccttgcctgtcaaggaaagtacactccgagcggtcaggctggggctgctgccagcgagtccctcttcgtctctaaccacgcctattaagcggaggtgttcccaggctgcccccaacactccaggccctgccccctcccactcttgaagaggaggccgcctcctcggggctccaggctggcttgcccgcgctctttcttccctcgtgacagtggtgtgtggtgtcgtctgtgaatgctaagtccatcaccctttccg

SEQ ID NO: 106452 - DNA, 2447 bp, Homo sapiens
  Payload ID: 908
  Gene Symbol: ALDOA
  Gene Name: aldolase A, fructose-bisphosphate
  Uniprot ID: P04075
  ENST ID: ENST00000395248
  CDS Start-End: 983-2239
atgccgcgaacggcttctgggcggggccggtccctcggacgattggacctagcttggcgcggaatccgtgaattgcccgcggcccgagggtgcagctcccggactgactggctctgcccttccccatggacgcctcctctagcccgtggaatccaaccccggctcctgtcagcagccctcccctgctgctccccatccctgccatcgtcttcatcgctgtgggcatctatttgttgctgctgggtctagtcctgctgactaggaactgcctgctggcccagggctgctgcgcggacggtagctccccctgcaggaagcaaggttcctccgggcccccagactgctgctggacctgtgcagaagcctgcaactttcctctgcctagcccggcccacttcctggatgcttgctgcccccagcccaccagagctggcttccattctggtgatggagagagagaaataaccaggccattacaacagagggtgagaaatgacgtgctatggagcagcggttgctcagccctgcatgcgatcagaagcaggactgggcacctcgctgcccccgctgctgcccactctgcgactgtgcctgtacgtgccagctccccgactgccagagcctcaactgtctctgcttcgagatcaagctccgatgaggacccagggcccctgccctctggggagcggccagcccccagggcccatgtgccctcctccctgaagagcctttccccacgccactggaaccacagatggcctgccgagcacccaggcctgggaactggaagtggcagcgcagggcctggctccctgcagggcaggactcttggccggctggacggcagctcctctggagggccagaaaagagaggggctagtgctcgggtccctggccaaagatttatttctcttgacaaccaagggcctccgtctggatttccaaggaagaatttcctctgaagcaccggcaaggtgaccccatggcaaggcgcaagccagaagggtccagcttcaacatgacccacctgtccatggctatggccttttcctttcccccagttgccagtgggcaactccaccctcagctgggcaacacccagcaccagacagagttaggaaaggaacttgctactaccagcaccatgccctaccaatatccagcactgaccccggagcagaagaaggagctgtctgacatcgctcaccgcatcgtggcacctggcaagggcatcctggctgcagatgagtccactgggagcattgccaagcggctgcagtccattggcaccgagaacaccgaggagaaccggcgcttctaccgccagctgctgctgacagctgacgaccgcgtgaacccctgcattgggggtgtcatcctcttccatgagacactctaccagaaggcggatgatgggcgtcccttcccccaagttatcaaatccaagggcggtgttgtgggcatcaaggtagacaagggcgtggtccccctggcagggacaaatggcgagactaccacccaagggttggatgggctgtctgagcgctgtgcccagtacaagaaggacggagctgacttcgccaagtggcgttgtgtgctgaagattggggaacacaccccctcagccctcgccatcatggaaaatgccaatgttctggcccgttatgccagtatctgccagcagaatggcattgtgcccatcgtggagcctgagatcctccctgatggggaccatgacttgaagcgctgccagtatgtgaccgagaaggtgctggctgctgtctacaaggctctgagtgaccaccacatctacctggaaggcaccttgctgaagcccaacatggtcaccccaggccatgcttgcactcagaagttttctcatgaggagattgccatggcgaccgtcacagcgctgcgccgcacagtgccccccgctgtcactgggatcaccttcctgtctggaggccagagtgaggaggaggcgtccatcaacctcaatgccattaacaagtgccccctgctgaagccctgggccctgaccttctcctacggccgagccctgcaggcctctgccctgaaggcctggggcgggaagaaggagaacctgaaggctgcgcaggaggagtatgtcaagcgagccctggccaacagccttgcctgtcaaggaaagtacactccgagcggtcaggctggggctgctgccagcgagtccctcttcgtctctaaccacgcctattaagcggaggtgttcccaggctgcccccaacactccaggccctgccccctcccactcttgaagaggaggccgcctcctcggggctccaggctggcttgcccgcgctctttcttccctcgtgacagtggtgtgtggtgtcgtctgtgaatgctaagtccatcaccctttccggcacactgccaaataaacagctatttaagggggagtcggc

SEQ ID NO: 106453 - DNA, 1603 bp, Homo sapiens
  Payload ID: 908
  Gene Symbol: ALDOA
  Gene Name: aldolase A, fructose-bisphosphate
  Uniprot ID: P04075
  ENST ID: ENST00000412304
  CDS Start-End: 310-1404
gaagcaccggtgagtgggcaggggctccctccccatcaatagggccgacccaagtcttcctcccccttcccccatgccgggccccacgatagtgtgaatgtcaggggcttcaggtttccctaaatataggtccctgccagaggatccgtggcgggaaaagggcaggggtcattagagaagatcggggacacatgtggggcgggcaggagctgccttataaccagcccgggaacccctagctcactcgctgctgaccaggctctgccggctccttcggcctcgccgcaggaacttgctactaccagcaccatgccctaccaatatccagcactgaccccggagcagaagaaggagctgtctgacatcgctcaccgcatcgtggcacctggcaagggcatcctggctgcagatgagtccactgggagcattgccaagcggctgcagtccattggcaccgagaacaccgaggagaaccggcgcttctaccgccagctgctgctgacagctgacgaccgcgtgaacccctgcattgggggtgtcatcctcttccatgagacactctaccagaaggcggatgatgggcgtcccttcccccaagttatcaaatccaagggcggtgttgtgggcatcaaggtagacaagggcgtggtccccctggcagggacaaatggcgagactaccacccaagggttggatgggctgtctgagcgctgtgcccagtacaagaaggacggagctgacttcgccaagtggcgttgtgtgctgaagattggggaacacaccccctcagccctcgccatcatggaaaatgccaatgttctggcccgttatgccagtatctgccagcagaatggcattgtgcccatcgtggagcctgagatcctccctgatggggaccatgacttgaagcgctgccagtatgtgaccgagaaggtgctggctgctgtctacaaggctctgagtgaccaccacatctacctggaaggcaccttgctgaagcccaacatggtcaccccaggccatgcttgcactcagaagttttctcatgaggagattgccatggcgaccgtcacagcgctgcgccgcacagtgccccccgctgtcactgggatcaccttcctgtctggaggccagagtgaggaggaggcgtccatcaacctcaatgccattaacaagtgccccctgctgaagccctgggccctgaccttctcctacggccgagccctgcaggcctctgccctgaaggcctggggcgggaagaaggagaacctgaaggctgcgcaggaggagtatgtcaagcgagccctggccaacagccttgcctgtcaaggaaagtacactccgagcggtcaggctggggctgctgccagcgagtccctcttcgtctctaaccacgcctattaagcggaggtgttcccaggctgcccccaacactccaggccctgccccctcccactcttgaagaggaggccgcctcctcggggctccaggctggcttgcccgcgctctttcttccctcgtgacagtggtgtgtggtgtcgtctgtgaatgctaagtccatcaccctttccggcacactgccaaataaacagctatttaaggg

SEQ ID NO: 106454 - DNA, 512 bp, Homo sapiens
  Payload ID: 908
  Gene Symbol: ALDOA
  Gene Name: aldolase A, fructose-bisphosphate
  ENST ID: ENST00000566846
  CDS Start-End: 92-512
cttgaatccactcgccagcccgccgccctctgccgccgcaccctgcacacccgcccctctcctgtgccaggaacttgctactaccagcaccatgccctaccaatatccagcactgaccccggagcagaagaaggagctgtctgacatcgctcaccgcatcgtggcacctgggagcattgccaagcggctgcagtccattggcaccgagaacaccgaggagaaccggcgcttctaccgccagctgctgctgacagctgacgaccgcgtgaacccctgcattgggggtgtcatcctcttccatgagacactctaccagaaggcggatgatgggcgtcccttcccccaagttatcaaatccaagggcggtgttgtgggcatcaaggtagacaagggcgtggtccccctggcagggacaaatggcgagactaccacccaagggttggatgggctgtctgagcgctgtgcccagtacaagaaggacggagctgacttcgccaagtggcgttgtgtgc

SEQ ID NO: 106455 - DNA, 906 bp, Homo sapiens
  Payload ID: 908
  Gene Symbol: ALDOA
  Gene Name: aldolase A, fructose-bisphosphate
  ENST ID: ENST00000562679
  CDS Start-End: 72-906
ctgtggcaaaggattagggccccttagccctggcggggatcctaagaggcagtgaggggcaaggtgaccccatggcaaggcgcaagccagaagggtccagcttcaacatgacccacctgtccatggctatggccttttcctttcccccagttgccagtgggcaactccaccctcagctgggcaacacccagcaccagacagagttaggaaaggaacttgctactaccagcaccatgccctaccaatatccagcactgaccccggagcagaagaaggagctgtctgacatcgctcaccgcatcgtggcacctggcaagggcatcctggctgcagatgagtccactgggagcattgccaagcggctgcagtccattggcaccgagaacaccgaggagaaccggcgcttctaccgccagctgctgctgacagctgacgaccgcgtgaacccctgcattgggggtgtcatcctcttccatgagacactctaccagaaggcggatgatgggcgtcccttcccccaagttatcaaatccaagggcggtgttgtgggcatcaaggtagacaagggcgtggtccccctggcagggacaaatggcgagactaccacccaagggttggatgggctgtctgagcgctgtgcccagtacaagaaggacggagctgacttcgccaagtggcgttgtgtgctgaagattggggaacacaccccctcagccctcgccatcatggaaaatgccaatgttctggcccgttatgccagtatctgccagcagaatggcattgtgcccatcgtggagcctgagatcctccctgatggggaccatgacttgaagcgctgccagtatgtgaccgagaaggtgctggctgctgtctacaaggctctgagtgaccaccacatctacctgg

SEQ ID NO: 106456 - DNA, 1359 bp, Homo sapiens
  Payload ID: 908
  Gene Symbol: ALDOA
  Gene Name: aldolase A, fructose-bisphosphate
  Uniprot ID: P04075
  ENST ID: ENST00000569545
  CDS Start-End: 220-1314
agtaccgggtacgcaggggtgcctcaaccacactccgtccacggactctccgttattttaggaggtccctggccaaagatttatttctcttgacaaccaagggcctccgtctggatttccaaggaagaatttcctctgaagcaccgcccgccgccctctgccgccgcaccctgcacacccgcccctctcctgtgccaggaacttgctactaccagcaccatgccctaccaatatccagcactgaccccggagcagaagaaggagctgtctgacatcgctcaccgcatcgtggcacctggcaagggcatcctggctgcagatgagtccactgggagcattgccaagcggctgcagtccattggcaccgagaacaccgaggagaaccggcgcttctaccgccagctgctgctgacagctgacgaccgcgtgaacccctgcattgggggtgtcatcctcttccatgagacactctaccagaaggcggatgatgggcgtcccttcccccaagttatcaaatccaagggcggtgttgtgggcatcaaggtagacaagggcgtggtccccctggcagggacaaatggcgagactaccacccaagggttggatgggctgtctgagcgctgtgcccagtacaagaaggacggagctgacttcgccaagtggcgttgtgtgctgaagattggggaacacaccccctcagccctcgccatcatggaaaatgccaatgttctggcccgttatgccagtatctgccagcagaatggcattgtgcccatcgtggagcctgagatcctccctgatggggaccatgacttgaagcgctgccagtatgtgaccgagaaggtgctggctgctgtctacaaggctctgagtgaccaccacatctacctggaaggcaccttgctgaagcccaacatggtcaccccaggccatgcttgcactcagaagttttctcatgaggagattgccatggcgaccgtcacagcgctgcgccgcacagtgccccccgctgtcactgggatcaccttcctgtctggaggccagagtgaggaggaggcgtccatcaacctcaatgccattaacaagtgccccctgctgaagccctgggccctgaccttctcctacggccgagccctgcaggcctctgccctgaaggcctggggcgggaagaaggagaacctgaaggctgcgcaggaggagtatgtcaagcgagccctggccaacagccttgcctgtcaaggaaagtacactccgagcggtcaggctggggctgctgccagcgagtccctcttcgtctctaaccacgcctattaagcggaggtgttcccaggctgcccccaacactccaggccctgcccc

SEQ ID NO: 106457 - DNA, 2448 bp, Homo sapiens
  Payload ID: 908
  Gene Symbol: ALDOA
  Gene Name: aldolase A, fructose-bisphosphate
  Uniprot ID: P04075
  ENST ID: ENST00000566897
  CDS Start-End: 1153-2247
cgcgaacggcttctgggcggggccggtccctcggacgattggacctagcttggcgcggaatccgtgaattgcccgcggcccgagggtgcaggtgatgggtgctgaccgactggggaagcccggagtgtggggactgaggaggggagtggcctggggcgcgctggagcctgcgaggaaggcgccgcctcggatcccccgccccccattccccttcccgaattccaccctccggcccagccatggcctcagtttccccaaacaggaaagggaaggagggtgggcaccccggtctaacggtgcctctcagcctctgagacccagaaccttccttctgcagctcccggactgactggctctgcccttccccatggacgcccagggctgctgcgcggacggtagctccccctgcaggaagcaaggttcctccgggcccccagactgctgctggacctgtgcagaagcctgcaactttcctctgcctagcccggcccacttcctggatgcttgctgcccccagcccaccagagctgactgggcacctcgctgcccccgctgctgcccactctgcgactgtgcctgtacgtgccagctccccgactgccagagcctcaactgtctctgcttcgagatcaagctccgatgaggacccagggcccctgccctctggggagcggccagcccccagggcccatgtgccctcctccctgaagagcctttccccacgccactggaaccacagatggcctgccgagcacccaggcctgggaactggaagtggcagcgcagggcctggctccctgcagggcaggactcttggccggctggacggcagctcctctggagggccagaaaagagaggggctagtgctcgggcaggtgccctggcttcccttcccctccacacgtcaacgattctatttgaagttgggcaggggggtggcgctgctcaccacacacaagtgttataggaggagtctggcccttgagtaccgggtacgcaggggtgcctcaaccacactccgtccacggactctccgttattttaggaggtccctggccaaagatttatttctcttgacaaccaagggcctccgtctggatttccaaggaagaatttcctctgaagcaccggaacttgctactaccagcaccatgccctaccaatatccagcactgaccccggagcagaagaaggagctgtctgacatcgctcaccgcatcgtggcacctggcaagggcatcctggctgcagatgagtccactgggagcattgccaagcggctgcagtccattggcaccgagaacaccgaggagaaccggcgcttctaccgccagctgctgctgacagctgacgaccgcgtgaacccctgcattgggggtgtcatcctcttccatgagacactctaccagaaggcggatgatgggcgtcccttcccccaagttatcaaatccaagggcggtgttgtgggcatcaaggtagacaagggcgtggtccccctggcagggacaaatggcgagactaccacccaagggttggatgggctgtctgagcgctgtgcccagtacaagaaggacggagctgacttcgccaagtggcgttgtgtgctgaagattggggaacacaccccctcagccctcgccatcatggaaaatgccaatgttctggcccgttatgccagtatctgccagcagaatggcattgtgcccatcgtggagcctgagatcctccctgatggggaccatgacttgaagcgctgccagtatgtgaccgagaaggtgctggctgctgtctacaaggctctgagtgaccaccacatctacctggaaggcaccttgctgaagcccaacatggtcaccccaggccatgcttgcactcagaagttttctcatgaggagattgccatggcgaccgtcacagcgctgcgccgcacagtgccccccgctgtcactgggatcaccttcctgtctggaggccagagtgaggaggaggcgtccatcaacctcaatgccattaacaagtgccccctgctgaagccctgggccctgaccttctcctacggccgagccctgcaggcctctgccctgaaggcctggggcgggaagaaggagaacctgaaggctgcgcaggaggagtatgtcaagcgagccctggccaacagccttgcctgtcaaggaaagtacactccgagcggtcaggctggggctgctgccagcgagtccctcttcgtctctaaccacgcctattaagcggaggtgttcccaggctgcccccaacactccaggccctgccccctcccactcttgaagaggaggccgcctcctcggggctccaggctggcttgcccgcgctctttcttccctcgtgacagtggtgtgtggtgtcgtctgtgaatgctaagtccatcaccctttccggcacactgccaaataaacagctatttaaggggg

SEQ ID NO: 106458 - DNA, 1550 bp, Homo sapiens
  Payload ID: 908
  Gene Symbol: ALDOA
  Gene Name: aldolase A, fructose-bisphosphate
  Uniprot ID: P04075
  ENST ID: ENST00000563060
  CDS Start-End: 254-1348
tccttcttaaaaaaaaccagggctccagagaatcagaacagccaccatcaccgcagggagtcaagggaggagggagattagagaaggagccagggagggtggcagggaggccacgtgatccgagtcccctcacccctttccttcccacaggtccctggccaaagatttatttctcttgacaaccaagggcctccgtctggatttccaaggaagaatttcctctgaagcaccggaacttgctactaccagcaccatgccctaccaatatccagcactgaccccggagcagaagaaggagctgtctgacatcgctcaccgcatcgtggcacctggcaagggcatcctggctgcagatgagtccactgggagcattgccaagcggctgcagtccattggcaccgagaacaccgaggagaaccggcgcttctaccgccagctgctgctgacagctgacgaccgcgtgaacccctgcattgggggtgtcatcctcttccatgagacactctaccagaaggcggatgatgggcgtcccttcccccaagttatcaaatccaagggcggtgttgtgggcatcaaggtagacaagggcgtggtccccctggcagggacaaatggcgagactaccacccaagggttggatgggctgtctgagcgctgtgcccagtacaagaaggacggagctgacttcgccaagtggcgttgtgtgctgaagattggggaacacaccccctcagccctcgccatcatggaaaatgccaatgttctggcccgttatgccagtatctgccagcagaatggcattgtgcccatcgtggagcctgagatcctccctgatggggaccatgacttgaagcgctgccagtatgtgaccgagaaggtgctggctgctgtctacaaggctctgagtgaccaccacatctacctggaaggcaccttgctgaagcccaacatggtcaccccaggccatgcttgcactcagaagttttctcatgaggagattgccatggcgaccgtcacagcgctgcgccgcacagtgccccccgctgtcactgggatcaccttcctgtctggaggccagagtgaggaggaggcgtccatcaacctcaatgccattaacaagtgccccctgctgaagccctgggccctgaccttctcctacggccgagccctgcaggcctctgccctgaaggcctggggcgggaagaaggagaacctgaaggctgcgcaggaggagtatgtcaagcgagccctggccaacagccttgcctgtcaaggaaagtacactccgagcggtcaggctggggctgctgccagcgagtccctcttcgtctctaaccacgcctattaagcggaggtgttcccaggctgcccccaacactccaggccctgccccctcccactcttgaagaggaggccgcctcctcggggctccaggctggcttgcccgcgctctttcttccctcgtgacagtggtgtgtggtgtcgtctgtgaatgctaagtccatcaccctttccggcacactgccaaataaacagctatttaaggggga

SEQ ID NO: 106459 - DNA, 1499 bp, Homo sapiens
  Payload ID: 908
  Gene Symbol: ALDOA
  Gene Name: aldolase A, fructose-bisphosphate
  ENST ID: ENST00000569798
  CDS Start-End: 178-1263
cgccgccccttccgaggctaaatcggctgcgttcctctcggaacgcgccgcagaaggggtcctggtgacgagtcccgcgttctctccttgaatccactcgccagcccgccgccctctgccgccgcaccctgcacacccgcccctctcctgtgccaggaacttgctactaccagcaccatgccctaccaatatccagcactgaccccggagcagaagaaggagctgtctgacatcgctcaccgcatcgtggcacctggcaagggcatcctggctgcagatgagtccactgggagcattgccaagcggctgcagtccattggcaccgagaacaccgaggagaaccggcgcttctaccgccagctgctgctgacagctgacgaccgcgtgaacccctgcattgggggtgtcatcctcttccatgagacactctaccagaaggcggatgatgggcgtcccttcccccaagttatcaaatccaagggcggtgttgtgggcatcaaggtagacaagggcgtggtccccctggcagggacaaatggcgagactaccacccaagggttggatgggctgtctgagcgctgtgcccagtacaagaaggacggagctgacttcgccaagtggcgttgtgtgctgaagattggggaacacaccccctcagccctcgccatcatggaaaatgccaatgttctggcccgttatgccagtatctgccagcagaatggcattgtgcccatcgtggagcctgagatcctccctgatggggaccatgacttgaagcgctgccagtatgtgaccgagaaggtgctggctgctgtctacaaggctctgagtgaccaccacatctacctggaaggcaccttgctgaagcccaacatggtcaccccaggccatgcttgcactcagaagttttctcatgaggagattgccatggcgaccgtcacagcgctgcgccgcacagtgccccccgctgtcactgggatcaccttcctgtctggaggccagagtgaggaggaggcgtccatcaacctcaatgccattaacaagtgccccctgctgaagccctgggccctgaccttctcctacggccgagccctgcaggcctctgccctgaaggcctggggcgggaagaaggagaacctgaaggctgcgcaggaggagtatgtcaagcgagccctggtaaggataggcaggaggtgggcagggtgcctgggtggatgggactcggagaagagcccttctcactccacccctctccctgcttaggccaacagccttgcctgtcaaggaaagtacactccgagcggtcaggctggggctgctgccagcgagtccctcttcgtctctaaccacgcctattaagcggaggtgttcccaggctgcccccaacactccaggccctgccccctcccactcttgaagaggaggccgcctcctcggggctccaggctggcttgcccgcgctctttcttccctcgtgacagtggtgtgtggtgtcgtct

SEQ ID NO: 106460 - DNA, 2104 bp, Homo sapiens
  Payload ID: 908
  Gene Symbol: ALDOA
  Gene Name: aldolase A, fructose-bisphosphate
  Uniprot ID: P04075
  ENST ID: ENST00000564546
  CDS Start-End: 802-1896
tcgcctccgcgcgccgctagttccgccgccttctcgcgctccctgcgtgtcctctcgatgccctttcctccgcctcccttacgcctgggccagtgacagggtgtcggctccgcgccgattcagcccgcgggcgaggcaggctaacgcacgactgcgcgatgtggcccctatggtgacacgcgctgcagccgcgaagaccggaagctggggcggccccgggccgcgcgcgctgggcctgggaggcgaaactcagcttccttcgtttccgacttttccatccgcgtcctccacttccccgttccgccctcccccattgccaacattctggctgagtcacggcgccccagagcgcgccaggctgggggaaaggagcagaagggagggccctagcgacccgcgggatgtggtccgagtcacgtccgaggggggtggggagggatcgtgttctcggcgcccgccccttcctagcgcggcctctgggctgcgcctctcgggggcggcccgtagcccagtccgtcgcctgccattggacgccgcccgctcctcgtaaaggaaaaagctcggcggagggcggagtggtgcctttaaaaggccgggcgccgccttccgcctgcccgcctcctgcgccgccccttccgaggctaaatcggctgcgttcctctcggaacgcgccgcagaaggggtcctggtgacgagtcccgcgttctctccttgaatccactcgccagcccgccgccctctgccgccgcaccctgcacacccgcccctctcctgtgccaggaacttgctactaccagcaccatgccctaccaatatccagcactgaccccggagcagaagaaggagctgtctgacatcgctcaccgcatcgtggcacctggcaagggcatcctggctgcagatgagtccactgggagcattgccaagcggctgcagtccattggcaccgagaacaccgaggagaaccggcgcttctaccgccagctgctgctgacagctgacgaccgcgtgaacccctgcattgggggtgtcatcctcttccatgagacactctaccagaaggcggatgatgggcgtcccttcccccaagttatcaaatccaagggcggtgttgtgggcatcaaggtagacaagggcgtggtccccctggcagggacaaatggcgagactaccacccaagggttggatgggctgtctgagcgctgtgcccagtacaagaaggacggagctgacttcgccaagtggcgttgtgtgctgaagattggggaacacaccccctcagccctcgccatcatggaaaatgccaatgttctggcccgttatgccagtatctgccagcagaatggcattgtgcccatcgtggagcctgagatcctccctgatggggaccatgacttgaagcgctgccagtatgtgaccgagaaggtgctggctgctgtctacaaggctctgagtgaccaccacatctacctggaaggcaccttgctgaagcccaacatggtcaccccaggccatgcttgcactcagaagttttctcatgaggagattgccatggcgaccgtcacagcgctgcgccgcacagtgccccccgctgtcactgggatcaccttcctgtctggaggccagagtgaggaggaggcgtccatcaacctcaatgccattaacaagtgccccctgctgaagccctgggccctgaccttctcctacggccgagccctgcaggcctctgccctgaaggcctggggcgggaagaaggagaacctgaaggctgcgcaggaggagtatgtcaagcgagccctggccaacagccttgcctgtcaaggaaagtacactccgagcggtcaggctggggctgctgccagcgagtccctcttcgtctctaaccacgcctattaagcggaggtgttcccaggctgcccccaacactccaggccctgccccctcccactcttgaagaggaggccgcctcctcggggctccaggctggcttgcccgcgctctttcttccctcgtgacagtggtgtgtggtgtcgtctgtgaatgctaagtccatcaccctttccggcacactgccaaataaacagctatttaagggggagtcggc

SEQ ID NO: 106461 - DNA, 666 bp, Homo sapiens
  Payload ID: 908
  Gene Symbol: ALDOA
  Gene Name: aldolase A, fructose-bisphosphate
  ENST ID: ENST00000562168
  CDS Start-End: 181-666
agtctggcccttgagtaccgggtacgcaggggtgcctcaaccacactccgtccacggactctccgttattttaggaggtccctggccaaagatttatttctcttgacaaccaagggcctccgtctggatttccaaggaagaatttcctctgaagcaccggaacttgctactaccagcaccatgccctaccaatatccagcactgaccccggagcagaagaaggagctgtctgacatcgctcaccgcatcgtggcacctgggagcattgccaagcggctgcagtccattggcaccgagaacaccgaggagaaccggcgcttctaccgccagctgctgctgacagctgacgaccgcgtgaacccctgcattgggggtgtcatcctcttccatgagacactctaccagaaggcggatgatgggcgtcccttcccccaagttatcaaatccaagggcggtgttgtgggcatcaaggtagacaagggcgtggtccccctggcagggacaaatggcgagactaccacccaagggttggatgggctgtctgagcgctgtgcccagtacaagaaggacggagctgacttcgccaagtggcgttgtgtgctgaagattggggaacacaccccctcagccctcgccatcatggaaaatgccaatgttctggcccgt

SEQ ID NO: 106462 - DNA, 538 bp, Homo sapiens
  Payload ID: 908
  Gene Symbol: ALDOA
  Gene Name: aldolase A, fructose-bisphosphate
  ENST ID: ENST00000565355
  CDS Start-End: 1-392
ccccaggccatgcttgcactcagaagttttctcatgaggagattgccatggcgaccgtcacagcgctgcgccgcacagtgccccccgctgtcactgggatcaccttcctgtctggaggccagagtgaggaggaggcgtccatcaacctcaatgccattaacaagtgccccctgctgaagccctgggccctgaccttctcctacggccgagccctgcaggcctctgccctgaaggcctggggcgggaagaaggagaacctgaaggctgcgcaggaggagtatgtcaagcgagccctggccaacagccttgcctgtcaaggaaagtacactccgagcggtcaggctggggctgctgccagcgagtccctcttcgtctctaaccacgcctattaagcggaggccgcctcctcggggctccaggctggcttgcccgcgctctttcttccctcgtgacagtggtgtgtggtgtcgtctgtgaatgctaagtccatcaccctttccggcacactgccaaataaacagctatttaagggggagtc

SEQ ID NO: 106463 - DNA, 1663 bp, Homo sapiens
  Payload ID: 908
  Gene Symbol: ALDOA
  Gene Name: aldolase A, fructose-bisphosphate
  Uniprot ID: P04075
  ENST ID: ENST00000564595
  CDS Start-End: 208-1464
aaaaggccgggcgccgccttccgcctgcccgcctcctgcgccgccccttccgaggctaaatcggctgcgttcctctcggaacgcgccgcagaaggggtcctggtgacgagtcccgcgttctctccttgaatccactcgccagcccgccgccctctgccgccgcaccctgcacacccgcccctctcctgtgccaggcaaggtgaccccatggcaaggcgcaagccagaagggtccagcttcaacatgacccacctgtccatggctatggccttttcctttcccccagttgccagtgggcaactccaccctcagctgggcaacacccagcaccagacagagttaggaaaggaacttgctactaccagcaccatgccctaccaatatccagcactgaccccggagcagaagaaggagctgtctgacatcgctcaccgcatcgtggcacctggcaagggcatcctggctgcagatgagtccactgggagcattgccaagcggctgcagtccattggcaccgagaacaccgaggagaaccggcgcttctaccgccagctgctgctgacagctgacgaccgcgtgaacccctgcattgggggtgtcatcctcttccatgagacactctaccagaaggcggatgatgggcgtcccttcccccaagttatcaaatccaagggcggtgttgtgggcatcaaggtagacaagggcgtggtccccctggcagggacaaatggcgagactaccacccaagggttggatgggctgtctgagcgctgtgcccagtacaagaaggacggagctgacttcgccaagtggcgttgtgtgctgaagattggggaacacaccccctcagccctcgccatcatggaaaatgccaatgttctggcccgttatgccagtatctgccagcagaatggcattgtgcccatcgtggagcctgagatcctccctgatggggaccatgacttgaagcgctgccagtatgtgaccgagaaggtgctggctgctgtctacaaggctctgagtgaccaccacatctacctggaaggcaccttgctgaagcccaacatggtcaccccaggccatgcttgcactcagaagttttctcatgaggagattgccatggcgaccgtcacagcgctgcgccgcacagtgccccccgctgtcactgggatcaccttcctgtctggaggccagagtgaggaggaggcgtccatcaacctcaatgccattaacaagtgccccctgctgaagccctgggccctgaccttctcctacggccgagccctgcaggcctctgccctgaaggcctggggcgggaagaaggagaacctgaaggctgcgcaggaggagtatgtcaagcgagccctggccaacagccttgcctgtcaaggaaagtacactccgagcggtcaggctggggctgctgccagcgagtccctcttcgtctctaaccacgcctattaagcggaggtgttcccaggctgcccccaacactccaggccctgccccctcccactcttgaagaggaggccgcctcctcggggctccaggctggcttgcccgcgctctttcttccctcgtgacagtggtgtgtggtgtcgtctgtgaatgctaagtccatcaccctttccggcacactgccaaataaacagctatttaaggg

SEQ ID NO: 106464 - DNA, 613 bp, Homo sapiens
  Payload ID: 908
  Gene Symbol: ALDOA
  Gene Name: aldolase A, fructose-bisphosphate
  ENST ID: ENST00000564688
  CDS Start-End: 1-613
cggcgcttctaccgccagctgctgctgacagctgacgaccgcgtgaacccctgcattgggggtgtcatcctcttccatgagacactctaccagaaggcggatgatgggcgtcccttcccccaagttatcaaatccaagggcggtgttgtgggcatcaaggtagacaagggcgtggtccccctggcagggacaaatggcgagactaccacccaagggttggatgggctgtctgagcgctgtgcccagtacaagaaggacggagctgacttcgccaagtggcgttgtgtgctgaagattggggaacacaccccctcagccctcgccatcatggaaaatgccaatgttctggcccgttatgccagtatctgccagcaggtgctggctgctgtctacaaggctctgagtgaccaccacatctacctggaaggcaccttgctgaagcccaacatggtcaccccaggccatgcttgcactcagaagttttctcatgaggagattgccatggcgaccgtcacagcgctgcgccgcacagtgccccccgctgtcactgggatcaccttcctgtctggaggccagagtgaggaggaggcgtccatcaacctcaatgccatta

SEQ ID NO: 106465 - DNA, 586 bp, Homo sapiens
  Payload ID: 908
  Gene Symbol: ALDOA
  Gene Name: aldolase A, fructose-bisphosphate
  ENST ID: ENST00000563987
  CDS Start-End: 120-586
actcgctgctgaccaggctctgccggctccttcggcctcgccgcagcccgccgccctctgccgccgcaccctgcacacccgcccctctcctgtgccaggaacttgctactaccagcaccatgccctaccaatatccagcactgaccccggagcagaagaaggagctgtctgacatcgctcaccgcatcgtggcacctggcaagggcatcctggctgcagatgagtccactgggagcattgccaagcggctgcagtccattggcaccgagaacaccgaggagaaccggcgcttctaccgccagctgctgctgacagctgacgaccgcgtgaacccctgcattgggggtgtcatcctcttccatgagacactctaccagaaggcggatgatgggcgtcccttcccccaagttatcaaatccaagggcggtgttgtgggcatcaaggtagacaagggcgtggtccccctggcagggacaaatggcgagactaccacccaagggttggatgggctgtctgagcgctgtgcccagtacaagaaggacggagctgacttcgccaagtggcgttgtgtgctgaagattgggga

SEQ ID NO: 106466 - DNA, 935 bp, Homo sapiens
  Payload ID: 908
  Gene Symbol: ALDOA
  Gene Name: aldolase A, fructose-bisphosphate
  ENST ID: ENST00000568435
  CDS Start-End: 900-935
ggcttctgggcggggccggtccctcggacgattggacctagcttggcgcggaatccgtgaattgcccgcggcccgagggtgcagctcccggactgactggctctgcccttccccatggacgcccagggctgctgcgcggacggtagctccccctgcaggaagcaaggttcctccgggcccccagactgctgctggacctgtgcagaagcctgcaactttcctctgcctagcccggcccacttcctggatgcttgctgcccccagcccaccagagctgactgggcacctcgctgcccccgctgctgcccactctgcgactgtgcctgtacgtgccagctccccgactgccagagcctcaactgtctctgcttcgagatcaagctccgatgaggacccagggcccctgccctctggggagcggccagcccccagggcccatgtgccctcctccctgaagagcctttccccacgccactggaaccacagatggcctgccgagcacccaggcctgggaactggaagtggcagcgcagggcctggctccctgcagggcaggactcttggccggctggacggcagctcctctggagggccagaaaagagaggggctagtgctcgggcaggtgccctggcttcccttcccctccacacgtcaacgattctatttgaagttgggcaggggggtggcgctgctcaccacacacaagtgttataggaggagtctggcccttgagtaccgggtacgcaggggtgcctcaaccacactccgtccacggactctccgttattttaggaggtccctggccaaagatttatttctcttgacaaccaagggcctccgtctggatttccaaggaagaatttcctctgaagcaccggaacttgctactaccagcaccatgccctaccaatatccagcactgaccccggagcag

SEQ ID NO: 106467 - DNA, 2402 bp, Homo sapiens
  Payload ID: 908
  Gene Symbol: ALDOA
  Gene Name: aldolase A, fructose-bisphosphate
  ENST ID: ENST00000627059
  CDS Start-End: 1088-2194
aaacaccgctctggtcaccatggcaacagcgggatgccgcgaacggcttctgggcggggccggtccctcggacgattggacctagcttggcgcggaatccgtgaattgcccgcggcccgagggtgcagctcccggactgactggctctgcccttccccatggacgcctcctctagcccgtggaatccaaccccggctcctgtcagcagccctcccctgctgctccccatccctgccatcgtcttcatcgctgtgggcatctatttgttgctgctgggtctagtcctgctgactaggaactgcctgctggcccagggctgctgcgcggacggtagctccccctgcaggaagcaaggttcctccgggcccccagactgctgctggacctgtgcagaagcctgcaactttcctctgcctagcccggcccacttcctggatgcttgctgcccccagcccaccagagctgactgggcacctcgctgcccccgctgctgcccactctgcgactgtgcctgtacgtgccagctccccgactgccagagcctcaactgtctctgcttcgagatcaagctccgatgaggacccagggcccctgccctctggggagcggccagcccccagggcccatgtgccctcctccctgaagagcctttccccacgccactggaaccacagatggcctgccgagcacccaggcctgggaactggaagtggcagcgcagggcctggctccctgcagggcaggactcttggccggctggacggcagctcctctggagggccagaaaagagaggggctagtgctcgggcaggtgccctggcttcccttcccctccacacgtcaacgattctatttgaagttgggcaggggggtggcgctgctcaccacacacaagtgttataggaggagtctggcccttgagtaccgggtacgcaggggtgcctcaaccacactccgtccacggactctccgttattttaggaggtccctggccaaagatttatttctcttgacaaccaagggcctccgtctggatttccaaggaagaatttcctctgaagcaccggaacttgctactaccagcaccatgccctaccaatatccagcactgaccccggagcagaagaaggagctgtctgacatcgctcaccgcatcgtggcacctggcaagggcatcctggctgcagatgagtccactgggagcattgccaagcggctgcagtccattggcaccgagaacaccgaggagaaccggcgcttctaccgccagctgctgctgacagctgacgaccgcgtgaacccctgcattgggggtgtcatcctcttccatgagacactctaccagaaggcggatgatgggcgtcccttcccccaagttatcaaatccaagggcggtgttgtgggcatcaaggtagacaagggcgtggtccccctggcagggacaaatggcgagactaccacccaagggttggatgggctgtctgagcgctgtgcccagtacaagaaggacggagctgacttcgccaagtggcgttgtgtgctgaagattggggaacacaccccctcagccctcgccatcatggaaaatgccaatgttctggcccgttatgccagtatctgccagcaggtgggcctgcagaatggcattgtgcccatcgtggagcctgagatcctccctgatggggaccatgacttgaagcgctgccagtatgtgaccgagaaggtgctggctgctgtctacaaggctctgagtgaccaccacatctacctggaaggcaccttgctgaagcccaacatggtcaccccaggccatgcttgcactcagaagttttctcatgaggagattgccatggcgaccgtcacagcgctgcgccgcacagtgccccccgctgtcactgggatcaccttcctgtctggaggccagagtgaggaggaggcgtccatcaacctcaatgccattaacaagtgccccctgctgaagccctgggccctgaccttctcctacggccgagccctgcaggcctctgccctgaaggcctggggcgggaagaaggagaacctgaaggctgcgcaggaggagtatgtcaagcgagccctggccaacagccttgcctgtcaaggaaagtacactccgagcggtcaggctggggctgctgccagcgagtccctcttcgtctctaaccacgcctattaagcggaggtgttcccaggctgcccccaacactccaggccctgccccctcccactcttgaagaggaggccgcctcctcggggctccaggctggcttgcccgcgctctttcttccctcgtgacagtggtgtgtggtgtcgtctgtgaatgctaagtccatcaccctttccggcacactgccaaataaacagctatttaagggggagtcggc

SEQ ID NO: 106468 - DNA, 2451 bp, Homo sapiens
  Payload ID: 909
  Gene Symbol: ALDOB
  Gene Name: aldolase B, fructose-bisphosphate
  Uniprot ID: P05062
  ENST ID: ENST00000374855
  CDS Start-End: 126-1220
aaaaacatgatgagaagtctataaaaattgtgtgctaccaaagatctgtcttatttggcagctgctgcctcacccacagcttttgatatctaggaggactcttctctcccaaactacctgtcaccatggcccaccgatttccagccctcacccaggagcagaagaaggagctctcagaaattgcccagagcattgttgccaatggaaaggggatcctggctgcagatgaatctgtaggtaccatggggaaccgcctgcagaggatcaaggtggaaaacactgaagagaaccgccggcagttccgagaaatcctcttctctgtggacagttccatcaaccagagcatcgggggtgtgatccttttccacgagaccctctaccagaaggacagccagggaaagctgttcagaaacatcctcaaggaaaaggggatcgtggtgggaatcaagttagaccaaggaggtgctcctcttgcaggaacaaacaaagaaaccaccattcaagggcttgatggcctctcagagcgctgtgctcagtacaagaaagatggtgttgactttgggaagtggcgtgctgtgctgaggattgccgaccagtgtccatccagcctcgctatccaggaaaacgccaacgccctggctcgctacgccagcatctgtcagcagaatggactggtacctattgttgaaccagaggtaattcctgatggagaccatgacctggaacactgccagtatgttactgagaaggtcctggctgctgtctacaaggccctgaatgaccatcatgtttacctggagggcaccctgctaaagcccaacatggtgactgctggacatgcctgcaccaagaagtatactccagaacaagtagctatggccaccgtaacagctctccaccgtactgttcctgcagctgttcctggcatctgctttttgtctggtggcatgagtgaagaggatgccactctcaacctcaatgctatcaacctttgccctctaccaaagccctggaaactaagtttctcttatggacgggccctgcaggccagtgcactggctgcctggggtggcaaggctgcaaacaaggaggcaacccaggaggcttttatgaagcgggccatggctaactgccaggcggccaaaggacagtatgttcacacgggttcttctggggctgcttccacccagtcgctcttcacagcctgctatacctactagggtccaatgcccgccagcctagctccagtgcttctagtaggagggctgaaagggagcaacttttcctccaatcctggaaattcgacacaattagatttgaactgctggaaatacaacacatgttaaatcttaagtacaagggggaaaaaataaatcagttattgaaacataaaaatgaataccaaggacctgatcaaatttcacacagcagtttccttgcaacactttcagctccccatgctccagaatacccacccaagaaaataataggctttaaaacaatatcggctcctcatccaaagaacaactgctgattgaaacacctcattagctgagtgtagagaagtgcatcttatgaaacagtcttagcagtggtaggttgggaaggagatagctgcaaccaaaaaagaaataaatattctataaaccttcagctgctatcgggtttcacttttctgctcttgctgtccaaagactcagtgtatttcattacttttgactctactagacatgactgggtttcaacagtaaaggtcttcaactcttgctagtcattggaatcaagccgcaaaattttaaaaactgagatgctcaggccacaccccagctcaattaaatcagaaaccctagacttgggatcctctaactattagatttcttaaagctccctcagtaattccaatgtacagtcaagtttgagaactaccaatctaaatttcaagtttgagggtatttgaaaattaaagccattcacaatacgaagccagctaaaaatgtagaatgattttgagcaacttgtggagtataataagagaattaatgtgacttcaatgcttggagcattcttgttcaagtggcccaggtttggtgaaacaggactaccttgtcatctgcacgtccaggcatatttcgtagttttgcagtaaataatattcacataatgatactgtattgactttcaattttcagaattaacctatagttacagcacttaagacaaccagagttataaaagagaatttaaatattataactttggacaatataaaagtgatgatttaactgacagaagctaggaaatataagggggaggagaagtggaagaaagcaaagagagtcaggaatactacttaaaactgatgggttaagaaatagtgctttaattctatttaagtaataaaagaaatggatgtaaatcataaaaatatatatctaaaattaaaatattgat

SEQ ID NO: 106469 - DNA, 1391 bp, Homo sapiens
  Payload ID: 909
  Gene Symbol: ALDOB
  Gene Name: aldolase B, fructose-bisphosphate
  ENST ID: ENST00000616752
  CDS Start-End: 77-1027
cttatttggcagctgctgcctcacccacagcttttgatatctaggaggactcttctctcccaaactacctgtcaccatggcccaccgatttccagccctcacccaggagcagaagaaggagctctcagaaattgcccagagcattgttgccaatggaaaggggatcctggctgcagatgaatctgtaggtaccatggggaaccgcctgcagaggatcaaggtggaaaacactgaagagaaccgccggcagttccgagaaatcctcttctctgtggacagttccatcaaccagagcatcgggggtgtgatccttttccacgagaccctctaccagaaggacagccagggaaagctgttcagaaacatcctcaaggaaaaggggatcgtggtgggaatcaagttagaccaaggaggtgctcctcttgcaggaacaaacaaagaaaccaccattcaagggcttgatggcctctcagagcgctgtgctcagtacaagaaagatggtgttgactttgggaagtggcgtgctgtgctgaggattgccgaccagtgtccatccagcctcgctatccaggaaaacgccaacgccctggctcgctacgccagcatctgtcagcagaatggactggtacctattgttgaaccagaggtaattcctgatggagaccatgacctggaacactgccagtatgttactgagaaggtcctggctgctgtctacaaggccctgaatgaccatcatgtttacctggagggcaccctgctaaagcccaacatggtgactgctggacatgcctgcaccaagaagtatactccagaacaagtagctatggccaccgtaacagctctccaccgtactgttcctgcagctgttcctggcatctgctttttgtctggtggcatgagtgaagaggatgccactctcaacctcaatgctatcaacctttgccctctaccaaagccctggaaactaagtttctcttgggtggcaaggctgcaaacaaggaggcaacccaggaggcttttatgaagcgggccatggctaactgccaggcggccaaaggacagtatgttcacacgggttcttctggggctgcttccacccagtcgctcttcacagcctgctatacctactagggtccaatgcccgccagcctagctccagtgcttctagtaggagggctgaaagggagcaacttttcctccaatcctggaaattcgacacaattagatttgaactgctggaaatacaacacatgttaaatcttaagtacaagggggaaaaaataaatcagttattgaaacataaaaatgaataccaaggacctgatcaaatttcacacagcagtttccttgcaacactttcagctccccatgctccagaatacccaccc

SEQ ID NO: 106470 - DNA, 1982 bp, Homo sapiens
  Payload ID: 910
  Gene Symbol: ALDOC
  Gene Name: aldolase C, fructose-bisphosphate
  Uniprot ID: P09972
  ENST ID: ENST00000226253
  CDS Start-End: 477-1571
attacttcctgccctgaacttgggcaccttgaagatgcttctgccccacctactcaacctgttgttactgttctggtgcctcctcttcaccagactaagcttaatccccagcatccagcaagtgcccggcacgtggtaaagggattgtggcagaaatgaacgcaaggtcatggccaggctccccgaggtgggagggcagtccctaacagccacggatgcctggcggggcgctcactccacctcgccgccccgcctctgagggcgtggtcttgccccggacaccagtcctggggagggggtgtggtcagggcggggcatgcaggccacgcccccggaggagtcacgtagctctgcgacatccgcagcctcatttaccagagggagccagggctgcagcctcatctgtttgcggatcagaacccgagctgtgcttgtggctgcggctgctaactggctgcgcacagggagctgtcaccatgcctcactcgtacccagccctttctgctgagcagaagaaggagttgtctgacattgccctgcggattgtagccccgggcaaaggcattctggctgcggatgagtctgtaggcagcatggccaagcggctgagccaaattggggtggaaaacacagaggagaaccgccggctgtaccgccaggtcctgttcagtgctgatgaccgtgtgaaaaagtgcattggaggcgtcattttcttccatgagaccctctaccagaaagatgataatggtgttcccttcgtccgaaccatccaggataagggcatcgtcgtgggcatcaaggttgacaagggtgtggtgcctctagctgggactgatggagaaaccaccactcaagggctggatgggctctcagaacgctgtgcccaatacaagaaggatggtgctgactttgccaagtggcgctgtgtgctgaaaatcagtgagcgtacaccctctgcacttgccattctggagaacgccaacgtgctggcccgttatgccagtatctgccagcagaatggcattgtgcctattgtggaacctgaaatattgcctgatggagaccacgacctcaaacgttgtcagtatgttacagagaaggtcttggctgctgtgtacaaggccctgagtgaccatcatgtatacctggaggggaccctgctcaagcccaacatggtgaccccgggccatgcctgtcccatcaagtataccccagaggagattgccatggcaactgtcactgccctgcgtcgcactgtgcccccagctgtcccaggagtgaccttcctgtctgggggtcagagcgaagaagaggcatcattcaacctcaatgccatcaaccgctgcccccttccccgaccctgggcgcttaccttctcctatgggcgtgccctgcaagcctctgcactcaatgcctggcgagggcaacgggacaatgctggggctgccactgaggagttcatcaagcgggctgaggtgaatgggcttgcagcccagggcaagtatgaaggcagtggagaagatggtggagcagcagcacagtcactctacattgccaaccatgcctactgagtatccactccataccacagcccttggcccagccatctgcacccacttttgcttgtagtcatggccagggccaaatagctatgcagagcagagatgccttcacctggcaccaacttgtcttcctttctctcttcccttcccctctctcattgctgcacctgggaccataggatgggaggatagggagcccctcatgactgagggcagaagaaattgctagaagtcagaacaggatggctgggtctccccctacctcttccagctcccacaattttcccatgatgaggtagcttctccctgggctctccttcttgcctgccctgtctcctgggatcagagggtagtacagaagccctgactcatgccttgagtacataccatacagcaaataaatggtagcaaaacattcta

SEQ ID NO: 106471 - DNA, 1519 bp, Homo sapiens
  Payload ID: 910
  Gene Symbol: ALDOC
  Gene Name: aldolase C, fructose-bisphosphate
  ENST ID: ENST00000395319
  CDS Start-End: 98-1108
gggagccagggctgcagcctcatctgtttgcggatcagaacccgagctgtgcttgtggctgcggctgctaactggctgcgcacagggagctgtcaccatgcctcactcgtacccagccctttctgctgagcagaagaaggagttgtctgacattgccctgcggattgtagccccgggcaaaggcattctggctgcggatgagtctgtaggcagcatggccaagcggctgagccaaattggggtggaaaacacagaggagaaccgccggctgtaccgccaggtcctgttcagtgctgatgaccgtgtgaaaaagtgcattggaggcgtcattttcttccatgagaccctctaccagaaagatgataatggtgttcccttcgtccgaaccatccaggataagggcatcgtcgtgggcatcaaggttgacaagggtgtggtgcctctagctgggactgatggagaaaccaccactcaagggctggatgggctctcagaacgctgtgcccaatacaagaaggatggtgctgactttgccaagtggcgctgtgtgctgaaaatcagtgagcgtacaccctctgcacttgccattctggagaacgccaacgtgctggcccgttatgccagtatctgccagcaggtcttggctgctgtgtacaaggccctgagtgaccatcatgtatacctggaggggaccctgctcaagcccaacatggtgaccccgggccatgcctgtcccatcaagtataccccagaggagattgccatggcaactgtcactgccctgcgtcgcactgtgcccccagctgtcccaggagtgaccttcctgtctgggggtcagagcgaagaagaggcatcattcaacctcaatgccatcaaccgctgcccccttccccgaccctgggcgcttaccttctcctatgggcgtgccctgcaagcctctgcactcaatgcctggcgagggcaacgggacaatgctggggctgccactgaggagttcatcaagcgggctgaggtgaatgggcttgcagcccagggcaagtatgaaggcagtggagaagatggtggagcagcagcacagtcactctacattgccaaccatgcctactgagtatccactccataccacagcccttggcccagccatctgcacccacttttgcttgtagtcatggccagggccaaatagctatgcagagcagagatgccttcacctggcaccaacttgtcttcctttctctcttcccttcccctctctcattgctgcacctgggaccataggatgggaggatagggagcccctcatgactgagggcagaagaaattgctagaagtcagaacaggatggctgggtctccccctacctcttccagctcccacaattttcccatgatgaggtagcttctccctgggctctccttcttgcctgccctgtctcctgggatcagagggtagtacagaagccctgactcatgccttgagtacataccatacagcaaataaatggtagcaaaacattcta

SEQ ID NO: 106472 - DNA, 1722 bp, Homo sapiens
  Payload ID: 910
  Gene Symbol: ALDOC
  Gene Name: aldolase C, fructose-bisphosphate
  Uniprot ID: P09972
  ENST ID: ENST00000395321
  CDS Start-End: 217-1311
atgcaggccacgcccccggaggagtcacgtagctctgcgacatccgcagcctcatttaccagagggagccagggctgcagcctcatctgtttgcggatcagaacccgagctgtgcttgtggctgcggctgctaactggctgcgcacagaagctgagagaagagggtggcaataagtacttttgcctcattctgaagccttggaaggagctgtcaccatgcctcactcgtacccagccctttctgctgagcagaagaaggagttgtctgacattgccctgcggattgtagccccgggcaaaggcattctggctgcggatgagtctgtaggcagcatggccaagcggctgagccaaattggggtggaaaacacagaggagaaccgccggctgtaccgccaggtcctgttcagtgctgatgaccgtgtgaaaaagtgcattggaggcgtcattttcttccatgagaccctctaccagaaagatgataatggtgttcccttcgtccgaaccatccaggataagggcatcgtcgtgggcatcaaggttgacaagggtgtggtgcctctagctgggactgatggagaaaccaccactcaagggctggatgggctctcagaacgctgtgcccaatacaagaaggatggtgctgactttgccaagtggcgctgtgtgctgaaaatcagtgagcgtacaccctctgcacttgccattctggagaacgccaacgtgctggcccgttatgccagtatctgccagcagaatggcattgtgcctattgtggaacctgaaatattgcctgatggagaccacgacctcaaacgttgtcagtatgttacagagaaggtcttggctgctgtgtacaaggccctgagtgaccatcatgtatacctggaggggaccctgctcaagcccaacatggtgaccccgggccatgcctgtcccatcaagtataccccagaggagattgccatggcaactgtcactgccctgcgtcgcactgtgcccccagctgtcccaggagtgaccttcctgtctgggggtcagagcgaagaagaggcatcattcaacctcaatgccatcaaccgctgcccccttccccgaccctgggcgcttaccttctcctatgggcgtgccctgcaagcctctgcactcaatgcctggcgagggcaacgggacaatgctggggctgccactgaggagttcatcaagcgggctgaggtgaatgggcttgcagcccagggcaagtatgaaggcagtggagaagatggtggagcagcagcacagtcactctacattgccaaccatgcctactgagtatccactccataccacagcccttggcccagccatctgcacccacttttgcttgtagtcatggccagggccaaatagctatgcagagcagagatgccttcacctggcaccaacttgtcttcctttctctcttcccttcccctctctcattgctgcacctgggaccataggatgggaggatagggagcccctcatgactgagggcagaagaaattgctagaagtcagaacaggatggctgggtctccccctacctcttccagctcccacaattttcccatgatgaggtagcttctccctgggctctccttcttgcctgccctgtctcctgggatcagagggtagtacagaagccctgactcatgccttgagtacataccatacagcaaataaatggtagcaaaacattcta

SEQ ID NO: 106473 - DNA, 579 bp, Homo sapiens
  Payload ID: 910
  Gene Symbol: ALDOC
  Gene Name: aldolase C, fructose-bisphosphate
  ENST ID: ENST00000435638
  CDS Start-End: 132-579
agtctcatctctctctcaggctctctactcctttcagccttggtcctctgccctcccgtctgggtgtctgagttgtggggaattgaagtgcttcctattgctatcctcctgccaaacagggagctgtcaccatgcctcactcgtacccagccctttctgctgagcagaagaaggagttgtctgacattgccctgcggattgtagccccgggcaaaggcattctggctgcggatgagtctgtaggcagcatggccaagcggctgagccaaattggggtggaaaacacagaggagaaccgccggctgtaccgccaggtcctgttcagtgctgatgaccgtgtgaaaaagtgcattggaggcgtcattttcttccatgagaccctctaccagaaagatgataatggtgttcccttcgtccgaaccatccaggataagggcatcgtcgtgggcatcaaggttgacaagggtgtggtgcctctagctgggactgatggagaaaccaccactcaagggctggatgggctctcagaacgctgtgcccaatacaagaaggatggtgctgactttgccaagtggcgct

SEQ ID NO: 106474 - DNA, 686 bp, Homo sapiens
  Payload ID: 910
  Gene Symbol: ALDOC
  Gene Name: aldolase C, fructose-bisphosphate
  ENST ID: ENST00000584086
  CDS Start-End: 161-686
atttaccagagggagccagggctgcagcctcatctgtttgcggatcagaacccgagctgtgcttgtggctgcggctgctaactggctgcgcacagctgagagaagagggtggcaataagtacttttgcctcattctgaagccttggaaggagctgtcaccatgcctcactcgtacccagccctttctgctgagcagaagaaggagttgtctgacattgccctgcggattgtagccccgggcaaaggcattctggctgcggatgagtctgtaggcagcatggccaagcggctgagccaaattggggtggaaaacacagaggagaaccgccggctgtaccgccaggtcctgttcagtgctgatgaccgtgtgaaaaagtgcattggaggcgtcattttcttccatgagaccctctaccagaaagatgataatggtgttcccttcgtccgaaccatccaggataagggcatcgtcgtgggcatcaaggttgacaagggtgtggtgcctctagctgggactgatggagaaaccaccactcaagggctggatgggctctcagaacgctgtgcccaatacaagaaggatggtgctgactttgccaagtggcgctgtgtgctgaaaatcagtgagcgtacaccctctgcacttgccattctggagaacgccaacgtgctggcccgttatgcca

SEQ ID NO: 106475 - DNA, 839 bp, Homo sapiens
  Payload ID: 910
  Gene Symbol: ALDOC
  Gene Name: aldolase C, fructose-bisphosphate
  ENST ID: ENST00000578590
  CDS Start-End: 473-839
agcctgcatcaccactagctcccctcagtctcatctctctctcaggctctctactcctttcagccttggtcctctgccctcccgtctgggtgtctgagttgtggggaattgaagtgcttcctattgctatcctcctgccaaacaggtgaagtgcttcctgggcacagagatgacccggaggtgtcactagccctagtctccacacactaacacagctgacccgctgggccctctttcctacatcactgcagccccactggggccaacctctggtactgggtgggaataggcaataggcataggcaggcaggtttggagtacagaaaaggagaagctgcaggagcctgtgactggtatttgtgccactcctactccctacctgttcttccaaccttttcctctagaagctgagagaagagggtggcaataagtacttttgcctcattctgaagccttggaaggagctgtcaccatgcctcactcgtacccagccctttctgctgagcagaagaaggagttgtctgacattgccctgcggattgtagccccgggcaaaggcattctggctgcggatgagtctgtaggcagcatggccaagcggctgagccaaattggggtggaaaacacagaggagaaccgccggctgtaccgccaggtcctgttcagtgctgatgaccgtgtgaaaaagtgcattggaggcgtcattttcttccatgagaccctctaccagaaagatgataatggtgttcccttcgtccgaaccatccaggataagggcatcgtcgtgggcatcaaggttgacaagggtgtggtgcctctagctgggactgatggagaaa

SEQ ID NO: 106476 - DNA, 922 bp, Homo sapiens
  Payload ID: 910
  Gene Symbol: ALDOC
  Gene Name: aldolase C, fructose-bisphosphate
  ENST ID: ENST00000460201
  CDS Start-End: 383-922
ggaaaggccaggacttttgcctacctcaacaagggaccaagttcagtgaaagaagggttggcatccttgattgggcagcagatttatcagaagagctgtggcttcagggctgctcacctccccacccccaccctgcatctttccccagggctgggaaggatgcctaccagggacaaaaggagatgtgggaactggagccctaagcttgctagctgtcagaaggactggtgccacttgatgcccaggactcatgccaaggactgctgccctgttcccagccccttgcttgatggggaggccatttggcccatctggccaggagaggcagcagagggtgaggtctggcttttttatcttgtctccactccagggagctgtcaccatgcctcactcgtacccagccctttctgctgagcagaagaaggagttgtctgacattgccctgcggattgtagccccgggcaaaggcattctggctgcggatgagtctgtaggcagcatggccaagcggctgagccaaattggggtggaaaacacagaggagaaccgccggctgtaccgccaggtcctgttcagtgctgatgaccgtgtgaaaaagtgcattggaggcgtcattttcttccatgagaccctctaccagaaagatgataatggtgttcccttcgtccgaaccatccaggataagggcatcgtcgtgggcatcaaggttgacaagggtgtggtgcctctagctgggactgatggagaaaccaccactcaagggctggatgggctctcagaacgctgtgcccaatacaagaaggatggtgctgactttgccaagtggcgctgtgtgctgaaaatcagtgagcgtacaccctctgcacttgccattctggagaacgccaacgtgctggcccgttatgccagtatctgccagcag

SEQ ID NO: 106477 - DNA, 580 bp, Homo sapiens
  Payload ID: 910
  Gene Symbol: ALDOC
  Gene Name: aldolase C, fructose-bisphosphate
  ENST ID: ENST00000581807
  CDS Start-End: 176-580
tttaccagagggagccagggctgcagcctcatctgtttgcggatcagaacccgagctgtgcttgtggctgcggctgctaactggctgcgcacagaagaaggagttgtctgacattgccctgcggattgtagccccgggcaaaggcattctggctgcggatgagtctgtaggcagcatggccaagcggctgagccaaattggggtggaaaacacagaggagaaccgccggctgtaccgccaggtcctgttcagtgctgatgaccgtgtgaaaaagtgcattggaggcgtcattttcttccatgagaccctctaccagaaagatgataatggtgttcccttcgtccgaaccatccaggataagggcatcgtcgtgggcatcaaggttgacaagggtgtggtgcctctagctgggactgatggagaaaccaccactcaagggctggatgggctctcagaacgctgtgcccaatacaagaaggatggtgctgactttgccaagtggcgctgtgtgctgaaaatcagtgagcgtacaccctctgcacttgccattctggagaacgccaacgtgctggcccgttat

SEQ ID NO: 106478 - DNA, 2132 bp, Homo sapiens
  Payload ID: 911
  Gene Symbol: ALG1
  Gene Name: ALG1, chitobiosyldiphosphodolichol beta -mannosyltransferase
  Uniprot ID: Q9BT22
  ENST ID: ENST00000262374
  CDS Start-End: 32-1426
gcggtcacgtgactgctgcgggccagccaagatggcggcctcatgcttggtcctgctggcgctgtgtctgctgctgccgctgctgctgctgggaggatggaagcgctggcgccgggggcgggcggcccggcatgtagtagcggtggtgctgggcgacgtgggccgcagcccccgtatgcagtaccacgcgctgtcgttggccatgcacggcttctcggtgaccctcctggggttctgcaactccaaaccccatgatgagctcttgcagaacaacagaattcagattgtggggttgacagaacttcagagtcttgcagttgggccccgagttttccagtacggagtcaaagttgtacttcaggctatgtacttgctgtggaagttgatgtggagggagccaggtgcctatatctttctccagaaccccccaggtctgcctagcattgctgtctgctggttcgtgggctgcctttgtggaagcaagctcgtcattgactggcacaactatggctactccatcatgggtctggtgcatggccccaaccatcccctcgttctgctggccaagtggtacgagaagttctttgggcgcctgtcccacctgaacctgtgtgttaccaatgctatgcgagaagacctggcggataactggcacatcagggctgtgaccgtctacgacaagcccgcatctttctttaaagagacacctctggacctgcagcaccggctcttcatgaagctgggcagcatgcactctccgttcagggcccgctcagaacctgaggacccagtcacggagcggtcggccttcacggagcgggatgctgggagcgggctggtgacgcgtctccgtgagcggccagccctgctggtcagcagcacgagctggacagaggacgaagacttctccatcctgctggcagctttagaaaagtttgaacaactgactcttgatggacacaaccttccttctctcgtctgtgtgataacaggcaaagggcctctgagggagtattatagccgcctcatccaccagaagcacttccagcacatccaggtctgcaccccctggctggaggccgaggactaccccctgcttctagggtcggcggacctgggtgtctgtctgcacacgtcctccagtggcctggacctgcccatgaaggtggtggacatgttcgggtgctgtttgcctgtgtgtgctgtgaacttcaagtgtttacatgagctggtgaaacatgaagaaaatggcctggtctttgaggactcagaggaactggcagctcagctgcagatgcttttctcaaactttcctgatcctgcgggcaagctaaaccagttccggaagaacctgcgggagtcgcagcagctccgatgggatgagagctgggtgcagactgtgctccctttggttatggacacataactcctgggccagaggctaaaaccccaggacccctgctgtccttcccgcagcttcttcttggagtctcagggcaaaccctttcgagcagcacctcccagtggccagaagctgaaatgacagcagtggtactgcctggtaaaagaattggttctgtgacccgggaagctttggttggccttgatttcttctctggaggcttggaaacgcttcctctcttcttctgttcttcacgccccatgcccctgctagcgtattactgttctgtgacttccctgtgacctctgcagaactcctcatcctgcgtttggtctccaggtgtcccctttctgccgtgttcctaacattttgattcctgtcttgaaaaaagcacctgctgcaccgtaagcccagggatgtggcagctgcagtgggcttggctttgtgaggaactgagtgtgtccacgttgggggaacatcatacttgatacacacgtttttatttgcacaaagaaaatgctatttttggagccagaattttcatgtctgatttatggtgattttcttaagaaccagaactgctggcagaaagggggcacccacacgcttagatagccgatgtcttattagagggcagtttgtggttcctgatttggaaattaacattctccaaacattccagtccaatgaaagttttatccgctttcccatataaaaattcttcccatga

SEQ ID NO: 106479 - DNA, 1419 bp, Homo sapiens
  Payload ID: 911
  Gene Symbol: ALG1
  Gene Name: ALG1, chitobiosyldiphosphodolichol beta -mannosyltransferase
  Uniprot ID: Q9BT22
  ENST ID: ENST00000544428
  CDS Start-End: 182-1243
cacgtgtcagaagtgtgttaagtgaatccattgcgtggtctcacgtaattctcctaactccaaaccccatgatgagctcttgcagaacaacagaattcagattgtggggttgacagaacttcagagtcttgcagttgggccccgagttttccagtacggagtcaaagttgtacttcaggctatgtacttgctgtggaagttgatgtggagggagccaggtgcctatatctttctccagaaccccccaggtctgcctagcattgctgtctgctggttcgtgggctgcctttgtggaagcaagctcgtcattgactggcacaactatggctactccatcatgggtctggtgcatggccccaaccatcccctcgttctgctggccaagtggtacgagaagttctttgggcgcctgtcccacctgaacctgtgtgttaccaatgctatgcgagaagacctggcggataactggcacatcagggctgtgaccgtctacgacaagcccgcatctttctttaaagagacacctctggacctgcagcaccggctcttcatgaagctgggcagcatgcactctccgttcagggcccgctcagaacctgaggacccagtcacggagcggtcggccttcacggagcgggatgctgggagcgggctggtgacgcgtctccgtgagcggccagccctgctggtcagcagcacgagctggacagaggacgaagacttctccatcctgctggcagctttagaaaagtttgaacaactgactcttgatggacacaaccttccttctctcgtctgtgtgataacaggcaaagggcctctgagggagtattatagccgcctcatccaccagaagcacttccagcacatccaggtctgcaccccctggctggaggccgaggactaccccctgcttctagggtcggcggacctgggtgtctgtctgcacacgtcctccagtggcctggacctgcccatgaaggtggtggacatgttcgggtgctgtttgcctgtgtgtgctgtgaacttcaagtgtttacatgagctggtgaaacatgaagaaaatggcctggtctttgaggactcagaggaactggcagctcagctgcagatgcttttctcaaactttcctgatcctgcgggcaagctaaaccagttccggaagaacctgcgggagtcgcagcagctccgatgggatgagagctgggtgcagactgtgctccctttggttatggacacataactcctgggccagaggctaaaaccccaggacccctgctgtccttcccgcagcttcttcttggagtctcagggcaaaccctttcgagcagcacctcccagtggccagaagctgaaatgacagcagtggtactgcctggtaaaagaattggttctgtgacccgggaagctttggttggc

SEQ ID NO: 106480 - DNA, 742 bp, Homo sapiens
  Payload ID: 911
  Gene Symbol: ALG1
  Gene Name: ALG1, chitobiosyldiphosphodolichol beta -mannosyltransferase
  ENST ID: ENST00000591783
  CDS Start-End: 240-742
ctttcctgggtgggtctctaggtatagccggcgttaatcttgccacgtgtcagaagtgtgttaagtgaatccattgcgtggtctcacgtaattctcctagtaagtggaacccagactccaaaccccatgatgagctcttgcagaacaacagaattcagattgtggggttgacagaacttcagagtcttgcagttgggccccgagttttccagtacggagtcaaagttgtacttcaggctatgtacttgctgtggaagttgatgtggagggagccaggtgcctatatctttctccagaaccccccaggtctgcctagcattgctgtctgctggttcgtgggctgcctttgtggaagcaagctcgtcattgactggcacaactatggctactccatcatgggtctggtgcatggccccaaccatcccctcgttctgctggccaagtggtacgagaagttctttgggcgcctgtcccacctgaacctgtgtgttaccaatgctatgcgagaagacctggcggataactggcacatcagggctgtgaccgtctacgacaagcccgcatctttctttaaagagacacctctggacctgcagcaccggctcttcatgaagctgggcagcatgcactctccgttcagggcccgctcagaacctgaggacccagtcacggagcggtcggccttcacggagcgggatgctgggagcgggctggtgacgcgtctccgtgagcggccagccct

SEQ ID NO: 106481 - DNA, 582 bp, Homo sapiens
  Payload ID: 911
  Gene Symbol: ALG1
  Gene Name: ALG1, chitobiosyldiphosphodolichol beta -mannosyltransferase
  ENST ID: ENST00000586840
  CDS Start-End: 29-582
gtcacgtgactgctgcgggccagccaagatggcggcctcatgcttggtcctgctggcgctgtgtctgctgctgccgctgctgctgctgggaggatggaagcgctggcgccgggggcgggcggcccggcatgtagtagcggtggtgctgggcgacgtgggccgcagcccccgtatgcagtaccacgcgctgtcgttggccatgcacggcttctcggtgaccctcctggggttctgcaactccaaaccccatgatgagctcttgcagaacaacagaattcagattgtggggttgacagaacttcagagtcttgcagttgggccccgagttttccagtacggagtcaaagttgtacttcaggctatgtacttgctgtggaagttgatgtggagggagccaggtgcctatatctttctccaggtctgcctagcattgctgtctgctggttcgtgggctgcctttgtggaagcaagctcgtcattgactggcacaactatggctactccatcatgggtctggtgcatggccccaaccatcccctcgttctgctggccaagtggtacgagaagttctttgggcgcctg

SEQ ID NO: 106482 - DNA, 1689 bp, Homo sapiens
  Payload ID: 911
  Gene Symbol: ALG1
  Gene Name: ALG1, chitobiosyldiphosphodolichol beta -mannosyltransferase
  ENST ID: ENST00000591822
  CDS Start-End: 2-256
gatggcggcctcatgcttggtcctgctggcgctgtgtctgctgctgccgctgctgctgctgggaggatggaagcgctggcgccgggggcgggcggcccggcatgtagtagcggtggtgctgggcgacgtgggccgcagcccccgtatgcagtaccacgcgctgtcgttggccatgcacggcttctcggtgaccctcctggggttctgcagtgagtggccaagggtctgggagggacgatgctctctcagccgttgatcctcggttctaaccgccccggggagtcgaggcggaagtgctcctttagtcgccgcctttgggcagctctccgagattagacgagcggttctgccccagcctttcctggactccaaaccccatgatgagctcttgcagaacaacagaattcagattgtggggttgacagaacttcagagtcttgcagttgggccccgagttttccagtacggagtcaaagttgtacttcaggctatgtacttgctgtggaagttgatgtggagggagccaggtgcctatatctttctccagaaccccccaggtctgcctagcattgctgtctgctggttcgtgggctgcctttgtggaagcaagctcgtcattgactggcacaactatggctactccatcatgggtctggtgcatggccccaaccatcccctcgttctgctggccaagtggtacgagaagttctttgggcgcctgtcccacctgaacctgtgtgttaccaatgctatgcgagaagacctggcggataactggcacatcagggctgtgaccgtctacgacaagcccgcatctttctttaaagagacacctctggacctgcagcaccggctcttcatgaagctgggcagcatgcactctccgttcagggcccgctcagaacctgaggacccagtcacggagcggtcggccttcacggagcgggatgctgggagcgggctggtgacgcgtctccgtgagcggccagccctgctggtcagcagcacgagctggacagaggacgaagacttctccatcctgctggcagctttagaaaagtttgaacaactgactcttgatggacacaaccttccttctctcgtctgtgtgataacaggcaaagggcctctgagggagtattatagccgcctcatccaccagaagcacttccagcacatccaggtctgcaccccctggctggaggccgaggactaccccctgcttctagggtcggcggacctgggtgtctgtctgcacacgtcctccagtggcctggacctgcccatgaaggtggtggacatgttcgggtgctgtttgcctgtgtgtgctgtgaacttcaagtgtttacatgagctggtgaaacatgaagaaaatggcctggtctttgaggactcagaggaactggcagctcagctgcagatgcttttctcaaactttcctgatcctgcgggcaagctaaaccagttccggaagaacctgcgggagtcgcagcagctccgatgggatgagagctgggtgcagactgtgctccctttggttatggacacataactcctgggccagaggctaaaaccccaggacccctgctgtccttcccgcagcttcttcttggagtctcagggcaaaccctttcgagcagcacctcccagtggccagaagctgaaatgacagcagtggtactgcctggt

SEQ ID NO: 106483 - DNA, 2671 bp, Homo sapiens
  Payload ID: 911
  Gene Symbol: ALG1
  Gene Name: ALG1, chitobiosyldiphosphodolichol beta -mannosyltransferase
  Uniprot ID: Q9BT22
  ENST ID: ENST00000588623
  CDS Start-End: 1101-2162
aagtcccagggtggccgctttcagctcggactgaattacctgcgctcttttcggctggcgggctggcgggcggtgctggtgatgttaactttttatctccagtcatttcaccctctccctggtttggtaactgaagccttctgaaatgaaccagtgtcaggctccagtgaggactccatccccaattcaggaagcacagaggtggagcataatccccccaatttgtttatgtgcggctgacttctctcaagatggtgtgcctgtttgggaaaacttttgtttgcaagacaatgtgaaagaaatccttaaagctcacagactgctgggtggatatgacattctggcccttggttcccccaagaaaacagcaacttgcagatagcaagtcaaacttgtcagcagaatccagggatgttcctcgaggcctgacaagttaagagcaatcatgggaaggcattcagaggaccgcagcagaggatcaggtcaagggaaacctacctcctaaaggaaagatcgagaagaaccatgcgccccaccacccacctgggctgctcagctgggcacagaagcagccaaggatattttcattcggatgctcacatatgactgagttgccacatgaggatgatccgtggcgattttccaccttgaggcaaagcaggacaatgcgtgtaaagaggtttgcagccccgggaccgggttttcagctggtttttctaccccaaagtccaatgcgtgcaggctgtcatcagcaccacagacagcaccagaacccatcataatgtcccagaaggttttattgctaaattagtgtcagagctccagggaacacattcagatatagtcacactgagtcagagctcgagggaagagctgtaagctgggaaccagagaaccgatgacaaggcagcggcctcttctggcagcttccggaggagcccccacttaatgggacgtcatcacttgaggcagcagactccaaaccccatgatgagctcttgcagaacaacagaattcagattgtggggttgacagaacttcagagtcttgcagttgggccccgagttttccagtacggagtcaaagttgtacttcaggctatgtacttgctgtggaagttgatgtggagggagccaggtgcctatatctttctccagaaccccccaggtctgcctagcattgctgtctgctggttcgtgggctgcctttgtggaagcaagctcgtcattgactggcacaactatggctactccatcatgggtctggtgcatggccccaaccatcccctcgttctgctggccaagtggtacgagaagttctttgggcgcctgtcccacctgaacctgtgtgttaccaatgctatgcgagaagacctggcggataactggcacatcagggctgtgaccgtctacgacaagcccgcatctttctttaaagagacacctctggacctgcagcaccggctcttcatgaagctgggcagcatgcactctccgttcagggcccgctcagaacctgaggacccagtcacggagcggtcggccttcacggagcgggatgctgggagcgggctggtgacgcgtctccgtgagcggccagccctgctggtcagcagcacgagctggacagaggacgaagacttctccatcctgctggcagctttagaaaagtttgaacaactgactcttgatggacacaaccttccttctctcgtctgtgtgataacaggcaaagggcctctgagggagtattatagccgcctcatccaccagaagcacttccagcacatccaggtctgcaccccctggctggaggccgaggactaccccctgcttctagggtcggcggacctgggtgtctgtctgcacacgtcctccagtggcctggacctgcccatgaaggtggtggacatgttcgggtgctgtttgcctgtgtgtgctgtgaacttcaagtgtttacatgagctggtgaaacatgaagaaaatggcctggtctttgaggactcagaggaactggcagctcagctgcagatgcttttctcaaactttcctgatcctgcgggcaagctaaaccagttccggaagaacctgcgggagtcgcagcagctccgatgggatgagagctgggtgcagactgtgctccctttggttatggacacataactcctgggccagaggctaaaaccccaggacccctgctgtccttcccgcagcttcttcttggagtctcagggcaaaccctttcgagcagcacctcccagtggccagaagctgaaatgacagcagtggtactgcctggtaaaagaattggttctgtgacccgggaagctttggttggccttgatttcttctctggaggcttggaaacgcttcctctcttcttctgttcttcacgccccatgcccctgctagcgtattactgttctgtgacttccctgtgacctctgcagaactcctcatcctgcgtttggtctccaggtgtcccctttctgccgtgttcctaacattttgattcctgtcttgaaaaaagcacctgctgcaccgtaagcccagggatgtggcagctgcagtgggcttggctttgtgaggaactgagtgtgtccacgttgggggaacatcatacttgatacacacgtttttatttgcacaaagaaaatgctatttttggagcc

SEQ ID NO: 106484 - DNA, 805 bp, Homo sapiens
  Payload ID: 912
  Gene Symbol: ALG1L
  Gene Name: ALG1, chitobiosyldiphosphodolichol beta -mannosyltransferase-like
  Uniprot ID: Q6GMV1
  ENST ID: ENST00000340333
  CDS Start-End: 165-728
cagactgctgtgctagcaatcagtgagactccgtgggcgtaggaccctctgagccaggtgcgggatataatcttgtggtgcgccgttttttaagccggtccgaaaagcgcaatattcgggtgggagtgacccgatttcccagctcagaacctgaggacgcagccatggagcggtcggccttcatggagctggatgctgggagcaggctggtgatgcatctccgcgagtggccagccctgctggtcagcagcacgggctggacagagtttgaacaacttactcttgatggacacaaccttccttctcttgtctgtgtgataacagggtcggtggacctgggtgtctgtctgcacatgtcctccagtggcctggacctgcccatgaaggtggtggacatgttcgggtgctgtttgcctgtgtgtgccgtgaacttcaagtgtttacatgagctggtgaaacatgaagaaaatggcctggtctttgaggactcagaggaactggcagctctgcagatgcttttctcaaactttcctgatcctgcaggcaagctaaaccagttttggaagaacctgcgggagtcgcagcagctccgatgggatgagagctgggtgcagactgtgctccctttggttatggacatacaactcctgggccagaggctaaaaccccgggacccctgctgtccttcccgcagcttcttctcggagtctcagggcaaacccttttgagcagcgcctcccagtggccagaagctgaaatgacggcagtggtgccgcctggtgaatgaattggttctgtgacccgg

SEQ ID NO: 106485 - DNA, 701 bp, Homo sapiens
  Payload ID: 912
  Gene Symbol: ALG1L
  Gene Name: ALG1, chitobiosyldiphosphodolichol beta -mannosyltransferase-like
  ENST ID: ENST00000611639
  CDS Start-End: 1-624
atgaagctgggtggcactcactctctgttcagggcctgctcagaacctgaggacgcagccatggagcggtcggccttcatggagctggatgctgggagcaggctggtgatgcatctccgcgagtggccagccctgctggtcagcagcacgggctggacagagtttgaacaacttactcttgatggacacaaccttccttctcttgtctgtgtgataacagggtcggtggacctgggtgtctgtctgcacatgtcctccagtggcctggacctgcccatgaaggtggtggacatgttcgggtgctgtttgcctgtgtgtgccgtgaacttcaagtgtttacatgagctggtgaaacatgaagaaaatggcctggtctttgaggactcagaggaactggcagctctgcagatgcttttctcaaactttcctgatcctgcaggcaagctaaaccagttttggaagaacctgcgggagtcgcagcagctccgatgggatgagagctgggtgcagactgtgctccctttggttatggacatacaactcctgggccagaggctaaaaccccgggacccctgctgtccttcccgcagcttcttctcggagtctcagggcaaacccttttgagcagcgcctcccagtggccagaagctgaaatgacggcagtggtgccgcctggtgaatgaattggttctgtgacccgg

SEQ ID NO: 106486 - DNA, 969 bp, Homo sapiens
  Payload ID: 913
  Gene Symbol: ALG1L2
  Gene Name: ALG1, chitobiosyldiphosphodolichol beta -mannosyltransferase-like 2
  Uniprot ID: C9J202
  ENST ID: ENST00000425059
  CDS Start-End: 187-834
gtgggaggtgacaccaggaggtaaccaggtggaaatcaccctcaagtagcagagacaggtgtgcaaaggctcagagggagcttctccaggatcagcagagctcgattgtagggtgtgaggctgtcacagaggctggagaaataagcagttccttgctaagaagtctgaattttaacctgaagggacatgggagctactgcaggctgggctgtgaccgtctacgacaagccggcatctttctttaaagaggcacctctggacctgcagcaccggctcttcatgaagctgggcagcacgcactctccgttcagggcccgctcagaacctgaggacccagacacagagcggtcggccttcacggagcgggattctgggagcgggctggtgacgcgtctccacgagcggccagccctgctggtcagcagcacaagctggacagagtttgaacaactgactcttgacggacagaaccttccttctctcgtctgtgtgataacaggcaaagggcctctgagggagtattacagccgcctcatccaccagaagcatttccagcacatccaggtctgcatcccctggctggagggccgaggactacccccgcttctagggtcggtggacctggatgtctgtctggacacgtcctccagtggcctggacctgcccatgaaggtggtggacatgttcaggtgctgtttgcctgcgtgtgccgtgaacttcaagtgtttacatgagctggtgaaacatgaagaaaaccgcctggtctttgaggactcagaggaactggcagctcagctgcagtattttgcagatgcttttctcaaactttcctgatcctgaaggcaagctaaaccagttccggaagaacctgcgggagtcgcagcagctctgatgggatgagagctgggtgcagactgtgctccctttggttatggacacataactcctgggccagaggctaaaacccca

SEQ ID NO: 106487 - DNA, 3128 bp, Homo sapiens
  Payload ID: 914
  Gene Symbol: ALG10
  Gene Name: ALG10, alpha-1,2-glucosyltransferase
  Uniprot ID: Q5BKT4
  ENST ID: ENST00000266483
  CDS Start-End: 320-1741
ctaagcagcaagccacgcacctcccgcgctggcgaaatccgagacccgccccttccggaagttttgacactttgtgcgccccgggcaatgcgattgagagggtaatcatccggtccgttatctaaacccgtcactccgggaaacagcgacccgatctttccggatccgcgctctcccagcatcctttgccttccggtatgtggccccgtctggctagtcccgcctagcgcgcccatttcgagcccaagtttccagctcgggtttccaggctcagaattttccaggagtaggttcttgggcagtggctgtgggagctggaatggcgcagctggaaggttactatttctcggccgccttgagctgtacctttttagtatcctgcctcctcttctccgccttcagccgggcgttgcgagagccctacatggacgagatcttccacctgcctcaggcgcagcgctactgtgagggccatttctccctttcccagtgggatcccatgattactacattacctggcttgtacctggtgtcaattggagtgatcaaacctgccatttggatctttggatggtctgaacatgttgtctgctccattgggatgctcagatttgttaatcttctcttcagtgttggcaacttctatttactatatttgcttttctgcaaggtacaacccagaaacaaggctgcctcaagtatccagagagtcttgtcaacattaacactagcagtatttccaacactttatttttttaacttcctttattatacagaagcaggatctatgttttttactctttttgcgtatttgatgtgtctttatggaaatcataaaacttcagccttccttggattttgtggcttcatgtttcggcaaacaaatatcatctgggctgtcttctgtgcaggaaatgtcattgcacaaaagttaacggaggcttggaaaactgagctacaaaagaaggaagacagacttccacctattaaaggaccatttgcagaattcagaaaaattcttcagtttcttttggcttattccatgtcctttaaaaacttgagtatgcttttgcttctgacttggccctacatccttctgggatttctgttttgtgcttttgtagtagttaatggtggaattgttattggcgatcggagtagtcatgaagcctgtcttcattttcctcaactattctactttttttcatttactctctttttttcctttcctcatctcctgtctcctagcaaaattaagacttttctttccttagtttggaaacgtagaattctgttttttgtggttaccttagtctctgtgtttttagtttggaaattcacttatgctcataaatacttgctagcagacaatagacattatactttctatgtgtggaaaagagtttttcaaagatatgaaactgtaaaatatttgttagttccagcctatatatttgctggttggagtatagctgactcattgaaatcaaagtcaattttttggaatttaatgtttttcatatgcttgttcactgttatagttcctcagaaactgctggaatttcgttacttcattttaccttatgtcatttataggcttaacatacctctgcctcccacatccagactcatttgtgaactgagctgctatgcagttgttaatttcataacttttttcatctttctgaacaagacttttcagtggccaaatagtcaggacattcaaaggtttatgtggtaatatcagtgatatttcgaactgtgaaaatggacttaataattagaccatttctacaaagaacaactgaataggtggaaaacatggaatttcttttaggtgcagtggtggtcttcaaattacattagttttttttatatatattttaaacatatgtaagaaattaagtggcaaagaactgagaaagcttaagacctgcttcaaaagcctgaaaaatggaaaaataaaattgttttcagatatctcatatcactctcataatgttggccccttaaaaagcttgggaatgttttgtatgtacaagtttattaaaactgggtatgcttcatattactggaatgaatttattctcttcagagagaaatattaggttagtgcaaaagtaattgtggtttttgccattgaaagtaatggcaaaaccacaattacttttttaccaacctaataacaatgtattagcaaatatttacaaatggtcaggtgatattcttgattgaaaagttgcttaacatttcagtaatataattttaattctaagtcaaaatacaaatgcatagatagtaaatgataaagtagagactcatatatgcctgtctagacatcaaattgttggttattgtttacaatctagaaatgatgaagctctttcactaattcctaatatgaaatgtatgatggccaaagacaaattgtattgattataatcctttaaaagggggatttcctttctgaaatacatattgtattagcttcccagggcttccataacaaatgacgacaaacttgggtgcttacaacaattttcctcacagtctggaggccagaagtctaaaatcaaagtgtcagcagagttggttccttctggaggctctaaggaagaatccataaacagacattctatgtctgtttcctaatatcttgtggctgtgtgcaattcttggagttctttggcttctggacaaatcttgtccaagtattgcagacagcaatcttcactccagtctctgcctctgtgttcacacggcctttccctctgtcttctcttcattaccttttaaggacagtgtctttgaatgtagggcccaccctgatctagggtgattgtgtctggagacccttaattatgtttacaaagacccatgttccaagtaagtttgtattcacatgatctgagtagacattgtctcttcgtgggatacttttcagtccatgacagttactaaaggacattttaggatagtcttcatatgattgttaggagactacctttttagattttttttattatatatcaaattatagttgtatatacttatgagaaacaaagtggcattatgatttttgaatataatgtgggattaaataaagctaatctatccatcacctcaaa

SEQ ID NO: 106488 - DNA, 1637 bp, Homo sapiens
  Payload ID: 914
  Gene Symbol: ALG10
  Gene Name: ALG10, alpha-1,2-glucosyltransferase
  ENST ID: ENST00000541875
  CDS Start-End: 128-361
ccggtatgtggccccgtctggctagtcccgcctagcgcgcccatttcgagcccaagtttccagctcgggtttccaggctcagaattttccaggagtaggttcttgggcagtggctgtgggagctggaatggcgcagctggaaggttactatttctcggccgccttgagctgtacctttttagtatcctgcctcctcttctccgccttcagccgggcgttgcgagagccctacatggacgagatcttccacctgcctcaggcgcagcgctacttgggatcccatgattactacattacctggcttgtacctggtgtcaattggagtgatcaaacctgccatttggatctttggatggtctgaacatgttgtctgctccattgggatgctcagatttgttaatcttctcttcagtgttggcaacttctatttactatatttgcttttctgcaaggtacaacccagaaacaaggctgcctcaagtatccagagagtcttgtcaacattaacactagcagtatttccaacactttatttttttaacttcctttattatacagaagcaggatctatgttttttactctttttgcgtatttgatgtgtctttatggaaatcataaaacttcagccttccttggattttgtggcttcatgtttcggcaaacaaatatcatctgggctgtcttctgtgcaggaaatgtcattgcacaaaagttaacggaggcttggaaaactgagctacaaaagaaggaagacagacttccacctattaaaggaccatttgcagaattcagaaaaattcttcagtttcttttggcttattccatgtcctttaaaaacttgagtatgcttttgcttctgacttggccctacatccttctgggatttctgttttgtgcttttgtagtagttaatggtggaattgttattggcgatcggagtagtcatgaagcctgtcttcattttcctcaactattctactttttttcatttactctctttttttcctttcctcatctcctgtctcctagcaaaattaagacttttctttccttagtttggaaacgtagaattctgttttttgtggttaccttagtctctgtgtttttagtttggaaattcacttatgctcataaatacttgctagcagacaatagacattatactttctatgtgtggaaaagagtttttcaaagatatgaaactgtaaaatatttgttagttccagcctatatatttgctggttggagtatagctgactcattgaaatcaaagtcaattttttggaatttaatgtttttcatatgcttgttcactgttatagttcctcagaaactgctggaatttcgttacttcattttaccttatgtcatttataggcttaacatacctctgcctcccacatccagactcatttgtgaactgagctgctatgcagttgttaatttcataacttttttcatctttctgaacaagacttttcagtggccaaatagtcaggacattcaaaggtttatgtggtaatatcagtgatatttcgaactgtgaaaatggacttaataattagaccatttctacaaagaacaactgaataggtggaaaacatggaatttcttttaggtgcagtggtggtcttca

SEQ ID NO: 106489 - DNA, 571 bp, Homo sapiens
  Payload ID: 914
  Gene Symbol: ALG10
  Gene Name: ALG10, alpha-1,2-glucosyltransferase
  ENST ID: ENST00000538927
  CDS Start-End: 133-513
gccttccggtatgtggccccgtctggctagtcccgcctagcgcgcccatttcgagcccaagtttccagctcgggtttccaggctcagaattttccaggagtaggttcttgggcagtggctgtgggagctggaatggcgcagctggaaggttactatttctcggccgccttgagctgtacctttttagtatcctgcctcctcttctccgccttcagccgggcgttgcgagagccctacatggacgagatcttccacctgcctcaggcgcagcgctactgtgagggccatttctccctttcccagtgggatcccatgattactacattacctggcttgtacctggtgtcaattggagtgatcaaacctgccatttggatctttggatggtctgaacatgttgtctgctccattgggatgctcagatttgttaatcttctcttcagtgttggcaacttctatttactatatttgcttttctgcaaggtacaacccagaaacaaggaatacttctgagaggagaagcttccactctgatctagtctggcaaaattgaggaaaatattctaccctg

SEQ ID NO: 106490 - DNA, 10253 bp, Homo sapiens
  Payload ID: 915
  Gene Symbol: ALG10B
  Gene Name: ALG10B, alpha-1,2-glucosyltransferase
  Uniprot ID: Q5I7T1
  ENST ID: ENST00000308742
  CDS Start-End: 317-1738
aagcagcaagccacgcccctcccgcgctcgcgaaatccgagacccgccctttccggaagttttgacactgtgcgccccgagtaatgtgatggagagggtaatcatccggtccgttatctaaacccgtcactccaggaaacagcgacccgctgttttccggatccgcgctctcccagcatcctttgccttccggtatgtggccccgtctggctagtcctgtctagcgcgcccatttcgagcccaagtttccagctcgggtttccgggctcagaattttccaggagtgggttcttgggcagtggctgtgggagcaggaatggcgcagctagagggttactgtttctcggccgccttgagctgtacctttttagtgtcctgcctcctcttctccgccttcagccgggcgctgcgagagccctacatggacgagatcttccacctgcctcaggcgcagcgctactgtgagggccatttctccctttcccagtgggatcccatgattactacattacctggcttgtacctggtgtcagttggagtggtcaaacctgccatttggatctttgcatggtctgaacatgttgtctgctccattgggatgctcagatttgttaatcttctcttcagtgttggcaacttctatttactatatttgcttttccacaaggtacaacccagaaacaaggctgcctcaagtatccagagagtcttgtcaacattaacactagcagtatttccaacactttatttttttaacttcctttattatacagaagcaggatctatgttttttactctttttgcatatttgatgtgtctttatggaaatcataaaacttcagccttccttggattttgtggcttcatgtttcggcaaacaaatatcatctgggctgtcttctgtgcagggaatgtcattgcacaaaagttaactgaggcttggaaaactgagctacaaaagaaggaagacagacttccacctattaaaggaccatttgcagaattcagaaaaattcttcagtttcttttggcttattccatgtcctttaaaaacttgagtatgcttttctgtttgacttggccctacatccttctgggatttctgttttgtgcttttgtagtagttaatggtggaattgttattggcgatcggagtagtcatgaagcctgtcttcattttcctcaactattctactttttttcatttactctctttttttcttttcctcatctcctgtctcctagcaaaattaagacttttctttccttagtttggaaacatggaattctgtttttggtggttaccttagtctctgtgtttttagtttggaaattcacttatgctcataaatacttgctagcagacaatagacattatactttctatgtgtggaaaagagtttttcaaagatatgcaattctgaaatatttgttagttccagcctatatatttgctggttggagtatagctgactcattgaaatcaaagccaattttttggaatttaatgtttttcatatgcttgttcattgttatagttcctcagaaactgctggaatttcgttacttcattttaccttatgtcatttataggcttaacataactctgcctcccacatccagacttgtttgtgaactgagttgctatgcaattgttaatttcataactttttacatctttctgaacaagacttttcagtggccaaatagtcaggacattcaaaggtttatgtggtaatatcagtgatattttgaactgtaaaaatggacttaataattagaccatttctacaaagaacaactgaataggtggaaaacatggaatttcttttaggtgcagtggtggtcctcaaattacattagtttttttaatatatattttaaacatatgtaagaaattaagtggcaaagaactgggaaagcttaagacctgcttcaaaagcctgaataatgggaaaataaaattgttttcagatatctcatatcgctctcgtaatgttggcccctcacaaagcttgggaatgttttgtatgtataagtttattaaaactgggtatgcttcatattactagaactaatttattctcttcagagagaactattaggttagtgcaaaagtaattgtggtttttgccattgaaagtaatggcaaaaccacaattacttttgtaccaacctaataacaatgtgttagcaaatatttacaaatggtcaggtgatattcttgactgaaaagttccttaacatttcagtaaatataattttaattctaagtcaaaatagaaatgcatagatagtaaatgataaagtagagactcatatatgtctgtctaggcatcaaattgttggttattgtttacaatccagaaatgatgaagctctttcactaattcctaatatgaaatgtatgatggccaaagacaaattgtgttgattataatcctttaaaagggggatttcctttatgaaatacatattgtattagcttcccagggctgccataacaaatgaccacaaacttgggtgcttacaacaattttcctcacagtctggaggccagaagtctaaaatcaaagtgtcagcagagttggttccttctggaggctctaaggaagaatccattctatgtctgtttcctaatatcttgtggctgtctgcaattcttggagttctttggcttatgggcatatcttgtctaagtattgcagacagcaatcttcactccagtctctgcctctgcgttcacacggcctttccctctgtcttttcattaccttttaaggacagtgtctttgaatgtagggcccaccctgatctagggtgattgtgtctggagacccttaattatgtttacaaagacccatgttccaagtaagtttgtattcacatgttctgagtagacattgtctcttcatgggatacttttcagtccatgacagttactaaaggacattttaggataatcctcatatgattgttaggagactacctttaaaaattttttattatatatcaaattatagttgtatatacttatgaggtacgaagtggcattatgatttttgaatataatgtgggatgattaaataaagctaatctatccatcacctcaaatatttgacatattttgtgatgaaaacatttgaaatgtactctcaacagtattgaaatgtacatacagtgcttaattattagctgtattcaccatgttgtgtaatagatctaaaaaaagtcaaacatattccttctatctaattgaggctttgtatcttttgattgtcatctccctattcccacatccccggcctctagcaaccatcattcttctctctacttctgtgagtttaattgttttagattacacaaataagtgagatcatgtggtatttgtctttctgtgcttggcttatttcacttaccataatgtcctccacgatcatccatattgttgcaaatgacacaatttcttcctttttaaaggctgaatagtatttttttgtatatatatgccacattttctttatccattcatccatggatggacacttaggttgatcgaatcacttggttattgtgacttgtctgcaatgaacatagagtgcagacttctctttgacatacggatttcaaatcttctggataaatagccagaagtgggattgttggatcaggagataatatcttagctgataccttttaaataactctcagtatctttactgagaggttaaaaaataagtgacttcttaggtaatataaagctaaaggtgactagtgtttgattccattatctattaaaaaaagtcagaattgaaagaaagttgagaaatcctttggtctgactttgtagattagggaacaactgctggggtaggattattttgtgttactttttgaattttgtgtttattattttgagtgtattttttgggttgtcattccattacaggaaagtattatttgggcatgttaactttgacatgtaaacttagaattgtgaatagaactcatcttttaacataattttatgtttctaaactttaaaagtagctataagtgaacaaattactttcccctcaatgtcaaattttgcttctctgagttttaagtgatgagtctacatttacaaatataaaattgtgtgcaggtgaaaattacaagtataatttgagtaataaatgcaggccattttttggttgtactctagtactcagaaaatagatcggcattagttataacagtgattgtagaaaaacgtgttttacccagacttcttaaaaattagatgagagaggacactcaaagaaattatacttttgtcattaatttactatagtggagaactaaatctgggaagtcaaaattgaaaaaagaatgtgtaatttagggaaagtaactttttgtctgataatattaatgcaaggattttgtatttaggaatacttctgagaggagaagcttccactctgatctagtctggcaaaattgaggaaaatattctaccctgtaattaaagaagactgctctttggagggatcactgttctatatctttttttgtttgtttttgtctttgaggagaagtctcgctcttgtcccccaggctggaatgcaatggcgcgatcttggctcactgaaacctccacctcctgggttcaagcagttctcctgcctcagcctcccgagtagctgagattataggcgcccaccaccaagcctggctaattttttctatttttagtagagccggggtttcaccgtgttagccaggctggtctcgaactcctgacctcaggtaatccacctgcctcgcctcccaaagtgctgggattacaggcgtgagccactgtgcccagctcttctagttcatttttaagtgttgagtccctgctgtttaagagatgttttggtgaaaatctacattcagagagaaacaggttaatcttccacattttttataaaatacataaaatatagtacttggcattttaagaaaagaatgccatgtattaaaaggtgctattttcaactatttattattttaaaacaggaatgcttatcaatactttcgaatttaagataaatgtcttcgttaaattttctaggcagttcaaagatggccatttgctggtgaattttccaaaatagataacagataaaatgattatgtaagaacttggcacaacagatcattttgcctttagtcgttcaagaaatgatactaaactcaaagtcattcacttgaaacaactgagaagaccattcttaggtgtttagatccttgcttttagaaacattcttagttatatttgtgttttcaaaagttattgagtagatagatattttttcatgaatttttaaacattagacttagctgaattgattaaaattaggtgattatgaaaaaaatattgccctgctcgagggcatctggagccctacagttaccattactaaagtctgtgagtatgtctattttgaaaagtgtcataaaaatatctagtccataaatcattataggttcagtaatacatcattttgaactgattctatcttctgtgaaattctagagatatgttatctttaggtagcatgagtaagattcaggtatgctgtgaattttgttaacgtttatgttttccattaatggatagtcaggaatcttttgaactgcgtctatgtatttaaatgatttggaaagatagcatctctcagtttaaacttagcatctcattttggcaagataaattattttagctgtctggccttttctttgtcttcttagagttatttctgaaatgtgcatagccagtcataaaataacttgtgtaaatagcctaatgtaatttatttctaataaatacgtagcttaatgaaatgtatttctagtttgaacttaattgccacttggcttgatattattttccttagaattgttggaagagaggagagaggaagggatctaccatttttatttataccacctaaatagtggactgttattttggactcacttttaaataaaatatttattcacatgaagaaataaattttgtgtttattaggttagcaagcgtttattatctttgaagtaattggaatttcattaaaaagtgaagcaagtaagaattgtgatataaatttgaaaatttttaaatggaaattgaaatatgacttaggaactgtgggcttgtagaaaaaaacatttaacatgggagttaagatttttatatttggttgtggctctgggatcaataaggcaagtggtttagtctttagtcctcatttcaaatgagaatagtatttgtcctaactctagtcagtgtctgattggtatgtgtataaccttattttaaaaaggattcattcctgccatatactcataatatttataagtatgtcatatgataaatattgagtaaatatatactgaatgaagtttttagtatagagtgaagtgaatagaaaaaacatcctacataaccgtggctaattttaggaagtaaatcatgtttcataataagagtcatcctaaacatttttctgtgtaattttctgacccagtgttaacaatttttatttgccttagtgcaagcttgttcaacccacaggccacatgcagcccaggatggctttgaatgcggccccaacacaaattttgtaagctttcttaaaacatgatgagatattttgtgattttattttattttattttatttattattttattttattttattttattttttagctcatcagctatcattagtgttcgtgtattttatgtgtggcccaagatggttcttccagtgtggcccagggaagccaaaagattggagacccctgctagcatttaatgcttatacatgtatttacttgtaaacatgttgtttctttgataggatatgatttcaacataattactgtttatttaaaataagaaaaacaaataactttcaaccattaaaaggttataacactttaaaggaaagtttcttattaaagaaactttataccctattaagggtataatttcaaaataattgctttttatttaaaataagaaaatattcttatttctatttaaaataagaaaaatcagtaaccttcaacgaataacaggttaaagaatttaaaggtaaaagacatttcaactaattacaaatactttgttttttttagttgggctacattttaccactctaggaatagctgttaattattttttatatagggcatttttatgtatttaatgttgacaactgacgtttccaatatacaaaaacttgtgtaactgagaaaattataataaaaatagagattgaggacatatttttaacatatatccatgagtcaacactaatatttaatatttgagatttgaaaaattatttctagggtaagaaattctgtcacaatataatatctctatattgtgcttttttaagagataaatttttgatgaatttaatgttaattaaattttatctcagcctatcaccatcagaccaaaagacaatacagtatttttctaacaaggaaaagaaaatacatatatatatatttatatatacaaatatatacgtatttatatatacaaatttgtatatatgtaatgtatgtgtgtgtgtatacatataatttctccttttttttttttgtaagaattgagacagggtgtcactatgttgtgtgggctggtctcaaaacacctgcctcaagtgatcctcccaccttggcctcccaaagtgctaggatttacaatgagccactgtgccagcttccaacaagaaaaatattaaatgtattggtttttcacagtgaaacttaattcagtttagttgaaccatatatgtgtgtgtatggcatatataagatgaaaaaaggagaaaaagtaacaataataatgatggttgccatcattcattgaacacctataatgttttaggcattatactagctgatttacaaatattgtctcatttgatgctacatttatatttctatgaggcagatgttgatttctctttgactgctgaagaaactgaaggtcggtcaggtcaggtgatttgcccaaagtccacactgtcactaaatgaacatagattggtatgactcccaagcctgtgagtttttgaccgtcatattctgcctcactatgaaaagttttttttcaattttttttaaatcaaaagaagtagtatatggagagagaggtgaaaatccatgtttgctctctgcagtttccaaaccattcatgacgtgttatttttgtactggatatagtcattttttaaaatgctacaaactgttcaaaagagcatgaacaacatgataactccttataattttgttgtaagataaatgactaaaattatgtgggatatttaatttggataagtggaaattctatcacttgataagctctcttgaagaataattatttgaaagattggacttaattctgtattgcctgaagtgtaaatcagaggtcaacaattagattgcaaatcatgaaaagcataacttctaattgtttagtctttttagggaaacaagcccagaaaaaaagtaagattctcattcattggagataagatttctatttatcaaagatactacacaagagttagatagcaagtagttcaaatgtcttttaaaggtatctgacatctttaaagctctgtaatttttaaattctaaattttgttacagctaatttttaaaaattaattgctaagtcatggtcaagtatttctgatgacttacatgctgtctttggtatattttaagtttctaaaccaaaactactatttgactctattacaccctgttttagaaaaacatttgagttatacaacttactaaaatgtattttagcggtgatgttttggagcactggtaatatagtgtttaacttattttctattttttatccctctatattcgtgaaattacttctatttgaaaagttttccgccagtgataaaaaaaggctgagcactatctgtaaaaatttttaaggtgtccactaggtggagatattgtgctacatttccaagtgttgtagttaaacttttattagtctgaattaaactcttttatagtgttttattgttttaaaccacaaagatttataatcatttatatctatttatctaatgttattcaaatgttttctgcgttgtatgaagctaagataaatgtaaaaaaaacaaacaaaaaaaacctcactttgtgttttgtaatcattagacgatttaacctaatatatcttcccatatgatatgatctttgcatatggcatacttcattcatatgacatagttagaatcttttcccacaaacaatgagtgatgatatctcatttgaaaactcgtgtaacattgtatcagccactgttataaagtgatttacccatgttagtctcataacaactctatgagatcagtaccgtacacatggggaaacttagtatagagaggtgaagtattttttccaagattacaaaataactgtctgagctgggattcgtaaccaggcagcctgactccaaaatcaatattcttaactctattgttatgatggagaaaggcatgaagtctaccttcaaattcatggcattttagaaggaaaaattgtcgcaagtaatgtgattatacttcctagttttataggtcagaaaaatgaggtccacactaattttgcctcttccacagggagatagattctcatctaccattgtgtcttttgtttctgtttttgtcatgatacctcaaattgatatatgttgtaattatgaatttaaggaagtaaaaaaataactcagggctggagccttcagccatattaacatacattgacataaagacctttgttttaatatgaatgattccagttaacaaatggagaaatagttgtttgaaaattaatatttagcttctcaaaagagactcctgtttggaagcaaattgttggtttaacaggacatactttagatatttgaaaaattctctgtggaatcacaatctcttatttttaagaatgtaggaatatgtgttctatatgcttttaagttatgtattacatactattctctaaaatagaaatgtttatttggcttctaaaagtcatttgtgagttgatgttatttaaaactgcttttcagtcaacttattctttataaaaaagtttgttcaaatagcatgtttttattttgtttctaaataaattcatgtttgataatattttata

SEQ ID NO: 106491 - DNA, 571 bp, Homo sapiens
  Payload ID: 915
  Gene Symbol: ALG10B
  Gene Name: ALG10B, alpha-1,2-glucosyltransferase
  ENST ID: ENST00000551464
  CDS Start-End: 133-513
gccttccggtatgtggccccgtctggctagtcctgtctagcgcgcccatttcgagcccaagtttccagctcgggtttccgggctcagaattttccaggagtgggttcttgggcagtggctgtgggagcaggaatggcgcagctagagggttactgtttctcggccgccttgagctgtacctttttagtgtcctgcctcctcttctccgccttcagccgggcgctgcgagagccctacatggacgagatcttccacctgcctcaggcgcagcgctactgtgagggccatttctccctttcccagtgggatcccatgattactacattacctggcttgtacctggtgtcagttggagtggtcaaacctgccatttggatctttgcatggtctgaacatgttgtctgctccattgggatgctcagatttgttaatcttctcttcagtgttggcaacttctatttactatatttgcttttccacaaggtacaacccagaaacaaggaatacttctgagaggagaagcttccactctgatctagtctggcaaaattgaggaaaatattctaccctg

SEQ ID NO: 106492 - DNA, 1565 bp, Homo sapiens
  Payload ID: 915
  Gene Symbol: ALG10B
  Gene Name: ALG10B, alpha-1,2-glucosyltransferase
  ENST ID: ENST00000548240
  CDS Start-End: 56-289
ccgggctcagaattttccaggagtgggttcttgggcagtggctgtgggagcaggaatggcgcagctagagggttactgtttctcggccgccttgagctgtacctttttagtgtcctgcctcctcttctccgccttcagccgggcgctgcgagagccctacatggacgagatcttccacctgcctcaggcgcagcgctacttgggatcccatgattactacattacctggcttgtacctggtgtcagttggagtggtcaaacctgccatttggatctttgcatggtctgaacatgttgtctgctccattgggatgctcagatttgttaatcttctcttcagtgttggcaacttctatttactatatttgcttttccacaaggtacaacccagaaacaaggctgcctcaagtatccagagagtcttgtcaacattaacactagcagtatttccaacactttatttttttaacttcctttattatacagaagcaggatctatgttttttactctttttgcatatttgatgtgtctttatggaaatcataaaacttcagccttccttggattttgtggcttcatgtttcggcaaacaaatatcatctgggctgtcttctgtgcagggaatgtcattgcacaaaagttaactgaggcttggaaaactgagctacaaaagaaggaagacagacttccacctattaaaggaccatttgcagaattcagaaaaattcttcagtttcttttggcttattccatgtcctttaaaaacttgagtatgcttttctgtttgacttggccctacatccttctgggatttctgttttgtgcttttgtagtagttaatggtggaattgttattggcgatcggagtagtcatgaagcctgtcttcattttcctcaactattctactttttttcatttactctctttttttcttttcctcatctcctgtctcctagcaaaattaagacttttctttccttagtttggaaacatggaattctgtttttggtggttaccttagtctctgtgtttttagtttggaaattcacttatgctcataaatacttgctagcagacaatagacattatactttctatgtgtggaaaagagtttttcaaagatatgcaattctgaaatatttgttagttccagcctatatatttgctggttggagtatagctgactcattgaaatcaaagccaattttttggaatttaatgtttttcatatgcttgttcattgttatagttcctcagaaactgctggaatttcgttacttcattttaccttatgtcatttataggcttaacataactctgcctcccacatccagacttgtttgtgaactgagttgctatgcaattgttaatttcataactttttacatctttctgaacaagacttttcagtggccaaatagtcaggacattcaaaggtttatgtggtaatatcagtgatattttgaactgtaaaaatggacttaataattagaccatttctacaaagaacaactgaataggtggaaaacatggaatttcttttaggtgcagtggtggtcctca

SEQ ID NO: 106493 - DNA, 1404 bp, Homo sapiens
  Payload ID: 916
  Gene Symbol: ALG11
  Gene Name: ALG11, alpha-1,2-mannosyltransferase
  ENST ID: ENST00000523764
  CDS Start-End: 22-132
gagttcgggggtcggcggaagatggcggccggcgaaaggagctggtgcctgtgcaagttgttgaggagttgtggagtgtatggcagctggcacaattatccttgcacacaattcggggggcccaaagcttgacattgtggttcctcacgaaggagatataactggctttctggctgagagtgaagaagactatgctgaaactatcgctcacattctttccatgtctgcagaaaagagactccaaatcagaaaaagtgctcgtgcatctgtaagcagattctctgatcaggaatttgaagtgacattcctatcatctgtggaaaagttatttaagtaatgccatatctgtaaaattaaagatattttatataaactggttaaacaccttcatatgtaaatatttttctaaattcaatctcatttgtcaaatcattttactttagaaaacagacaaaatttccttttagaataaaaggaagtgttgaaaagaaaatggatgactagccttcggcttccattcttggtatacatgagagaggctggctgctgagatgaatgtgaaccaggttgcagagaatctggctttgagccaccaggaagaactagtggatttgccaaaaaactaccccttgagtgaaaatgaagatgagggggacagtgatggagagagaaagcatcaaaagcttctggaagcaatcatttcccttgatggaaagaataggcggaaattggctgagaggtctgaggctagtctgaaagtgtcagagttcagtgtcagttctgaaggatcaggagaaaagctgggccttgcagatctgcttgagcccgttaaaacttcatcttctttggccactgtaaaaaagcaactgaatagagtcaaatcaaagaaggtggtggagttacctcttaacaaagaaaaaattgaacagatccacagagaagtagcattcagtaaaacctcacaggtcctctccaaatgggaccctatcatcctgaagaaccagcaggcagagcagctggtttttcccctggggaaggagcagccagccattgctcccattgaacatgcgctcagtggctggaaggcaagaactcccctggagcaggaaatttttaacctcctccataagaacaagcagccagtgacagatcctttactgactcccatggaaaaggcctctctccaagccatgagcctggaagaggcaaagatgcaccgagcagagcttcagagggctcgggctctgcagtcctactatgaggccaaggctcgaaaagagaagaaaatcaaaagtaaaaagtatcacaaagtcgtgaagaaaggaaaggccaagaaagccttaaaagagtttgagcagctacagaaggttaatccaactgtggcactggaagaaatggaaaaaa

SEQ ID NO: 106494 - DNA, 2558 bp, Homo sapiens
  Payload ID: 916
  Gene Symbol: ALG11
  Gene Name: ALG11, alpha-1,2-mannosyltransferase
  Uniprot ID: Q2TAA5
  ENST ID: ENST00000521508
  CDS Start-End: 6-1484
ggaagatggcggccggcgaaaggagctggtgcctgtgcaagttgttgaggtttttttattcattattcttccctgggctcattgtatgtggaactttatgtgtgtgtttggtcattgtcctttggggaatcagactgctgctacagagaaagaaaaaattagtgtcaactagcaaaaatgggaaaaatcaaatggtgattgcattttttcatccatactgcaatgctggtggaggaggagaaagagttttatggtgtgctttaagagccctgcagaaaaagtatcctgaagcagtttatgttgtttataccggcgatgttaatgtcaacggtcaacagatactagaaggtgctttcagaagatttaacatcagattaattcacccagtgcagtttgtttttttaaggaaacgctatcttgtggaagattcactgtatcctcacttcacactgctgggccaaagtctaggatccatttttcttggctgggaagctctaatgcagtgtgttcctgatgtttacattgattcaatgggatacgcttttacgcttcctctgtttaagtatatagggggttgccaagttggaagctatgttcattatcctactatcagcaccgacatgctctctgtagtgaagaatcaaaatattggatttaataatgcagccttcattaccaggaatccttttctcagcaaagtaaagctcatctactactatttatttgcttttatttatggacttgttggttcttgcagtgatgtagtcatggtcaattcttcttggacactaaaccatattctctcactatggaaagttgggaattgcactaacattgtttatccaccttgtgatgtgcagacatttctggacattcccttacatgagaaaaagatgaccccaggacatttgctggtttctgttggccagtttaggccggaaaagaatcatccattgcagatcagagcctttgctaaattgctgaataagaagatggttgagtcacctccttcgcttaaacttgtcctcattggaggttgtcgtaacaaagatgatgaacttagggtaaaccaactgagaaggctgtctgaggatttaggagttcaagaatatgtggaatttaaaataaacattccatttgatgaattaaagaattatttgtctgaagcaacaattggtctgcataccatgtggaacgagcattttgggattggagttgtggagtgtatggcagctggcacaattatccttgcacacaattcggggggcccaaagcttgacattgtggttcctcacgaaggagatataactggctttctggctgagagtgaagaagactatgctgaaactatcgctcacattctttccatgtctgcagaaaagagactccaaatcagaaaaagtgctcgtgcatctgtaagcagattctctgatcaggaatttgaagtgacattcctatcatctgtggaaaagttatttaagtaatgccatatctgtaaaattaaagatattttatataaactggttaaacaccttcatatgtaaatatttttctaaattcaatctcatttgtcaaatcattttactttagaaaacagacaaaatttccttttagaataaaaggaagtgttgaaaagaaaatggatgactagccttcggcttccattcttggtatacatgagagaggctggctgctgagatgaatgtgaaccaggttgcagagaatctggctttgagccaccaggaagaactagtggatttgccaaaaaactaccccttgagtgaaaatgaagatgagggggacagtgatggagagagaaagcatcaaaagcttctggaagcaatcatttcccttgatggaaagaataggcggaaattggctgagaggtctgaggctagtctgaaagtgtcagagttcagtgtcagttctgaaggatcaggagaaaagctgggccttgcagatctgcttgagcccgttaaaacttcatcttctttggccactgtaaaaaagcaactgaatagagtcaaatcaaagaaggtggtggagttacctcttaacaaagaaaaaattgaacagatccacagagaagtagcattcagtaaaacctcacaggtcctctccaaatgggaccctatcatcctgaagaaccagcaggcagagcagctggtttttcccctggggaaggagcagccagccattgctcccattgaacatgcgctcagtggctggaaggcaagaactcccctggagcaggaaatttttaacctcctccataagaacaagcagccagtgacagatcctttactgactcccatggaaaaggcctctctccaagccatgagcctggaagaggcaaagatgcaccgagcagagcttcagagggctcgggctctgcagtcctactatgaggccaaggctcgaaaagagaagaaaatcaaaagtaaaaagtatcacaaagtcgtgaagaaaggaaaggccaagaaagccttaaaagagtttgagcagctacagaaggttaatccaactgtggcactggaagaaatggaaaaaattgaaaa

SEQ ID NO: 106495 - DNA, 1983 bp, Homo sapiens
  Payload ID: 916
  Gene Symbol: ALG11
  Gene Name: ALG11, alpha-1,2-mannosyltransferase
  ENST ID: ENST00000616513
  CDS Start-End: 9-101
ggcggaagatggcggccggcgaaaggagctggtgcctgtgcaagttgttgagtttcgagtatgtctttatcagcagcgtgaaaatgaacttggtaccataaattagtaccagtagagtggggtgctgctgaagagatacccaaaaatgtggaagcgactttggaactgggcaacaggcagaggctggaacagtttggagggctcagaagaagccaggaaaatgtgggaaagtttggaacatcctagagacttgttgaatggctttgaacaaaatgcggatagtgatatggacaacgaaatccaggctgaggtggtctcagatggagatgaagaacttgttgggaactggagaaaggtgactcctcttatgttttagcaaaggtactagaggcattttgcccctgccctagagatttgtggaactttgaacttgaaagagatgatttagggtatctggtgtaagaaatttctaagcagcaaagaattcaagaagtgacttgggtgctcttaaaagcattccattttaaaagcggaacagagcataaaagttcagaaaatttgcagcctgacaatgcagtagaaaagaaagacccatttttttaggagaaattcaagctggctgcagaaattttcaaaagtagcaaggagcctaatgttaatcctgaagaccatgggggaaaatgtctccaggcaatgtcggagaccttcatggcagcctctctcatggcaggcctggaggcccaggaggaaaaagtggttttgtgggccaggtgcaggggccctgtgctgtgtgcagcctagggacttggtaccctgtgtcccagctgctccagccgtggctgaaaggggccaatgcagagctagtgctgtggcttcagagggtgaaagccccaagccatggtagcttcacatggtgttgagcctgcgggtgcacagaagtcaagaatggaaatttgggaacctctacctagattgcagaagatgtatagaaacgcctggatgcccaggcaaaagtttgccaccggggcagggccctcatggagaacctctgccagggcagtgcagaagggaaatgtggggttggagcccccacacagagtccctactggggcactgcctagtggagctgcgagaagagggccaccgtcctccataccccagagtggtagatccactgacagcttgcaccgtgtgcctggaaaaacctcagacactcaacgccggcccatgaaagcagccaggagggaggctgtaccctgcaaatctacaggggcagagctgctcaagaccatgggaacccacctcttgcttaagcatgacctggatgtgagacctggagtcaaaggaggtcattttggagctttaaaaatttgactgccccactggattttggacttgcatgggccctgtaacccccttgttttggccaatttctcccatttggaacagctgtacttacccaatacctgtactcccattgtatctgggaagtaactagcttacttttgattttacaggctcataggcagaagggacttgccttgtctcggatgagactttggactgtggacatatgggttaatgctgaaatgagttaagactttgggggactgttgggaaggcataattggttttgaaatgtgatgacgtgagatttggaggggccagggcagaatgatatggtttggccatgtccccacccaaatctcagtttgaattgtgtctcccagaattcccatgtgttgtggaagggacccaggggaaggtaattgaatcatgggggccggtctttcccatgctattctcataataatgaataagtctcatgagatctgatgggtttatcaggggtttccgcttttgctgcttcctcgtttttctcttgcccactgccctgtaagaagtgccttacacctcctgccgtgattctgaggtctccccagccatatggaactgtaagtccaattaaatctctttttgttc

SEQ ID NO: 106496 - DNA, 5350 bp, Homo sapiens
  Payload ID: 917
  Gene Symbol: ALG12
  Gene Name: ALG12, alpha-1,6-mannosyltransferase
  Uniprot ID: Q9BV10
  ENST ID: ENST00000330817
  CDS Start-End: 275-1741
gcgcgcagcccgcggcggccatctttactcagggcacagagggtctctgcggccgtagcggccggggctgcggtagccactttagatttgggcaaggactttagattcgggctctgttctgtttccgccgtcctgcttcctgccgaggctggcccaggcagccgcgcttcgaaggacgccgccgggagctgcggagcatgcgtggagtggcagtgctaacggctggtgtctcgcactgttggcctgtgaaggtacgtgaagctgaaagcctggaatggctggaaaggggtcatcaggcaggcggcccctgctgctggggctgctggtggccgtagccactgtccacctggtcatctgtccctacaccaaagtggaggagagcttcaacctgcaggccacacatgacctgctctaccactggcaagacctggagcagtacgaccatcttgagttccccggagtcgtccccaggacgttcctcgggccagtggtgatcgcagtgttctccagccccgcggtttacgtgctttcgctgttagaaatgtccaagttttactctcagctaatagttagaggagtgcttggactcggcgtgatttttggactctggacgttacaaaaggaagtgagacggcacttcggggccatggtggccaccatgttctgctgggtgacggccatgcagttccacctgatgttctactgcacgcggacactgcccaatgtgctggccctgcctgtagtcctgctggccctcgcggcctggctgcggcacgagtgggcccgcttcatctggctgtcagccttcgccatcatcgtgttcagggtggagctgtgcctgttcctgggcctcctgctgctgctggccttgggcaaccgaaaggtttctgtagtcagagcccttcgccacgccgtcccggcagggatcctctgtttaggactgacggttgctgtggactcttatttttggcggcagctcacttggccggaaggaaaggtgctttggtacaacactgtcctgaacaaaagctccaactgggggacctccccgctgctgtggtacttctactcagccctgccccgcggcctgggctgcagcctgctcttcatccccctgggcttggtagacagaaggacgcacgcgccgacggtgctggcactgggcttcatggcactctactccctcctgccacacaaggagctacgcttcatcatctatgccttccccatgctcaacatcacggctgccagaggctgctcctacctgctgaataactataaaaagtcttggctgtacaaagcggggtctctgcttgtgatcggacacctcgtggtgaatgccgcctactcagccacggccctgtatgtgtcccatttcaactacccaggtggcgtcgcaatgcagaggctgcaccagctggtgcccccccagacagacgtccttctgcacattgacgtggcagccgcccagacaggtgtgtctcggtttctccaagtcaacagcgcctggaggtacgacaagagggaggatgtgcagccggggacaggcatgctggcatacacacacatcctcatggaggcggcccctgggctcctggccctctacagggacacacaccgggtcctggccagcgtcgtggggaccacaggtgtgagtctgaacctgacccaactgccccccttcaacgtccacctgcagacaaagctggtgcttctggagaggctcccccggccgtcctgagggggaccaggcagccctcagcagccacaggccttccaggagctgttatcactaccagtttctggcacaattccagcacaattatgacaattcagagaagcaagtcaaaggactgggcacctgcctctgacagacaccagaccaggtccagggcctcctccacagcctcagctggggctctcagcaccaaagaacgaggggcccaggtcttgttggcaccccgggagccactgcccagggtgatggtggccagctcagggcttcctgcgggtgactgtcgcccagaccaggtgccattcatgactaatcaggagcagcgggctcacccaggcacctgtctgccaggaggccacgtgtgtcctgcccacccagggggagctgtattttggcagcaccccacgcttgctgcccgagggcctcttggggcacctaagacagcaccccctctcaggggagaccatggtggccccggccgcacccccccaccctggtgccaccactgcaacttttgtattcacaggcatcccatctccatcacagataaaatcttaggagataaacacattcaaaaaggaatgagataaaaagaataaggcaataaatgttgattggaacctctcaagattacagaaaataatgagaatgaaattttaaaaatgtttcctatgtgatagcttatcacaggtgactattccaggtgttatggtaaagggacagcttggtgctgtcagcctcactgaccatgcatttataaagcaccaaagtgcgtgtgatgctgctgggcactggagatgggaccaggtgctgctgcacacgtatgcacacaccatgcatacatgcacacacaccacacacgcatgcacacagtgcacacgtgcacacaccatgcatacacaccacacaccgtgcacacgtgcacacaccatgcatacacaccacacacagtgcacacgtgcacattaccatgcatccacacacagtgcacacgtgcacacactatgcatacacagtgcacacgtgcacacaccatgcatacacaccacacaccgtgcacacgtgcacacaccatgcatacacaccacacacagtgcacacgtgcacattaccatgcatccacacacagtgcacacgtgcacacactatgcatacacagtgcacacgtgcacacaccatgcatacacaccacacagtgcacacgtgcacattaccatgcatacacagtgcacacgtgcacacaccatgcatacacaccacacacagtgcacacgtgcacattaccatgcatacacacagtgcacgcgtgcacattaccatgcatacacagtgcacatgtgcacacaccatgcatacacaccacacagtgcacacgtgcacacaccatgcatacacagtgcacacgtgcacacaccatgcatacacagtgcacatgtgcacacaccatgcatacacaccacacaccgtgcacacgtgcacacaccatgcatacacaccacacacagtgcacacgtgcacattaccatgcatccacacacagtgcacacgtgcacactatgcatacagtgcacacatgcacacaccatgcatacacagtgcacacgtgcacacaccatgcatacacaccacacagtgcacatgtgcacacaccatgcatacacaccacacacagtgcacacgtgcacacaccatgcatacacaccacacacagtgcacacgtgcacattaccatgcatacacagtgcacacgtgcacacaccatgcatgcacaccacacacagtgcacacgtgtacgttaccatgcatacacacagtgcacgcgtgcacattaccatgcatacacagtgcacacgtgcacacaccatgcatacacaccacacacagtgcacacgtgcacattaccgtgcatacacacagtgcatgcgtgcacattaccatgcatacacacagtgcacacgtgcacacaccatgaatacacaccacacacagtgcacacgtgcacacaccatgcatacacacagtgcacacgtgcacacaccatgcatacataccacacacagtgcacacgtgcacattaccatgcatacaccacgcatgcacaatgcacgtgcacaccatgcatacacaccacacatgcatccacacacaatgcacagatgcgcacaccatgcatacacaccatacatgcatgatcacacgtgcacacaccatacatacccaccacgcatgcacacacacaatgcacaggtgcacacaccatgcatacacaccacacaatgcaatcgtgcacacacaatgcacacgtgcacacaccatgcatacacaccacacaatgcaatcatgcacacaatgcacacgtgcacacaccatgcatacataccacacatgcacacacgtgtgcataaagacatgatttcttcctgtgctctttgagagcttgtggctgttgcccaggtgccctggggctgcctctccacctgatgcctcctggttttcccattgcgtctggcgaacatctgtgcagacacttcctgactcccacagaggccagatggtgagggctggagagcaggcttcctggccccagcatcccacagacatgggctccctcccccatccatccacctgtgtgtctcaggtattcactggttatccacgctcgtttgttctcttttatcgctggccacatgtggattgcctcccgacttcagtggtctgtgagtcactcctgtctttaattatcctggtgttcaaagtgtacgagatttgctggcgggaaccctgccatgctctgcctgtgtgccgtgcctctccttcgagcacctcctcatgaccaggcatggcagggcgtcctcttgggcctctggcctcggccattgctctgtgggtcttggctccctttggtggggaacagcgttagagaccgggatctagacacgaggtgtgctcgatgccacggggtgcctgagctttaggccctttctgtggacaggctagggaggacaggcatgctgcgtgcagttgcacacgtacatatgtaatatgtgtgtacagatctgaaacagcacagaaccgtgcctggattccgtcccaccttgcacggttctcccccaccccccatctccaccctgaggaccctggcccccagcaacagcagcatcctcacgcatctgctagggagtccagtgcacgcctgctcgagagctccagtgcagctttgccacaggattgcaaaaacaaacccaccatgaagaggtcgggattgtgtgcagttcactccctgcccacaactgcgggtgccgtcaagcactgtgctcatgagttccttgggtcggcttctccaccgtcagtgtagtggtgccttcgttggaaatacagctgggttcatccttcccgtttgctttcagtcttgtgcctcccaccataccccacacccccatcctgttaggtttgtagagtgtgaccatccttctagatgtcaaaactgcccctgaagacagatgcagggagccactccctcctgtacctcctcctcgctttttggtaatgagcataattgtctcctggtttatctcccatgtgtttaattttgtaaagataaacattacacatata

SEQ ID NO: 106497 - DNA, 753 bp, Homo sapiens
  Payload ID: 917
  Gene Symbol: ALG12
  Gene Name: ALG12, alpha-1,6-mannosyltransferase
  ENST ID: ENST00000492791
  CDS Start-End: 1-590
tcctgctggccctcgcggcctggctgcggcacgagtgggcccgcttcatctggctgtcagccttcgccatcatcgtgttcagggtggagctgtgcctgttcctgggcctcctgctgctgctggccttgggcaaccgaaaggtttctgtagtcagagcccttcgccacgccgtcccggcagggatcctctgtttaggactgacggttgctgtggactcttatttttggcggcagctcacttggccggaaggaaaggtgctttggtacaacactgtcctgaacaaaagctccaactgggggacctccccgctgctgtggtacttctactcagccctgccccgcggcctgggctgcagcctgctcttcatccccctgggcttggtagacagaaggacgcacgcgccgacggtgctggcactgggcttcatggcactctactccctcctgccacacaaggagctacgcttcatcatctatgccttccccatgctcaacatcacggctgccagaggctgctcctacctgtggcgtcgcaatgcagaggctgcaccagctggtgcccccccagacagacgtccttctgcacattgacgtggcagccgcccagacaggtgtgtctcggtttctccaagtcaacagcgcctggaggtacgacaagagggaggatgtgcagccggggacaggcatgctggcatacacacacatcctcatggaggcggcccctgggctcctggccctctacagggacacacac

SEQ ID NO: 106498 - DNA, 674 bp, Homo sapiens
  Payload ID: 917
  Gene Symbol: ALG12
  Gene Name: ALG12, alpha-1,6-mannosyltransferase
  ENST ID: ENST00000486602
  CDS Start-End: 1-616
ctcagccctgccccgcggcctgggctgcagcctgctcttcatccccctgggcttggtagacagaaggacgcacgcgccgacggtgctggcactgggcttcatggcactctactccctcctgccacacaaggagctacgcttcatcatctatgccttccccatgctcaacatcacggctgccagaggctgctcctacctgctgaataactataaaaagtcttggctgtacaaagcggggtctctgcttgtgatcggacacctcgtggtgaatgccgcctactcagccacggccctgtatgtgtcccatttcaactacccaggtggcgtcgcaatgcagaggctgcaccagctggtgcccccccagacagacgtccttctgcacattgacgtggcagccgcccagacaggtgtgtctcggtttctccaagtcaacagcgcctggagacaaagctggtgcttctggagaggctcccccggccgtcctgagggggaccaggcagccctcagcagccacaggccttccaggagctgttatcactaccagtttctggcacaattccagcacaattatgacaattcagagaagcaagtcaaaggactgggcacctgcctctgacagacaccagaccaggtccagggcctcctccacagcctcagctggggctctcagcacc

SEQ ID NO: 106499 - DNA, 3997 bp, Homo sapiens
  Payload ID: 918
  Gene Symbol: ALG13
  Gene Name: ALG13, UDP-N-acetylglucosaminyltransferase subunit
  Uniprot ID: Q9NP73
  ENST ID: ENST00000251943
  CDS Start-End: 487-3351
agttgcgtcatatccggcccttgcgatcagggcttgaggaacccgcgccatgaagtgcgtgtttgttaccgtagggaccaccagctttgacgacctcattgcgtgtgtgtcggcgcccgacagtctgcaagtgagtgagggaggcgagcaggcggcggcttggctcgccacccgccatctccggccatactgccagccgcgttagccttgcctgaccgtcgcgctcggaaagaaacccccgcaactctaccacagaaaatcgagagccttggttacaaccgacttatcctgcaaattggtagaggaacggtggtacctgaacccttcagtactgagtcgtttactctggatgtttacaggtacaaggattccttgaaagaagacattcagaaagcagatcttgttattagtcacgcaggtgcaggaagctgtttggagactctggaaaaaggaaagccactcgtagtggttataaacgaaaagttgatgaacaatcatcagctggaactggcaaagcagctacacaaagagggtcatctcttctattgtacctgcagggtcctgacttgtcctgggcaagccaagtccattgcttctgctcctgggaagtgccaagattctgcagcgctgacttcaactgccttttcaggcctagactttgggctgctttccggatacctgcataagcaagcccttgttactgctacccatcctacctgcaccctgctttttccctcttgccacgctttttttcctctccctcttacccccaccctgtacaaaatgcataaaggatggaaaaactactgcagccagaagtctttgaatgaggcatcaatggatgaatatttaggcagcttagggctgtttcgaaagctgactgccaaggatgcctcttgcctctttcgggccatttcggagcagttgttttgcagccaggtccatcatttggaaatcaggaaggcttgtgtctcatatatgagggaaaatcaacaaacttttgagtcttatgtggagggatcttttgagaaatacctggaacggttgggagatcccaaggaaagtgctggccagctggaaataagagctctttctctaatttataatcgggatttcattctttatcgctttcctggaaaacctccaacttatgtcacagataatggctatgaagacaagattctactctgctactcaagtagtggtcactatgattctgtgtactcaaaacaatttcagtcaagtgcagctgtttgtcaggctgtattgtacgaaattctctataaagatgtgtttgttgtggatgaagaagagttgaagactgcgattaaattgtttcgaagtggttctaagaagaacagaaataatgctgtaactggaagcgaggatgcccatactgattacaagagttcaaatcagaataggatggaagagtggggtgcctgctacaatgctgaaaatataccagagggctacaataaaggaacagaagaaacaaagtctccagaaaatccatcaaagatgcccttcccctataaggtgctcaaagccctggatccagaaatctatcgtaatgtagaatttgatgtttggttggacagcagaaaagaacttcaaaaatctgattacatggagtatgctgggagacagtactatttgggagacaagtgtcaggtttgcttggaatcagaaggaagatattataatgctcatatccaggaagttggaaatgagaacaattcagtaacagtcttcattgaagaattggcggaaaagcatgttgttccactggctaacttaaaaccagttacccaagtgatgtctgttcctgcctggaatgctatgcccagtcggaaaggaagaggttaccagaaaatgcctgggggttatgtcccggaaatagttatatcagagatggacataaagcaacagaagaagatgttcaagaaaattcgagggaaagaagtttacatgactatggcttacggcaagggagaccccctcctcccacccaggctgcagcacagtatgcattatgggcacgatcctccaatgcactactcacagacagctggcaatgttatgtctaatgaacattttcatcctcagcatccatctccgagacaaggtcggggatatgggatgcccaggaattcatctcggtttataaacaggcacaacatgccgggccctaaagttgatttttacccaggcccaggtaaaaggtgctgccagagctatgataacttctcttatagatctcgttcatttagacgtagtcaccgccagatgagttgtgtgaataaggagtcccagtatggatttaccccagggaatggacagatgcccaggggcttggaagaaactattactttttatgaagttgaagaaggggatgagactgcttatccaactttacctaatcatggaggtccctctacaatggttcctgctacttcaggatactgtgttggaaggcggggacatagctcaggcaaacagactttgaatttagaggagggcaatggccagagtgaaaatgggcgatatcatgaagaatatctttatcgtgcagagccagactatgaaacttcaggtgtttatagcacaactgcatctacagcaaacttgtctcttcaggacagaaagtcatgttctatgtctcctcaggacacagttacctcatacaactacccccagaagatgatgggaaatattgcagcagttgcagcttcctgtgccaataatgttccagctccagtcttatctaacggtgcagcggctaatcaagctattagtaccacttcagtttcctcacagaatgctatacagcctctctttgtatctccacctacacacggcaggccagatacaaaagttttgcagtactatttcaatctaggattgcagtgctattaccacagctactggcactccatggtctatgtgccacagatgcagcagcagcttcatgtagagaattatccagtctatactgagccacctctggtagatcaaaccgttcctcaatgctacagtgaggtgaggagagaagatggcatacaggcggaagcatcagcaaatgatacttttccgaatgctgattcttcatctgtccctcatggagcagtctattatccagtaatgtcagatccctatgggcagccacctttgccaggttttgactcctgccttccggttgtgccagattattcctgtgttcccccctggcatccagttggtacagcatatggtggttcttctcaaattcatggtgctataaatcctgggccaattggctgtattgctccatctcccccagcttctcattatgtacctcagggtatgtaagatccagcagtatgaagtattcttgcactgccattttcttgctgtttttgtttttaaaaagtattttatgttagtggttaaatgatttaggtgattagtgtttactattgtatttgtctttaaaattattttatcttttgatttaaaatagtactttaaaattaaggggtattattttgggctgtgactaaggaaattgagatggatgtacaactagccccatattgagcatacttcattgtattcagctgttttcctgtcagccatttgtcagctttatattagctgatggtaccaattgataaaatgaatataaagtatttcattggttcaaaaatcacacatcatattaaaccatgcagaattggagtaacttccacttttttctagaaagtaaaaccaagagcctttgcttctggataactcacttaatattaaattaaagagctcttcacgtttcttgagaattatctgaagccagttgcattctgtgatatcagttttgaaggcacatggttctctgctttagatttatcccatatgctattgtttaatactggatgtatgtaagtgttttactgcactgtattgaattggtgtcttttgcacagttagcagtaaataaaaattagcatttaaaattgcc

SEQ ID NO: 106500 - DNA, 2770 bp, Homo sapiens
  Payload ID: 918
  Gene Symbol: ALG13
  Gene Name: ALG13, UDP-N-acetylglucosaminyltransferase subunit
  Uniprot ID: Q9NP73
  ENST ID: ENST00000371979
  CDS Start-End: 102-599
acggatttccgcctccctcacagaaggcagtcactgcaacgtgcgtggcctcagttgcgtcatatccggcccttgcgatcagggcttgaggaacccgcgccatgaagtgcgtgtttgttaccgtagggaccaccagctttgacgacctcattgcgtgtgtgtcggcgcccgacagtctgcaaaaaatcgagagccttggttacaaccgacttatcctgcaaattggtagaggaacggtggtacctgaacccttcagtactgagtcgtttactctggatgtttacaggtacaaggattccttgaaagaagacattcagaaagcagatcttgttattagtcacgcaggtgcaggaagctgtttggagactctggaaaaaggaaagccactcgtagtggttataaacgaaaagttgatgaacaatcatcagctggaactggcaaagcagctacacaaagagggtcatctcttctattgtacctgcagcacgcttcctgggctgttacagtcaatggacttatcaacactgaaatgttatcctcctggccagccagaaaaattttctgcatttttggataaagttgttggattacaaaaataaacactaaactctcaacactttaaaagcaacccccaaattcaacctatgtaatgtgattaaatcaaattaaatacataatatatatttacaaaataatataattaataaacttcctacatctatagaatgtataggaaattttatgttgtgcacatttgcattgggtccaaatcctaattgcagtttagtgaaattactagatttttttctaatcttcagtatgtagtgagcattcacaggttttctcctagaatctcaagtggaattggaatcataaaaatgaatgagatttgaaaactttcacaaagattataaatgtagttagtttgatactccttagaataaaaaaatgaaacagtaacaacttttatgtaaaaaaattttacataagagttagcatctttagctttataatctaaggaaccaaatttaaaaaatgatggattatgctctgtgaaatgaaaagttcaatcattgcctaaaaaagatgatcaagttagttgatctcttgtacttggaaaagctacttttttcctaaagaacagagtggagtggatatattcactttttttttctaaaacatacaaagtgataaaataatcgtgcctaatgtcaaaactttactggtttgagaagaataatcaaaaaggacttataccaataggacttactattgttttttaaggatctcctctcacagtggtaatgaaacattaactgtaacagaaatttacaatttatgtgcttataaaattagttttatgaatgaacaataaactgatgcatataatggcttaaatatatggttttaaaattgacttaacttgagcaagatacattatgaagttctttctgattagagtgtgtggtctcaagacctttacagtagattatccttaagtgtccatagctctctggtacaatgtttagatatagtttatctatcaaaatagaacattcactataaagacctctcttccattccaatcatattatcccaacatgctaaatgttccaaacattttatttggaatgcattttatcatgtttttataggtttatttttctgattgtgttttatttaggctaatattaaaaaaatgcttactagtggtagaaggtggtgacaaagaaatactctgggtagcaggaggaagccaacttggattaaaattttgctgagaataatctaaaaagtgagtaatctggttgagaattcacagcaccataatcataattgtatatcaatgttatgttttaggaaaggtcctattcaaatccagggagagaatctttagtgttttctgggccctcataaatacgtttttctcatttgagaaaattgtgactttatgttggtcacttagtttttatagtttatgatgaagaattaaagagaaacaaatgaaaggcaaggtctactcaaatatcagacaactaaaaggctatacagcccctaaatcctttgctatctacttccccagaataatgcataacctaaattccattatttcatttagcagaggtttaagccgttgttgtcaattgtgtgcagtaacgcctctgacttcccttttgtggaattttgtatcgattttggatttttaagtcaaaggagactttaaaatcattttgatttggcacggattcttgagattatctagtccaattccatcatattcagattttaccatttgcttaaagtatagcttttggcagaactgcccctaggagcagctccttgattcccagtcccctgctctttctaccctgcataatatatgttgtaagctttttgtttctttatagttgtttgcctagtgttcattttagttactcgaattccttgcaaggtaggttttgtttgtttatttatggaagttatttagtaggaatttcacacttaactgggttttcctttggcgtatgacaaccttacctaggacttagaaatctgtgatttctgagtttttggaatttaggaaaatgctctgggtaggattgatagtagattgaataaattaagactttaagacagaattgtagacttttggagttgggagataatttaaagaatattttaaaccaccagttttacagatgaggaaacatgctaaattaatcaccacatttacatcttattagtccttattaaagaatggtaaccaaaa

SEQ ID NO: 106501 - DNA, 4133 bp, Homo sapiens
  Payload ID: 918
  Gene Symbol: ALG13
  Gene Name: ALG13, UDP-N-acetylglucosaminyltransferase subunit
  Uniprot ID: Q9NP73
  ENST ID: ENST00000394780
  CDS Start-End: 70-3483
actgcaacgtgcgtggcctcagttgcgtcatatccggcccttgcgatcagggcttgaggaacccgcgccatgaagtgcgtgtttgttaccgtagggaccaccagctttgacgacctcattgcgtgtgtgtcggcgcccgacagtctgcaaaaaatcgagagccttggttacaaccgacttatcctgcaaattggtagaggaacggtggtacctgaacccttcagtactgagtcgtttactctggatgtttacaggtacaaggattccttgaaagaagacattcagaaagcagatcttgttattagtcacgcaggtgcaggaagctgtttggagactctggaaaaaggaaagccactcgtagtggttataaacgaaaagttgatgaacaatcatcagctggaactggcaaagcagctacacaaagagggtcatctcttctattgtacctgcagggtcctgacttgtcctgggcaagccaagtccattgcttctgctcctgggaagtgccaagattctgcagcgctgacttcaactgccttttcaggcctagactttgggctgctttccggatacctgcataagcaagcccttgttactgctacccatcctacctgcaccctgctttttccctcttgccacgctttttttcctctccctcttacccccaccctgtacaaaatgcataaaggatggaaaaactactgcagccagaagtctttgaatgaggcatcaatggatgaatatttaggcagcttagggctgtttcgaaagctgactgccaaggatgcctcttgcctctttcgggccatttcggagcagttgttttgcagccaggtccatcatttggaaatcaggaaggcttgtgtctcatatatgagggaaaatcaacaaacttttgagtcttatgtggagggatcttttgagaaatacctggaacggttgggagatcccaaggaaagtgctggccagctggaaataagagctctttctctaatttataatcgggatttcattctttatcgctttcctggaaaacctccaacttatgtcacagataatggctatgaagacaagattctactctgctactcaagtagtggtcactatgattctgtgtactcaaaacaatttcagtcaagtgcagctgtttgtcaggctgtattgtacgaaattctctataaagatgtgtttgttgtggatgaagaagagttgaagactgcgattaaattgtttcgaagtggttctaagaagaacagaaataatgctgtaactggaagcgaggatgcccatactgattacaagagttcaaatcagaataggatggaagagtggggtgcctgctacaatgctgaaaatataccagagggctacaataaaggaacagaagaaacaaagtctccagaaaatccatcaaagatgcccttcccctataaggtgctcaaagccctggatccagaaatctatcgtaatgtagaatttgatgtttggttggacagcagaaaagaacttcaaaaatctgattacatggagtatgctgggagacagtactatttgggagacaagtgtcaggtttgcttggaatcagaaggaagatattataatgctcatatccaggaagttggaaatgagaacaattcagtaacagtcttcattgaagaattggcggaaaagcatgttgttccactggctaacttaaaaccagttacccaagtgatgtctgttcctgcctggaatgctatgcccagtcggaaaggaagaggttaccagaaaatgcctgggggttatgtcccggaaatagttatatcagagatggacataaagcaacagaagaagatgttcaagaaaattcgagggaaagaagtttacatgactatggcttacggcaagggagaccccctcctcccacccaggctgcagcacagtatgcattatgggcacgatcctccaatgcactactcacagacagctggcaatgttatgtctaatgaacattttcatcctcagcatccatctccgagacaaggtcggggatatgggatgcccaggaattcatctcggtttataaacaggcacaacatgccgggccctaaagttgatttttacccaggcccaggtaaaaggtgctgccagagctatgataacttctcttatagatctcgttcatttagacgtagtcaccgccagatgagttgtgtgaataaggagtcccagtatggatttaccccagggaatggacagatgcccaggggcttggaagaaactattactttttatgaagttgaagaaggggatgagactgcttatccaactttacctaatcatggaggtccctctacaatggttcctgctacttcaggatactgtgttggaaggcggggacatagctcaggcaaacagactttgaatttagaggagggcaatggccagagtgaaaatgggcgatatcatgaagaatatctttatcgtgcagagccagactatgaaacttcaggtgtttatagcacaactgcatctacagcaaacttgtctcttcaggacagaaagtcatgttctatgtctcctcaggacacagttacctcatacaactacccccagaagatgatgggaaatattgcagcagttgcagcttcctgtgccaataatgttccagctccagtcttatctaacggtgcagcggctaatcaagctattagtaccacttcagtttcctcacagaatgctatacagcctctctttgtatctccacctacacacggcaggccagtgattgcctcaccatcctatccatgccattctgctattcctcatgctggtgcctctctaccaccaccaccaccaccaccaccaccaccaccaccaccaccacctcctcctcctcctcctcctcctcctcctcctcctcctgctcttgatgtgggagagacttcaaacttacaaccaccaccaccactaccacctccaccttattcctgtgatccaagcggcagtgatttgcctcaagatacaaaagttttgcagtactatttcaatctaggattgcagtgctattaccacagctactggcactccatggtctatgtgccacagatgcagcagcagcttcatgtagagaattatccagtctatactgagccacctctggtagatcaaaccgttcctcaatgctacagtgaggtgaggagagaagatggcatacaggcggaagcatcagcaaatgatacttttccgaatgctgattcttcatctgtccctcatggagcagtctattatccagtaatgtcagatccctatgggcagccacctttgccaggttttgactcctgccttccggttgtgccagattattcctgtgttcccccctggcatccagttggtacagcatatggtggttcttctcaaattcatggtgctataaatcctgggccaattggctgtattgctccatctcccccagcttctcattatgtacctcagggtatgtaagatccagcagtatgaagtattcttgcactgccattttcttgctgtttttgtttttaaaaagtattttatgttagtggttaaatgatttaggtgattagtgtttactattgtatttgtctttaaaattattttatcttttgatttaaaatagtactttaaaattaaggggtattattttgggctgtgactaaggaaattgagatggatgtacaactagccccatattgagcatacttcattgtattcagctgttttcctgtcagccatttgtcagctttatattagctgatggtaccaattgataaaatgaatataaagtatttcattggttcaaaaatcacacatcatattaaaccatgcagaattggagtaacttccacttttttctagaaagtaaaaccaagagcctttgcttctggataactcacttaatattaaattaaagagctcttcacgtttcttgagaattatctgaagccagttgcattctgtgatatcagttttgaaggcacatggttctctgctttagatttatcccatatgctattgtttaatactggatgtatgtaagtgttttactgcactgtattgaattggtgtcttttgcacagttagcagtaaataaaaattagcatttaaaattgccaaaa

SEQ ID NO: 106502 - DNA, 3812 bp, Homo sapiens
  Payload ID: 918
  Gene Symbol: ALG13
  Gene Name: ALG13, UDP-N-acetylglucosaminyltransferase subunit
  Uniprot ID: Q9NP73
  ENST ID: ENST00000436609
  CDS Start-End: 298-3162
agtttttcctcaggcccccctgtggaccgcacgtcggcgccggcgtctgagccagccgagctcgcctcagagcccggctccttcccctcagcacttggccggagcccgcgcggttcctctcctcagcgcgcgtcgtcccctcagggctcccggttctcgcagttgatcaagtacaaggattccttgaaagaagacattcagaaagcagatcttgttattagtcacgcaggtgcaggaagctgtttggagactctggaaaaaggaaagccactcgtagtggttataaacgaaaagttgatgaacaatcatcagctggaactggcaaagcagctacacaaagagggtcatctcttctattgtacctgcagggtcctgacttgtcctgggcaagccaagtccattgcttctgctcctgggaagtgccaagattctgcagcgctgacttcaactgccttttcaggcctagactttgggctgctttccggatacctgcataagcaagcccttgttactgctacccatcctacctgcaccctgctttttccctcttgccacgctttttttcctctccctcttacccccaccctgtacaaaatgcataaaggatggaaaaactactgcagccagaagtctttgaatgaggcatcaatggatgaatatttaggcagcttagggctgtttcgaaagctgactgccaaggatgcctcttgcctctttcgggccatttcggagcagttgttttgcagccaggtccatcatttggaaatcaggaaggcttgtgtctcatatatgagggaaaatcaacaaacttttgagtcttatgtggagggatcttttgagaaatacctggaacggttgggagatcccaaggaaagtgctggccagctggaaataagagctctttctctaatttataatcgggatttcattctttatcgctttcctggaaaacctccaacttatgtcacagataatggctatgaagacaagattctactctgctactcaagtagtggtcactatgattctgtgtactcaaaacaatttcagtcaagtgcagctgtttgtcaggctgtattgtacgaaattctctataaagatgtgtttgttgtggatgaagaagagttgaagactgcgattaaattgtttcgaagtggttctaagaagaacagaaataatgctgtaactggaagcgaggatgcccatactgattacaagagttcaaatcagaataggatggaagagtggggtgcctgctacaatgctgaaaatataccagagggctacaataaaggaacagaagaaacaaagtctccagaaaatccatcaaagatgcccttcccctataaggtgctcaaagccctggatccagaaatctatcgtaatgtagaatttgatgtttggttggacagcagaaaagaacttcaaaaatctgattacatggagtatgctgggagacagtactatttgggagacaagtgtcaggtttgcttggaatcagaaggaagatattataatgctcatatccaggaagttggaaatgagaacaattcagtaacagtcttcattgaagaattggcggaaaagcatgttgttccactggctaacttaaaaccagttacccaagtgatgtctgttcctgcctggaatgctatgcccagtcggaaaggaagaggttaccagaaaatgcctgggggttatgtcccggaaatagttatatcagagatggacataaagcaacagaagaagatgttcaagaaaattcgagggaaagaagtttacatgactatggcttacggcaagggagaccccctcctcccacccaggctgcagcacagtatgcattatgggcacgatcctccaatgcactactcacagacagctggcaatgttatgtctaatgaacattttcatcctcagcatccatctccgagacaaggtcggggatatgggatgcccaggaattcatctcggtttataaacaggcacaacatgccgggccctaaagttgatttttacccaggcccaggtaaaaggtgctgccagagctatgataacttctcttatagatctcgttcatttagacgtagtcaccgccagatgagttgtgtgaataaggagtcccagtatggatttaccccagggaatggacagatgcccaggggcttggaagaaactattactttttatgaagttgaagaaggggatgagactgcttatccaactttacctaatcatggaggtccctctacaatggttcctgctacttcaggatactgtgttggaaggcggggacatagctcaggcaaacagactttgaatttagaggagggcaatggccagagtgaaaatgggcgatatcatgaagaatatctttatcgtgcagagccagactatgaaacttcaggtgtttatagcacaactgcatctacagcaaacttgtctcttcaggacagaaagtcatgttctatgtctcctcaggacacagttacctcatacaactacccccagaagatgatgggaaatattgcagcagttgcagcttcctgtgccaataatgttccagctccagtcttatctaacggtgcagcggctaatcaagctattagtaccacttcagtttcctcacagaatgctatacagcctctctttgtatctccacctacacacggcaggccagatacaaaagttttgcagtactatttcaatctaggattgcagtgctattaccacagctactggcactccatggtctatgtgccacagatgcagcagcagcttcatgtagagaattatccagtctatactgagccacctctggtagatcaaaccgttcctcaatgctacagtgaggtgaggagagaagatggcatacaggcggaagcatcagcaaatgatacttttccgaatgctgattcttcatctgtccctcatggagcagtctattatccagtaatgtcagatccctatgggcagccacctttgccaggttttgactcctgccttccggttgtgccagattattcctgtgttcccccctggcatccagttggtacagcatatggtggttcttctcaaattcatggtgctataaatcctgggccaattggctgtattgctccatctcccccagcttctcattatgtacctcagggtatgtaagatccagcagtatgaagtattcttgcactgccattttcttgctgtttttgtttttaaaaagtattttatgttagtggttaaatgatttaggtgattagtgtttactattgtatttgtctttaaaattattttatcttttgatttaaaatagtactttaaaattaaggggtattattttgggctgtgactaaggaaattgagatggatgtacaactagccccatattgagcatacttcattgtattcagctgttttcctgtcagccatttgtcagctttatattagctgatggtaccaattgataaaatgaatataaagtatttcattggttcaaaaatcacacatcatattaaaccatgcagaattggagtaacttccacttttttctagaaagtaaaaccaagagcctttgcttctggataactcacttaatattaaattaaagagctcttcacgtttcttgagaattatctgaagccagttgcattctgtgatatcagttttgaaggcacatggttctctgctttagatttatcccatatgctattgtttaatactggatgtatgtaagtgttttactgcactgtattgaattggtgtcttttgcacagttagcagtaaataaaaattagcatttaaaattgccaaaa

SEQ ID NO: 106503 - DNA, 916 bp, Homo sapiens
  Payload ID: 918
  Gene Symbol: ALG13
  Gene Name: ALG13, UDP-N-acetylglucosaminyltransferase subunit
  ENST ID: ENST00000486353
  CDS Start-End: 22-501
agggcttgaggaacccgcgccatgaagtgcgtgtttgttaccgtagggaccaccagctttgacgacctcattgcgtgtgtgtcggcgcccgacagtctgcaaaaaatcgagagccttggttacaaccgacttatcctgcaaattggtagaggaacggtggtacctgaacccttcagtactgagtcgtttactctggatgtttacaggtacaaggattccttgaaagaagacattcagaaagcagatcttgttattagtcacgcaggtgcaggaagctgtttggagactctggaaaaaggaaagccactcgtagtggttataaacgaaaagttgatgaacaatcatcagctggaactggcaaagcagctacacaaagagggtcatctcttctattgtacctgcaggctaatattaaaaaaatgcttactagtggtagaaggtggtgacaaagaaatactctgggtagcaggaggaagccaacttggattaaaattttgctgagaataatctaaaaaggtcctgacttgtcctgggcaagccaagtccattgcttctgctcctgggaagtgccaagattctgcagcgctgacttcaactgccttttcaggcctagactttgggctgctttccggatacctgcataagcaagcccttgttactgctacccatcctacctgcaccctgctttttccctcttgccacgctttttttcctctccctcttacccccaccctgtacaaaatgcataaaggatggaaaaactactgcagccagaagtctttgaatgaggcatcaatggatgaatatttaggcagcttagggctgtttcgaaagctgactgccaaggatgcctcttgcctctttcgggccatttcggagcagttgttttgcagccaggtccatcatttggaaatca

SEQ ID NO: 106504 - DNA, 3236 bp, Homo sapiens
  Payload ID: 918
  Gene Symbol: ALG13
  Gene Name: ALG13, UDP-N-acetylglucosaminyltransferase subunit
  ENST ID: ENST00000495283
  CDS Start-End: 22-177
agggcttgaggaacccgcgccatgaagtgcgtgtttgttaccgtagggaccaccagctttgacgacctcattgcgtgtgtgtcggcgcccgacagtctgcaagtgagtgagggaggcgagcaggcggcggcttggctcgccacccgccatctccggccatactgccagccgcgttagccttgcctgaccgtcgcgctcggaaagaaacccccgcaactctaccacaggtacaaggattccttgaaagaagacattcagaaagcagatcttgttattagtcacgcaggtgcaggaagctgtttggagactctggaaaaaggaaagccactcgtagtggttataaacgaaaagttgatgaacaatcatcagctggaactggcaaagcagctacacaaagagggtcatctcttctattgtacctgcagggtcctgacttgtcctgggcaagccaagtccattgcttctgctcctgggaagtgccaagattctgcagcgctgacttcaactgccttttcaggcctagactttgggctgctttccggatacctgcataagcaagcccttgttactgctacccatcctacctgcaccctgctttttccctcttgccacgctttttttcctctccctcttacccccaccctgtacaaaatgcataaaggatggaaaaactactgcagccagaagtctttgaatgaggcatcaatggatgaatatttaggcagcttagggctgtttcgaaagctgactgccaaggatgcctcttgcctctttcgggccatttcggagcagttgttttgcagccaggtccatcatttggaaatcaggaaggcttgtgtctcatatatgagggaaaatcaacaaacttttgagtcttatgtggagggatcttttgagaaatacctggaacggttgggagatcccaaggaaagtgctggccagctggaaataagagctctttctctaatttataatcgggatttcattctttatcgctttcctggaaaacctccaacttatgtcacagataatggctatgaagacaagattctactctgctactcaagtagtggtcactatgattctgtgtactcaaaacaatttcagtcaagtgcagctgtttgtcaggctgtattgtacgaaattctctataaagatgtgtttgttgtggatgaagaagagttgaagactgcgattaaattgtttcgaagtggttctaagaagaacagaaataatgctgtaactggaagcgaggatgcccatactgattacaagagttcaaatcagaataggatggaagagtggggtgcctgctacaatgctgaaaatataccagagggctacaataaaggaacagaagaaacaaagtctccagaaaatccatcaaagatgcccttcccctataaggtgctcaaagccctggatccagaaatctatcgtaatgtagaatttgatgtttggttggacagcagaaaagaacttcaaaaatctgattacatggagtatgctgggagacagtactatttgggagacaagtgtcaggtttgcttggaatcagaaggaagatattataatgctcatatccaggaagttggaaatgagaacaattcagtaacagtcttcattgaagaattggcggaaaagcatgttgttccactggctaacttaaaaccagttacccaagtgatgtctgttcctgcctggaatgctatgcccagtcggaaaggaagaggttaccagaaaatgcctgggggttatgtcccggaaatagttatatcagagatggacataaagcaacagaagaagatgttcaagaaaattcgagggaaagaagtttacatgactatggcttacggcaagggagaccccctcctcccacccaggctgcagcacagtatgcattatgggcacgatcctccaatgcactactcacagacagctggcaatgttatgtctaatgaacattttcatcctcagcatccatctccgagacaaggtcggggatatgggatgcccaggaattcatctcggtttataaacaggcacaacatgccgggccctaaagttgatttttacccaggcccaggtaaaaggtgctgccagagctatgataacttctcttatagatctcgttcatttagacgtagtcaccgccagatgagttgtgtgaataaggagtcccagtatggatttaccccagggaatggacagatgcccaggggcttggaagaaactattactttttatgaagttgaagaaggggatgagactgcttatccaactttacctaatcatggaggtccctctacaatggttcctgctacttcaggatactgtgttggaaggcggggacatagctcaggcaaacagactttgaatttagaggagggcaatggccagagtgaaaatgggcgatatcatgaagaatatctttatcgtgcagagccagactatgaaacttcaggtgtttatagcacaactgcatctacagcaaacttgtctcttcaggacagaaagtcatgttctatgtctcctcaggacacagttacctcatacaactacccccagaagatgatgggaaatattgcagcagttgcagcttcctgtgccaataatgttccagctccagtcttatctaacggtgcagcggctaatcaagctattagtaccacttcagtttcctcacagaatgctatacagcctctctttgtatctccacctacacacggcaggccagatacaaaagttttgcagtactatttcaatctaggattgcagtgctattaccacagctactggcactccatggtctatgtgccacagatgcagcagcagcttcatgtagagaattatccagtctatactgagccacctctggtagatcaaaccgttcctcaatgctacagtgaggtgaggagagaagatggcatacaggcggaagcatcagcaaatgatacttttccgaatgctgattcttcatctgtccctcatggagcagtctattatccagtaatgtcagatccctatgggcagccacctttgccaggttttgactcctgccttccggttgtgccagattattcctgtgttcccccctggcatccagttggtacagcatatggtggttcttctcaaattcatggtgctataaatcctgggccaattggctgtattgctccatctcccccagcttctcattatgtacctcagggtatgtaagatccagcagtatgaag

SEQ ID NO: 106505 - DNA, 620 bp, Homo sapiens
  Payload ID: 918
  Gene Symbol: ALG13
  Gene Name: ALG13, UDP-N-acetylglucosaminyltransferase subunit
  ENST ID: ENST00000482742
  CDS Start-End: 396-581
tcctcaggcccccctgtggaccgcacgtcggcgccggcgtctgagccagccgagctcgcctcagagcccggctccttcccctcagcacttggccggagcccgcgcggttcctctcctcagcgcgcgtcgtcccctcagggctcccggttctcgcagttgatcaaaaaatcgagagccttggttacaaccgacttatcctgcaaattggtagaggaacggtggtacctgaacccttcagtactgagtcgtttactctggatgtttacaggtacaaggattccttgaaagaagacattcagaaagcagatcttgttattagtcacgcaggtgcaggaagctgtttggagactctggaaaaaggaaagccactcgtagtggttataaacgaaaagttgatgaacaatcatcagctggaactggcaaagcagctacacaaagagggtcatctcttctattgtacctgcagcacgcttcctgggctgttacagtcaatggacttatcaacactgaaatgttatcctcctggccagccagaaaaattttctgcatttttggataaagttgttggattacaaaaataaacactaaactctcaacactttaaaagcaacccccaaatt

SEQ ID NO: 106506 - DNA, 745 bp, Homo sapiens
  Payload ID: 918
  Gene Symbol: ALG13
  Gene Name: ALG13, UDP-N-acetylglucosaminyltransferase subunit
  ENST ID: ENST00000487141
  CDS Start-End: 45-560
ggagagagtggcctagcctccctcccagcctacatctttctcccatgctggatacttcctgccttcaaacatcagactccaagttcttcagttttgggactcggactggctctccttgctcctcagcttgcagacatcctattgtgggaccttgtgattgtaaaatcgagagccttggttacaaccgacttatcctgcaaattggtagaggaacggtggtacctgaacccttcagtactgagtcgtttactctggatgtttacaggtacaaggattccttgaaagaagacattcagaaagcagatcttgttattagtcacgcaggtgcaggaagctgtttggagactctggaaaaaggaaagccactcgtagtggttataaacgaaaagttgatgaacaatcatcagctggaactggcaaagcagctacacaaagagggtcatctcttctattgtacctgcaggctaatattaaaaaaatgcttactagtggtagaaggtggtgacaaagaaatactctgggtagcaggaggaagccaacttggattaaaattttgctgagaataatctaaaaatatgtggagggatcttttgagaaatacctggaacggttgggagatcccaaggaaagtgctggccagctggaaataagagctctttctctaatttataatcgggatttcattctttatcgctttcctggaaaacctccaacttatgtcacagataatggctatgaagacaag

SEQ ID NO: 106507 - DNA, 3200 bp, Homo sapiens
  Payload ID: 918
  Gene Symbol: ALG13
  Gene Name: ALG13, UDP-N-acetylglucosaminyltransferase subunit
  ENST ID: ENST00000470971
  CDS Start-End: 13-144
ggaacccgcgccatgaagtgcgtgtttgttaccgtagggaccaccagctttgacgacctcattgcgtgtgtgtcggcgcccgacagtctgcaagtacaaggattccttgaaagaagacattcagaaagcagatcttgttattagtcacgcaggtgcaggaagctgtttggagactctggaaaaaggaaagccactcgtagtggttataaacgaaaagttgatgaacaatcatcagctggaactggcaaagcagctacacaaagagggtcatctcttctattgtacctgcagtatgtggagggatcttttgagaaatacctggaacggttgggagatcccaaggaaagtgctggccagctggaaataagagctctttctctaatttataatcgggatttcattctttatcgctttcctggaaaacctccaacttatgtcacagataatggctatgaagacaagtctccagaaaatccatcaaagatgcccttcccctataaggtgctcaaagccctggatccagaaatctatcgtaatgtagaatttgatgtttggttggacagcagaaaagaacttcaaaaatctgattacatggagtatgctgggagacagtactatttgggagacaagtgtcaggtttgcttggaatcagaaggaagatattataatgctcatatccaggaagttggaaatgagaacaattcagtaacagtcttcattgaagaattggcggaaaagcatgttgttccactggctaacttaaaaccagttacccaagtgatgtctgttcctgcctggaatgctatgcccagtcggaaaggaagaggttaccagaaaatgcctgggggttatgtcccggaaatagttatatcagagatggacataaagcaacagaagaagatgttcaagaaaattcgagggaaagaagtttacatgactatggcttacggcaagggagaccccctcctcccacccaggctgcagcacagtatgcattatgggcacgatcctccaatgcactactcacagacagctggcaatgttatgtctaatgaacattttcatcctcagcatccatctccgagacaaggtcggggatatgggatgcccaggaattcatctcggtttataaacaggcacaacatgccgggccctaaagttgatttttacccaggcccaggtaaaaggtgctgccagagctatgataacttctcttatagatctcgttcatttagacgtagtcaccgccagatgagttgtgtgaataaggagtcccagtatggatttaccccagggaatggacagatgcccaggggcttggaagaaactattactttttatgaagttgaagaaggggatgagactgcttatccaactttacctaatcatggaggtccctctacaatggttcctgctacttcaggatactgtgttggaaggcggggacatagctcaggcaaacagactttgaatttagaggagggcaatggccagagtgaaaatgggcgatatcatgaagaatatctttatcgtgcagagccagactatgaaacttcaggtgtttatagcacaactgcatctacagcaaacttgtctcttcaggacagaaagtcatgttctatgtctcctcaggacacagttacctcatacaactacccccagaagatgatgggaaatattgcagcagttgcagcttcctgtgccaataatgttccagctccagtcttatctaacggtgcagcggctaatcaagctattagtaccacttcagtttcctcacagaatgctatacagcctctctttgtatctccacctacacacggcaggccagtgattgcctcaccatcctatccatgccattctgctattcctcatgctggtgcctctctaccaccaccaccaccaccaccaccaccaccaccaccaccaccacctcctcctcctcctcctcctcctcctcctcctcctcctgctcttgatgtgggagagacttcaaacttacaaccaccaccaccactaccacctccaccttattcctgtgatccaagcggcagtgatttgcctcaagatacaaaagttttgcagtactatttcaatctaggattgcagtgctattaccacagctactggcactccatggtctatgtgccacagatgcagcagcagcttcatgtagagaattatccagtctatactgagccacctctggtagatcaaaccgttcctcaatgctacagtgaggtgaggagagaagatggcatacaggcggaagcatcagcaaatgatacttttccgaatgctgattcttcatctgtccctcatggagcagtctattatccagtaatgtcagatccctatgggcagccacctttgccaggttttgactcctgccttccggttgtgccagattattcctgtgttcccccctggcatccagttggtacagcatatggtggttcttctcaaattcatggtgctataaatcctgggccaattggctgtattgctccatctcccccagcttctcattatgtacctcagggtatgtaagatccagcagtatgaagtattcttgcactgccattttcttgctgtttttgtttttaaaaagtattttatgttagtggttaaatgatttaggtgattagtgtttactattgtatttgtctttaaaattattttatcttttgatttaaaatagtactttaaaattaaggggtattattttgggctgtgactaaggaaattgagatggatgtacaactagccccatattgagcatacttcattgtattcagctgttttcctgtcagccatttgtcagctttatattagctgatggtaccaattgataaaatgaatataaagtatttcattggttcaaaaatcacacatcatattaaaccatgcagaattggagtaacttccacttttttctagaaagtaaaaccaagagcctttgcttctggataactcacttaatattaaattaaagagctcttcacgtttcttgagaattatctgaagccagttgcattctgtgatatcagttttgaaggcacatggttctctgctttagatttatcccatatgctattgtttaatactggatgtatgtaagtgttttactgcactgtattgaattggtgtcttttgcacagttagcagtaaataaaaattagcatttaaaattgccaaaa

SEQ ID NO: 106508 - DNA, 1098 bp, Homo sapiens
  Payload ID: 918
  Gene Symbol: ALG13
  Gene Name: ALG13, UDP-N-acetylglucosaminyltransferase subunit
  ENST ID: ENST00000492038
  CDS Start-End: 26-157
gatcagggcttgaggaacccgcgccatgaagtgcgtgtttgttaccgtagggaccaccagctttgacgacctcattgcgtgtgtgtcggcgcccgacagtctgcaagtacaaggattccttgaaagaagacattcagaaagcagatcttgttattagtcacgcaggtgcaggaagctgtttggagactctggaaaaaggaaagccactcgtagtggttataaacgaaaagttgatgaacaatcatcagctggaactggcaaagcagctacacaaagagggtcatctcttctattgtacctgcagttcttccttgagacactagaagcttgccaaagggccagcacgcttcctgggctgttacagtcaatggacttatcaacactgaaatgttatcctcctggccagccagaaaaattttctgcatttttggataaagttgttggattacaaaaataaacactaaactctcaacactttaaaagcaacccccaaattcaacctatgtaatgtgattaaatcaaattaaatacataatatatatttacaaaataatataattaataaacttcctacatctatagaatgtataggaaattttatgttgtgcacatttgcattgggtccaaatcctaattgcagtttagtgaaattactagatttttttctaatcttcagtatgtagtgagcattcacaggttttctcctagaatctcaagtggaattggaatcataaaaatgaatgagatttgaaaactttcacaaagattataaatgtagttagtttgatactccttagaataaaaaaatgaaacagtaacaacttttatgtaaaaaaattttacataagagttagcatctttagctttataatctaaggaaccaaatttaaaaaatgatggattatgctctgtgaaatgaaaagttcaatcattgcctaaaaaagatgatcaagttagttgatctcttgtacttggaaaagctacttttttcctaaagaacagagtggagtggatatattcactttttttttctaaaacatacaaagtgataaaataatcgtgcctaatgtcaaaactttactggtttgagaagaataa

SEQ ID NO: 106509 - DNA, 679 bp, Homo sapiens
  Payload ID: 918
  Gene Symbol: ALG13
  Gene Name: ALG13, UDP-N-acetylglucosaminyltransferase subunit
  ENST ID: ENST00000482374
  CDS Start-End: 28-183
gcgatcagggcttgaggaacccgcgccatgaagtgcgtgtttgttaccgtagggaccaccagctttgacgacctcattgcgtgtgtgtcggcgcccgacagtctgcaagtgagtgagggaggcgagcaggcggcggcttggctcgccacccgccatctccggccatactgccagccgcgttagccttgcctgaccgtcgcgctcggaaagaaacccccgcaactctaccacaggtacaaggattccttgaaagaagacattcagaaagcagatcttgttattagtcacgcaggtgcaggaagctgtttggagactctggaaaaaggaaagccactcgtagtggttataaacgaaaagttgatgaacaatcatcagctggaactggcaaagcagctacacaaagagggtcatctcttctattgtacctgcagcacgcttcctgggctgttacagtcaatggacttatcaacactgaaatgttatcctcctggccagccagaaaaattttctgcatttttggataaagttgttggattacaaaaataaacactaaactctcaacactttaaaagcaacccccaaattcaacctatgtaatgtgattaaatcaaattaaatacataatatatatttacaaaataatataattaataaacttcctacatctatagaatgtata

SEQ ID NO: 106510 - DNA, 4175 bp, Homo sapiens
  Payload ID: 918
  Gene Symbol: ALG13
  Gene Name: ALG13, UDP-N-acetylglucosaminyltransferase subunit
  Uniprot ID: Q9NP73
  ENST ID: ENST00000610588
  CDS Start-End: 350-3529
agttgcgtcatatccggcccttgcgatcagggcttgaggaacccgcgccatgaagtgcgtgtttgttaccgtagggaccaccagctttgacgacctcattgcgtgtgtgtcggcgcccgacagtctgcaagtgagtgagggaggcgagcaggcggcggcttggctcgccacccgccatctccggccatactgccagccgcgttagccttgcctgaccgtcgcgctcggaaagaaacccccgcaactctaccacagaaaatcgagagccttggttacaaccgacttatcctgcaaattggtagaggaacggtggtacctgaacccttcagtactgagtcgtttactctggatgtttacaggtgcaggaagctgtttggagactctggaaaaaggaaagccactcgtagtggttataaacgaaaagttgatgaacaatcatcagctggaactggcaaagcagctacacaaagagggtcatctcttctattgtacctgcagggtcctgacttgtcctgggcaagccaagtccattgcttctgctcctgggaagtgccaagattctgcagcgctgacttcaactgccttttcaggcctagactttgggctgctttccggatacctgcataagcaagcccttgttactgctacccatcctacctgcaccctgctttttccctcttgccacgctttttttcctctccctcttacccccaccctgtacaaaatgcataaaggatggaaaaactactgcagccagaagtctttgaatgaggcatcaatggatgaatatttaggcagcttagggctgtttcgaaagctgactgccaaggatgcctcttgcctctttcgggccatttcggagcagttgttttgcagccaggtccatcatttggaaatcaggaaggcttgtgtctcatatatgagggaaaatcaacaaacttttgagtcttatgtggagggatcttttgagaaatacctggaacggttgggagatcccaaggaaagtgctggccagctggaaataagagctctttctctaatttataatcgggatttcattctttatcgctttcctggaaaacctccaacttatgtcacagataatggctatgaagacaagattctactctgctactcaagtagtggtcactatgattctgtgtactcaaaacaatttcagtcaagtgcagctgtttgtcaggctgtattgtacgaaattctctataaagatgtgtttgttgtggatgaagaagagttgaagactgcgattaaattgtttcgaagtggttctaagaagaacagaaataatgctgtaactggaagcgaggatgcccatactgattacaagagttcaaatcagaataggatggaagagtggggtgcctgctacaatgctgaaaatataccagagggctacaataaaggaacagaagaaacaaagtctccagaaaatccatcaaagatgcccttcccctataaggtgctcaaagccctggatccagaaatctatcgtaatgtagaatttgatgtttggttggacagcagaaaagaacttcaaaaatctgattacatggagtatgctgggagacagtactatttgggagacaagtgtcaggtttgcttggaatcagaaggaagatattataatgctcatatccaggaagttggaaatgagaacaattcagtaacagtcttcattgaagaattggcggaaaagcatgttgttccactggctaacttaaaaccagttacccaagtgatgtctgttcctgcctggaatgctatgcccagtcggaaaggaagaggttaccagaaaatgcctgggggttatgtcccggaaatagttatatcagagatggacataaagcaacagaagaagatgttcaagaaaattcgagggaaagaagtttacatgactatggcttacggcaagggagaccccctcctcccacccaggctgcagcacagtatgcattatgggcacgatcctccaatgcactactcacagacagctggcaatgttatgtctaatgaacattttcatcctcagcatccatctccgagacaaggtcggggatatgggatgcccaggaattcatctcggtttataaacaggcacaacatgccgggccctaaagttgatttttacccaggcccaggtaaaaggtgctgccagagctatgataacttctcttatagatctcgttcatttagacgtagtcaccgccagatgagttgtgtgaataaggagtcccagtatggatttaccccagggaatggacagatgcccaggggcttggaagaaactattactttttatgaagttgaagaaggggatgagactgcttatccaactttacctaatcatggaggtccctctacaatggttcctgctacttcaggatactgtgttggaaggcggggacatagctcaggcaaacagactttgaatttagaggagggcaatggccagagtgaaaatgggcgatatcatgaagaatatctttatcgtgcagagccagactatgaaacttcaggtgtttatagcacaactgcatctacagcaaacttgtctcttcaggacagaaagtcatgttctatgtctcctcaggacacagttacctcatacaactacccccagaagatgatgggaaatattgcagcagttgcagcttcctgtgccaataatgttccagctccagtcttatctaacggtgcagcggctaatcaagctattagtaccacttcagtttcctcacagaatgctatacagcctctctttgtatctccacctacacacggcaggccagtgattgcctcaccatcctatccatgccattctgctattcctcatgctggtgcctctctaccaccaccaccaccaccaccaccaccaccaccaccaccaccacctcctcctcctcctcctcctcctcctcctcctcctcctgctcttgatgtgggagagacttcaaacttacaaccaccaccaccactaccacctccaccttattcctgtgatccaagcggcagtgatttgcctcaagatacaaaagttttgcagtactatttcaatctaggattgcagtgctattaccacagctactggcactccatggtctatgtgccacagatgcagcagcagcttcatgtagagaattatccagtctatactgagccacctctggtagatcaaaccgttcctcaatgctacagtgaggtgaggagagaagatggcatacaggcggaagcatcagcaaatgatacttttccgaatgctgattcttcatctgtccctcatggagcagtctattatccagtaatgtcagatccctatgggcagccacctttgccaggttttgactcctgccttccggttgtgccagattattcctgtgttcccccctggcatccagttggtacagcatatggtggttcttctcaaattcatggtgctataaatcctgggccaattggctgtattgctccatctcccccagcttctcattatgtacctcagggtatgtaagatccagcagtatgaagtattcttgcactgccattttcttgctgtttttgtttttaaaaagtattttatgttagtggttaaatgatttaggtgattagtgtttactattgtatttgtctttaaaattattttatcttttgatttaaaatagtactttaaaattaaggggtattattttgggctgtgactaaggaaattgagatggatgtacaactagccccatattgagcatacttcattgtattcagctgttttcctgtcagccatttgtcagctttatattagctgatggtaccaattgataaaatgaatataaagtatttcattggttcaaaaatcacacatcatattaaaccatgcagaattggagtaacttccacttttttctagaaagtaaaaccaagagcctttgcttctggataactcacttaatattaaattaaagagctcttcacgtttcttgagaattatctgaagccagttgcattctgtgatatcagttttgaaggcacatggttctctgctttagatttatcccatatgctattgtttaatactggatgtatgtaagtgttttactgcactgtattgaattggtgtcttttgcacagttagcagtaaataaaaattagcatttaaaattgcc

SEQ ID NO: 106511 - DNA, 916 bp, Homo sapiens
  Payload ID: 918
  Gene Symbol: ALG13
  Gene Name: ALG13, UDP-N-acetylglucosaminyltransferase subunit
  ENST ID: ENST00000468657
  CDS Start-End: 41-196
atatccggcccttgcgatcagggcttgaggaacccgcgccatgaagtgcgtgtttgttaccgtagggaccaccagctttgacgacctcattgcgtgtgtgtcggcgcccgacagtctgcaagtgagtgagggaggcgagcaggcggcggcttggctcgccacccgccatctccggccatactgccagccgcgttagccttgcctgaccgtcgcgctcggaaagaaacccccgcaactctaccacagaaaatcgagagccttggttacaaccgacttatcctgcaaattggtagaggaacggtggtacctgaacccttcagtactgagtcgtttactctggatgtttacaggtacaaggattccttgaaagaagacattcagaaagcagatcttgttattagtcacgcaggtgcaggaagctgtttggagactctggaaaaaggaaagccactcgtagtggttataaacgaaaagttgatgaacaatcatcagctggaactggcaaagcagctacacaaagagggtcatctcttctattgtacctgcagcacgcttcctgggctgttacagtcaatggacttatcaacactgaaatgttatcctcctggccagccagaaaaattttctgcatttttggataaagttgttggattacaaaaataaacactaaactctcaacactttaaaagcaacccccaaattcaacctatgtaatgtgattaaatcaaattaaatacataatatatatttacaaaataatataattaataaacttcctacatctatagaatgtataggaaattttatgttgtgcacatttgcattgggtccaaatcctaattgcagtttagtgaaattactagatttttttctaatcttcagtatgtagtgagcattcacaggttttctcctagaa

SEQ ID NO: 106512 - DNA, 693 bp, Homo sapiens
  Payload ID: 918
  Gene Symbol: ALG13
  Gene Name: ALG13, UDP-N-acetylglucosaminyltransferase subunit
  ENST ID: ENST00000473389
  CDS Start-End: 31-432
cttgcgatcagggcttgaggaacccgcgccatgaagtgcgtgtttgttaccgtagggaccaccagctttgacgacctcattgcgtgtgtgtcggcgcccgacagtctgcaaaaaatcgagagccttggttacaaccgacttatcctgcaaattggtagaggaacggtggtacctgaacccttcagtactgagtcgtttactctggatgtttacaggtacaaggattccttgaaagaagacattcagaaagcagatcttgttattagtcacgcaggtgcaggaagctgtttggagactctggaaaaaggaaagccactcgtagtggttataaacgaaaagttgatgaacaatcatcagctggaactggcaaagcagctacacaaagagggtcatctcttctattgtacctgcagttcttccttgagacactagaagcttgccaaagggccagcacgcttcctgggctgttacagtcaatggacttatcaacactgaaatgttatcctcctggccagccagaaaaattttctgcatttttggataaagttgttggattacaaaaataaacactaaactctcaacactttaaaagcaacccccaaattcaacctatgtaatgtgattaaatcaaattaaatacataatatatatttacaaaataatataattaataaacttcctacatctatagaa

SEQ ID NO: 106513 - DNA, 3893 bp, Homo sapiens
  Payload ID: 918
  Gene Symbol: ALG13
  Gene Name: ALG13, UDP-N-acetylglucosaminyltransferase subunit
  Uniprot ID: Q9NP73
  ENST ID: ENST00000621367
  CDS Start-End: 383-3247
agttgcgtcatatccggcccttgcgatcagggcttgaggaacccgcgccatgaagtgcgtgtttgttaccgtagggaccaccagctttgacgacctcattgcgtgtgtgtcggcgcccgacagtctgcaagtgagtgagggaggcgagcaggcggcggcttggctcgccacccgccatctccggccatactgccagccgcgttagccttgcctgaccgtcgcgctcggaaagaaacccccgcaactctaccacaggtacaaggattccttgaaagaagacattcagaaagcagatcttgttattagtcacgcaggtgcaggaagctgtttggagactctggaaaaaggaaagccactcgtagtggttataaacgaaaagttgatgaacaatcatcagctggaactggcaaagcagctacacaaagagggtcatctcttctattgtacctgcagggtcctgacttgtcctgggcaagccaagtccattgcttctgctcctgggaagtgccaagattctgcagcgctgacttcaactgccttttcaggcctagactttgggctgctttccggatacctgcataagcaagcccttgttactgctacccatcctacctgcaccctgctttttccctcttgccacgctttttttcctctccctcttacccccaccctgtacaaaatgcataaaggatggaaaaactactgcagccagaagtctttgaatgaggcatcaatggatgaatatttaggcagcttagggctgtttcgaaagctgactgccaaggatgcctcttgcctctttcgggccatttcggagcagttgttttgcagccaggtccatcatttggaaatcaggaaggcttgtgtctcatatatgagggaaaatcaacaaacttttgagtcttatgtggagggatcttttgagaaatacctggaacggttgggagatcccaaggaaagtgctggccagctggaaataagagctctttctctaatttataatcgggatttcattctttatcgctttcctggaaaacctccaacttatgtcacagataatggctatgaagacaagattctactctgctactcaagtagtggtcactatgattctgtgtactcaaaacaatttcagtcaagtgcagctgtttgtcaggctgtattgtacgaaattctctataaagatgtgtttgttgtggatgaagaagagttgaagactgcgattaaattgtttcgaagtggttctaagaagaacagaaataatgctgtaactggaagcgaggatgcccatactgattacaagagttcaaatcagaataggatggaagagtggggtgcctgctacaatgctgaaaatataccagagggctacaataaaggaacagaagaaacaaagtctccagaaaatccatcaaagatgcccttcccctataaggtgctcaaagccctggatccagaaatctatcgtaatgtagaatttgatgtttggttggacagcagaaaagaacttcaaaaatctgattacatggagtatgctgggagacagtactatttgggagacaagtgtcaggtttgcttggaatcagaaggaagatattataatgctcatatccaggaagttggaaatgagaacaattcagtaacagtcttcattgaagaattggcggaaaagcatgttgttccactggctaacttaaaaccagttacccaagtgatgtctgttcctgcctggaatgctatgcccagtcggaaaggaagaggttaccagaaaatgcctgggggttatgtcccggaaatagttatatcagagatggacataaagcaacagaagaagatgttcaagaaaattcgagggaaagaagtttacatgactatggcttacggcaagggagaccccctcctcccacccaggctgcagcacagtatgcattatgggcacgatcctccaatgcactactcacagacagctggcaatgttatgtctaatgaacattttcatcctcagcatccatctccgagacaaggtcggggatatgggatgcccaggaattcatctcggtttataaacaggcacaacatgccgggccctaaagttgatttttacccaggcccaggtaaaaggtgctgccagagctatgataacttctcttatagatctcgttcatttagacgtagtcaccgccagatgagttgtgtgaataaggagtcccagtatggatttaccccagggaatggacagatgcccaggggcttggaagaaactattactttttatgaagttgaagaaggggatgagactgcttatccaactttacctaatcatggaggtccctctacaatggttcctgctacttcaggatactgtgttggaaggcggggacatagctcaggcaaacagactttgaatttagaggagggcaatggccagagtgaaaatgggcgatatcatgaagaatatctttatcgtgcagagccagactatgaaacttcaggtgtttatagcacaactgcatctacagcaaacttgtctcttcaggacagaaagtcatgttctatgtctcctcaggacacagttacctcatacaactacccccagaagatgatgggaaatattgcagcagttgcagcttcctgtgccaataatgttccagctccagtcttatctaacggtgcagcggctaatcaagctattagtaccacttcagtttcctcacagaatgctatacagcctctctttgtatctccacctacacacggcaggccagatacaaaagttttgcagtactatttcaatctaggattgcagtgctattaccacagctactggcactccatggtctatgtgccacagatgcagcagcagcttcatgtagagaattatccagtctatactgagccacctctggtagatcaaaccgttcctcaatgctacagtgaggtgaggagagaagatggcatacaggcggaagcatcagcaaatgatacttttccgaatgctgattcttcatctgtccctcatggagcagtctattatccagtaatgtcagatccctatgggcagccacctttgccaggttttgactcctgccttccggttgtgccagattattcctgtgttcccccctggcatccagttggtacagcatatggtggttcttctcaaattcatggtgctataaatcctgggccaattggctgtattgctccatctcccccagcttctcattatgtacctcagggtatgtaagatccagcagtatgaagtattcttgcactgccattttcttgctgtttttgtttttaaaaagtattttatgttagtggttaaatgatttaggtgattagtgtttactattgtatttgtctttaaaattattttatcttttgatttaaaatagtactttaaaattaaggggtattattttgggctgtgactaaggaaattgagatggatgtacaactagccccatattgagcatacttcattgtattcagctgttttcctgtcagccatttgtcagctttatattagctgatggtaccaattgataaaatgaatataaagtatttcattggttcaaaaatcacacatcatattaaaccatgcagaattggagtaacttccacttttttctagaaagtaaaaccaagagcctttgcttctggataactcacttaatattaaattaaagagctcttcacgtttcttgagaattatctgaagccagttgcattctgtgatatcagttttgaaggcacatggttctctgctttagatttatcccatatgctattgtttaatactggatgtatgtaagtgttttactgcactgtattgaattggtgtcttttgcacagttagcagtaaataaaaattagcatttaaaattgcc

SEQ ID NO: 106514 - DNA, 785 bp, Homo sapiens
  Payload ID: 918
  Gene Symbol: ALG13
  Gene Name: ALG13, UDP-N-acetylglucosaminyltransferase subunit
  ENST ID: ENST00000489033
  CDS Start-End: 4-159
gccatgaagtgcgtgtttgttaccgtagggaccaccagctttgacgacctcattgcgtgtgtgtcggcgcccgacagtctgcaagtgagtgagggaggcgagcaggcggcggcttggctcgccacccgccatctccggccatactgccagccgcgttagccttgcctgaccgtcgcgctcggaaagaaacccccgcaactctaccacagaaaatcgagagccttggttacaaccgacttatcctgcaaattggtagaggaacggtggtacctgaacccttcagtactgagtcgtttactctggatgtttacaggtgcaggaagctgtttggagactctggaaaaaggaaagccactcgtagtggttataaacgaaaagttgatgaacaatcatcagctggaactggcaaagcagctacacaaagagggtcatctcttctattgtacctgcagcacgcttcctgggctgttacagtcaatggacttatcaacactgaaatgttatcctcctggccagccagaaaaattttctgcatttttggataaagttgttggattacaaaaataaacactaaactctcaacactttaaaagcaacccccaaattcaacctatgtaatgtgattaaatcaaattaaatacataatatatatttacaaaataatataattaataaacttcctacatctatagaatgtataggaaattttatgttgtgcacatttgcattgggtccaaatcctaattgcagtttagtgaaattactagatttttttctaatcttca

SEQ ID NO: 106515 - DNA, 711 bp, Homo sapiens
  Payload ID: 918
  Gene Symbol: ALG13
  Gene Name: ALG13, UDP-N-acetylglucosaminyltransferase subunit
  ENST ID: ENST00000471924
  CDS Start-End: 1-108
attgcgtgtgtgtcggcgcccgacagtctgcaagtgagtgagggaggcgagcaggcggcggcttggctcgccacccgccatctccggccatactgccagccgcgttagccttgcctgaccgtcgcgctcggaaagaaacccccgcaactctaccacagaaaatcgagagccttggttacaaccgacttatcctgcaaattggtagaggaacggtggtacctgaacccttcagtactgagtcgtttactctggatgtttacaggtacaaggattccttgaaagaagacattcagaaagcagatcttgttattagtcacgcaggtgcaggaagctgtttggagactctggaaaaaggaaagccactcgtagtggttataaacgaaaagttgatgaacaatcatcagctggaactggcaaagcagctacacaaagagggtcatctcttctattgtacctgcaggctaatattaaaaaaatgcttactagtggtagaaggtggtgacaaagaaatactctgggtagcaggaggaagccaacttggattaaaattttgctgagaataatctaaaaaggtcctgacttgtcctgggcaagccaagtccattgcttctgctcctgggaagtgccaagattctgcagcgctgacttcaactgccttttcaggcctagactttgggctgctttccggatacctgcataagcaagcccttg

SEQ ID NO: 106516 - DNA, 582 bp, Homo sapiens
  Payload ID: 918
  Gene Symbol: ALG13
  Gene Name: ALG13, UDP-N-acetylglucosaminyltransferase subunit
  ENST ID: ENST00000622986
  CDS Start-End: 25-423
atcagggcttgaggaacccgcgccatgaagtgcgtgtttgttaccgtagggaccaccagctttgacgacctcattgcgtgtgtgtcggcgcccgacagtctgcaaaaaatcgagagccttggttacaaccgacttatcctgcaaattggtagaggaacggtggtacctgaacccttcagtactgagtcgtttactctggatgtttacaggtacaaggattccttgaaagaagacattcagaaagcagatcttgttattagtcacgcaggtgcaggaagctgtttggagactctggaaaaaggaaagccactcgtagtggttataaacgaaaagttgatgaacaatcatcagctggaactggcaaagcagctacacaaagagggtcatctcttctattgtacctgcaggtatgctagagactgattattattatctcttgccttaattcgtcccttgcacttcctcttatccacctacctaacccatctgtctcttctgcctcttaccttctcccagttaccaaaccttttgattttctcagctgtaaaatcctcccatttgtttgtctcccattttgcaatc

SEQ ID NO: 106517 - DNA, 440 bp, Homo sapiens
  Payload ID: 918
  Gene Symbol: ALG13
  Gene Name: ALG13, UDP-N-acetylglucosaminyltransferase subunit
  ENST ID: ENST00000623310
  CDS Start-End: 1-233
agccacctttgccaggttttgactcctgccttccggttgtgccagattattcctgtgttcccccctggcatccagttggtacagcatatggtggttcttctcaaattcatggtgctataaatcctgggccaattggctgtattgctccatctcccccagcttctcattatgtacctcaggaaagtaaaaccaagagcctttgcttctggataactcacttaatattaaattaaagagctcttcacgtttcttgagaattatctgaagccagttgcattctgtgatatcagttttgaaggcacatggttctctgctttagatttatcccatatgctattgtttaatactggatgtatgtaagtgttttactgcactgtattgaattggtgtcttttgcacagttagcagtaaataaaaattagcatttaaaattgccaaaa

SEQ ID NO: 106518 - DNA, 876 bp, Homo sapiens
  Payload ID: 918
  Gene Symbol: ALG13
  Gene Name: ALG13, UDP-N-acetylglucosaminyltransferase subunit
  ENST ID: ENST00000624881
  CDS Start-End: 41-493
atatccggcccttgcgatcagggcttgaggaacccgcgccatgaagtgcgtgtttgttaccgtagggaccaccagctttgacgacctcattgcgtgtgtgtcggcgcccgacagtctgcaaaaaatcgagagccttggttacaaccgacttatcctgcaaattggtagaggaacggtggtacctgaacccttcagtactgagtcgtttactctggatgtttacaggtgcaggaagctgtttggagactctggaaaaaggaaagccactcgtagtggttataaacgaaaagttgatgaacaatcatcagctggaactggcaaagcagctacacaaagagggtcatctcttctattgtacctgcagggtcctgacttgtcctgggcaagccaagtccattgcttctgctcctgggaagtgccaagattctgcagcgctgacttcaactgccttttcaggcctagactttgggctgctttccggatacctgcataagcaagcccttgttactgctacccatcctacctgcaccctgctttttccctcttgccacgctttttttcctctccctcttacccccaccctgtacaaaatgcataaaggatggaaaaactactgcagccagaagtctttgaatgaggcatcaatggatgaatatttaggcagcttagggctgtttcgaaagctgactgccaaggatgcctcttgcctctttcgggccatttcggagcagttgttttgcagccaggtccatcatttggaaatcaggaaggcttgtgtctcatatatgagggaaaatcaacaaacttttgagtcttatgtggagggatcttttgagaaatacctggaacggttgggagatcccaaggaaagtgctg

SEQ ID NO: 106519 - DNA, 3761 bp, Homo sapiens
  Payload ID: 918
  Gene Symbol: ALG13
  Gene Name: ALG13, UDP-N-acetylglucosaminyltransferase subunit
  ENST ID: ENST00000624161
  CDS Start-End: 44-175
gtcatatccggcccttgcgatcagggcttgaggaacccgcgccatgaagtgcgtgtttgttaccgtagggaccaccagctttgacgacctcattgcgtgtgtgtcggcgcccgacagtctgcaagtacaaggattccttgaaagaagacattcagaaagcagatcttgttattagtcacgcaggtgcaggaagctgtttggagactctggaaaaaggaaagccactcgtagtggttataaacgaaaagttgatgaacaatcatcagctggaactggcaaagcagctacacaaagagggtcatctcttctattgtacctgcagggtcctgacttgtcctgggcaagccaagtccattgcttctgctcctgggaagtgccaagattctgcagcgctgacttcaactgccttttcaggcctagactttgggctgctttccggatacctgcataagcaagcccttgttactgctacccatcctacctgcaccctgctttttccctcttgccacgctttttttcctctccctcttacccccaccctgtacaaaatgcataaaggatggaaaaactactgcagccagaagtctttgaatgaggcatcaatggatgaatatttaggcagcttagggctgtttcgaaagctgactgccaaggatgcctcttgcctctttcgggccatttcggagcagttgttttgcagccaggtccatcatttggaaatcaggaaggcttgtgtctcatatatgagggaaaatcaacaaacttttgagtcttatgtggagggatcttttgagaaatacctggaacggttgggagatcccaaggaaagtgctggccagctggaaataagagctctttctctaatttataatcgggatttcattctttatcgctttcctggaaaacctccaacttatgtcacagataatggctatgaagacaagattctactctgctactcaagtagtggtcactatgattctgtgtactcaaaacaatttcagtcaagtgcagctgtttgtcaggctgtattgtacgaaattctctataaagatgtgtttgttgtggatgaagaagagttgaagactgcgattaaattgtttcgaagtggttctaagaagaacagaaataatgctgtaactggaagcgaggatgcccatactgattacaagagttcaaatcagaataggatggaagagtggggtgcctgctacaatgctgaaaatataccagagggctacaataaaggaacagaagaaacaaagtctccagaaaatccatcaaagatgcccttcccctataaggtgctcaaagccctggatccagaaatctatcgtaatgtagaatttgatgtttggttggacagcagaaaagaacttcaaaaatctgattacatggagtatgctgggagacagtactatttgggagacaagtgtcaggtttgcttggaatcagaaggaagatattataatgctcatatccaggaagttggaaatgagaacaattcagtaacagtcttcattgaagaattggcggaaaagcatgttgttccactggctaacttaaaaccagttacccaagtgatgtctgttcctgcctggaatgctatgcccagtcggaaaggaagaggttaccagaaaatgcctgggggttatgtcccggaaatagttatatcagagatggacataaagcaacagaagaagatgttcaagaaaattcgagggaaagaagtttacatgactatggcttacggcaagggagaccccctcctcccacccaggctgcagcacagtatgcattatgggcacgatcctccaatgcactactcacagacagctggcaatgttatgtctaatgaacattttcatcctcagcatccatctccgagacaaggtcggggatatgggatgcccaggaattcatctcggtttataaacaggcacaacatgccgggccctaaagttgatttttacccaggcccaggtaaaaggtgctgccagagctatgataacttctcttatagatctcgttcatttagacgtagtcaccgccagatgagttgtgtgaataaggagtcccagtatggatttaccccagggaatggacagatgcccaggggcttggaagaaactattactttttatgaagttgaagaaggggatgagactgcttatccaactttacctaatcatggaggtccctctacaatggttcctgctacttcaggatactgtgttggaaggcggggacatagctcaggcaaacagactttgaatttagaggagggcaatggccagagtgaaaatgggcgatatcatgaagaatatctttatcgtgcagagccagactatgaaacttcaggtgtttatagcacaactgcatctacagcaaacttgtctcttcaggacagaaagtcatgttctatgtctcctcaggacacagttacctcatacaactacccccagaagatgatgggaaatattgcagcagttgcagcttcctgtgccaataatgttccagctccagtcttatctaacggtgcagcggctaatcaagctattagtaccacttcagtttcctcacagaatgctatacagcctctctttgtatctccacctacacacggcaggccagatacaaaagttttgcagtactatttcaatctaggattgcagtgctattaccacagctactggcactccatggtctatgtgccacagatgcagcagcagcttcatgtagagaattatccagtctatactgagccacctctggtagatcaaaccgttcctcaatgctacagtgaggtgaggagagaagatggcatacaggcggaagcatcagcaaatgatacttttccgaatgctgattcttcatctgtccctcatggagcagtctattatccagtaatgtcagatccctatgggcagccacctttgccaggttttgactcctgccttccggttgtgccagattattcctgtgttcccccctggcatccagttggtacagcatatggtggttcttctcaaattcatggtgctataaatcctgggccaattggctgtattgctccatctcccccagcttctcattatgtacctcagggtatgtaagatccagcagtatgaagtattcttgcactgccattttcttgctgtttttgtttttaaaaagtattttatgttagtggttaaatgatttaggtgattagtgtttactattgtatttgtctttaaaattattttatcttttgatttaaaatagtactttaaaattaaggggtattattttgggctgtgactaaggaaattgagatggatgtacaactagccccatattgagcatacttcattgtattcagctgttttcctgtcagccatttgtcagctttatattagctgatggtaccaattgataaaatgaatataaagtatttcattggttcaaaaatcacacatcatattaaaccatgcagaattggagtaacttccacttttttctagaaagtaaaaccaagagcctttgcttctggataactcacttaatattaaattaaagagctcttcacgtttcttgagaattatctgaagccagttgcattctgtgatatcagttttgaaggcacatggttctctgctttagatttatcccatatgctattgtttaatactggatgtatgtaagtgttttactgcactgtattgaattggtgtcttttgcacagttagcagtaaataaaaattagcatttaaaattgc

SEQ ID NO: 106520 - DNA, 3693 bp, Homo sapiens
  Payload ID: 918
  Gene Symbol: ALG13
  Gene Name: ALG13, UDP-N-acetylglucosaminyltransferase subunit
  ENST ID: ENST00000623144
  CDS Start-End: 16-171
tgaggaacccgcgccatgaagtgcgtgtttgttaccgtagggaccaccagctttgacgacctcattgcgtgtgtgtcggcgcccgacagtctgcaagtgagtgagggaggcgagcaggcggcggcttggctcgccacccgccatctccggccatactgccagccgcgttagccttgcctgaccgtcgcgctcggaaagaaacccccgcaactctaccacagaaaatcgagagccttggttacaaccgacttatcctgcaaattggtagaggaacggtggtacctgaacccttcagtactgagtcgtttactctggatgtttacaggtacaaggattccttgaaagaagacattcagaaagcagatcttgttattagtcacgcaggtgcaggaagctgtttggagactctggaaaaaggaaagccactcgtagtggttataaacgaaaagttgatgaacaatcatcagctggaactggcaaagcagctacacaaagagggtcatctcttctattgtacctgcagggtcctgacttgtcctgggcaagccaagtccattgcttctgctcctgggaagtgccaagattctgcagcgctgacttcaactgccttttcaggcctagactttgggctgctttccggatacctgcataagcaagcccttgttactgctacccatcctacctgcaccctgctttttccctcttgccacgctttttttcctctccctcttacccccaccctgtacaaaatgcataaaggatggaaaaactactgcagccagaagtctttgaatgaggcatcaatggatgaatatttaggcagcttagggctgtttcgaaagctgactgccaaggatgcctcttgcctctttcgggccatttcggagcagttgttttgcagccaggtccatcatttggaaatcaggaaggcttgtgtctcatatatgagggaaaatcaacaaacttttgagtcttatgtggagggatcttttgagaaatacctggaacggttgggagatcccaaggaaagtgctggccagctggaaataagagctctttctctaatttataatcgggatttcattctttatcgctttcctggaaaacctccaacttatgtcacagataatggctatgaagacaagattctactctgctactcaagtagtggtcactatgattctgtgtactcaaaacaatttcagtcaagtgcagctgtttgtcaggctgtattgtacgaaattctctataaagatgtgtttgttgtggatgaagaagagttgaagactgcgattaaattgtttcgaagtggttctaagaagaacagaaataatgctgtaactggaagcgaggatgcccatactgattacaagagttcaaatcagaataggatggaagagtggggtgcctgctacaatgctgaaaatataccagagggctacaataaaggaacagaagaaacaaagtctccagaaaatccatcaaagatgcccttcccctataaggtgctcaaagccctggatccagaaatctatcgtaatgtagaatttgatgtttggttggacagcagaaaagaacttcaaaaatctgattacatggagtatgctgggagacagtactatttgggagacaagtgtcaggtttgcttggaatcagaaggaagatattataatgctcatatccaggaagttggaaatgagaacaattcagtaacagtcttcattgaagaattggcggaaaagcatgttgttccactggctaacttaaaaccagttacccaagtgatgtctgttcctgcctggaatgctatgcccagtcggaaaggaagaggttaccagaaaatgcctgggggttatgtcccggaaatagttatatcagagatggacataaagcaacagaagaagatgttcaagaaaattcgagggaaagaagtttacatgactatggcttacggcaagggagaccccctcctcccacccaggctgcagcacagtatgcattatgggcacgatcctccaatgcactactcacagacagctggcaatgttatgtctaatgaacattttcatcctcagcatccatctccgagacaaggtcggggatatgggatgcccaggaattcatctcggtttataaacaggcacaacatgccgggccctaaagttgatttttacccaggcccaggtaaaaggtgctgccagagctatgataacttctcttatagatctcgttcatttagacgtagtcaccgccagatgagttgtgtgaataaggagtcccagtatggatttaccccagggaatggacagatgcccaggggcttggaagaaactattactttttatgaagttgaagaaggggatgagactgcttatccaactttacctaatcatggaggtccctctacaatggttcctgctacttcaggatactgtgttggaaggcggggacatagctcaggcaaacagactttgaatttagaggagggcaatggccagagtgaaaatgggcgatatcatgaagaatatctttatcgtgcagagccagactatgaaacttcaggtgtttatagcacaactgcatctacagcaaacttgtctcttcaggacagaaagtcatgttctatgtctcctcaggacacagttacctcatacaactacccccagaagatgatgggaaatattgcagcagttgcagcttcctgtgccaataatgttccagctccagtcttatctaacggtgcagcggctaatcaagctattagtaccacttcagtttcctcacagaatgctatacagcctctctttgtatctccacctacacacggcaggccagatacaaaagttttgcagtactatttcaatctaggattgcagtgctattaccacagctactggcactccatggtctatgtgccacagatgcagcagcagcttcatgtagagaattatccagtctatactgagccacctctggtagatcaaaccgttcctcaatgctacagtgaggtgaggagagaagatggcatacaggcggaagcatcagcaaatgatacttttccgaatgctgattcttcatctgtccctcatggagcagtctattatccagtaatgtcagatccctatgggcagccacctttgccaggttttgactcctgccttccggttgtgccagattattcctgtgttcccccctggcatccagttggtacagcatatggtggttcttctcaaattcatggtgctataaatcctgggccaattggctgtattgctccatctcccccagcttctcattatgtacctcagggtatgtaagatccagcagtatgaagtattcttgcactgccattttcttgctgtttttgtttttaaaaagtattttatgttagtggttaaatgatttaggtgattagtgtttactattgtatttgtctttaaaattattttatcttttgatttaaaatagtactttaaaattaaggggtattattttgggctgtgactaaggaaattgagatggatgtacaactagccccatattgagcatacttcattgtattcagctgttttcctgtcagccatttgtcagctttatattagctgatggtaccaattgataaaatgaatataaagtatttcattggttcaaaaatcacacatcatattaaaccatgcagaattggagtaactt

SEQ ID NO: 106521 - DNA, 585 bp, Homo sapiens
  Payload ID: 918
  Gene Symbol: ALG13
  Gene Name: ALG13, UDP-N-acetylglucosaminyltransferase subunit
  ENST ID: ENST00000623255
  CDS Start-End: 1-489
gttaccgtagggaccaccagctttgacgacctcattgcgtgtgtgtcggcgcccgacagtctgcaaaaaatcgagagccttggttacaaccgacttatcctgcaaattggtagaggaacggtggtacctgaacccttcagtactgagtcgtttactctggatgtttacaggtacaaggattccttgaaagaagacattcagaaagcagatcttgttattagtcacgcaggtaaaggtgcaggaagctgtttggagactctggaaaaaggaaagccactcgtagtggttataaacgaaaagttgatgaacaatcatcagctggaactggcaaagcagctacacaaagagggtcatctcttctattgtacctgcagcacgcttcctgggctgttacagtcaatggacttatcaacactgaaatgttatcctcctggccagccagaaaaattttctgcatttttggataaagttgttggattacaaaaataaacactaaactctcaacactttaaaagcaacccccaaattcaacctatgtaatgtgattaaatcaaattaaatacataatatatatttacaaaataa

SEQ ID NO: 106522 - DNA, 458 bp, Homo sapiens
  Payload ID: 918
  Gene Symbol: ALG13
  Gene Name: ALG13, UDP-N-acetylglucosaminyltransferase subunit
  ENST ID: ENST00000623189
  CDS Start-End: 142-327
tcgcagttgatcaagtacaaggattccttgaaagaagacattcagaaagcagatcttgttattagtcacgcaggtgcaggaagctgtttggagactctggaaaaaggaaagccactcgtagtggttataaacgaaaagttgatgaacaatcatcagctggaactggcaaagcagctacacaaagagggtcatctcttctattgtacctgcagcacgcttcctgggctgttacagtcaatggacttatcaacactgaaatgttatcctcctggccagccagaaaaattttctgcatttttggataaagttgttggattacaaaaataaacactaaactctcaacactttaaaagcaacccccaaattcaacctatgtaatgtgattaaatcaaattaaatacataatatatatttacaaaataatataattaataaacttcctacatctatagaatgta

SEQ ID NO: 106523 - DNA, 436 bp, Homo sapiens
  Payload ID: 918
  Gene Symbol: ALG13
  Gene Name: ALG13, UDP-N-acetylglucosaminyltransferase subunit
  ENST ID: ENST00000474121
  CDS Start-End: 1-127
accaccactaccacctccaccttattcctgtgatccaagcggcagtgatttgcctcaagatacaaaagttttgcagtactatttcaatctaggattgcaggtaagtgccatgttaaaatttctttgataagccctattttcaaagtatagaccgttttgataatcagactcttgaacttcgaaagccaaaatcactaaggggactaaacattttaattctgtctaagagatctctgaagatgacatagttcagttgtctgctttagcctcccagtgctttagtttctcttataaaatagtcgttaaactgaagagaggggtactgggctgtaagcagcacaatcagcatatattagatgagccatcatatttaacattacatgctaacttttcactgtggtgttctgtctcaaaataaatgaattatcctaaaata

SEQ ID NO: 106524 - DNA, 594 bp, Homo sapiens
  Payload ID: 918
  Gene Symbol: ALG13
  Gene Name: ALG13, UDP-N-acetylglucosaminyltransferase subunit
  ENST ID: ENST00000622997
  CDS Start-End: 50-205
agttgcgtcatatccggcccttgcgatcagggcttgaggaacccgcgccatgaagtgcgtgtttgttaccgtagggaccaccagctttgacgacctcattgcgtgtgtgtcggcgcccgacagtctgcaagtgagtgagggaggcgagcaggcggcggcttggctcgccacccgccatctccggccatactgccagccgcgttagccttgcctgaccgtcgcgctcggaaagaaacccccgcaactctaccacagaaaatcgagagccttggttacaaccgacttatcctgcaaattggtagaggaacggtggtacctgaacccttcagtactgagtcgtttactctggatgtttacaggtacaaggattccttgaaagaagacattcagaaagcagatcttgttattagtcacgcaggtgcaggaagctgtttggagactctggaaaaaggaaagccactcgtagtggttataaacgaaaagttgatgaacaatcatcagctggaactggcaaagcagctacacaaagagggtcatctcttctattgtacctgcagtcgggatttcattctttatcgctttcctggaaaacct

SEQ ID NO: 106525 - DNA, 1121 bp, Homo sapiens
  Payload ID: 918
  Gene Symbol: ALG13
  Gene Name: ALG13, UDP-N-acetylglucosaminyltransferase subunit
  ENST ID: ENST00000623622
  CDS Start-End: 1-1121
gattctgtgtactcaaaacaatttcagtcaagtgcagctgtttgtcaggctgtattgtacgaaattctctataaagatgtgtttgttgtggatgaagaagagttgaagactgcgattaaattgtttcgaagtggttctaagaagaacagaaataatgctgtaactggaagcgaggatgcccatactgattacaagagttcaaatcagaataggatggaagagtggggtgcctgctacaatgctgaaaatataccagagggctacaataaaggaacagaagaaacaaaggtttgcttggaatcagaaggaagatattataatgctcatatccaggaagttggaaatgagaacaattcagtaacagtcttcattgaagaattggcggaaaagcatgttgttccactggctaacttaaaaccagttacccaagtgatgtctgttcctgcctggaatgctatgcccagtcggaaaggaagaggttaccagaaaatgcctgggggttatgtcccggaaatagttatatcagagatggacataaagcaacagaagaagatgttcaagaaaattcgagggaaagaagtttacatgactatggcttacggcaagggagaccccctcctcccacccaggctgcagcacagtatgcattatgggcacgatcctccaatgcactactcacagacagctggcaatgttatgtctaatgaacattttcatcctcagcatccatctccgagacaaggtcggggatatgggatgcccaggaattcatctcggtttataaacaggcacaacatgccgggccctaaagttgatttttacccaggcccaggtaaaaggtgctgccagagctatgataacttctcttatagatctcgttcatttagacgtagtcaccgccagatgagttgtgtgaataaggagtcccagtatggatttaccccagggaatggacagatgcccaggggcttggaagaaactattactttttatgaagttgaagaaggggatgagactgcttatccaactttacctaatcatggaggtccctctacaatggttcctgctacttcaggatactgtgttggaaggcggggacatagctcaggcaaacagacttt

SEQ ID NO: 106526 - DNA, 3689 bp, Homo sapiens
  Payload ID: 918
  Gene Symbol: ALG13
  Gene Name: ALG13, UDP-N-acetylglucosaminyltransferase subunit
  ENST ID: ENST00000623148
  CDS Start-End: 1-108
attgcgtgtgtgtcggcgcccgacagtctgcaagtgagtgagggaggcgagcaggcggcggcttggctcgccacccgccatctccggccatactgccagccgcgttagccttgcctgaccgtcgcgctcggaaagaaacccccgcaactctaccacagaaaatcgagagccttggttacaaccgacttatcctgcaaattggtagaggaacggtggtacctgaacccttcagtactgagtcgtttactctggatgtttacaggtgcaggaagctgtttggagactctggaaaaaggaaagccactcgtagtggttataaacgaaaagttgatgaacaatcatcagctggaactggcaaagcagctacacaaagagggtcatctcttctattgtacctgcagggtcctgacttgtcctgggcaagccaagtccattgcttctgctcctgggaagtgccaagattctgcagcgctgacttcaactgccttttcaggcctagactttgggctgctttccggatacctgcataagcaagcccttgttactgctacccatcctacctgcaccctgctttttccctcttgccacgctttttttcctctccctcttacccccaccctgtacaaaatgcataaaggatggaaaaactactgcagccagaagtctttgaatgaggcatcaatggatgaatatttaggcagcttagggctgtttcgaaagctgactgccaaggatgcctcttgcctctttcgggccatttcggagcagttgttttgcagccaggtccatcatttggaaatcaggaaggcttgtgtctcatatatgagggaaaatcaacaaacttttgagtcttatgtggagggatcttttgagaaatacctggaacggttgggagatcccaaggaaagtgctggccagctggaaataagagctctttctctaatttataatcgggatttcattctttatcgctttcctggaaaacctccaacttatgtcacagataatggctatgaagacaagattctactctgctactcaagtagtggtcactatgattctgtgtactcaaaacaatttcagtcaagtgcagctgtttgtcaggctgtattgtacgaaattctctataaagatgtgtttgttgtggatgaagaagagttgaagactgcgattaaattgtttcgaagtggttctaagaagaacagaaataatgctgtaactggaagcgaggatgcccatactgattacaagagttcaaatcagaataggatggaagagtggggtgcctgctacaatgctgaaaatataccagagggctacaataaaggaacagaagaaacaaagtctccagaaaatccatcaaagatgcccttcccctataaggtgctcaaagccctggatccagaaatctatcgtaatgtagaatttgatgtttggttggacagcagaaaagaacttcaaaaatctgattacatggagtatgctgggagacagtactatttgggagacaagtgtcaggtttgcttggaatcagaaggaagatattataatgctcatatccaggaagttggaaatgagaacaattcagtaacagtcttcattgaagaattggcggaaaagcatgttgttccactggctaacttaaaaccagttacccaagtgatgtctgttcctgcctggaatgctatgcccagtcggaaaggaagaggttaccagaaaatgcctgggggttatgtcccggaaatagttatatcagagatggacataaagcaacagaagaagatgttcaagaaaattcgagggaaagaagtttacatgactatggcttacggcaagggagaccccctcctcccacccaggctgcagcacagtatgcattatgggcacgatcctccaatgcactactcacagacagctggcaatgttatgtctaatgaacattttcatcctcagcatccatctccgagacaaggtcggggatatgggatgcccaggaattcatctcggtttataaacaggcacaacatgccgggccctaaagttgatttttacccaggcccaggtaaaaggtgctgccagagctatgataacttctcttatagatctcgttcatttagacgtagtcaccgccagatgagttgtgtgaataaggagtcccagtatggatttaccccagggaatggacagatgcccaggggcttggaagaaactattactttttatgaagttgaagaaggggatgagactgcttatccaactttacctaatcatggaggtccctctacaatggttcctgctacttcaggatactgtgttggaaggcggggacatagctcaggcaaacagactttgaatttagaggagggcaatggccagagtgaaaatgggcgatatcatgaagaatatctttatcgtgcagagccagactatgaaacttcaggtgtttatagcacaactgcatctacagcaaacttgtctcttcaggacagaaagtcatgttctatgtctcctcaggacacagttacctcatacaactacccccagaagatgatgggaaatattgcagcagttgcagcttcctgtgccaataatgttccagctccagtcttatctaacggtgcagcggctaatcaagctattagtaccacttcagtttcctcacagaatgctatacagcctctctttgtatctccacctacacacggcaggccagtgattgcctcaccatcctatccatgccattctgctattcctcatgctggtgcctctctaccaccaccaccaccaccaccaccaccaccaccaccaccaccacctcctcctcctcctcctcctcctcctcctcctcctcctgctcttgatgtgggagagacttcaaacttacaaccaccaccaccactaccacctccaccttattcctgtgatccaagcggcagtgatttgcctcaagatacaaaagttttgcagtactatttcaatctaggattgcagtgctattaccacagctactggcactccatggtctatgtgccacagatgcagcagcagcttcatgtagagaattatccagtctatactgagccacctctggtagatcaaaccgttcctcaatgctacagtgaggtgaggagagaagatggcatacaggcggaagcatcagcaaatgatacttttccgaatgctgattcttcatctgtccctcatggagcagtctattatccagtaatgtcagatccctatgggcagccacctttgccaggttttgactcctgccttccggttgtgccagattattcctgtgttcccccctggcatccagttggtacagcatatggtggttcttctcaaattcatggtgctataaatcctgggccaattggctgtattgctccatctcccccagcttctcattatgtacctcagggtatgtaagatccagcagtatgaagtattcttgcactgccattttcttgctgtttttgtttttaaaaagtattttatgttagtggttaaatgatttaggtgattagtgtttactattgtatttgtctttaaaattattttatcttttgatttaaaatagtactttaaaattaaggggtattattttgggctgtgactaaggaaattgagatggatgtacaactagccccatattgagcatacttcattgtattcagctgttttcc

SEQ ID NO: 106527 - DNA, 9367 bp, Homo sapiens
  Payload ID: 919
  Gene Symbol: ALG14
  Gene Name: ALG14, UDP-N-acetylglucosaminyltransferase subunit
  Uniprot ID: Q96F25
  ENST ID: ENST00000370205
  CDS Start-End: 48-698
gacagcggctggtccccggaagttggacgcatgcgccgtttctctgcatggtgtgcgttctcgttctagctgcggccgcaggagctgtggcggttttcctaatcctgcgaatatgggtagtgcttcgttccatggacgttacgccccgggagtctctcagtatcttggtagtggctgggtccggtgggcataccactgagatcctgaggctgcttgggagcttgtccaatgcctactcacctagacattatgtcattgctgacactgatgaaatgagtgccaataaaataaattcttttgaactagatcgagctgatagagaccctagtaacatgtataccaaatactacattcaccgaattccaagaagccgggaggttcagcagtcctggccctccaccgttttcaccaccttgcactccatgtggctctcctttcccctaattcacagggtgaagccagatttggtgttgtgtaacggaccaggaacatgtgttcctatctgtgtatctgcccttctccttgggatactaggaataaagaaagtgatcattgtctacgttgaaagcatctgccgtgtagaaacgttatccatgtccggaaagattctgtttcatctctcagattacttcattgttcagtggccggctctgaaagaaaagtatcccaaatcggtgtaccttgggcgaattgtttgacaaatggcaactgacttctttagaattttgcagttaacagtagtatgtactcaaattggggggaaaaaaaccctacatgtttcttgtaaaggcgtctgacagtcctgagaattattgatggtaaggaataaaaaatgtacagatgactcagtgaagaaactgaggcttctcttatgaaacaaacattgataaacgtaactactaaatgtttatgcctctgtaaaccaaatttcttttctagataaaaatatgtattactacctgcaaattttcttctggctgttttagtagtattttttttacagaactaaatatagagtttgtatgattagtaatatttcctgtcctacagctttttttttttttttttttttttgtaaagtattctgcattgtaaaagaagagagaaaaaaagtatttctgagttttggttcagatacaaaaggctttatttcctgtatggaaacagtgatgtccccagtgaatcctttcagcataaaggaagcagttatattaaattggcttcatgacaatttgcactccacaagcctccagaaccttgagcataaaccagtatcattttttgtacttcagtcttgctttttgagtagttggccttaatacagagtatcttttaaaatctcttgtttaggccggcatgacggctcacacctgtaatcccagcaccttgggaggctaaggcgggtggatcactggaggtcaggagtttgacaccagcctgaccaacatggtgaaaccttgtctctactaaaaatacaaaaattagtcaggcgtggtggcacatgcctgtaatcccagctactcgggaggctgaggcaggagaatcgcttgaacccgggaggcagaggctgcagtgagccgagattgcaccattgcactccatccagcctgggtgacaagagtgaaacttcgtctcaaaaaaaaaaaaaaaaaacaaaactcaatgatgtagggactgttattattcccattttacagatgacttgtccaagatcacatgagtagtaagtagcaaagccagaattcaagttcaggtaaacctgacttcttagtggggccagtttcacgggtgtgtggcctgtgcagtcacacagagttctgcactgaagagggcctccacttggtttaatgttctgctgtgactctcttgaacttctgaatatttttttaaacaatgaacttatattttagaccctctgaattctttcgctggtcctgcttgagactgtgtttctagtggtgccatgtctactggaatagaagtacaatagttagtgcagtgcctggcccaggagctcctcaaaaacaggaattccatttccttccctctaacctctgcttctttaacaaagcagccaaaaaaaaaaaaaacaaaacaaaataaaaaacagaaaagagaagattctctcctgtagtatatataggttttttcctcttaaatcttttgctttataagtatgatataaatctaataaatagtgattagtgaagtgattgaatttttgtgaaaagagacatgattatccacgatcatgtaagattaaaatcctgaggctgatccagccttttttcttttttttttttttaaaaaaaaaaagcaaaaaaaacaaaaaaactgtcttctctgaatcatgtaacaggcgcatctgtcagccggacatcttcctaggtttttggctggagaaatgtgtagccgaaggtgtctcagaatggtgagaacactttgctgtctggatttagtgggcctggggcagccaaatgatagttcattgtgctttgattttaatcctcaaatctcagtcactggttgcttccctggagtatcagagcgtattagtatcatacaaccaggggctgaggtgaaataagccttgactgttctagaaagaaagtgattttttcagggacaacagcatctgcattttattgctgtttaaggctttctctgctctgtactttgttccctgagtggcactaggtaaatgaatggtaagggaaagtgaactgcgtttagtgaatgcctctctgtgctgtggggcagcttccctgggcccccacaggtaatcctgctgcagaggcttctgtcaggtcagagcttaacaaagatcagaccagagagaattgtagaaaagatgctataattttttccagaaacatatgtcccagatgttttgcagagccttaacttaagacagtggttagcctggaatgtcagagaaagaatgtgtatgtgttatatcaccaaaagtttagaaatgttatatctttcataggttcaggctgctgtgtactcattcagagccaggctgagacatgtgttattgcatcttcctgatcattcagattactctggtaaacaagtgcatgctctgctgtgtgttactgttatggctaatttgagtcctcaaggtcccattagcagagggggctggtggcacaatttccctgctgtgcatttctgtgacattcagaaagatagtgcgccagtcccaactcaaactgaagaagatgagtagctagcttgtcccttccagtttctcttagaacactctgaatgcaacttttactgtaggagactgttcatgaaaaaattaattgaatcagtcttcaaatgagaggcagggaaaccacacatcctgcccacacctacttccctggaagatttctatctacagtccagctatcctaaaaggtctcagtagcttgccaggtcagaatgtctaactgtttcaaaaaggatgcccaaaaatcatgacaggaaactttagcctggaacgaagagtgctatgaaaccgtgtcaacaagaggagtggtgacaattgtgagttgaatagcaagatgtccttgctaggaaggagatgacccaagcttccccttataaaagcaacttggaacacatcattctacctttcaaagatacatggtaagttaaaattgagaaacgtacccctttactatacagttccttgggttgaatgagtgcttttttttttttctgaaaagccccatcccccaaaaggcatttgatagcaatgtattaagcaccttttaccaacaataagaacatcattgtaagtgttaaagaaaattgtccttctccctacaggtcagcgtttgagcctcacggggtttcttcccatgacttcagccctggcgcacaatgagcagacacccaaatcttgtccgccttcaacattcttttgttagggcccatccctctagcactctaaaaacaaatcatctacaactgtgttcctgctgcccactcattttaaacatgaatttgacatagctcctccttttcgcactggagtagttaactaatgctagcccactagcttctatcatgtccctcaagcaacaaactttgggatcatttttgctttttcactctttctttacccaattataattggttgccttttttgtttcattatccccagaattttctcgtcttcctcttctctccttgaaattacttttactgttcctctcctttgtcatcacctattgattctgcctttgacttagttcatatctaccctttccttttcagtcccatagttacaacctaagccagctcttcaacaaaaatttcttgcttgatgagcaagttttattgaggaactgaggaaacacctgtggaaggaacaaatgaatgattttgttaattacttatgtttgtcttcagagacttcccctcatgctagttctgtatacttgtttcacttttttctttcttttttttttttttttttttttttcgagacagtctcgctccatcgcccaggctggagtgcagtggtgcaatctcaccttactggctcactgtaacctctgcctcctggcttcaagcgattcttgtgcctcagcctcccgagtagctgggattacaggcatgcaccaccacacctggctaatttttgtatttttagtagagacagggttttaccatgttggccaggctgatcttgaactcccaacctcaggtgatccacccatcttggcctcccaaagtgctggaattacaggtgtaagccacacgtccggcccttgttccactttttataatatttacaccacagagaggttaagtaatttattaaagattatagaactagaaagtgacaaagctcagatttgaaccaaggcattctagctccagccaggcttaccttaatagctacgttaggtgtttttttttttttttaaagaaaaaagaaaaaatgtcctcaaaaggaaataaatggggtaacagggtactatgacggagtagaaggtagttggtgttctagatagggaaatcaggaaaggcctttctaagaaagtggtattttacctgagttccaaaggataatgccttaaatatttgtcctccttctacttcactcccaacttagattttgccccacccacaaagtctttgtcttcatttagcttgagcaaattctctaaataactctgtgacatagccacccataccaaaggttagtgctgagttatataccatcgaattgcagtccttgttcttagaaacacctgtggaaggaataatgaatgctattgctgattatttatgtttgtcttcagggactgtacctcattctagttttgtatccttgttccacttttgatagtatttacaccacagctctgtacaaaacataggcactaattaaatacataaattatttggccaggcatggtggctcacgcctgtaatcccagcactttgggaggccaaggtgggtgtatcacaaggtcaggagttcaagaccagcctggccaagatggtgaaaccccatctctactaaaaatacaaaaaatttgccggcgtggtggcgggcgcctgtaattccagctacttgggaggctgaggcaaataattgcttgaaccagggaggtggaggttgcagtgaactgagatggcaccactgcactccagcctgggggacagagcgagactccacctcaaaaaaaaaaaaagaaaaaaattatagcttcagacttgtctaggctcacttcagttatattttatctagaccagtgcttcacaaacgttttgatctcaggacctcattatactaaaaaattattgaaaactggctgggcacagtgtttcacacttgtaatcccagcactttgggaggccgaggtggatggatcacctgagcccaggagtttgagatcagcctgggcaacacagtaaaaccccatctctacaaaaaaaatacaaaaattagccaggcatggtgatgcacacctatagttccagctacttgggaggctgaggtggtaggatcacttgagcctgggaggtggaggttgcagtgagccgagatcatggcactgcactccagcctgggtgacagagtgagaccctgcctcagaaaaaaaaaaaatatatcccaatgagcttttgtttgtgtgagctatatttgtcaatatttaccattgtagaaactagacaaaaattttaaacgcaagaatataaaaggacatattccactggctgtcagaacaatatcatcacacatcttgtagcatctggaaaactataccatcataagaatgacaaggaaaaggcaaataacatcttaatattactatgaaaatagttttgacctcataaacccctaaaaacgtcttgaagactccccaggaccttggaccacattttaagaactgctgctttacataatgtcacatcagcgaattcatctcttctttttttaaaataagaggcagggtttcactatgttgtccagactggtctcaaactcctggtctcaaggaatcctcctatcttggccttccaaagtgctggaatcacaggcatgcggcactgcgcccggcctatctcctctttagtcagtcagtgatctgtgtattagttttatcgctgtgtaaaaaattgccacacatatattggcttaaaacaatacattatctctgtaggttagaaatccaggcaaagaaggttttctgctcaagatctcaaaaggctgaaatcaagatgatggccaaggctgagttctgatctgcaactctgaatccttttcagataccttcagatggttgttggcagaattcagttccttgcagttgtaggatttgtggtggcctgcttcctatcttttaaggactcacatgactgagtcagtgtaatctcccttttgattaattcaaggtcaactgattaggatcataattacgtcccttttgccatgttaatgtaacataatcagaggaatgacatgtcatgatattcacagatcccacccatactaacggatagtagattatccagggcatgtaaatcagggggtggaatattaggggacatcttttttttttttctttaagacggagtctcactctgtcacccaggctggagtgctgtggtgcaatctcaactcactgcaacctctacctccctggttcaagcgattctcgtgcctcagccgcctgactagctgggatttcaggagtgcaccaccagcccggctaacttttgtatttttagcagagatggggtttcaccatgttggccgggctggtctcgaactcctgggctcaagtgatccgcccacctcggcttcccaaagtgctggaattacaggcgtcagccaccatgcccgttctgggggccatctgagacttctgccaaccacaatcagctagatgttttttgttttgttttgaaaaaataataataataacctttcacttgggccaccaaactcctaccttagtatccaagttctctaatttttttttaatatgggaaatccacatctcccaaactctatcccttttctggcaagttacttgacctttctgtaaaataagcataatgtacctgcgttagagttgtagggagcactaaacattcagatgatgtatgtacagtgtttagcacagagcctgctaaatagtaagccctcaagccctcagtcacatttgtctccatcagtggtagctcccctggtgtgttaaggaggctcttctttcttttttttttttttttttttttttgagacagagtctcgctctgttgcccaggctgaagtgcagtggcgcgatctcggctcactgcaagctccgcctcctgggttcacgccattgtcctgcctcagcctcccgagtagctgggattacaggcgcctgtcaccacgcccggctaattttttttttgtttgttttttttgtatttttagtagagacagggtttcactgtgttagccaggatggtctccatctcctcacctcgtgatctgcccgcctcggcctcccaaagtgctgggattacaggcgtgagccactgcgcccggccaggaggctctttttaaactaagggcagcaaccccctagggtggctatagtccaagaaaacccagaaaatacatgctgccaaggatttggagaaattggagccctcctacattgctggtaggaatgtagaatggtgcagcagctgtggaaaacagttcagcagtttcacaaaaatcaaacatagggttatcatatgacccagaaattctacccataggtgtataccctggagaattaaaaacatgtatttacacaaaaacttatatgttcgcagcagcgttattcataataacccgaaagtagaaacaacccaaatgctctactaatgaacagataaacaaaatgtggtatatccatatagtggaatattactcgatcacacaaaggaatgaagtactaatacatgctacagtgtggatgaaccttgtaaacagtaggctaagttacagaagccagccacaaaagacaacaaatgcatgattctattcatatgaaatgtccagagtaggcaagtccatagacagaaagtagcttagtggtttccaggggcagtgagaaggggaaatggagggcaactcctaatgggtatgaggcttcttttggaggtgatgaaaatgttctggaattcgacagtggtgatggttgtacatctctgtgaatatactaaaagccactgaattgtatactgggtgaattttatggtatctgtagacattccaattgacagtcacatcttagtatagactttgagtcatctcactggaggcactagacatgcaagaggagaagtctccagattattccagccctgccatttgagtcactccaggctttctggtcttcccagctgaggctcagacaccttggaagagagaaaagctctcccttctgtgccctgtgatttgctgatccacagagttcataggcatgattaaatggtagtagttttccaccacgaagttttggaataatttgtcacaaagcaataggtaattagaaaaataacctttcagaaggagacagtttctccaaagcttgggtactttcgcttaatattaaaagaggaagaaattttttgcctgccaggcaaaaggcagaagatgtatttctacaccatggataggaaaatgattttttttcctcctttctccttggcctgcatgcagcagtgaaaaagaaaccaatggattcttttaaatctttaaccatatgcagatgaataagcacatggttggacttgattcctaatctcttttcctttcctgtataactgagatttttttccactctaataaacttgagcatttaaacag

SEQ ID NO: 106528 - DNA, 1627 bp, Homo sapiens
  Payload ID: 920
  Gene Symbol: ALG2
  Gene Name: ALG2, alpha-1,3/1,6-mannosyltransferase
  Uniprot ID: Q9H553
  ENST ID: ENST00000319033
  CDS Start-End: 94-1065
caggccatttgcatcccactgtccttgtgttcggagccaggccacaccgtcctcagcagtgtcatgtgttaaaaacgccaagctgaatatatcatgcccctattaaaacttgtacatggctccccattggtttttggagaaaagttcaagctttttaccttggtgtctgcctgtatcccagtgttcaggctggctagacggcggaagaagatcctattttactgtcacttcccagatctgcttctcaccaagagagattcttttcttaaacgactatacagggccccaattgactggatagaggaatacaccacaggcatggcagactgcatcttagtcaacagccagttcacagctgctgtttttaaggaaacattcaagtccctgtctcacatagaccctgatgtcctctatccatctctaaatgtcaccagctttgactcagttgttcctgaaaagctggatgacctagtccccaaggggaaaaaattcctgctgctctccatcaacagatacgaaaggaagaaaaatctgactttggcactggaagccctagtacagctgcgtggaagattgacatcccaagattgggagagggttcatctgatcgtggcaggtggttatgacgagagagtcctggagaatgtggaacattatcaggaattgaagaaaatggtccaacagtccgaccttggccagtatgtgaccttcttgaggtctttctcagacaaacagaaaatctccctcctccacagctgcacgtgtgtgctttacacaccaagcaatgagcactttggcattgtccctctggaagccatgtacatgcagtgcccagtcattgctgttaattcgggtggacccttggagtccattgaccacagtgtcacagggtttctgtgtgagcctgacccggtgcacttctcagaagcaatagaaaagttcatccgtgaaccttccttaaaagccaccatgggcctggctggaagagccagagtgaaggaaaaattttcccctgaagcatttacagaacagctctaccgatatgttaccaaactgctggtataatcagattgtttttaagatctccattaatgtcatttttatggattgtagacccagttttgaaaccaaaaaagaaacctagaatctaatgcagaagagatcttttaaaaaataaacttgagtcttgaatgtgagccactttcctatataccacacctccctgtccacttttcagaaaaaccatgtcttttatgctataatcattccaaattttgccagtgttaagttacaaatgtggtgtcattccatgttcagcagagtattttaattatattttctcgggattattgctcttctgtctataaattttgaatgatactgtgccttaattggttttcatagtttaagtgtgtatcattatcaaagttgattaatttggcttcatagtataatgagagcagggctattgtagttcccagattcaatccaccgaagtgttcactgtcatctgttagggaatttttgtttgtcctgtctttgcctggatccatagcgagagtgctctgtattttttttaagataatttgtatttttgcacactgagatataataaaaggtgtttatc

SEQ ID NO: 106529 - DNA, 1880 bp, Homo sapiens
  Payload ID: 920
  Gene Symbol: ALG2
  Gene Name: ALG2, alpha-1,3/1,6-mannosyltransferase
  Uniprot ID: Q9H553
  ENST ID: ENST00000476832
  CDS Start-End: 63-1313
agcgcggagcttgcgcagaagacccccatcagggtgcggggtgcagttgcggctccagggccatggcggaggagcagggccgggaacgggactcggttcccaagccgtcggtgctgttcctccacccagacctgggcgtgggcggcgctgagcggctggtgttggacgcggcgctggcgctgcaggcgcgcgggtgtagcgtgaagatctggacagcgcactacgacccgggccactgtttcgccgagagccgcgagctaccggtgcgctgtgccggggactggctgccgcgaggcctgggctggggcggccgcggcgccgccgtctgcgcctacgtgcgcatggttttcctggcgctctacgtgctgttcctcgccgacgaggagttcgacgtggtagtgtgcgaccaggtgtctgcctgtatcccagtgttcaggctggctagacggcggaagaagatcctattttactgtcacttcccagatctgcttctcaccaagagagattcttttcttaaacgactatacagggccccaattgactggatagaggaatacaccacaggcatggcagactgcatcttagtcaacagccagttcacagctgctgtttttaaggaaacattcaagtccctgtctcacatagaccctgatgtcctctatccatctctaaatgtcaccagctttgactcagttgttcctgaaaagctggatgacctagtccccaaggggaaaaaattcctgctgctctccatcaacagatacgaaaggaagaaaaatctgactttggcactggaagccctagtacagctgcgtggaagattgacatcccaagattgggagagggttcatctgatcgtggcaggtggttatgacgagagagtcctggagaatgtggaacattatcaggaattgaagaaaatggtccaacagtccgaccttggccagtatgtgaccttcttgaggtctttctcagacaaacagaaaatctccctcctccacagctgcacgtgtgtgctttacacaccaagcaatgagcactttggcattgtccctctggaagccatgtacatgcagtgcccagtcattgctgttaattcgggtggacccttggagtccattgaccacagtgtcacagggtttctgtgtgagcctgacccggtgcacttctcagaagcaatagaaaagttcatccgtgaaccttccttaaaagccaccatgggcctggctggaagagccagagtgaaggaaaaattttcccctgaagcatttacagaacagctctaccgatatgttaccaaactgctggtataatcagattgtttttaagatctccattaatgtcatttttatggattgtagacccagttttgaaaccaaaaaagaaacctagaatctaatgcagaagagatcttttaaaaaataaacttgagtcttgaatgtgagccactttcctatataccacacctccctgtccacttttcagaaaaaccatgtcttttatgctataatcattccaaattttgccagtgttaagttacaaatgtggtgtcattccatgttcagcagagtattttaattatattttctcgggattattgctcttctgtctataaattttgaatgatactgtgccttaattggttttcatagtttaagtgtgtatcattatcaaagttgattaatttggcttcatagtataatgagagcagggctattgtagttcccagattcaatccaccgaagtgttcactgtcatctgttagggaatttttgtttgtcctgtctttgcctggatccatagcgagagtgctctgtattttttttaagataatttgtatttttgcacactgagatataataaaaggtgtttatcataaa

SEQ ID NO: 106530 - DNA, 2966 bp, Homo sapiens
  Payload ID: 920
  Gene Symbol: ALG2
  Gene Name: ALG2, alpha-1,3/1,6-mannosyltransferase
  ENST ID: ENST00000238477
  CDS Start-End: 49-465
gcagaagacccccatcagggtgcggggtgcagttgcggctccagggccatggcggaggagcagggccgggaacgggactcggttcccaagccgtcggtgctgttcctccacccagacctgggcgtgggcggcgctgagcggctggtgttggacgcggcgctggcgctgcaggcgcgcgggtgtagcgtgaagatctggacagcgcactacgacccgggccactgtttcgccgagagccgcgagctaccggtgcgctgtgccggggactggctgccgcgaggcctgggctggggcggccgcggcgccgccgtctgcgcctacgtgcgcatggttttcctggcgctctacgtgctgttcctcgccgacgaggagttcgacgtggtagtgtgcgaccaggccatttgcatcccactgtccttgtgttcggagccaggccacaccgtcctcagcagtgtcatgtgttaaaaacgccaagctgaatatatcatgcccctattaaaacttgtacatggctccccattggtttttggagaaaagttcaagctttttaccttggtgtctgcctgtatcccagtgttcaggctggctagacggcggaagaagatcctattttactgtcacttcccagatctgcttctcaccaagagagattcttttcttaaacgactatacagggccccaattgactggatagaggaatacaccacaggcatggcagactgcatcttagtcaacagccagttcacagctgctgtttttaaggaaacattcaagtccctgtctcacatagaccctgatgtcctctatccatctctaaatgtcaccagctttgactcagttgttcctgaaaagctggatgacctagtccccaaggggaaaaaattcctgctgctctccatcaacagatacgaaaggaagaaaaatctgactttggcactggaagccctagtacagctgcgtggaagattgacatcccaagattgggagagggttcatctgatcgtggcaggtggttatgacgagagagtcctggagaatgtggaacattatcaggaattgaagaaaatggtccaacagtccgaccttggccagtatgtgaccttcttgaggtctttctcagacaaacagaaaatctccctcctccacagctgcacgtgtgtgctttacacaccaagcaatgagcactttggcattgtccctctggaagccatgtacatgcagtgcccagtcattgctgttaattcgggtggacccttggagtccattgaccacagtgtcacagggtttctgtgtgagcctgacccggtgcacttctcagaagcaatagaaaagttcatccgtgaaccttccttaaaagccaccatgggcctggctggaagagccagagtgaaggaaaaattttcccctgaagcatttacagaacagctctaccgatatgttaccaaactgctggtataatcagattgtttttaagatctccattaatgtcatttttatggattgtagacccagttttgaaaccaaaaaagaaacctagaatctaatgcagaagagatcttttaaaaaataaacttgagtcttgaatgtgagccactttcctatataccacacctccctgtccacttttcagaaaaaccatgtcttttatgctataatcattccaaattttgccagtgttaagttacaaatgtggtgtcattccatgttcagcagagtattttaattatattttctcgggattattgctcttctgtctataaattttgaatgatactgtgccttaattggttttcatagtttaagtgtgtatcattatcaaagttgattaatttggcttcatagtataatgagagcagggctattgtagttcccagattcaatccaccgaagtgttcactgtcatctgttagggaatttttgtttgtcctgtctttgcctggatccatagcgagagtgctctgtattttttttaagataatttgtatttttgcacactgagatataataaaaggtgtttatcataaaaaagaaacagtattagattttggtctccataatctattttggtattgttacgaacatggatatgacaaccaaactggaaatcagaacactagggtaaagtggatattgaaatgaagcaagaatattgtcacacatgtgttgtgcatcttgtttagggtatatttcttaatgtcatctaggtcattagttttgttaatatttgtgttgtcttgaccaagctcctactaagtataggacacaaatgttttttatcttccaaggcctggctcaaatgccactgctgcaaagctttctttgaccctctggccacctcccaagccagaagttatcttccccctccatgtactctagccttttcatgacactgatattttcgtgacactgacttatagttcactgtttacctgttggtctaacagcaaatcataaacagtagttttcaacatacttctaaggctaaattcatttccagaagtagcaaagcttactagccaaaggctccacatttatcaactcttaagagctagacttgagagcctaacagcctatatgattttgtgtaaattgatctctatacctcagcttcttcatctgcaaagtgagataattgtactattctactttcctcatagtgcggttataacagattatgataatattacaaagtacttaatacttggcatatagtatatatattagctattagtattttgcaatttggggatattgaaaattagaaattgcatgttagttcatgctgcactaccatattgttcttttggggctcttcaatgggtgaaattccattttacagtttatcatgtgcatctgtatcacaggagtattttggcaaaatgattctgtaccaaaaaggagtactataaaatgagggtgccaaatatattgagtcttttatgggattaaaagttctgttgcattcc

SEQ ID NO: 106531 - DNA, 1528 bp, Homo sapiens
  Payload ID: 921
  Gene Symbol: ALG3
  Gene Name: ALG3, alpha-1,3- mannosyltransferase
  Uniprot ID: Q92685
  ENST ID: ENST00000397676
  CDS Start-End: 32-1348
ggtgggcccacacaagcggcgcaccgttaagatggcggctgggctgcggaaacgcggccggtccggttccgcggcccaggcagagggactctgcaagcaatggctgcagcgcgcctggcaagagcggcgcctgctgctgcgggagccgcgctacacgctgctggtggccgcctgcctctgcctggcggaggtgggcatcaccttctgggtcattcacagggtggcatacacagagattgactggaaggcctacatggccgaggtagaaggcgtcatcaatggtacctatgactatacccaactgcagggtgacaccggaccacttgtgtacccagctggtttcgtgtacatctttatggggttgtactatgccaccagccgaggcactgacatccgcatggcccagaacatctttgctgtgctctacctggctaccttgctgcttgtcttcttgatctatcaccagacctgcaaggtacctcccttcgtctttttcttcatgtgctgcgcctcttaccgtgtccactccatctttgtgctgcggctcttcaatgacccagtggccatggtgctgctcttcctcagtatcaacctcctgctggcccagcgctggggctggggttgctgctttttcagcctggcagtctctgtgaagatgaatgtgctgctcttcgcccctgggttactgtttcttctcctcacacagtttggcttccgtggggccctccccaagctgggaatctgtgctggccttcaggtggtgctggggctgcccttcctgctggagaaccccagcggctacctgtcccgctcctttgaccttggccgccagtttctgttccactggacagtgaactggcgcttcctcccagaggcgctcttcctgcatcgagccttccacctggccctgttgactgcccacctcaccctgctcctgctgtttgccctctgcaggtggcacaggacaggggaaagtatcttgtcgctgctgagggatccctccaaaaggaaggttccaccccagccccttacacccaaccagatcgtttctaccctcttcacctccaacttcattggcatctgcttcagccgctccctccactaccagttctacgtctggtatttccacacactgccctacctcctgtgggccatgcctgcacgctggctcacacacctgctcaggttgttggtgctggggctcatcgagctctcctggaacacatacccttccacatcctgcagctctgctgccctgcacatatgccatgccgtcatcctgctgcagctctggctgggcccgcagcctttccccaagagcacccaacacagcaagaaagcccactgaagtccacccctttccctcaggacctgagtctaccctcaggacctggggttggttggactctgcccttccaaataaaccttgctaagtccaactctgtgcaacctacatggaggtgggggcagccgatgcctggtccaggctgtgagggacacgtatggagcagataaagaattcactcaa

SEQ ID NO: 106532 - DNA, 814 bp, Homo sapiens
  Payload ID: 921
  Gene Symbol: ALG3
  Gene Name: ALG3, alpha-1,3- mannosyltransferase
  ENST ID: ENST00000414845
  CDS Start-End: 1-317
ctgggctgcggaaacgcggccggtccggttccgcggcccaggcagagggactctgcaagcaatggctgcagcgcgcctggcaagagcggcgcctgctgctgcgggagccgcgctacacgctgctggtggccgcctgcctctgcctggcggaggtgggcatcaccttctgggtcattcacagggtggcatgtacccagctggtttcgtgtacatctttatggggttgtactatgccaccagccgaggcactgacatccgcatggcccagaacatctttgctgtgctctacctggctaccttgctgcttgtcttcttgatctatcaccagacctgcaagcctggcagtctctgtgaagatgaatgtgctgctcttcgcccctgggttactgtttcttctcctcacacagtttggcttccgtggggccctccccaagctgggaatctgtgctggccttcaggtggtgctggggctgcccttcctgctggagaaccccagcggctacctgtcccgctcctttgaccttggccgccagtttctgttccactggacagtgaactggcgcttcctcccagaggcgctcttcctgcatcgagccttccacctggccctgttgactgcccacctcaccctgctcctgctgtttgccctctgcaggtggcacaggacaggggaaagtatcttgtcgctgctgagggatccctccaaaaggaaggttccaccccagccccttacacccaaccagatcgtttctaccctcttcacctccaacttcattggcatctgcttcagccgctccctccactaccagttcta

SEQ ID NO: 106533 - DNA, 1452 bp, Homo sapiens
  Payload ID: 921
  Gene Symbol: ALG3
  Gene Name: ALG3, alpha-1,3- mannosyltransferase
  ENST ID: ENST00000411922
  CDS Start-End: 23-346
acacaagcggcgcaccgttaagatggcggctgggctgcggaaacgcggccggtccggttccgcggcccaggcagagggactctgcaagcaatggctgcagcgcgcctggcaagagcggcgcctgctgctgcgggagccgcgctacacgctgctggtggccgcctgcctctgcctggcggaggtgggcatcaccttctgggtcattcacagggtggcatgtacccagctggtttcgtgtacatctttatggggttgtactatgccaccagccgaggcactgacatccgcatggcccagaacatctttgctgtgctctacctggctaccttgctgcttgtcttcttgatctatcaccagacctgcaaggtacctcccttcgtctttttcttcatgtgctgcgcctcttaccgtgtccactccatctttgtgctgcggctcttcaatgacccagtggccatggtgctgctcttcctcagtatcaacctcctgctggcccagcgctggggctggggttgctgctttttcagcctggcagtctctgtgaagatgaatgtgctgctcttcgcccctgggttactgtttcttctcctcacacagtttggcttccgtggggccctccccaagctgggaatctgtgctggccttcaggtggtgctggggctgcccttcctgctggagaaccccagcggctacctgtcccgctcctttgaccttggccgccagtttctgttccactggacagtgaactggcgcttcctcccagaggcgctcttcctgcatcgagccttccacctggccctgttgactgcccacctcaccctgctcctgctgtttgccctctgcaggtggcacaggacaggggaaagtatcttgtcgctgctgagggatccctccaaaaggaaggttccaccccagccccttacacccaaccagatcgtttctaccctcttcacctccaacttcattggcatctgcttcagccgctccctccactaccagttctacgtctggtatttccacacactgccctacctcctgtgggccatgcctgcacgctggctcacacacctgctcaggttgttggtgctggggctcatcgagctctcctggaacacatacccttccacatcctgcagctctgctgccctgcacatatgccatgccgtcatcctgctgcagctctggctgggcccgcagcctttccccaagagcacccaacacagcaagaaagcccactgaagtccacccctttccctcaggacctgagtctaccctcaggacctggggttggttggactctgcccttccaaataaaccttgctaagtccaactctgtgcaacctacatggaggtgggggcagccgatgcctggtccaggctgtgagggacacgtatggagcagataaagaattcactcaagcagtcctaagaggcactttattgcataggatt

SEQ ID NO: 106534 - DNA, 967 bp, Homo sapiens
  Payload ID: 921
  Gene Symbol: ALG3
  Gene Name: ALG3, alpha-1,3- mannosyltransferase
  ENST ID: ENST00000446569
  CDS Start-End: 1-967
ggctgggctgcggaaacgcggccggtccggttccgcggcccaggcagagggactctgcaagcaatggctgcagcgcgcctggcaagagcggcgcctgctgctgcgggagccgcgctacacgctgctggtggccgcctgcctctgcctggcggaggtacctcccttcgtctttttcttcatgtgctgcgcctcttaccgtgtccactccatctttgtgctgcggctcttcaatgacccagtggccatggtgctgctcttcctcagtatcaacctcctgctggcccagcgctggggctggggttgctgctttttcagcctggcagtctctgtgaagatgaatgtgctgctcttcgcccctgggttactgtttcttctcctcacacagtttggcttccgtggggccctccccaagctgggaatctgtgctggccttcaggtggtgctggggctgcccttcctgctggagaaccccagcggctacctgtcccgctcctttgaccttggccgccagtttctgttccactggacagtgaactggcgcttcctcccagaggcgctcttcctgcatcgagccttccacctggccctgttgactgcccacctcaccctgctcctgctgtttgccctctgcaggtggcacaggacaggggaaagtatcttgtcgctgctgagggatccctccaaaaggaaggttccaccccagccccttacacccaaccagatcgtttctaccctcttcacctccaacttcattggcatctgcttcagccgctccctccactaccagttctacgtctggtatttccacacactgccctacctcctgtgggccatgcctgcacgctggctcacacacctgctcaggttgttggtgctggggctcatcgagctctcctggaacacatacccttccacatcctgcagctctgctgccctgcacatatgccatgccgtcatcctgctgcag

SEQ ID NO: 106535 - DNA, 1697 bp, Homo sapiens
  Payload ID: 921
  Gene Symbol: ALG3
  Gene Name: ALG3, alpha-1,3- mannosyltransferase
  ENST ID: ENST00000455059
  CDS Start-End: 456-1652
atcgtccagaccctgaatcctccggctgtactgccaagtcatttcctagggccgcactcaaggtgtcagactcacgtgggctcatcactgcgtcctctcatattttcaatatgaatgacttttatcaggaaatctgaaaattagtgaaaggttcatttttctcagcatccggaaggctcgaagggcaggcaggaggggcgcgaacaggggctttgccctcctggagagacagcatgaacacagatgttcccagcgcaggcgaaggagaatgctggcttcagcggttgtgggggaggtaggcaggaatgttgcttttctggacattcgttctaaattagcgcctgtgtacccagggctgggtataaactgaggagtaagacattgtccctgctcctatggagcgtggagtgcatcagaggagacaaatgcagaaaaattacattttagtggagtaaatgaagactggctactcggatcggcgcttagcctggtgggacgccaggcacgggaagcggaacctaagtgtcgaagacacagagattgactggaaggcctacatggccgaggtagaaggcgtcatcaatggtacctatgactatacccaactgcagggtgacaccggaccacttgtgtacccagctggtttcgtgtacatctttatggggttgtactatgccaccagccgaggcactgacatccgcatggcccagaacatctttgctgtgctctacctggctaccttgctgcttgtcttcttgatctatcaccagacctgcaaggtacctcccttcgtctttttcttcatgtgctgcgcctcttaccgtgtccactccatctttgtgctgcggctcttcaatgacccagtggccatggtgctgctcttcctcagtatcaacctcctgctggcccagcgctggggctggggttgctgctttttcagcctggcagtctctgtgaagatgaatgtgctgctcttcgcccctgggttactgtttcttctcctcacacagtttggcttccgtggggccctccccaagctgggaatctgtgctggccttcaggtggtgctggggctgcccttcctgctggagaaccccagcggctacctgtcccgctcctttgaccttggccgccagtttctgttccactggacagtgaactggcgcttcctcccagaggcgctcttcctgcatcgagccttccacctggccctgttgactgcccacctcaccctgctcctgctgtttgccctctgcaggtggcacaggacaggggaaagtatcttgtcgctgctgagggatccctccaaaaggaaggttccaccccagccccttacacccaaccagatcgtttctaccctcttcacctccaacttcattggcatctgcttcagccgctccctccactaccagttctacgtctggtatttccacacactgccctacctcctgtgggccatgcctgcacgctggctcacacacctgctcaggttgttggtgctggggctcatcgagctctcctggaacacatacccttccacatcctgcagctctgctgccctgcacatatgccatgccgtcatcctgctgcagctctggctgggcccgcagcctttccccaagagcacccaacacagcaagaaagcccactgaagtccacccctttccctcaggacctgagtctaccctcaggacctg

SEQ ID NO: 106536 - DNA, 1533 bp, Homo sapiens
  Payload ID: 921
  Gene Symbol: ALG3
  Gene Name: ALG3, alpha-1,3- mannosyltransferase
  Uniprot ID: Q92685
  ENST ID: ENST00000445626
  CDS Start-End: 272-1444
ttcgaagaatcctccggctgggaaaactatcgtccagaccctgaatcctccggctgtactgccaagtcatttcctagggccgcactcaaggtgtcagactcacgtgggctcatcactgcgtcctctcatattttcaatatgaatgacttttatcaggaaatctgaaaattagtgaaaggttcatttttctcagcatccggaaggctcgaagggcaggcaggaggggcgcgaacaggggctttgccctcctggagagacagcatgaacacagatgttcccagcgcaggcgaaggagaatgctggcttcagcggttgtgggggagacacagagattgactggaaggcctacatggccgaggtagaaggcgtcatcaatggtacctatgactatacccaactgcagggtgacaccggaccacttgtgtacccagctggtttcgtgtacatctttatggggttgtactatgccaccagccgaggcactgacatccgcatggcccagaacatctttgctgtgctctacctggctaccttgctgcttgtcttcttgatctatcaccagacctgcaaggtacctcccttcgtctttttcttcatgtgctgcgcctcttaccgtgtccactccatctttgtgctgcggctcttcaatgacccagtggccatggtgctgctcttcctcagtatcaacctcctgctggcccagcgctggggctggggttgctgctttttcagcctggcagtctctgtgaagatgaatgtgctgctcttcgcccctgggttactgtttcttctcctcacacagtttggcttccgtggggccctccccaagctgggaatctgtgctggccttcaggtggtgctggggctgcccttcctgctggagaaccccagcggctacctgtcccgctcctttgaccttggccgccagtttctgttccactggacagtgaactggcgcttcctcccagaggcgctcttcctgcatcgagccttccacctggccctgttgactgcccacctcaccctgctcctgctgtttgccctctgcaggtggcacaggacaggggaaagtatcttgtcgctgctgagggatccctccaaaaggaaggttccaccccagccccttacacccaaccagatcgtttctaccctcttcacctccaacttcattggcatctgcttcagccgctccctccactaccagttctacgtctggtatttccacacactgccctacctcctgtgggccatgcctgcacgctggctcacacacctgctcaggttgttggtgctggggctcatcgagctctcctggaacacatacccttccacatcctgcagctctgctgccctgcacatatgccatgccgtcatcctgctgcagctctggctgggcccgcagcctttccccaagagcacccaacacagcaagaaagcccactgaagtccacccctttccctcaggacctgagtctaccctcaggacctggggttggttggactctgcccttccaaataaaccttgctaagtcc

SEQ ID NO: 106537 - DNA, 904 bp, Homo sapiens
  Payload ID: 921
  Gene Symbol: ALG3
  Gene Name: ALG3, alpha-1,3- mannosyltransferase
  ENST ID: ENST00000423996
  CDS Start-End: 10-207
accgttaagatggcggctgggctgcggaaacgcggccggtccggttccgcggcccaggcagagggactctgcaagcaatggctgcagcgcgcctggcaagagcggcgcctgctgctgcgggagccgcgctacacgctgctggtggccgcctgcctctgcctggcggagacacagagattgactggaaggcctacatggccgaggtagaaggcgtcatcaatggtacctatgactatacccaactgcagggtgacaccggaccacttgtgtacccagctggtttcgtgtacatctttatggggttgtactatgccaccagccgaggcactgacatccgcatggcccagaacatctttgctgtgctctacctggctaccttgctgcttgtcttcttgatctatcaccagacctgcaaggtacctcccttcgtctttttcttcatgtgctgcgcctcttaccgtgtccactccatctttgtgctgcggctcttcaatgacccagtggccatggtgctgctcttcctcagtatcaacctcctgctggcccagcgctggggctggggttgctgctttttcagcctggcagtctctgtgaagatgaatgtgctgctcttcgcccctgggttactgtttcttctcctcacacagtttggcttccgtggggccctccccaagctgggaatctgtgctggccttcaggtggtgctggggctgcccttcctgctggagaaccccagcggctacctgtcccgctcctttgaccttggccgccagtttctgttccactggacagtgaactggcgcttcctcccagaggcgctcttcctgcatcgagccttccacctggccctgttgactgcccacctcaccctgctcctgctgtttgccctctgcaggtggcacag

SEQ ID NO: 106538 - DNA, 1154 bp, Homo sapiens
  Payload ID: 922
  Gene Symbol: ALG5
  Gene Name: ALG5, dolichyl-phosphate beta-glucosyltransferase
  Uniprot ID: Q9Y673
  ENST ID: ENST00000239891
  CDS Start-End: 68-1042
gggtcgcgcgggcgcgcttccgcctgtgtggaggtgcgggattgggcgggctgccacggcatggagaatggctccgcttctgttgcagctggcggtgctcggcgcggcgctggcggccgcagccctcgtactgatttccatcgttgcatttacaactgctacaaaaatgccagcactccatcgacatgaagaagagaaattcttcttaaatgccaaaggccagaaagaaactttacccagcatatgggactcacctaccaaacaactttctgtcgttgtgccttcatacaatgaagaaaaacggttgcctgtgatgatggatgaagctctgagctatctagagaagagacagaaacgagatcctgcgttcacttatgaagtgatagtagttgatgatggcagtaaagatcagacctcaaaggtagcttttaaatattgccagaaatatggaagtgacaaagtacgtgtgataaccctggtgaagaatcgtggaaaaggtggagcgattagaatgggtatattcagttctcgaggagaaaagatccttatggcagatgctgatggagccacaaagtttccagatgttgagaaattagaaaaggggctaaatgatctacagccttggcctaatcaaatggctatagcatgtggatctcgagctcatttagaaaaagaatcaattgctcagcgttcttacttccgtactcttctcatgtatgggttccactttctggtgtggttcctttgtgtcaaaggaatcagggacacacagtgtgggttcaaattatttactcgagaagcagcttcacggacgttttcatctctacacgttgaacgatgggcatttgatgtagaactactgtacatagcacagttctttaaaattccaatagcagaaattgctgtcaactggacagaaattgaaggttctaaattagttccattctggagctggctacaaatgggtaaagacctactttttatacgacttcgatatttgactggtgcctggaggcttgagcaaactcggaaaatgaattaggttgtttgcagtcttcagttgtgttcttatgcttcagtgtcacatttcatttcatttgaaactaaaattttaagtaaagctgaaataaacttcttgtcattgtctgcctttt

SEQ ID NO: 106539 - DNA, 1119 bp, Homo sapiens
  Payload ID: 922
  Gene Symbol: ALG5
  Gene Name: ALG5, dolichyl-phosphate beta-glucosyltransferase
  Uniprot ID: Q9Y673
  ENST ID: ENST00000443765
  CDS Start-End: 68-952
gggtcgcgcgggcgcgcttccgcctgtgtggaggtgcgggattgggcgggctgccacggcatggagaatggctccgcttctgttgcagctggcggtgctcggcgcggcgctggcggccgcagccctcgtactgatttccatcgttgcatttacaactgctacaaaaatgccagcactccatcgacatgaagaagagaaattcttcttaaatgccaaaggccagaaagaaactttacccagcatatgggactcacctaccaaacaactttctgtcgttgtgccttcatacaatgaagaaaaacggttgcctgtgatgatggatgaagctctgagctatctagagaagagacagaaatatggaagtgacaaagtacgtgtgataaccctggtgaagaatcgtggaaaaggtggagcgattagaatgggtatattcagttctcgaggagaaaagatccttatggcagatgctgatggagccacaaagtttccagatgttgagaaattagaaaaggggctaaatgatctacagccttggcctaatcaaatggctatagcatgtggatctcgagctcatttagaaaaagaatcaattgctcagcgttcttacttccgtactcttctcatgtatgggttccactttctggtgtggttcctttgtgtcaaaggaatcagggacacacagtgtgggttcaaattatttactcgagaagcagcttcacggacgttttcatctctacacgttgaacgatgggcatttgatgtagaactactgtacatagcacagttctttaaaattccaatagcagaaattgctgtcaactggacagaaattgaaggttctaaattagttccattctggagctggctacaaatgggtaaagacctactttttatacgacttcgatatttgactggtgcctggaggcttgagcaaactcggaaaatgaattaggttgtttgcagtcttcagttgtgttcttatgcttcagtgtcacatttcatttcatttgaaactaaaattttaagtaaagctgaaataaacttcttgtcattgtctgccttttgataattttaaagaaataactttccataagtaaaaaattatatatctctttggat

SEQ ID NO: 106540 - DNA, 1895 bp, Homo sapiens
  Payload ID: 923
  Gene Symbol: ALG6
  Gene Name: ALG6, alpha-1,3-glucosyltransferase
  ENST ID: ENST00000263440
  CDS Start-End: 209-1738
ggatacttctacatagacataatcaagttttgactatttggaaaccaagcatcattaaaattctctcaaactcctaattgcgaagaatcgataacatttcaagaagtgataacatttctctgaacaagaaaagaagtgattgaccacgttttaaaagtactctggcactggtgctgtgttttcttcccctccctaaatttgaagaactatggagaaatggtacttgatgacagtagtggttttaataggactaacagtacgatggacagtgtctcttaattcttattcaggtgctggtaaaccgcctatgtttggtgattatgaagctcagagacactggcaagaaataacttttaatttaccggtcaaacaatggtattttaacagcagtgataacaatttacagtattggggattggattacccacctcttacagcttatcatagtctcctatgtgcatatgtggcaaagtttataaatccagactggattgctctccatacatcacgtggatatgagagtcaggcacataagctcttcatgcgtacaacagttttaattgctgatctgctgatttacatacctgcagtggttttgtactgttgttgcttaaaagaaatctcaactaagaaaaagattgctaatgcattatgcatcttgctgtatccaggccttattcttatagactatggacattttcagaacatatataattctgtgagtcttggctttgctttgtggggtgttcttggaatatcttgtgactgcgacctcctagggtcactggcattttgcttagctataaattataaacagatggaactttaccacgccttgccatttttttgctttttacttggcaagtgttttaaaaaaggcctcaaaggaaaggggtttgtgttgctagttaagctagcttgtattgttgtggcttccttcgttctctgctggctgccattctttacagaaagggaacaaaccctgcaggttctaagaagactcttcccggttgatcgtggattatttgaggataaagtagccaatatttggtgcagcttcaatgtctttctgaagattaaggatattttgccacgtcacatccaattaataatgagcttttgttctacgtttttgagcctgcttcctgcatgcataaaattaatacttcagccctcttccaaaggattcaaatttacactggttagctgtgcgctatcattctttttattttctttccaagtacatgaaaaatccattctcttggtgtcactaccagtctgcttagttttaagtgaaattccttttatgtctacttggtttttacttgtgtcaacatttagtatgctacctcttctattgaaggatgaactcctaatgccctctgttgtgacaacaatggcattttttatagcttgtgtaacttccttttcaatatttgaaaagacttctgaagaagaactgcagttgaaatccttttccatttctgtgaggaaatatcttccatgttttacatttctttccagaattatacaatatttgtttcttatctcagtcatcactatggtgcttctgacgttgatgactgtcacactggatcctcctcagaaactaccggacttgttttctgtattggtgtgttttgtatcttgcttgaacttcctgttcttcttggtatactttaacattattattatgtgggattccaaaagtggaagaaatcagaagaaaatcagctagctgtattcctaaacaaattgtttcctaaacaaatgtgaaaatgtgaacagtgctgaaaggttttgtgaactttttgctatgtataaatgaaattaccattttgagaaccatggaaccacaggaaaggaaatggtgaaaagtcattgttgtctacaca

SEQ ID NO: 106541 - DNA, 3371 bp, Homo sapiens
  Payload ID: 923
  Gene Symbol: ALG6
  Gene Name: ALG6, alpha-1,3-glucosyltransferase
  Uniprot ID: Q9Y672
  ENST ID: ENST00000371108
  CDS Start-End: 306-1829
cggaaggccggaggggcagtccgccgcgggggcgagcgcgcatgcgccttcctgggacccacggcaggcgcgaatcccagcggccggcgggcggcggggatacttctacatagacataatcaagttttgactatttggaaaccaagcatcattaaaattctctcaaactcctaattgcgaagaatcgataacatttcaagaagtgataacatttctctgaacaagaaaagaagtgattgaccacgttttaaaagtactctggcactggtgctgtgttttcttcccctccctaaatttgaagaactatggagaaatggtacttgatgacagtagtggttttaataggactaacagtacgatggacagtgtctcttaattcttattcaggtgctggtaaaccgcctatgtttggtgattatgaagctcagagacactggcaagaaataacttttaatttaccggtcaaacaatggtattttaacagcagtgataacaatttacagtattggggattggattacccacctcttacagcttatcatagtctcctatgtgcatatgtggcaaagtttataaatccagactggattgctctccatacatcacgtggatatgagagtcaggcacataagctcttcatgcgtacaacagttttaattgctgatctgctgatttacatacctgcagtggttttgtactgttgttgcttaaaagaaatctcaactaagaaaaagattgctaatgcattatgcatcttgctgtatccaggccttattcttatagactatggacattttcaatataattctgtgagtcttggctttgctttgtggggtgttcttggaatatcttgtgactgcgacctcctagggtcactggcattttgcttagctataaattataaacagatggaactttaccacgccttgccatttttttgctttttacttggcaagtgttttaaaaaaggcctcaaaggaaaggggtttgtgttgctagttaagctagcttgtattgttgtggcttccttcgttctctgctggctgccattctttacagaaagggaacaaaccctgcaggttctaagaagactcttcccggttgatcgtggattatttgaggataaagtagccaatatttggtgcagcttcaatgtctttctgaagattaaggatattttgccacgtcacatccaattaataatgagcttttgttctacgtttttgagcctgcttcctgcatgcataaaattaatacttcagccctcttccaaaggattcaaatttacactggttagctgtgcgctatcattctttttattttctttccaagtacatgaaaaatccattctcttggtgtcactaccagtctgcttagttttaagtgaaattccttttatgtctacttggtttttacttgtgtcaacatttagtatgctacctcttctattgaaggatgaactcctaatgccctctgttgtgacaacaatggcattttttatagcttgtgtaacttccttttcaatatttgaaaagacttctgaagaagaactgcagttgaaatccttttccatttctgtgaggaaatatcttccatgttttacatttctttccagaattatacaatatttgtttcttatctcagtcatcactatggtgcttctgacgttgatgactgtcacactggatcctcctcagaaactaccggacttgttttctgtattggtgtgttttgtatcttgcttgaacttcctgttcttcttggtatactttaacattattattatgtgggattccaaaagtggaagaaatcagaagaaaatcagctagctgtattcctaaacaaattgtttcctaaacaaatgtgaaaatgtgaacagtgctgaaaggttttgtgaactttttgctatgtataaatgaaattaccattttgagaaccatggaaccacaggaaaggaaatggtgaaaagtcattgttgtctacacaaaataaatgtatatggagaccaaagaccaatggaggcttgtctaagtactgcttggccaaaacatgtggttttattattcacagctattcaagtggggaaaaaagagaaacatgtccttaatcccattgtttactcaggaaatgcactttttaaatgtctttaaaaaactgagaaatatttcttgatatttgctttgtctaaacctacttccttcatcagaccatatagtgagcttcatgggagaattgagccccttctttttaatggaaatcactaattttggtattcaaacttacattttagaatgcaagtagtgtgtatttcactgtttagaagtcatatcttagggaattaaatttgtgataatctttttaattactgagaaggcaatttaaactgcttgaagtttgaatatgccttattacacatgcaaatttgattgttttaacaaggcaaataaaccataatcttatttatttccaagaatgcatattttaatacaattaaaaatgaattttcctgaatttaaatgtaagctttaacttaactttaagtggtttgagtgaagtcttctaaattacacataatcactggttctaaacttccagaaccattctgtttaattaaacattatattatatatatattattattgacatggttcagggttaccactgccagagcattgattcatgttaacttcatcctattaatactgtatcaccctgtattagcagaagccaatatttattatagtattcaactggtaaaaataatacatgatatccatgttgcagtttctcatataaagatatgttttctttagcctctgtaataaagataatcattttcccatcaacattttttaaggaatatatttcttctttcataagatagccattaaactatattaagtggtggtatattttaatatagtgcaaatcaaaccacatacaaaaaaaaactggttctagacacggacagtcacaggctgatataagaaggtatgtgtttctaagtctggtaaaggaagtgggtttagacaaagcaaaaatctagaaaggtttctttctcaaagcaaatgtgcataaagactcaaagggcaggtcaacgcagaatagcagccttgaatcactgccgaatcagcaagaacattgctgtccatggtcaccatctgtaatcactgtgcccaaatgtcagcatcttggctggctggtgtagctttatttttaaaaatattttttgtaatagtacacttgtgtttaacatagaatgttgacttagataaatgatgaggaagttataaataattggagtagcataactttattatttggaaataaaagtattatgtacatatattagtaaaatgaaatgcacctga

SEQ ID NO: 106542 - DNA, 729 bp, Homo sapiens
  Payload ID: 923
  Gene Symbol: ALG6
  Gene Name: ALG6, alpha-1,3-glucosyltransferase
  ENST ID: ENST00000487136
  CDS Start-End: 246-377
acggcaggcgcgaatcccagcggccggcgggcggcggggatacttctacatagacataatcaagttttgactatttggaaaccaagcatcattaaaattctctcaaactcctaattgcgaagaatcgataacatttcaagaagtgataacatttctctgaacaagaaaagaagtgattgaccacgttttaaaagtactctggcactggtgctgtgttttcttcccctccctaaatttgaagaactatggagaaatggtacttgatgacagtagtggttttaataggactaacagtacgatggacagtgtctcttaattcttattcaggtaatacatttttactggttaaaaaaaaaacgaaattttcctttgaataggtgtttgtttggggaaaagtttaccattttctgaccagtacagagaagaatttcaggcctttttgatatggttgagaaaatacatttaaatgtccagttctaatagaaagaatatggataacagctaaatagaagcatgcgctttgtgatgtgagaaagcaaaaatgtgttctaacaggtgctggtaaaccgcctatgtttggtgattatgaagctcagagacactggcaagaaataacttttaatttaccggtcaaacaatggtattttaacagcagtgataacaatttacagtattggggattggattacccacctcttacagcttatcatagtctcctatgtgcatatg

SEQ ID NO: 106543 - DNA, 1811 bp, Homo sapiens
  Payload ID: 923
  Gene Symbol: ALG6
  Gene Name: ALG6, alpha-1,3-glucosyltransferase
  ENST ID: ENST00000603108
  CDS Start-End: 209-1054
ggatacttctacatagacataatcaagttttgactatttggaaaccaagcatcattaaaattctctcaaactcctaattgcgaagaatcgataacatttcaagaagtgataacatttctctgaacaagaaaagaagtgattgaccacgttttaaaagtactctggcactggtgctgtgttttcttcccctccctaaatttgaagaactatggagaaatggtacttgatgacagtagtggttttaataggactaacagtacgatggacagtgtctcttaattcttattcaggtgctggtaaaccgcctatgtttggtgattatgaagctcagagacactggcaagaaataacttttaatttaccggtcaaacaatggtattttaacagcagtgataacaatttacagtattggggattggattacccacctcttacagcttatcatagtctcctatgtgcatatgtggcaaagtttataaatccagactggattgctctccatacatcacgtggatatgagagtcaggcacataagctcttcatgcgtacaacagttttaattgctgatctgctgatttacatacctgcagtggttttgtactgttgttgcttaaaagaaatctcaactaagaaaaagattgctaatgcattatgcatcttgctgtatccaggccttattcttatagactatggacattttcagaacatatataattctgtgagtcttggctttgctttgtggggtgttcttggaatatcttgtgactgcgacctcctagggtcactggcattttgcttagctataaattataaacagatggaactttaccacgccttgccatttttttgctttttacttggcaagtgttttaaaaaaggcctcaaaggaaaggggtttgtgttgctagttaagctagcttgtattgttgtggcttccttcgttctctgctggctgccattctttacagaaagggaacaaaccctgcaggttctaagaagactcttcccggttgatcgtggattatttgaggcatcttttgttctacgtttttgagcctgcttcctgcatgcataaaattaatacttcagccctcttccaaaggattcaaatttacactggttagctgtgcgctatcattctttttattttctttccaagtacatgaaaaatccattctcttggtgtcactaccagtctgcttagttttaagtgaaattccttttatgtctacttggtttttacttgtgtcaacatttagtatgctacctcttctattgaaggatgaactcctaatgccctctgttgtgacaacaatggcattttttatagcttgtgtaacttccttttcaatatttgaaaagacttctgaagaagaactgcagttgaaatccttttccatttctgtgaggaaatatcttccatgttttacatttctttccagaattatacaatatttgtttcttatctcagtcatcactatggtgcttctgacgttgatgactgtcacactggatcctcctcagaaactaccggacttgttttctgtattggtgtgttttgtatcttgcttgaacttcctgttcttcttggtatactttaacattattattatgtgggattccaaaagtggaagaaatcagaagaaaatcagctagctgtattcctaaacaaattgtttcctaaacaaatgtgaaaatgtgaacagtgctgaaaggttttgtgaactttttgctatgtataaatgaaattaccattttgagaaccatggaaccacaggaaaggaaatggtgaaaagtcattgttgtctaca

SEQ ID NO: 106544 - DNA, 1675 bp, Homo sapiens
  Payload ID: 924
  Gene Symbol: ALG8
  Gene Name: ALG8, alpha-1,3-glucosyltransferase
  Uniprot ID: Q9BVK2
  ENST ID: ENST00000299626
  CDS Start-End: 73-1653
agagggctttctccgcatgcgcgggatcccggatgtggatcaagttggtgggaagcgtgcggtgccgcagcaatggcggcgctcacaattgccacgggtactggcaattggttttcggctttggcgctcggggtgactcttctcaaatgccttctcatccccacataccattccacagattttgaagtacaccgaaactggcttgctatcactcacagtttgccaatatcacagtggtattatgaggcaacttcagagtggacgttggattacccccctttctttgcatggtttgagtatatcctgtcacatgttgccaaatattttgatcaagaaatgctgaatgtccataatttgaattactccagctcaaggaccttacttttccagagattttccgtcatctttatggatgtactctttgtgtatgctgtccgtgagtgctgtaaatgcattgatggaaaaaaagtgggtaaagaacttacagaaaagccaaaatttattctgtcggtattacttctgtggaacttcgggttattaattgtggaccatattcattttcagtacaatggctttttatttggattaatgctactctccattgcacgattatttcagaaaaggcatatggaaggagcatttctctttgctgttctcctacatttcaagcatatctacctctatgtagcaccagcttatggtgtatatctgctgcgatcctactgtttcactgcaaataaaccagatgggtctattcgatggaagagtttcagctttgttcgtgttatttccctgggactggttgttttcttagtttctgctctttcattgggtcctttcctggccttgaatcagctgcctcaagtcttttcccgactctttcctttcaagaggggcctctgtcatgcatattgggctccaaacttctgggctttgtacaatgctttggacaaagtgctgtctgtcatcggtttgaaattgaaatttcttgatcccaacaatattcccaaggcctcaatgacaagtggtttggttcagcagttccaacacacagtccttccctcagtgactcccttggcaaccctcatctgcacactgattgccatattgccctctattttctgtctttggtttaaaccccaagggcccagaggctttctccgatgtctaactctttgtgccttgagctcctttatgtttgggtggcatgttcatgaaaaagccatacttctagcaattctcccaatgagccttttgtctgtgggaaaagcaggagacgcttcgatttttctgattctgaccacaacaggacattattccctctttcctctgctcttcactgcaccagaacttcccattaaaatcttactcatgttactattcaccatatatagtatttcgtcactgaagactttattcagaaaagaaaaacctctttttaattggatggaaactttctacctgcttggcctggggcctctggaagtctgctgtgaatttgtattccctttcacctcctggaaggtgaagtaccccttcatccctttgttactaacctcagtgtattgtgcagtaggcatcacatatgcttggttcaaactgtatgtttcagtattgattgactctgctattggcaagacaaagaaacaatgaataaaggaactgcttagatatg

SEQ ID NO: 106545 - DNA, 1677 bp, Homo sapiens
  Payload ID: 924
  Gene Symbol: ALG8
  Gene Name: ALG8, alpha-1,3-glucosyltransferase
  Uniprot ID: Q9BVK2
  ENST ID: ENST00000376156
  CDS Start-End: 5-1408
agcaatggcggcgctcacaattgccacgggtactggcaattggttttcggctttggcgctcggggtgactcttctcaaatgccttctcatccccacataccattccacagattttgaagtacaccgaaactggcttgctatcactcacagtttgccaatatcacagtggtattatgaggcaacttcagagtggacgttggattacccccctttctttgcatggtttgagtatatcctgtcacatgttgccaaatattttgatcaagaaatgctgaatgtccataatttgaattactccagctcaaggaccttacttttccagagattttccgtcatctttatggatgtactctttgtgtatgctgtccgtgagtgctgtaaatgcattgatggaaaaaaagtgggtaaagaacttacagaaaagccaaaatttattctgtcggtattacttctgtggaacttcgggttattaattgtggaccatattcattttcagtacaatggctttttatttggattaatgctactctccattgcacgattatttcagaaaaggcatatggaaggagcatttctctttgctgttctcctacatttcaagcatatctacctctatgtagcaccagcttatggtgtatatctgctgcgatcctactgtttcactgcaaataaaccagatgggtctattcgatggaagagtttcagctttgttcgtgttatttccctgggactggttgttttcttagtttctgctctttcattgggtcctttcctggccttgaatcagctgcctcaagtcttttcccgactctttcctttcaagaggggcctctgtcatgcatattgggctccaaacttctgggctttgtacaatgctttggacaaagtgctgtctgtcatcggtttgaaattgaaatttcttgatcccaacaatattcccaaggcctcaatgacaagtggtttggttcagcagttccaacacacagtccttccctcagtgactcccttggcaaccctcatctgcacactgattgccatattgccctctattttctgtctttggtttaaaccccaagggcccagaggctttctccgatgtctaactctttgtgccttgagctcctttatgtttgggtggcatgttcatgaaaaagccatacttctagcaattctcccaatgagccttttgtctgtgggaaaagcaggagacgcttcgatttttctgattctgaccacaacaggacattattccctctttcctctgctcttcactgcaccagaacttcccattaaaatcttactcatgttactattcaccatatatagtatttcgtcactgaagactttattcagacggagtttcacccttgttgcccaggctggagtgcaatggcacgatctcagctaactgaaacctccgcctcccagaaaagaaaaacctctttttaattggatggaaactttctacctgcttggcctggggcctctggaagtctgctgtgaatttgtattccctttcacctcctggaaggtgaagtaccccttcatccctttgttactaacctcagtgtattgtgcagtaggcatcacatatgcttggttcaaactgtatgtttcagtattgattgactctgctattggcaagacaaagaaacaatgaataaaggaactgcttag

SEQ ID NO: 106546 - DNA, 468 bp, Homo sapiens
  Payload ID: 924
  Gene Symbol: ALG8
  Gene Name: ALG8, alpha-1,3-glucosyltransferase
  ENST ID: ENST00000525761
  CDS Start-End: 179-468
ggatgtggatcaagttggtgggaagcgtgcggtgccgcagcaatggcggcgctcacaattgccacgggtactggcaattggttttcggctttggcgctcggggtgactcttctcaaatgccttctcatccccacataggccaagactgaaagcgtggaaaccaagaagcaaccatgaaatggtggtgtgtatacaccattccacagattttgaagtacaccgaaactggcttgctatcactcacagtttgccaatatcacagtggtattatgaggcaacttcagagtggacgttggattacccccctttctttgcatggtttgagtatatcctgtcacatgttgccaaatattttgatcaagaaatgctgaatgtccataatttgaattactccagctcaaggaccttacttttccagagattttccgtcatctttatggatgtactctttgtgtatgctgtccgtga

SEQ ID NO: 106547 - DNA, 714 bp, Homo sapiens
  Payload ID: 924
  Gene Symbol: ALG8
  Gene Name: ALG8, alpha-1,3-glucosyltransferase
  ENST ID: ENST00000530608
  CDS Start-End: 1-686
tgggactggttgttttcttagtttctgctctttcattgggtcctttcctggccttgaatcagctgcctcaagtcttttcccgactctttcctttcaagaggggcctctgtcatgcatattgggctccaaacttctgggctttgtacaatgctttggacaaagtgctgtctgtcatcgggcccagaggctttctccgatgtctaactctttgtgccttgagctcctttatgtttgggtggcatgttcatgaaaaagccatacttctagcaattctcccaatgagccttttgtctgtgggaaaagcaggagacgcttcgatttttctgattctgaccacaacaggacattattccctctttcctctgctcttcactgcaccagaacttcccattaaaatcttactcatgttactattcaccatatatagtatttcgtcactgaagactttattcagaaaagaaaaacctctttttaattggatggaaactttctacctgcttggcctggggcctctggaagtctgctgtgaatttgtattccctttcacctcctggaaggtgaagtaccccttcatccctttgttactaacctcagtgtattgtgcagtaggcatcacatatgcttggttcaaactgtatgtttcagtattgattgactctgctattggcaagacaaagaaacaatgaataaaggaactgcttagatatgtgccaa

SEQ ID NO: 106548 - DNA, 702 bp, Homo sapiens
  Payload ID: 924
  Gene Symbol: ALG8
  Gene Name: ALG8, alpha-1,3-glucosyltransferase
  ENST ID: ENST00000529139
  CDS Start-End: 1-473
taattgtggaccatattcattttcagtacaatggctttttatttggattaatgctactctccattgcacgattatttcagaaaaggcatatggaaggagcatttctctttgctgttctcctacatttcaagcatatctacctctatgtagcaccagcttatggtgtatatctgctgcgatcctactgtttcactgcaaataaaccagatgggtctattcgatggaagagtttcagctttgttcgtgttatttccctgggactggttgttttcttagtttctgctctttcattgggtcctttcctggccttgaatcagctgcctcaagtcttttcccgactctttcctttcaagaggggcctctgtcatgcatattgggctccaaacttctgggctttgtacaatgctttggacaaagtgctgtctgtcatcggtatggtagcgagcattttttactcagactctgaatattgaaaggacttaggcacatggagaaatggaaaaacctttgtgttttgaatgtggctgaattgtttgttctccagtcctgcatttcagctttcaggatgaacagggggagcagttcttgggactgaggctttagtgcagtaaacagactgttttccttataaaagctccttgtggtaatgaggttattgatcctttcctggggaaaaaataaaatatgtagacactctataaa

SEQ ID NO: 106549 - DNA, 680 bp, Homo sapiens
  Payload ID: 924
  Gene Symbol: ALG8
  Gene Name: ALG8, alpha-1,3-glucosyltransferase
  ENST ID: ENST00000532440
  CDS Start-End: 1-680
aaaaggcatatggaaggagcatttctctttgctgttctcctacatttcaagcatatctacctctatgtagcaccagcttatggtgtatatctgctgcgatcctactgtttcactgcaaataaaccagatgggtctattcgatggaagagtttcagctttgttcgtgttatttccctgggactggttgttttcttagtttctgctctttcattgggtcctttcctggccttgaatcagctgcctcaagtcttttcccgactctttcctttcaagaggggcctctgtcatgcatattgggctccaaacttctgggctttgtacaatgctttggacaaagtgctgtctgtcatcggtttgaaattgaaatttcttgatcccaacaatattcccaaggcctcaatgacaagtggtttggttcagcagttccaacacacagtccttccctcagtgactcccttggcaaccctcatctgcacactgattgccatattggttcaagcgattctcctgcctcagcctccagagtacctgggaatacagccctctattttctgtctttggtttaaaccccaagggcccagaggctttctccgatgtctaactctttgtgccttgagctcctttatgtttgggtggcatgttcatgaaaaagccatacttctagcaattctcccaatgag

SEQ ID NO: 106550 - DNA, 493 bp, Homo sapiens
  Payload ID: 924
  Gene Symbol: ALG8
  Gene Name: ALG8, alpha-1,3-glucosyltransferase
  ENST ID: ENST00000525783
  CDS Start-End: 1-263
tttcccgactctttcctttcaagaggggcctctgtcatgcatattgggctccaaacttctgggctttgtacaatgctttggacaaagtgctgtctgtcatcggtttgaaattgaaatttcttgatcccaacaatattcccaaggcctcaatgacaagtggtttggttcagcagttccaacacacagtccttccctcagtgactcccttggcaaccctcatctgcacactgattgccatattgaaaagaaaaacctctttttaattggatggaaactttctacctgcttggcctggggcctctggaagtctgctgtgaatttgtattccctttcacctcctggaaggtgaagtaccccttcatccctttgttactaacctcagtgtattgtgcagtaggcatcacatatgcttggttcaaactgtatgtttcagtattgattgactctgctattggcaagacaaagaaacaatgaataaaggaactgcttagat

SEQ ID NO: 106551 - DNA, 612 bp, Homo sapiens
  Payload ID: 924
  Gene Symbol: ALG8
  Gene Name: ALG8, alpha-1,3-glucosyltransferase
  ENST ID: ENST00000526849
  CDS Start-End: 1-594
tggtttggttcagcagttccaacacacagtccttccctcagtgactcccttggcaaccctcatctgcacactgattgccatattgggcccagaggctttctccgatgtctaactctttgtgccttgagctcctttatgtttgggtggcatgttcatgaaaaagccatacttctagcaattctcccaatgagccttttgtctgtgggaaaagcaggagacgcttcgatttttctgattctgaccacaacaggacattattccctctttcctctgctcttcactgcaccagaacttcccattaaaatcttactcatgttactattcaccatatatagtatttcgtcactgaagactttattcagaaaagaaaaacctctttttaattggatggaaactttctacctgcttggcctggggcctctggaagtctgctgtgaatttgtattccctttcacctcctggaaggtgaagtaccccttcatccctttgttactaacctcagtgtattgtgcagtaggcatcacatatgcttggttcaaactgtatgtttcagtattgattgactctgctattggcaagacaaagaaacaatgaataaaggaactgcttaga

SEQ ID NO: 106552 - DNA, 881 bp, Homo sapiens
  Payload ID: 924
  Gene Symbol: ALG8
  Gene Name: ALG8, alpha-1,3-glucosyltransferase
  ENST ID: ENST00000530454
  CDS Start-End: 35-881
atcaagttggtgggaagcgtgcggtgccgcagcaatggcggcgctcacaattgccacgggtactggcaattggttttcggctttggcgctcggggtgactcttctcaaatgccttctcatccccacatatagccattccacagattttgaagtacaccgaaactggcttgctatcactcacagtttgccaatatcacagtggtattatgaggcaacttcagagtggacgttggattacccccctttctttgcatggtttgagtatatcctgtcacatgttgccaaatattttgatcaagaaatgctgaatgtccataatttgaattactccagctcaaggaccttacttttccagagattttccgtcatctttatggatgtactctttgtgtatgctgtccgtgagtgctgtaaatgcattgatggaaaaaaagtgggtaaagaacttacagaaaagccaaaatttattctgtcggtattacttctgtggaacttcgggttattaattgtggaccatattcattttcagtacaatggctttttatttggattaatgctactctccattgcacgattatttcagaaaaggcatatggaaggagcatttctctttgctgttctcctacatttcaagcatatctacctctatgtagcaccagcttatggtgtatatctgctgcgatcctactgtttcactgcaaataaaccagatgggtctattcgatggaagagtttcagctttgttcgtgttatttccctgggactggttgttttcttagtttctgctctttcattgggtcctttcctggccttgaatcagctgcctcaagtcttttcccgactctttcctttcaagaggggcctctgtcatgcatattggg

SEQ ID NO: 106553 - DNA, 778 bp, Homo sapiens
  Payload ID: 924
  Gene Symbol: ALG8
  Gene Name: ALG8, alpha-1,3-glucosyltransferase
  ENST ID: ENST00000525870
  CDS Start-End: 261-778
aagttggtgggaagcgtgcggtgccgcagcaatggcggcgctcacaattgccacgggtactggcaattggttttcggctttggcgctcgggccattccacagattttgaagtacaccgaaactggcttgctatcactcacagtttgccaatatcacagtggtattatgaggcaacttcagagtggacgttggattacccccctttctttgcatggtttgagtatatcctgtcacatgttgccaaatattttgatcaagaaatgctgaatgtccataatttgaattactccagctcaaggaccttacttttccagagattttccgtcatctttatggatgtactctttgtgtatgctgtccgtgagtgctgtaaatgcattgatggaaaaaaagtgggtaaagaacttacagaaaagccaaaatttattctgtcggtattacttctgtggaacttcgggttattaattgtggaccatattcattttcagtacaatggctttttatttggattaatgctactctccattgcacgattatttcagaaaaggcatatggaaggagcatttctctttgctgttctcctacatttcaagcatatctacctctatgtagcaccagcttatggtgtatatctgctgcgatcctactgtttcactgcaaataaaccagatgggtctattcgatggaagagtttcagctttgttcgtgttatttccctgggactggttgttttcttagtttctgctctttcattgggtcctttcctggccttgaatca

SEQ ID NO: 106554 - DNA, 838 bp, Homo sapiens
  Payload ID: 924
  Gene Symbol: ALG8
  Gene Name: ALG8, alpha-1,3-glucosyltransferase
  ENST ID: ENST00000525755
  CDS Start-End: 111-838
ggatcaagttggtgggaagcgtgcggtgccgcagcaatggcggcgctcacaattgccacgggtactggcaattggttttcggctttggcgctcggggtgactcttctcaaatgccttctcatccccacatagcaacttcagagtggacgttggattacccccctttctttgcatggtttgagtatatcctgtcacatgttgccaaatattttgatcaagaaatgctgaatgtccataatttgaattactccagctcaaggaccttacttttccagagattttccgtcatctttatggatgtactctttgtgtatgctgtccgtgagtgctgtaaatgcattgatggaaaaaaagtgggtaaagaacttacagaaaagccaaaatttattctgtcggtattacttctgtggaacttcgggttattaattgtggaccatattcattttcagtacaatggctttttatttggattaatgctactctccattgcacgattatttcagaaaaggcatatggaaggagcatttctctttgctgttctcctacatttcaagcatatctacctctatgtagcaccagcttatggtgtatatctgctgcgatcctactgtttcactgcaaataaaccagatgggtctattcgatggaagagtttcagctttgttcgtgttatttccctgggactggttgttttcttagtttctgctctttcattgggtcctttcctggccttgaatcagctgcctcaagtcttttcccgactctttcctttcaagaggggcctctgtcatgcatattgggctccaaacttctgggctttgtacaatgctttggacaa

SEQ ID NO: 106555 - DNA, 844 bp, Homo sapiens
  Payload ID: 924
  Gene Symbol: ALG8
  Gene Name: ALG8, alpha-1,3-glucosyltransferase
  ENST ID: ENST00000532306
  CDS Start-End: 1-844
gcattgatggaaaaaaagtgggtaaagaacttacagaaaagccaaaatttattctgtcggtattacttctgtggaacttcgggttattaattgtggaccatattcattttcagtacaatggctttttatttggattaatgctactctccattgcacgattatttcagaaaaggcatatggaaggagcatttctctttgctgttctcctacatttcaagcatatctacctctatgtagcaccagcttatggtgtatatctgctgcgatcctactgtttcactgcaaataaaccagatgggtctattcgatggaagagtttcagctttgttcgtgttatttccctgggactggttgttttcttagtttctgctctttcattgggtcctttcctggccttgccctctattttctgtctttggtttaaaccccaagggcccagaggctttctccgatgtctaactctttgtgccttgagctcctttatgtttgggtggcatgttcatgaaaaagccatacttctagcaattctcccaatgagccttttgtctgtgggaaaagcaggagacgcttcgatttttctgattctgaccacaacaggacattattccctctttcctctgctcttcactgcaccagaacttcccattaaaatcttactcatgttactattcaccatatatagtatttcgtcactgaagactttattcagaaaagaaaaacctctttttaattggatggaaactttctacctgcttggcctggggcctctggaagtctgctgtgaatttgtattccctttcacctcctggaaggtgaagtaccccttcatccctttgttactaac

SEQ ID NO: 106556 - DNA, 829 bp, Homo sapiens
  Payload ID: 924
  Gene Symbol: ALG8
  Gene Name: ALG8, alpha-1,3-glucosyltransferase
  ENST ID: ENST00000527099
  CDS Start-End: 421-829
gtggatcaagttggtgggaagcgtgcggtgccgcagcaatggcggcgctcacaattgccacgggtactggcaattggttttcggctttggcgctcggggtgactcttctcaaatgccttctcatccccacataggtctcactctgcctctcaggctgtagtgcagtagcatgatctcatctcactgcaacctccacctttcaggctcaagcaatcctcctacctcaacctgccaagtagctgggacttaagccattccacagattttgaagtacaccgaaactggcttgctatcactcacagtttgccaatatcacagtggtattatgaggcaacttcagagtggacgttggattacccccctttctttgcatggtttgagtatatcctgtcacatgttgccaaatattttgatcaagaaatgctgaatgtccataatttgaattactccagctcaaggaccttacttttccagagattttccgtcatctttatggatgtactctttgtgtatgctgtccgtgagtgctgtaaatgcattgatggaaaaaaagtgggtaaagaacttacagaaaagccaaaatttattctgtcggtattacttctgtggaacttcgggttattaattgtggaccatattcattttcagtacaatggctttttatttggattaatgctactctccattgcacgattatttcagaaaaggcatatggaaggagcatttctctttgctgttctcctacatttcaagcatatctacctctatgtagcaccagcttatggtgtatatctgctgcgatcctactgtttcactgcaaataaaccag

SEQ ID NO: 106557 - DNA, 1674 bp, Homo sapiens
  Payload ID: 924
  Gene Symbol: ALG8
  Gene Name: ALG8, alpha-1,3-glucosyltransferase
  ENST ID: ENST00000526737
  CDS Start-End: 62-463
tccgcatgcgcgggatcccggatgtggatcaagttggtgggaagcgtgcggtgccgcagcaatggcggcgctcacaattgccacgggtactggcaattggttttcggctttggcgctcggggtgactcttctcaaatgccttctcatccccacataccattccacagattttgaagtacaccgaaactggcttgctatcactcacagtttgccaatatcacagtggtattatgaggcaacttcagagtggacgttggattacccccctttctttgcatggtttgagtatatcctgtcacatgttgccaaatattttgatcaagaaatgctgaatgtccataatttgaattactccagctcaaggaccttacttttccagagattttccgtcatctttatggatgtactctttgtgtatgctgtccgtgattgtttctgtttctttcctaatgtttcaatgtaggtgctgtaaatgcattgatggaaaaaaagtgggtaaagaacttacagaaaagccaaaatttattctgtcggtattacttctgtggaacttcgggttattaattgtggaccatattcattttcagtacaatggctttttatttggattaatgctactctccattgcacgattatttcagaaaaggcatatggaaggagcatttctctttgctgttctcctacatttcaagcatatctacctctatgtagcaccagcttatggtgtatatctgctgcgatcctactgtttcactgcaaataaaccagatgggtctattcgatggaagagtttcagctttgttcgtgttatttccctgggactggttgttttcttagtttctgctctttcattgggtcctttcctggccttgaatcagctgcctcaagtcttttcccgactctttcctttcaagaggggcctctgtcatgcatattgggctccaaacttctgggctttgtacaatgctttggacaaagtgctgtctgtcatcggtttgaaattgaaatttcttgatcccaacaatattcccaaggcctcaatgacaagtggtttggttcagcagttccaacacacagtccttccctcagtgactcccttggcaaccctcatctgcacactgattgccatattgccctctattttctgtctttggtttaaaccccaagggcccagaggctttctccgatgtctaactctttgtgccttgagctcctttatgtttgggtggcatgttcatgaaaaagccatacttctagcaattctcccaatgagccttttgtctgtgggaaaagcaggagacgcttcgatttttctgattctgaccacaacaggacattattccctctttcctctgctcttcactgcaccagaacttcccattaaaatcttactcatgttactattcaccatatatagtatttcgtcactgaagactttattcagaaaagaaaaacctctttttaattggatggaaactttctacctgcttggcctggggcctctggaagtctgctgtgaatttgtattccctttcacctcctggaaggtgaagtaccccttcatccctttgttactaacctcagtgtattgtgcagtaggcatcacatatgcttggttcaaactgtatgtttcagtattgattgactctgctattggcaagacaaagaaacaat

SEQ ID NO: 106558 - DNA, 860 bp, Homo sapiens
  Payload ID: 924
  Gene Symbol: ALG8
  Gene Name: ALG8, alpha-1,3-glucosyltransferase
  ENST ID: ENST00000530910
  CDS Start-End: 482-860
tcagggtcctcatccttaataggcagttaagaacctctgcctccaacagccattcagccagtattatcagatgcctgaggtgccaggtaccgttctaactcccgggagatgcggtggtgagcaagacattgctggtccttgccctcgaagttggtgggtggagctagacaaacaggaacttttcagattgtgataaaggaaatagagggttactaagtggctgtgcgctattcctttagaaggtgatgtttgagttgaaattcaaaaaatgaaaaagaataagtgatgtggaaagcagttcaggcataggaaagagtaagttcaaaggccctgtggcaggaaagaagtcagagcattctaggaacagaaagtgccccttgtggctgcagagcattgagggagaggagtggcacagcatggggtgcactggggacagataacacagggtttcgaagaccacagttagactgctgtgtaaaaaatggatgtagggccaagactgaaagcgtggaaaccaagaagcaaccatgaaatggtggtgtgtatacaccattccacagattttgaagtacaccgaaactggcttgctatcactcacagtttgccaatatcacagtggtattatgaggcaacttcagagtggacgttggattacccccctttctttgcatggtttgagtatatcctgtcacatgttgccaaatattttgatcaagaaatgctgaatgtccataatttgaattactccagctcaaggaccttacttttccagagattttccgtcatctttatggatgtactctttgtgtatgctgtccgtgagtgctgtaaatgcattgatggaaaaaaagtgggtaaag

SEQ ID NO: 106559 - DNA, 892 bp, Homo sapiens
  Payload ID: 924
  Gene Symbol: ALG8
  Gene Name: ALG8, alpha-1,3-glucosyltransferase
  ENST ID: ENST00000532050
  CDS Start-End: 35-745
atcaagttggtgggaagcgtgcggtgccgcagcaatggcggcgctcacaattgccacgggtactggcaattggttttcggctttggcgctcggggtgactcttctcaaatgccttctcatccccacataccattccacagattttgaagtacaccgaaactggcttgctatcactcacagtttgccaatatcacagtggtattatgaggcaacttcagagtggacgttggattacccccctttctttgcatggtttgagtatatcctgtcacatgttgccaaatattttgatcaagaaatgctgaatgtccataatttgaattactccagctcaaggaccttacttttccagagattttccgtcatctttatggatgtactctttgtgtatgctgtccgtgagtgctgtaaatgcattgatggaaaaaaagtgggtaaagaacttacagaaaagccaaaatttattctgtcggtattacttctgtggaacttcgggttattaattgtggaccatattcattttcagtacaatggctttttatttggattaatgctactctccattgcacgattatttcagagacagggcctccctattttgtccaggctggtcttgaactcctggggtcaagcaatccttccacgtcggcttaccaaagtgctgggattgcaggtaaaaggcatatggaaggagcatttctctttgctgttctcctacatttcaagcatatctacctctatgtagcaccagcttatggtgtatatctgctgcgatcctactgtttcactgcaaataaaccagatgggtctattcgatggaagagtttcagctttgttcgtgttatttccctgggactggttgttttcttagtttctgctctttcattgggtc

SEQ ID NO: 106560 - DNA, 1469 bp, Homo sapiens
  Payload ID: 924
  Gene Symbol: ALG8
  Gene Name: ALG8, alpha-1,3-glucosyltransferase
  Uniprot ID: Q9BVK2
  ENST ID: ENST00000615266
  CDS Start-End: 66-1469
tttctccgcatgcgcgggatcccggatgtggatcaagttggtgggaagcgtgcggtgccgcagcaatggcggcgctcacaattgccacgggtactggcaattggttttcggctttggcgctcggggtgactcttctcaaatgccttctcatccccacataccattccacagattttgaagtacaccgaaactggcttgctatcactcacagtttgccaatatcacagtggtattatgaggcaacttcagagtggacgttggattacccccctttctttgcatggtttgagtatatcctgtcacatgttgccaaatattttgatcaagaaatgctgaatgtccataatttgaattactccagctcaaggaccttacttttccagagattttccgtcatctttatggatgtactctttgtgtatgctgtccgtgagtgctgtaaatgcattgatggaaaaaaagtgggtaaagaacttacagaaaagccaaaatttattctgtcggtattacttctgtggaacttcgggttattaattgtggaccatattcattttcagtacaatggctttttatttggattaatgctactctccattgcacgattatttcagaaaaggcatatggaaggagcatttctctttgctgttctcctacatttcaagcatatctacctctatgtagcaccagcttatggtgtatatctgctgcgatcctactgtttcactgcaaataaaccagatgggtctattcgatggaagagtttcagctttgttcgtgttatttccctgggactggttgttttcttagtttctgctctttcattgggtcctttcctggccttgaatcagctgcctcaagtcttttcccgactctttcctttcaagaggggcctctgtcatgcatattgggctccaaacttctgggctttgtacaatgctttggacaaagtgctgtctgtcatcggtttgaaattgaaatttcttgatcccaacaatattcccaaggcctcaatgacaagtggtttggttcagcagttccaacacacagtccttccctcagtgactcccttggcaaccctcatctgcacactgattgccatattgccctctattttctgtctttggtttaaaccccaagggcccagaggctttctccgatgtctaactctttgtgccttgagctcctttatgtttgggtggcatgttcatgaaaaagccatacttctagcaattctcccaatgagccttttgtctgtgggaaaagcaggagacgcttcgatttttctgattctgaccacaacaggacattattccctctttcctctgctcttcactgcaccagaacttcccattaaaatcttactcatgttactattcaccatatatagtatttcgtcactgaagactttattcagacggagtttcacccttgttgcccaggctggagtgcaatggcacgatctcagctaa

SEQ ID NO: 106561 - DNA, 2345 bp, Homo sapiens
  Payload ID: 925
  Gene Symbol: ALG9
  Gene Name: ALG9, alpha-1,2-mannosyltransferase
  Uniprot ID: Q9H6U8
  ENST ID: ENST00000398006
  CDS Start-End: 910-2232
gctgcccccgggagggtcttagctgtggcgcgcggggctcagtccggcctggcctcaccgcgggaggcccgagctccctcttcagctaggtcctattggtcttcctgggcgggtcagcattcagtcttcgcccaccttagatccctccactgcgctgtaaaactgccttggagtgcggatctgtgatgctcctgggccaggcctagagtgggcacagcctctgtgggagatgtagacaggatcaaagagtataccttttacggctgttcctcacagctccttttattctccctcaagtcccgaccctttactgggcccatccaacccgccatcacctcttcccaaaccctggaggctgcaggttagaactgcattaagggagctgtcaacatatggaattggagtaggctatgtaccttgcacctaggcttctatctgaacataagggggaatgaataaagccatcaaaagcaatgaccttgttaagaaaagaaagaaaaggagaatgacagctttgtggccttcaagttatctgggaacaaagcaggacaagtctgggcacctgaaggatctactgctttcaagtgtctgctttcagcaaggttatgtgctgctctcctgagcaacatctctgactgtgatgaaacattcaactactgggagccaacacactacctcatctatggggaagggtttcagacttgggaatattccccagcatatgccattcgctcctatgcttacctgttgcttcatgcctggccagctgcatttcatgcaagaattctacaaactaataagattcttgtgttttactttttgcgatgtcttctggcttttgtgagctgtatttgtgaactttacttttacaaggctgtgtgcaagaagtttgggttgcacgtgagtcgaatgatgctagccttcttggttctcagcactggcatgttttgctcatcatcagcattccttcctagtagcttctgtatgtacactacgttgatagccatgactggatggtatatggacaagacttccattgctgtgctgggagtagcagctggggctatcttaggctggccattcagtgcagctcttggtttacccattgcctttgatttgctggtcatgaaacacaggtggaagagtttctttcattggtcgctgatggccctcatactatttctggtgcctgtggtggtcattgacagctactattatgggaagttggtgattgcaccactcaacattgttttgtataatgtctttactcctcatggacctgatctttatggtacagaaccctggtatttctatttaattaatggatttctgaatttcaatgtagcctttgctttggctctcctagtcctaccactgacttctcttatggaatacctgctgcagagatttcatgttcagaatttaggccacccgtattggcttaccttggctccaatgtatatttggtttataattttcttcatccagcctcacaaagaggagagatttcttttccctgtgtatccacttatatgtctctgtggcgctgtggctctctctgcacttcagaaatgttaccactttgtgtttcaacgatatcgcctggagcactatactgtgacatcgaattggctggcattaggaactgtcttcctgtttgggctcttgtcattttctcgctctgtggcactgttcagaggatatcacgggccccttgatttgtatccagaattttaccgaattgctacagacccaaccatccacactgtcccagaaggcagacctgtgaatgtctgtgtgggaaaagagtggtatcgatttcccagcagcttccttcttcctgacaattggcagcttcagttcattccatcagagttcagaggtcagttaccaaaaccttttgcagaaggacctctggccacccggattgttcctactgacatgaatgaccagaatctagaagagccatccagatatattgatatcagtaaatgccattatttagtggatttggacaccatgagagaaacaccccgggagccaaaatattcatccaataaagaagaatggatcagcttggcctatagaccattccttgatgcttctagatcttcaaagctgctgcgggcattctatgtccccttcctgtcagatcagtatacagtgtacgtaaactacaccatcctcaaaccccggaaagcaaagcaaatcaggaagaaaagtggaggttagcaacacacctgtggccccaaaggacaaccatcttgttaactattgattccagtgacctgactccctgcaagtcatcgcctgtaacatttgtaataaaggtcttctgacatgaa

SEQ ID NO: 106562 - DNA, 4485 bp, Homo sapiens
  Payload ID: 925
  Gene Symbol: ALG9
  Gene Name: ALG9, alpha-1,2-mannosyltransferase
  ENST ID: ENST00000532425
  CDS Start-End: 1-623
gaactgtcttcctgtttgggctcttgtcattttctcgctctgtggcactgttcagaggatatcacgggccccttgatttgtatccagaattttaccgaattgctacagacccaaccatccacactgtcccagaaggcagacctgtgaatgtctgtgtgggaaaagagtggtatcgatttcccagcagcttccttcttcctgacaattggcagcttcagttcattccatcagagttcagaggtcagttaccaaaaccttttgcagaaggacctctggccacccggattgttcctactgacatgaatgaccagaatctagaagagccatccagatatattgatatcagtaaatgccattatttagtggatttggacaccatgagagaaacaccccgggagccaaaatattcatccaataaagaagaatggatcagcttggcctatagaccattccttgatgcttctagatcttcaaagctgctgcgggcattctatgtccccttcctgtcagatcagtatacagtgtacgtaaactacaccatcctcaaaccccggaaagcaaagcaaatcaggaagaaaagtggagaccggagaagagcagaaccaacttacaggaagaattgaaaatcctggtactggatggctgtgataagctgttctccacactctggcctggcatctgagaactagcaagcctctcttaggccatatgggcttctccaccaaagctgtttggcagctcctagcagaccttcttattgaaatcctcatgctgaaaatgaacacagcctagttgccaacccacatgtccttttcacctccagcaagactaagcttctttaaagcacttcacaggactaggaccctgtcctggagctatctcaggaaaaaggtgaccatttgaggaactgtgacctaattttattataatgatgcctctaattttcatttcctttacaaccaactgtaactataaggttgtattgcttttttgttcagttttagcatgctattttttgaattctagactcctccatgtgaagatatcaacagacaaaactacaactgtataggacatatttggagaaaattctatcaattgatacatttggatgacatcacatttttaagtaatgtaatctgaggccattgctgaggaaattaagaattttcctttttttttaaccacccccagtgaaaaggatcagtgtatatttatagcacctattttttagttctgtctgttgtgaggcacatcctgcatggggcacttctagtcaaataggcaatgataaggacctaattaaaatgtgataagtgtatactattactttaaaagcctttacagtcagtacttcagtttacaaggcactttcacagcatctcgtttgatcctcacagtcacaacatgtggtagacaaggcaggtgatttttatccccattttacagataaggaaacaggctgcgggtggggagtgaggggaggtaaagatagttagttgcctaaggtcacacagccagtaagtaatagagctgggactggaacccaggtttccttactctcatctattgctcctccatattcctcactcaaccatgaaaacattacttgaaaggactgatgaggttaaccagagacctaactgatattgtaactttctattttaaggaagaattgtgtctgtatttgagttctttggagcctccagtctgcctgtgtgttagaccagcacagcagtgctgtgtgatgcagcctgacctgtggcaggaaagtagtgcttctgtttggaagtcatgttcttttgcagccacacaggatccaaatatcagtactattcctgtagtcaatctggggtcacattataggtgccttatttccctaagggtaactgatctgaatatctgcaaataggatgaatctatttttcagaagttccatctttcatttttctttttttttttgagacagagtctcattctgtcgcccatgctggagtgcagtggcgcgatctcggctcgctgcaacctctgcctcccaggttgaagcaattctcatgcctcagccacccgagtagctgggattacaggcatgcgccatcatgcccagctaatttatgtatttttagtagagttggagtttcaccatgttggccaggctggtcttggactcctgacctcaggtcatccacccgcctcagcctcccaaagtgctggtattacaggcgtgagccaccgcacccagccccatctttcattttcaaagagaagggcattctaataggaactggtgccaagagagaagaaaagaagtgataacagaagaaatggctagttacaatattaaaaagctcctctttgagatctcctctgcaggaatatcagagacggagttgaagcgctggagaggtaataggtctagacagtacagaacaataactggggagtgtgtgaggatagactgggctcccccttgcttgaaagatctctggcatttaattctcaattcttgattactattttccagtgtaaaactagcacatatgatctgactacaggacagagaattttaagtgaaacatttgccttacttgcagtaataatgtgctgttcttcacagtagctaaggccctctatgtttcccagaggtaaataagaatccaggaatggaggtccatctgtgatgaatggcttttttctaatcaaagtagtataatgctgttttatctgttttgtcatcttgtttttttttttttttaaaaaaacaaaaccttaattataatatagcgcaaagaaaggccaggactgatgcagggattccttggaaatatcagttcctatcacttttaaaacctgattttggatctctctgttctatgtatgtctttagtgagagcacaatacatggcagaacgctgtgccaaatgttataggtaaggaatatagaaatgaatgttttttgttgtgaaggtgttttcatgtgatattttataaacacattttaaaaaatctccatcactttttagtataggaaggatagctttgcctgggaaaaacagtttcaacacacctgctcagagtagcagttctccctcaaaaaagcagtgttcagcctgcactgactgttctgcttgccaaaaggaggaagcatgcaagatacttatttctccatagattgtggagtatagagggatgtgggactacagattattattttttttccccgagacagagtcttgctctgtcgcccaggttggaacacaatggcacgacctcagctcactgcaacctctgtctcccgggttcaagcaattctcctgcttcagcctcctgagtagctgggattacaggcacacaccaccaccgcactcagctaatttttgtatttttagtagaggtggggttttaccatgttggccaggctggtcttaaactcctgaccttgtaatcatcccgcctcggcctcctaaagtgctaggattacaggcatgagccaccgcacccggcccagataatttttaatagcctttgatcatggggtgagtgagggagtaggtatacttggcaaatgcatggttctctgatttctagctctaaagcagccttatctgaatccccaaatcttgtgatgctgagtaccattactgaaccagtctgcacggtaggcatctgctaccaaaatttacctcctacctggtaggtgtcatctgataagaaagaagacaggttattttaattttttgagataatcacagaaaattgcagcccatactctttattaccgaattcaagtttggaaatagaccctttgttttaaatcatgatgggtctttatcccaatcatttatctgggtcatttttccaactttggagttctaggaaagaaccttgaaaacctgatatgattctgcagcatgaggtctacggtgaccatttgggcaaagctccagtggcaatcatttattgtgttttgcatttcctgggatttattgaaataagaattcactgtgattatgtagtcttctggctagtatcaggcagctctgcttttaatttggttaattttattttctctgaagagggagaagaggtacaatttaatcttggcctccacaagcatattaaagctcacgtgttaatcagtgcattcttatgctcctacattaaatgccttgggtaaatggataaatggacatgtgcccagctttaattttttttgcaacagaaagatcagacttccgtatggcatcgttggatttcagaggctttctggtgtatctgtaaatctgaatgttgccttctgccagtctgtataaccaggtgattcatgctgcaaatgaaatcaggaagcagtaaagtgttaaagcaagagtattgtccaattcacttgtcttcctgatccttgtactttatttcacgtgtcggtgtttacattacatacttatatttcctgtgaaagaaagagttaaataaattgtagcagtttga

SEQ ID NO: 106563 - DNA, 1930 bp, Homo sapiens
  Payload ID: 925
  Gene Symbol: ALG9
  Gene Name: ALG9, alpha-1,2-mannosyltransferase
  Uniprot ID: Q9H6U8
  ENST ID: ENST00000531154
  CDS Start-End: 474-1817
tgaacataagggggaatgaataaagccatcaaaagcaatgaccttgttaagaaaagaaagaaaaggagaatgacagctttgtggccttcaagttatctgggaacaaagcaggacaagtctgggcacctgaaggatctactgctttcaagtgtctgctttcagcaaggttatgtgctgctctcctgagcaacatctctgactgtgatgaaacattcaactactgggagccaacacactacctcatctatggggaagggtttcagacttgggaatattccccagcatatgccattcgctcctatgcttacctgttgcttcatgcctggccagctgcatttcatgcaagaattctacaaactaataagattcttgtgttttactttttgcgatgtcttctggcttttgtgagctgtatttgtgaactttacttttacaaggctgtgtgcaagaagtttgggttgcacgtgagtcgaatgatgctagccttcttggttctcagcactggcatgttttgctcatcatcagcattccttcctagtagcttctgtatgtacactacgttgatagccatgactggatggtatatggacaagacttccattgctgtgctgggagtagcagctggggctatcttaggctggccattcagtgcagctcttggtttacccattgcctttgatttgctggtcatgaaacacaggtggaagagtttctttcattggtcgctgatggccctcatactatttctggtgcctgtggtggtcattgacagctactattatgggaagttggtgattgcaccactcaacattgttttgtataatgtctttactcctcatggacctgatctttatggtacagaaccctggtatttctatttaattaatggatttctgaatttcaatgtagcctttgctttggctctcctagtcctaccactgacttctcttatggaatacctgctgcagagatttcatgttcagaatttaggccacccgtattggcttaccttggctccaatgtatatttggtttataattttcttcatccagcctcacaaagaggagagatttcttttccctgtgtatccacttatatgtctctgtggcgctgtggctctctctgcacttcagcacagttttctgtacttccagaaatgttaccactttgtgtttcaacgatatcgcctggagcactatactgtgacatcgaattggctggcattaggaactgtcttcctgtttgggctcttgtcattttctcgctctgtggcactgttcagaggatatcacgggccccttgatttgtatccagaattttaccgaattgctacagacccaaccatccacactgtcccagaaggcagacctgtgaatgtctgtgtgggaaaagagtggtatcgatttcccagcagcttccttcttcctgacaattggcagcttcagttcattccatcagagttcagaggtcagttaccaaaaccttttgcagaaggacctctggccacccggattgttcctactgacatgaatgaccagaatctagaagagccatccagatatattgatatcagtaaatgccattatttagtggatttggacaccatgagagaaacaccccgggagccaaaatattcatccaataaagaagaatggatcagcttggcctatagaccattccttgatgcttctagatcttcaaagctgctgcgggcattctatgtccccttcctgtcagatcagtatacagtgtacgtaaactacaccatcctcaaaccccggaaagcaaagcaaatcaggaagaaaagtggaggttagcaacacacctgtggccccaaaggacaaccatcttgttaactattgattccagtgacctgactccctgcaagtcatcgcctgtaacatttgtaataaaggtcttctgacatgaa

SEQ ID NO: 106564 - DNA, 526 bp, Homo sapiens
  Payload ID: 925
  Gene Symbol: ALG9
  Gene Name: ALG9, alpha-1,2-mannosyltransferase
  ENST ID: ENST00000524671
  CDS Start-End: 1-107
caaaatattcatccaataaagaagaatggatcagcttggcctatagaccattccttgatgcttctagttttgaaggctggaagaccaagatcacgatgccagtatagtcaagttctggtaaaggccatctttctggctgcagacagctgacttgtatcctcacatggctgcaagaagacaagctagctctctagcctcttcttataaggacattaatcccattgttgagtgctccactcttttgacctaattcccttccaaaggcccacctccaaataccatcacatagatcttcaaagctgctgcgggcattctatgtccccttcctgtcagatcagtatacagtgtacgtaaactacaccatcctcaaaccccggaaagcaaagcaaatcaggaagaaaagtggaggttagcaacacacctgtggccccaaaggacaaccatcttgttaactattgattccagtgacctgactccctgcaagtcatcgcctgtaacatttgtaataaaggtcttctgacatgaa

SEQ ID NO: 106565 - DNA, 385 bp, Homo sapiens
  Payload ID: 925
  Gene Symbol: ALG9
  Gene Name: ALG9, alpha-1,2-mannosyltransferase
  ENST ID: ENST00000525910
  CDS Start-End: 1-73
agaagaatggatcagcttggcctatagaccattccttgatgcttctagggtctcgctctgttgcccaggctagagtgcagtgacacaatctctgttcactgcaacctccacctcctggactcaagccatcctcccatctcagtctcccaaatcttcaaagctgctgcgggcattctatgtccccttcctgtcagatcagtatacagtgtacgtaaactacaccatcctcaaaccccggaaagcaaagcaaatcaggaagaaaagtggaggttagcaacacacctgtggccccaaaggacaaccatcttgttaactattgattccagtgacctgactccctgcaagtcatcgcctgtaacatttgtaataaaggtcttctgacatg

SEQ ID NO: 106566 - DNA, 804 bp, Homo sapiens
  Payload ID: 925
  Gene Symbol: ALG9
  Gene Name: ALG9, alpha-1,2-mannosyltransferase
  ENST ID: ENST00000612489
  CDS Start-End: 100-504
gtcttttgtccctcggcggacaccgtttgccagccaaagctatgtctgcgcgctcaccgacttcatagggtgccgaattcttttttccccaggcttgccatggctagtcgaggggctcggcagcgcctgaagggcagcggggccagcagtggggatacggccccggctgcggacaagctgcgggagctgctgggcagccgagaggcgggcggcgcggagcaccggaccgagttatctgggaacaaagcaggacaagtctgggcacctgaaggatctactgctttcaagtgtctgctttcagcaaggttatgtgctgctctcctgagcaacatctctgactgtgatgaaacattcaactactgggagccagtagacacactacctcatctatggggaagggtttcagacttgggaatattccccagcatatgccattcgctcctatgcttacctgttgcttcatgcctggccagctgcatttcatgcaagaattctacaaactaataagattcttgtgttttactttttgcgatgtcttctggcttttgtgagctgtatttgtgaactttacttttacaaggctgtgtgcaagaagtttgggttgcacgtgagtcgaatgatgctagccttcttggttctcagcactggcatgttttgctcatcatcagcattccttcctagtagcttctgtatgtacactacgttgatagccatgactggatggtatatggacaagacttccattgctgtgctgggagtagcagctggggctatcttaggctggccattcagtgcagctcttgg

SEQ ID NO: 106567 - DNA, 1373 bp, Homo sapiens
  Payload ID: 925
  Gene Symbol: ALG9
  Gene Name: ALG9, alpha-1,2-mannosyltransferase
  ENST ID: ENST00000613181
  CDS Start-End: 65-571
aaagctatgtctgcgcgctcaccgacttcatagggtgccgaattcttttttccccaggcttgccatggctagtcgaggggctcggcagcgcctgaagggcagcggggccagcagtggggatacggccccggctgcggacaagctgcgggagctgctgggcagccgagaggcgggcggcgcggagcaccggaccgagttatctgggaacaaagcaggacaagtctgggcacctgaaggatctactgctttcaagtgtctgctttcagcaaggttatgtgctgctctcctgagcaacatctctgactgtgatgaaacattcaactactgggagccaacacactacctcatctatggggaagggtttcagacttgggaatattccccagcatatgccattcgctcctatgcttacctgttgcttcatgcctggccagctgcatttcatgcaagaattctacaaactaataagggctgtgtgcaagaagtttgggttgcacgtgagtcgaatgatgctagccttcttggttctcagcactggcatgttttgctcatcatcagcattccttcctagtagcttctgtatgtacactacgttgatagccatgactggatggtatatggacaagacttccattgctgtgctgggagtagcagctggggctatcttaggctggccattcagtgcagctcttggtttacccattgcctttgatttgctggtcatgaaacacaggtggaagagtttctttcattggtcgctgatggccctcatactatttctggtgcctgtggtggtcattgacagctactattatgggaagttggtgattgcaccactcaacattgttttgtataatgtctttactcctcatggacctgatctttatggtacagaaccctggtatttctatttaattaatggatttctgaatttcaatgtagcctttgctttggctctcctagtcctaccactgacttctcttatggaatacctgctgcagagatttcatgttcagaatttaggccacccgtattggcttaccttggctccaatgtatatttggtttataattttcttcatccagcctcacaaagaggagagatttcttttccctgtgtatccacttatatgtctctgtggcgctgtggctctctctgcacttcagaaatgttaccactttgtgtttcaacgatatcgcctggagcactatactgtgacatcgaattggctggcattaggaactgtcttcctgtttgggctcttgtcattttctcgctctgtggcactgttcagaggatatcacgggccccttgatttgtatccagaattttaccgaattgctacagacccaaccatccacactgtcccagaa

SEQ ID NO: 106568 - DNA, 2020 bp, Homo sapiens
  Payload ID: 925
  Gene Symbol: ALG9
  Gene Name: ALG9, alpha-1,2-mannosyltransferase
  ENST ID: ENST00000619129
  CDS Start-End: 79-387
accgtttgccagccaaagctatgtctgcgcgctcaccgacttcatagggtgccgaattcttttttccccaggcttgccatggctagtcgaggggctcggcagcgcctgaagggcagcggggccagcagtggggatacggccccggctgcggacaagctgcgggagctgctgggcagccgagaggcgggcggcgcggagcaccggaccgaacacactacctcatctatggggaagggtttcagacttgggaatattccccagcatatgccattcgctcctatgcttacctgttgcttcatgcctggccagctgcatttcatgcaagaattctacaaactaataagattcttgtgttttactttttgcgatgtcttctggcttttgtgagctgtatttgtgaactttacttttacaaggctgtgtgcaagaagtttgggttgcacgtgagtcgaatgatgctagccttcttggttctcagcactggcatgttttgctcatcatcagcattccttcctagtagcttctgtatgtacactacgttgatagccatgactggatggtatatggacaagacttccattgctgtgctgggagtagcagctggggctatcttaggctggccattcagtgcagctcttggtttacccattgcctttgatttgctggtcatgaaacacaggtggaagagtttctttcattggtcgctgatggccctcatactatttctggtgcctgtggtggtcattgacagctactattatgggaagttggtgattgcaccactcaacattgttttgtataatgtctttactcctcatggacctgatctttatggtacagaaccctggtatttctatttaattaatggatttctgaatttcaatgtagcctttgctttggctctcctagtcctaccactgacttctcttatggaatacctgctgcagagatttcatgttcagaatttaggccacccgtattggcttaccttggctccaatgtatatttggtttataattttcttcatccagcctcacaaagaggagagatttcttttccctgtgtatccacttatatgtctctgtggcgctgtggctctctctgcacttcagaaatgttaccactttgtgtttcaacgatatcgcctggagcactatactgtgacatcgaattggctggcattaggaactgtcttcctgtttgggctcttgtcattttctcgctctgtggcactgttcagaggatatcacgggccccttgatttgtatccagaattttaccgaattgctacagacccaaccatccacactgtcccagaaggcagacctgtgaatgtctgtgtgggaaaagagtggtatcgatttcccagcagcttccttcttcctgacaattggcagcttcagttcattccatcagagttcagaggtcagttaccaaaaccttttgcagaaggacctctggccacccggattgttcctactgacatgaatgaccagaatctagaagagccatccagatatattgatatcagtaaatgccattatttagtggatttggacaccatgagagaaacaccccgggagccaaaatattcatccaataaagaagaatggatcagcttggcctatagaccattccttgatgcttctaggtctcaatttgttgcccaggctgggctcaaactcctgggctcaagcaatcctcccacctcagcctctcaaaatattgggattacaggcctgagccaccgtgcctggccattaacttctccttgactgggatcttcaaagctgctgcgggcattctatgtccccttcctgtcagatcagtatacagtgtacgtaaactacaccatcctcaaaccccggaaagcaaagcaaatcaggaagaaaagtggaggttagcaacacacctgtggccccaaaggacaaccatcttgttaactattgattccagtgacctgactccctgcaagtcatcgcctgtaacatttgtaataaaggtcttctgacatgaatac

SEQ ID NO: 106569 - DNA, 2069 bp, Homo sapiens
  Payload ID: 925
  Gene Symbol: ALG9
  Gene Name: ALG9, alpha-1,2-mannosyltransferase
  Uniprot ID: Q9H6U8
  ENST ID: ENST00000616540
  CDS Start-End: 100-1956
gtcttttgtccctcggcggacaccgtttgccagccaaagctatgtctgcgcgctcaccgacttcatagggtgccgaattcttttttccccaggcttgccatggctagtcgaggggctcggcagcgcctgaagggcagcggggccagcagtggggatacggccccggctgcggacaagctgcgggagctgctgggcagccgagaggcgggcggcgcggagcaccggaccgagttatctgggaacaaagcaggacaagtctgggcacctgaaggatctactgctttcaagtgtctgctttcagcaaggttatgtgctgctctcctgagcaacatctctgactgtgatgaaacattcaactactgggagccaacacactacctcatctatggggaagggtttcagacttgggaatattccccagcatatgccattcgctcctatgcttacctgttgcttcatgcctggccagctgcatttcatgcaagaattctacaaactaataagattcttgtgttttactttttgcgatgtcttctggcttttgtgagctgtatttgtgaactttacttttacaaggctgtgtgcaagaagtttgggttgcacgtgagtcgaatgatgctagccttcttggttctcagcactggcatgttttgctcatcatcagcattccttcctagtagcttctgtatgtacactacgttgatagccatgactggatggtatatggacaagacttccattgctgtgctgggagtagcagctggggctatcttaggctggccattcagtgcagctcttggtttacccattgcctttgatttgctggtcatgaaacacaggtggaagagtttctttcattggtcgctgatggccctcatactatttctggtgcctgtggtggtcattgacagctactattatgggaagttggtgattgcaccactcaacattgttttgtataatgtctttactcctcatggacctgatctttatggtacagaaccctggtatttctatttaattaatggatttctgaatttcaatgtagcctttgctttggctctcctagtcctaccactgacttctcttatggaatacctgctgcagagatttcatgttcagaatttaggccacccgtattggcttaccttggctccaatgtatatttggtttataattttcttcatccagcctcacaaagaggagagatttcttttccctgtgtatccacttatatgtctctgtggcgctgtggctctctctgcacttcagcacagttttctgtacttccagaaatgttaccactttgtgtttcaacgatatcgcctggagcactatactgtgacatcgaattggctggcattaggaactgtcttcctgtttgggctcttgtcattttctcgctctgtggcactgttcagaggatatcacgggccccttgatttgtatccagaattttaccgaattgctacagacccaaccatccacactgtcccagaaggcagacctgtgaatgtctgtgtgggaaaagagtggtatcgatttcccagcagcttccttcttcctgacaattggcagcttcagttcattccatcagagttcagaggtcagttaccaaaaccttttgcagaaggacctctggccacccggattgttcctactgacatgaatgaccagaatctagaagagccatccagatatattgatatcagtaaatgccattatttagtggatttggacaccatgagagaaacaccccgggagccaaaatattcatccaataaagaagaatggatcagcttggcctatagaccattccttgatgcttctagatcttcaaagctgctgcgggcattctatgtccccttcctgtcagatcagtatacagtgtacgtaaactacaccatcctcaaaccccggaaagcaaagcaaatcaggaagaaaagtggaggttagcaacacacctgtggccccaaaggacaaccatcttgttaactattgattccagtgacctgactccctgcaagtcatcgcctgtaacatttgtaataaaggtcttctgacatgaa

SEQ ID NO: 106570 - DNA, 1147 bp, Homo sapiens
  Payload ID: 925
  Gene Symbol: ALG9
  Gene Name: ALG9, alpha-1,2-mannosyltransferase
  ENST ID: ENST00000618252
  CDS Start-End: 62-658
gctatgtctgcgcgctcaccgacttcatagggtgccgaattcttttttccccaggcttgccatggctagtcgaggggctcggcagcgcctgaagggcagcggggccagcagtggggatacggccccggctgcggacaagctgcgggagctgctgggcagccgagaggcgggcggcgcggagcaccggaccgagttatctgggaacaaagcaggacaagtctgggcacctgaaggatctactgctttcaagtgtctgctttcagcaaggttatgtgctgctctcctgagcaacatctctgactgtgatgaaacattcaactactgggagccaacacactacctcatctatggggaagggtttcagacttgggaatattccccagcatatgccattcgctcctatgcttacctgttgcttcatgcctggccagctgcatttcatgcaagaattctacaaactaataagattcttgtgttttactttttgcgatgtcttctggcttttgtgagctgtatttgtgaactttacttttacaaggctgtgtgcaagaagtttgggttgcacgtgagtcgaatgatgctagccttcttggttctcagcactggcatgttttgctcatcatcagtttacccattgcctttgatttgctggtcatgaaacacaggtggaagagtttctttcattggtcgctgatggccctcatactatttctggtgcctgtggtggtcattgacagctactattatgggaagttggtgattgcaccactcaacattgttttgtataatgtctttactcctcatggacctgatctttatgggacatggatggaactgaaagccattatcctcagcaaactaacacaggagcagaaaaccaaacaccacatcttctcacttataaatgggagctgaacgatgagaacacatggacacagggaggggagcaacatacactggggcctgtggagggggcggagggagggagagagcatcaggataatagctaatgcatgctgggcttaatatctaggtgatgggttgatctgtgcagcaaaccaccatggctcaagtttacctatgtaacaaacctgcacatcctgcacatgtaccccagaacttaaaacaatttaaaaacaggaaaaaa

SEQ ID NO: 106571 - DNA, 2028 bp, Homo sapiens
  Payload ID: 925
  Gene Symbol: ALG9
  Gene Name: ALG9, alpha-1,2-mannosyltransferase
  Uniprot ID: Q9H6U8
  ENST ID: ENST00000614444
  CDS Start-End: 52-1887
cgcgctcaccgacttcatagggtgccgaattcttttttccccaggcttgccatggctagtcgaggggctcggcagcgcctgaagggcagcggggccagcagtggggatacggccccggctgcggacaagctgcgggagctgctgggcagccgagaggcgggcggcgcggagcaccggaccgagttatctgggaacaaagcaggacaagtctgggcacctgaaggatctactgctttcaagtgtctgctttcagcaaggttatgtgctgctctcctgagcaacatctctgactgtgatgaaacattcaactactgggagccaacacactacctcatctatggggaagggtttcagacttgggaatattccccagcatatgccattcgctcctatgcttacctgttgcttcatgcctggccagctgcatttcatgcaagaattctacaaactaataagattcttgtgttttactttttgcgatgtcttctggcttttgtgagctgtatttgtgaactttacttttacaaggctgtgtgcaagaagtttgggttgcacgtgagtcgaatgatgctagccttcttggttctcagcactggcatgttttgctcatcatcagcattccttcctagtagcttctgtatgtacactacgttgatagccatgactggatggtatatggacaagacttccattgctgtgctgggagtagcagctggggctatcttaggctggccattcagtgcagctcttggtttacccattgcctttgatttgctggtcatgaaacacaggtggaagagtttctttcattggtcgctgatggccctcatactatttctggtgcctgtggtggtcattgacagctactattatgggaagttggtgattgcaccactcaacattgttttgtataatgtctttactcctcatggacctgatctttatggtacagaaccctggtatttctatttaattaatggatttctgaatttcaatgtagcctttgctttggctctcctagtcctaccactgacttctcttatggaatacctgctgcagagatttcatgttcagaatttaggccacccgtattggcttaccttggctccaatgtatatttggtttataattttcttcatccagcctcacaaagaggagagatttcttttccctgtgtatccacttatatgtctctgtggcgctgtggctctctctgcacttcagaaatgttaccactttgtgtttcaacgatatcgcctggagcactatactgtgacatcgaattggctggcattaggaactgtcttcctgtttgggctcttgtcattttctcgctctgtggcactgttcagaggatatcacgggccccttgatttgtatccagaattttaccgaattgctacagacccaaccatccacactgtcccagaaggcagacctgtgaatgtctgtgtgggaaaagagtggtatcgatttcccagcagcttccttcttcctgacaattggcagcttcagttcattccatcagagttcagaggtcagttaccaaaaccttttgcagaaggacctctggccacccggattgttcctactgacatgaatgaccagaatctagaagagccatccagatatattgatatcagtaaatgccattatttagtggatttggacaccatgagagaaacaccccgggagccaaaatattcatccaataaagaagaatggatcagcttggcctatagaccattccttgatgcttctagatcttcaaagctgctgcgggcattctatgtccccttcctgtcagatcagtatacagtgtacgtaaactacaccatcctcaaaccccggaaagcaaagcaaatcaggaagaaaagtggaggttagcaacacacctgtggccccaaaggacaaccatcttgttaactattgattccagtgacctgactccctgcaagtcatcgcctgtaacatttgtaataaaggtcttctgacatgaatactggaatctgggtgctctgggctagt

SEQ ID NO: 106572 - DNA, 1445 bp, Homo sapiens
  Payload ID: 926
  Gene Symbol: ACER1
  Gene Name: alkaline ceramidase 1
  Uniprot ID: Q8TDN7
  ENST ID: ENST00000301452
  CDS Start-End: 79-873
cctcatcagggcccagccttcccaagctcgccttctctctgccgggcgcagccggctggtggtggccactgagacaagatgcctagcatcttcgcctatcagagctccgaggtggactggtgtgagagcaacttccagtactcggagctggtggccgagttctacaacacgttctccaatatccccttcttcatcttcgggccactgatgatgctcctgatgcacccgtatgcccagaagcgctcccgctacatttacgttgtctgggtcctcttcatgatcataggcctgttctccatgtatttccacatgacgctcagcttcctgggccagctgctggacgagatcgccatcctgtggctcctgggcagtggctatagcatatggatgccccgctgctatttcccctccttccttggggggaacaggtcccagttcatccgcctggtcttcatcaccactgtggtcagcacccttctgtccttcctgcggcccacggtcaacgcctacgccctcaacagcattgccctgcacattctctacatcgtgtgccaggagtacaggaagaccagcaataaggagcttcggcacctgattgaggtctccgtggttttatgggctgttgctctgaccagctggatcagtgaccgtctgctttgcagcttctggcagaggattcatttcttctatctgcacagcatctggcatgtgctcatcagcatcaccttcccttatggcatggtcaccatggccttggtggatgccaactatgagatgccaggtgaaaccctcaaagtccgctactggcctcgggacagttggcccgtggggctgccctacgtggaaatccggggtgatgacaaggactgctgagacctgccagcctcttgactatccaaccacccaacaacttgcctgtgtcttgagaagatagccccggtcaggacttgcacctgcgggacactcgtggttccttcctctgtttccccttccgtgtcctccttgtcctgcgctgccctgccttgaggcagatgatggactttgtgacatctctgagcagcagcctggtgactgtggggggctgtctcgtgcatctcccctccatgaccccccccatcctctttcatttcctcctctgtgtccacagcctcccagtgaccattgtcacatgagctggtgggactgtgtcaccaggtactggggtgactgaaggatgtggcatctaaatattagcttctaggctgggaacggtggctcacgcctataatcccagcactttgggaggccgaggtgggtggatcacctgaggtcagaagttcaagactagcctggccaacatggcaaaaccccgcctctactaaaaatacaaaaattagccgggcgtggtggtgcatgcctgtaatctcagctacttgggaggctgaggcaggagaatcgcttgaacc

SEQ ID NO: 106573 - DNA, 2238 bp, Homo sapiens
  Payload ID: 927
  Gene Symbol: ACER2
  Gene Name: alkaline ceramidase 2
  Uniprot ID: Q5QJU3
  ENST ID: ENST00000340967
  CDS Start-End: 27-854
agctgctccaatgccccggagtggccatgggcgccccgcactggtgggaccagctgcaggctggtagctcggaggtggactggtgcgaggacaactacaccatcgtgcctgctatcgccgagttctacaacacgatcagcaatgtcttatttttcattttaccgcccatctgcatgtgcttgtttcgtcagtatgcaacatgcttcaacagtggcatctacttaatctggactcttttggttgtagtgggaattggatccgtctacttccatgcaacccttagtttcttgggtcagatgcttgatgaacttgcagtcctttgggttctgatgtgtgctttggccatgtggttccccagaaggtatctaccaaagatctttcggaatgaccggggtaggttcaaggtggtggtcagtgtcctgtctgcggttacgacgtgcctggcatttgtcaagcctgccatcaacaacatctctctgatgaccctgggagttccttgcactgcactgctcatcgcagagctaaagaggtgtgacaacatgcgtgtgtttaagctgggcctcttctcgggcctctggtggaccctggccctgttctgctggatcagtgaccgagctttctgcgagctgctgtcatccttcaacttcccctacctgcactgcatgtggcacatcctcatctgccttgctgcctacctgggctgtgtatgctttgcctactttgatgctgcctcagagattcctgagcaaggccctgtcatcaagttctggcccaatgagaaatgggccttcattggtgtcccctatgtgtccctcctgtgtgccaacaagaaatcatcagtcaagatcacgtgatggcaagatggtggctggcttctctgcttatcgcccctcatgcagtgggcttcctttgctaggaagacagccaagggagttcgaatagttggggtgtgggctatcttttcaaaaatctatttgctggggctcttaatttctttagtgttctttgtatgtagggatttaaactttgtcatatggtacaaatattccctgcccccctgcagtttcccatttgtctttcagtatgttaatatttttgtgccatactggttttaaactttcatgttgtcacatctgttaatcttttctttaggatttctggattttgtgtaatttttaaaaaggtcccctcctcctccctaatgtgtctgtggaccacctggattccactgtacaaggggaaaagtgtctattcctttcccaaagatggaaaatggagggcttagggacactagatgcatctttctcagcatcacttccagatgcagtgacttgttgggctgcgtccttaatggccatggcagagcagtcccttgggggatccagccctgtacaatgcatctcttcctggagaaagctggcctgctccagaccccaccattcccaggcgcccttggagtggactctactgatgacagacagaccctctgagagacaagaccctctgactctgtgatggaagatgccagagattttcctttggggtaattgtccttaaacaaaaccaaacagatgaaacacacacaggacttgtggctaaaaaggctagtttttcacttgcatttctcaactaacccaggttttacatgcatctgtgaatccttttactactacctctgtggagagatggagagacttcagataaacgtgaagctaatgagtaaaaccctctctgccaaaacctacactccactttaggcccttcttgaagatgagcacaatttttaaatactgagcacaatttttaaatactgacatcacttcctcttccccctcccaccccagctcagcagcctcaaatctacagagaagaagaattatggcatgaacattcccacagacccaccatctttaagacttgacctctgtaagtttaccaaagggctcctcacaattgtggtgggggttctggttcaaaatttggagcaaacatgaagtttttggaaacgttttctcatttgaagcctccagtatgctgtactattctggaaattaccttcaagagtctcacttcttgtttctgttgtgttttctgtgggcatcatgttcttcacgcttgcagtagaaggtgctttctcggtttcccagagtatccaacggctcacctttctcaagtgctggcagtagctatgcactcacgggctggtttgggtcgctggtgcagcagcgcaaatctgtt

SEQ ID NO: 106574 - DNA, 3500 bp, Homo sapiens
  Payload ID: 928
  Gene Symbol: ACER3
  Gene Name: alkaline ceramidase 3
  ENST ID: ENST00000278544
  CDS Start-End: 28-258
cgcctgggcggcggcggcggcggcgtgatggctccggccgcggaccgagagggctactggggccccacgacctccacgctggactggtgcgaggagaactactccgtgacctggtacatcgccgagttctggaatacagtgagtaacctgatcatgattatacctccaatgttcggtgcagttcagagtgttagagacggtctggaaaagcggtacattgcttcttatttagcactcacagaagtacttcagatttgagaaaagagcacataactatggctaaaagatgggatttgtaatctctggagttttttacttcaagtctgaggatccaaactgactaagtgaagtaaagaaataagcagctattggatgaactcccaatgatatacagctgttgcatatttgtgtactgcatgtttgaatgtttcaagatcaagaactcagtaaactaccatctgctttttaccttagttctattcagtttaatagtaaccacagtttaccttaaggtaaaagagccgatattccatcaggtcatgtatggaatgttggtctttacattagtacttcgatctatttatattgttacatgggtttatccatggcttagaggactgggttatacatcattgggtatatttttattgggatttttattttggaatatagataacatattttgtgagtcactgaggaactttcgaaagaaggtaccacctatcataggtattaccacacaatttcatgcatggtggcatattttaactggccttggttcctatcttcacatccttttcagtttgtatacaagaacactttacctgagatataggccaaaagtgaagtttctctttggaatctggccagtgatcctgtttgagcctctcaggaagcattgatgaatcattccaccaagaaaacaaacaagcacctaccatagacctggcagaataaataaggaaatccttaaagatctacaagttcaaatatgtcatgaccatcacagcagaggagtgactttctgactaatgctgccacccacacagagaataaggagtagggcctgctgggtgtttagctcatggctttatcttatttgtccccctcctcctttcacgctccagtttataaagaaacagagatgatgtgtgtgtatgcctcaaatgcagaaacagttgggcttttcttaacaggttaacagtttgtgctggttataagaaattaaccttcttttctttttgccaagggttgcatgtgaattatacctttcttaatatttgattaaataatgcagtcagctaagagccaacaaaaccccatatccagatagttagctgtgagccagcactcagctgtgtcagatttgattaatattgtattaatctcatggatggttctcaaaggtaaaaaaagagagagaaagagagagagctagctgtgggattctgtgtagttcttcactatctgttccagggctagtcggaggatcataagcaagctcagacctgcccccagttcagtacttgaccacatcccaggatttatggtgtctgtctatggccacagccaaccagaatgagtgggtcatcttataacctttctgaagctccatgaggacatgtatagaatgctgcaccttcagccagctctgctctgatctttgcagatctttaagttgtcactgtttctacggctagacaaatatgactggtggtctagactacccatagttcatcctcctcacataacttatttgaagttgtcagggaatgtcattacactctgatttttaaaattatgcagtattttccagttctcagagaggtcatggttgtgcccagggaagtgtgttgcattaactaaagctaaaattatcagaatcctatttacataaagcatattaaaatatctgctccttaattttctgaaggaaatagatgtaagtttctgctacttgaaacctacagaaccgacaaaaattagggtgctaaaaaaatgacagtgaaatctcatcgtaaggcagctagttctaatttgcatttgaatgtataacaaattgcatcacttttcacaaacttaacacctgcctggagtaaaaatctgatttgacccctctgctcatgtttcatcatatttgtagctctgcatcatttagcatttttatgactttttttgctttatataaattattgtaaaatccagattgtttttaccacatgatgacgtgactcaggattaaatcctgagctacagtttcaaaaggaaaatcatttttttcttatgcaaagatggtaaaacactgttgtcattttttccagtattcaataagtagcctttgtacaaatttaaaaccaaaaactattctgttgtttttcttcacctactagccttagtttttaaccaagtatccaaggatgtcaacttgacatccttcccttagcatgccaacaagccattagactgattcttccacctatttttatgaacctccaggaagaaaaacacttgccaaaacattaagagaactttgattctgccttaagagggtataaaactaaaccatttgaaggcacagcccataagactatacttgattttgccccaagattctgacttctggctacatttcacctgcagttacctgggctatcggccgtgatacattttttaattcatttgttttccaccattatatttttatacttttcagttagatatacttctgcataaagagtatatatacagtgtaggataaaggcatatcgtacatggcaatgctgttaaacatggtaagactgaggttctgcaggattaaagtcagattaagggtacagaaagcacaccttgatactgaggccatttagagcaatttgtttaatgagtggttcagccatcaccaccagtggccacctgttcaataaaattgcctagcaccacagtggagagtcatctacaccccaaggtgagctgtaagactggccaattctttgaagacctttttttctgttgggagaatggaaagcagaaagggaagccaggctctttaatgttccaagtcagctgtgcctcacacaaggctctctttttagctactaagtaacatactcaagactttgtatctgtgcagcattttatggaaatcactggtgacctataggatattactaaattatttcaatagctttatttttttcctacttggattctaggtggacattacagagttgaattcctcactaccccctcccgctgtcatttgttttattggaaaacttcatgttaactagagtgtacaaaaagtctgtttcctgctgagccaatagtgatttgtttgcatatcacctaatgtgaaaagtgctcatctgtgaactctacagcaaattatattttagaaaatactttgtgaggccgggcatggtggcagagcgagactccgtctcaaaaaaaaaaaaaaaaaaaaaaaagaaaagaaaagaaaatataaggatgtaaaagaa

SEQ ID NO: 106575 - DNA, 1269 bp, Homo sapiens
  Payload ID: 928
  Gene Symbol: ACER3
  Gene Name: alkaline ceramidase 3
  ENST ID: ENST00000526597
  CDS Start-End: 378-896
agtgagcggagcgcctgggcggcggcggcggcggcgtgatggctccggccgcggaccgagagggctactggggccccacgacctccacgctggactggtgcgaggagaactactccgtgacctgggaatacagtgagtaacctgatcatgattatacctccaatgttcggtgcagttcagagtgttagagacggtctggaaaagcggtacattgcttcttatttagcactcacagaagtacttcagatttgagaaaagagcacataactatggctaaaagatgggatttgtaatctctggagttttttacttcaagtctgaggatccaaactgactaagtgaagtaaagaaataagcagctattggatgaactcccaatgatatacagctgttgcatatttgtgtactgcatgtttgaatgtttcaagatcaagaactcagtaaactaccatctgctttttaccttagttctattcagtttaatagtaaccacagtttaccttaaggtaaaagagccgatattccatcaggtcatgtatggaatgttggtctttacattagtacttcgatctatttatattgttacatgggtttatccatggcttagaggactgggttatacatcattgggtatatttttattgggatttttattttggaatatagataacatattttgtgagtcactgaggaactttcgaaagaaggtaccacctatcataggtattaccacacaatttcatgcatggtggcatattttaactggccttggttcctatcttcacatccttttcagtttgtatacaagaacactttacctgagatataggccaaaagtgaagtttctctttggaatctggccagtgatcctgtttgagcctctcaggaagcattgatgaatcattccaccaagaaaacaaacaagcacctaccatagacctggcagaataaataaggaaatccttaaagatctacaagttcaaatatgtcatgaccatcacagcagaggagtgactttctgactaatgctgccacccacacagagaataaggagtagggcctgctgggtgtttagctcatggctttatcttatttgtccccctcctcctttcacgctccagtttataaagaaacagagatgatgtgtgtgtatgcctcaaatgcagaaacagttgggcttttcttaacaggttaacagtttgtgctggttataagaaattaaccttcttttctttttgccaagggttgcatgtgaattatacctttctt

SEQ ID NO: 106576 - DNA, 2093 bp, Homo sapiens
  Payload ID: 928
  Gene Symbol: ACER3
  Gene Name: alkaline ceramidase 3
  ENST ID: ENST00000531352
  CDS Start-End: 35-190
agcggagcgcctgggcggcggcggcggcggcgtgatggctccggccgcggaccgagagggctactggggccccacgacctccacgctggactggtgcgaggagaactactccgtgacctggtacatcgccgagttctgttccttcctaccatcctccctgaagagcaacctcaaggaatacagtgagtaacctgatcatgattatacctccaatgttcggtgcagttcagagtgttagagacggtctggaaaagcggtacattgcttcttatttagcactcacagtggtaggaatgggatcctggtgcttccacatgactctgaaatatgaaatgcagctattggatgaactcccaatgatatacagctgttgcatatttgtgtactgcatgtttgaatgtttcaagatcaagaactcagtaaactaccatctgctttttaccttagttctattcagtttaatagtaaccacagtttaccttaaggtaaaagagccgatattccatcaggtcatgtatggaatgttggtctttacattagtacttcgatctatttatattgttacatgggtttatccatggcttagaggactgggttatacatcattgggtatatttttattgggatttttattttggaatatagataacatattttgtgagtcactgaggaactttcgaaagaaggtaccacctatcataggtattaccacacaatttcatgcatggtggcatattttaactggccttggttcctatcttcacatccttttcagtttgtatacaagaacactttacctgagatataggccaaaagtgaagtttctctttggaatctggccagtgatcctgtttgagcctctcaggaagcattgatgaatcattccaccaagaaaacaaacaagcacctaccatagacctggcagaataaataaggaaatccttaaagatctacaagttcaaatatgtcatgaccatcacagcagaggagtgactttctgactaatgctgccacccacacagagaataaggagtagggcctgctgggtgtttagctcatggctttatcttatttgtccccctcctcctttcacgctccagtttataaagaaacagagatgatgtgtgtgtatgcctcaaatgcagaaacagttgggcttttcttaacaggttaacagtttgtgctggttataagaaattaaccttcttttctttttgccaagggttgcatgtgaattatacctttcttaatatttgattaaataatgcagtcagctaagagccaacaaaaccccatatccagatagttagctgtgagccagcactcagctgtgtcagatttgattaatattgtattaatctcatggatggttctcaaaggtaaaaaaagagagagaaagagagagagctagctgtgggattctgtgtagttcttcactatctgttccagggctagtcggaggatcataagcaagctcagacctgcccccagttcagtacttgaccacatcccaggatttatggtgtctgtctatggccacagccaaccagaatgagtgggtcatcttataacctttctgaagctccatgaggacatgtatagaatgctgcaccttcagccagctctgctctgatctttgcagatctttaagttgtcactgtttctacggctagacaaatatgactggtggtctagactacccatagttcatcctcctcacataacttatttgaagttgtcagggaatgtcattacactctgatttttaaaattatgcagtattttccagttctcagagaggtcatggttgtgcccagggaagtgtgttgcattaactaaagctaaaattatcagaatcctatttacataaagcatattaaaatatctgctccttaattttctgaaggaaatagatgtaagtttctgctacttgaaacctacagaaccgacaaaaattagggtgctaaaaaaatgacagtgaaatctcatcgtaaggcagctagttctaatttgcatttgaatgtataacaaattgcatcacttttcacaaacttaacacctgcctggagtaaaaatctgatttgacccctctg

SEQ ID NO: 106577 - DNA, 846 bp, Homo sapiens
  Payload ID: 928
  Gene Symbol: ACER3
  Gene Name: alkaline ceramidase 3
  ENST ID: ENST00000525194
  CDS Start-End: 54-209
agcctaacccggcacagtgagcggagcgcctgggcggcggcggcggcggcgtgatggctccggccgcggaccgagagggctactggggccccacgacctccacgctggactggtgcgaggagaactactccgtgacctggtacatcgccgagttctgttccttcctaccatcctccctgaagagcaacctcaaggaatacagtgagtaacctgatcatgattatacctccaatgttcggtgcagttcagagtgttagagacggtctggaaaagcggtacattgcttcttatttagcactcacagaagtacttcagatttgagaaaagagcacataactatggctaaaagatgggatttgtaatctctggagttttttacttcaagtctgaggatccaaactgactaagtgaagtaaagaaataagcagctattggatgaactcccaatgatatacagctgttgcatatttgtgtactgcatgtttgaatgtttcaagatcaagaactcagtaaactaccatctgctttttaccttagttctattcagtttaatagtaaccacagtttaccttaaggtaaaagagccgatattccatcaggagtctcactctgtcaccccggctgaagtgcaatggcacaatctcggctcattggaacctccacctcccaggtcatgtatggaatgttggtctttacattagtacttcgatctatttatattgttacatgggtttatccatggcttagaggactgggttatacatcattgggtatatttttattgggatttttattttggaatatagataacatattttgtgagtcactgaggaactttcgaaagaa

SEQ ID NO: 106578 - DNA, 2058 bp, Homo sapiens
  Payload ID: 928
  Gene Symbol: ACER3
  Gene Name: alkaline ceramidase 3
  ENST ID: ENST00000525861
  CDS Start-End: 43-285
gcacagtgagcggagcgcctgggcggcggcggcggcggcgtgatggctccggccgcggaccgagagggctactggggccccacgacctccacgctggactggtgcgaggagaactactccgtgacctggtacatcgccgagttctggaatacagtgagtaacctgatcatgattatacctccaatgttcggtgcagttcagagtgttagagacggtctggaaaagcggtacattgcttcttatttagcactcacagatggagtctcactctgtcgccgaggctgaagtgcagtggcacaatctcggctcactgcaacctccatttcccaggtttacgcgatccttctgcctcagcctcccaagtagctgggactacagtggtaggaatgggatcctggtgcttccacatgactctgaaatatgaaatgcagctattggatgaactcccaatgatatacagctgttgcatatttgtgtactgcatgtttgaatgtttcaagatcaagaactcagtaaactaccatctgctttttaccttagttctattcagtttaatagtaaccacagtttaccttaaggtaaaagagccgatattccatcaggagtctcactctgtcaccccggctgaagtgcaatggcacaatctcggctcattggaacctccacctcccaggtcatgtatggaatgttggtctttacattagtacttcgatctatttatattgttacatgggtttatccatggcttagaggactgggttatacatcattgggtatatttttattgggatttttattttggaatatagataacatattttgtgagtcactgaggaactttcgaaagaaggtaccacctatcataggtattaccacacaatttcatgcatggtggcatattttaactggccttggttcctatcttcacatccttttcagtttgtatacaagaacactttacctgagatataggccaaaagtgaagtttctctttggaatctggccagtgatcctgtttgagcctctcaggaagcattgatgaatcattccaccaagaaaacaaacaagcacctaccatagacctggcagaataaataaggaaatccttaaagatctacaagttcaaatatgtcatgaccatcacagcagaggagtgactttctgactaatgctgccacccacacagagaataaggagtagggcctgctgggtgtttagctcatggctttatcttatttgtccccctcctcctttcacgctccagtttataaagaaacagagatgatgtgtgtgtatgcctcaaatgcagaaacagttgggcttttcttaacaggttaacagtttgtgctggttataagaaattaaccttcttttctttttgccaagggttgcatgtgaattatacctttcttaatatttgattaaataatgcagtcagctaagagccaacaaaaccccatatccagatagttagctgtgagccagcactcagctgtgtcagatttgattaatattgtattaatctcatggatggttctcaaaggtaaaaaaagagagagaaagagagagagctagctgtgggattctgtgtagttcttcactatctgttccagggctagtcggaggatcataagcaagctcagacctgcccccagttcagtacttgaccacatcccaggatttatggtgtctgtctatggccacagccaaccagaatgagtgggtcatcttataacctttctgaagctccatgaggacatgtatagaatgctgcaccttcagccagctctgctctgatctttgcagatctttaagttgtcactgtttctacggctagacaaatatgactggtggtctagactacccatagttcatcctcctcacataacttatttgaagttgtcagggaatgtcattacactctgatttttaaaattatgcagtattttccagttctcagagaggtcatggttgtgcccagggaagtgtgttgcattaactaaagctaaaattatcagaatcctatttacataaagcatattaaaatatctgctcctt

SEQ ID NO: 106579 - DNA, 1292 bp, Homo sapiens
  Payload ID: 928
  Gene Symbol: ACER3
  Gene Name: alkaline ceramidase 3
  ENST ID: ENST00000531461
  CDS Start-End: 42-266
cacagtgagcggagcgcctgggcggcggcggcggcggcgtgatggctccggccgcggaccgagagggctactggggccccacgacctccacgctggactggtgcgaggagaactactccgtgacctggtacatcgccgagttctggaatacagtgagtaacctgatcatgattatacctccaatgttcggtgcagttcagagtgttagagacggtctggaaaagcggtacattgcttcttatttagcactcacagctattggatgaactcccaatgatatacagctgttgcatatttgtgtactgcatgtttgaatgtttcaagatcaagaactcagtaaactaccatctgctttttaccttagttctattcagtttaatagtaaccacagtttaccttaaggtaaaagagccgatattccatcaggtcatgtatggaatgttggtctttacattagtacttcgatctatttatattgttacatgggtttatccatggcttagaggactgggttatacatcattgggtatatttttattgggatttttattttggaatatagataacatattttgtgagtcactgaggaactttcgaaagaaggtaccacctatcataggtattaccacacaatttcatgcatggtggcatattttaactggccttggttcctatcttcacatccttttcagtttgtatacaagaacactttacctgagatataggccaaaagtgaagtttctctttggaatctggccagtgatcctgtttgagcctctcaggaagcattgatgaatcattccaccaagaaaacaaacaagcacctaccatagacctggcagaataaataaggaaatccttaaagatctacaagttcaaatatgtcatgaccatcacagcagaggagtgactttctgactaatgctgccacccacacagagaataaggagtagggcctgctgggtgtttagctcatggctttatcttatttgtccccctcctcctttcacgctccagtttataaagaaacagagatgatgtgtgtgtatgcctcaaatgcagaaacagttgggcttttcttaacaggttaacagtttgtgctggttataagaaattaaccttcttttctttttgccaagggttgcatgtgaattatacctttcttaatatttgattaaataatgcagtcagctaagagccaacaaaaccccatatccagatagttagctgtgagccagcactcagctgtgtcagatttgattaatattgtattaatctcatggatggttctc

SEQ ID NO: 106580 - DNA, 7378 bp, Homo sapiens
  Payload ID: 928
  Gene Symbol: ACER3
  Gene Name: alkaline ceramidase 3
  Uniprot ID: Q9NUN7
  ENST ID: ENST00000532485
  CDS Start-End: 105-908
gggcggggcgcgagcgagcgcgcgggctgggccggagccggcctggtcgccagcctaacccggcacagtgagcggagcgcctgggcggcggcggcggcggcgtgatggctccggccgcggaccgagagggctactggggccccacgacctccacgctggactggtgcgaggagaactactccgtgacctggtacatcgccgagttctggaatacagtgagtaacctgatcatgattatacctccaatgttcggtgcagttcagagtgttagagacggtctggaaaagcggtacattgcttcttatttagcactcacagtggtaggaatgggatcctggtgcttccacatgactctgaaatatgaaatgcagctattggatgaactcccaatgatatacagctgttgcatatttgtgtactgcatgtttgaatgtttcaagatcaagaactcagtaaactaccatctgctttttaccttagttctattcagtttaatagtaaccacagtttaccttaaggtaaaagagccgatattccatcaggtcatgtatggaatgttggtctttacattagtacttcgatctatttatattgttacatgggtttatccatggcttagaggactgggttatacatcattgggtatatttttattgggatttttattttggaatatagataacatattttgtgagtcactgaggaactttcgaaagaaggtaccacctatcataggtattaccacacaatttcatgcatggtggcatattttaactggccttggttcctatcttcacatccttttcagtttgtatacaagaacactttacctgagatataggccaaaagtgaagtttctctttggaatctggccagtgatcctgtttgagcctctcaggaagcattgatgaatcattccaccaagaaaacaaacaagcacctaccatagacctggcagaataaataaggaaatccttaaagatctacaagttcaaatatgtcatgaccatcacagcagaggagtgactttctgactaatgctgccacccacacagagaataaggagtagggcctgctgggtgtttagctcatggctttatcttatttgtccccctcctcctttcacgctccagtttataaagaaacagagatgatgtgtgtgtatgcctcaaatgcagaaacagttgggcttttcttaacaggttaacagtttgtgctggttataagaaattaaccttcttttctttttgccaagggttgcatgtgaattatacctttcttaatatttgattaaataatgcagtcagctaagagccaacaaaaccccatatccagatagttagctgtgagccagcactcagctgtgtcagatttgattaatattgtattaatctcatggatggttctcaaaggtaaaaaaagagagagaaagagagagagctagctgtgggattctgtgtagttcttcactatctgttccagggctagtcggaggatcataagcaagctcagacctgcccccagttcagtacttgaccacatcccaggatttatggtgtctgtctatggccacagccaaccagaatgagtgggtcatcttataacctttctgaagctccatgaggacatgtatagaatgctgcaccttcagccagctctgctctgatctttgcagatctttaagttgtcactgtttctacggctagacaaatatgactggtggtctagactacccatagttcatcctcctcacataacttatttgaagttgtcagggaatgtcattacactctgatttttaaaattatgcagtattttccagttctcagagaggtcatggttgtgcccagggaagtgtgttgcattaactaaagctaaaattatcagaatcctatttacataaagcatattaaaatatctgctccttaattttctgaaggaaatagatgtaagtttctgctacttgaaacctacagaaccgacaaaaattagggtgctaaaaaaatgacagtgaaatctcatcgtaaggcagctagttctaatttgcatttgaatgtataacaaattgcatcacttttcacaaacttaacacctgcctggagtaaaaatctgatttgacccctctgctcatgtttcatcatatttgtagctctgcatcatttagcatttttatgactttttttgctttatataaattattgtaaaatccagattgtttttaccacatgatgacgtgactcaggattaaatcctgagctacagtttcaaaaggaaaatcatttttttcttatgcaaagatggtaaaacactgttgtcattttttccagtattcaataagtagcctttgtacaaatttaaaaccaaaaactattctgttgtttttcttcacctactagccttagtttttaaccaagtatccaaggatgtcaacttgacatccttcccttagcatgccaacaagccattagactgattcttccacctatttttatgaacctccaggaagaaaaacacttgccaaaacattaagagaactttgattctgccttaagagggtataaaactaaaccatttgaaggcacagcccataagactatacttgattttgccccaagattctgacttctggctacatttcacctgcagttacctgggctatcggccgtgatacattttttaattcatttgttttccaccattatatttttatacttttcagttagatatacttctgcataaagagtatatatacagtgtaggataaaggcatatcgtacatggcaatgctgttaaacatggtaagactgaggttctgcaggattaaagtcagattaagggtacagaaagcacaccttgatactgaggccatttagagcaatttgtttaatgagtggttcagccatcaccaccagtggccacctgttcaataaaattgcctagcaccacagtggagagtcatctacaccccaaggtgagctgtaagactggccaattctttgaagacctttttttctgttgggagaatggaaagcagaaagggaagccaggctctttaatgttccaagtcagctgtgcctcacacaaggctctctttttagctactaagtaacatactcaagactttgtatctgtgcagcattttatggaaatcactggtgacctataggatattactaaattatttcaatagctttatttttttcctacttggattctaggtggacattacagagttgaattcctcactaccccctcccgctgtcatttgttttattggaaaacttcatgttaactagagtgtacaaaaagtctgtttcctgctgagccaatagtgatttgtttgcatatcacctaatgtgaaaagtgctcatctgtgaactctacagcaaattatattttagaaaatactttgtgaggccgggcatggtggcagagcgagactccgtctcaaaaaaaaaaaaaaaaaaaaaaaagaaaagaaaagaaaatataaggatgtaaaagaagcaatttgcttgcacatctgaatatccttcttgtgcctccattttcactcttgaaaactgaaagcaatttgacttttatttttgtttttctaaagaacagctaggtgaaaggaggttaagctgattgtcactctgcctgcccactacctactccccaccatggtgtttcatgaaacatccccaccacctgaagtgatctttttaatccttgtgatagtaaatgcattgataattaacaggaaaaacatgtttttaaataatctacaaatgagaacccaaatagtagtgttttgtttgacagaagtaaatcaaatattatggtttaaatataatgcaaaatttcaggacagttaatttggacttcccttaccctaagagggtttttcttataataaggagaagaggtgtggttcaaagaaaattaagagacaaaaccttcaggtacataatgcatgaaaatctttaaatgcctgcaaaaattaagttctgttataataccagccaattctgaattagccaatgccctaaaagcatctaacaatttaaggttatcttatgagtcctatgaaaacaattatttgttgctaaatttgagttttagctaccaacgccatgtttacgtgacaagaaattgttttggccctgtggtttatgacgtgctgctggataagcatttatgtaaaactgagtatttcaaagagaaccatttacaattggaatttccacctgtgtggctgtttgcagacctacctctgtcttccattttgcatcctgtcagtgctataattagtttgatcactttgtcttgtttttcagtgtctacaattatagcttattcactatgttctaactatttaaaaataatgggccgggcgcggtggctcatgcctgtaatcccagcactttgggaggccgaggtgagcagatcacaaggtcaggagatcgagaccatcctggctaacacagtgaaaccccgtctctactaaaaatacaaaaaaattagtcgggcatggtggcgggcgcctgtagtcccagctactcgggaggctgaggcaggagaatggcgtgaacctgggaggcagagcttgcagtgagccaagattgtgccactgcactccagcctgggcaacagagcgagactctgtctcaaaaaaaaaaaaaaaaaaaaaaaaaaaagactaaaatttgatttaaagtagttaaacccctttatggaaggagctgcaaaatgaaaaaaaaaaaaaaaaggaatcatgtcatcttgacccagctgactggaaattttcaatactgtcttttaactgttgtactccagccagcctgggcaacagagtgagaccctgtctcaaaaaaaaaaaaaaaaaaaaaaaaaaaaagaattaggaaatacttgttaaaatatctaactacgtaattgctacatgggggagctgctggtgttgttgaggtccttgggagcattccactggacttcaccatttctccaaaattatcagcccagtcagcttcatatacccagatatggacacttctacacgtgaaattcaaactgaagataaaactctgactttggagtataaacttttgccttgagtatgaaaccttgacattgctgaaagaaaagtggaaactgtaagggacaacaagtttcaccaaggcacagtcttctctgataggccagcagagcagctaaggagaagacagatcattcaagaacttaagtcgtttgttagctacagcatttccattgctgtgatacacattcagccattttggaggaaagctaagcaggttctgaccacccattttcatgtactttaaataacaaatattatttctcaaggtcttcattttatcattaaattcagctaattactacctgatttcaaaggcagctagtgtagaagactggtcacaagaatttttttttaaatagaaaaccctaaaatgcaaatcaagaaattcagttacaggctgcaagtgacctaaaattcccctactctagctcagcagccatcagtcagtatagcatcagccacaggtcactgctctgcatacagttccttttcaacccttacaagacctgcttcattgctttaaaaatgtagtgttgatacttgaactgaatttagtcattggtaacttaaatattcacaaaattgtcataaagcttctgaaacatctggcaatgccagatctgtaatcatcacttttaaattgaatttgcagaattaactctaaagttgcagcaaccatatttattagagaaatctttaagcatatacatatggttccctataagcattcattcagagatcatctgtgcctaaaagaaaatgataaaaatgtgtcataatatcaaaggggtctagatcaggggttggtaaactacaacccatgggccaaattcaggctgcgttgtatggcctgcaaggtaagaatggttattttattttattttattctttatatatatatatatatatttatttatttttttgagacagagtctctctctgtcacccacgctggagtgcagtggcaggatctcaactcattgcaacctccgcctcccaaggttcaagcgattctcctgcctcagcctcccgagtagctgggactacaggcacatgccaccatgccaccatgcctggctgatttttgtatttttagtagagctgggttggccaggctggtcttgaactcctgacctcaagtgattcacctgccttggcctcccaaagtcctggaattacaggcgtgagctaccgtgcccagctggtttttacattttaaaaacgtttagagaaagaagaatatgcaacagaaactgtatgtagcctgcaaagcctaaaatgtttactctctggcttgggagtttgtctcccctgctctagactgtcagcaagtggtacagtggtacagtacagtggtactgcccaactgcacttctctgcaaggtgattctagtgtgcacttgtcagaatgaaaatatgttattcatttaagacatctcatgtctttgaatgtaatcacatgatttgtatttaatatttacatgacctaattattttttcacgtcagtttttctagattggcaatagcctgttgcaaagtgcctaaacctttgagaaaaattactatgagcaaggtccatgatttagttttcaatataaagggaattccattctatactgtaaaatccaaaaatgctagttgccctcagcttttgagttgacttccagaaagttgagatcttttgaccattttttctcatgtcatataaaatgtgccacatggtagttgtcaagctgtggtagtcatgtacactttttttcttttttttaactttctaaaaggaaaagttcaaagtcctttccacagttagtcttcgcttcttttggatttttctttttagagctaaattattcataccaatgaataagtgagtctgttctaagatataggggccattatctatttttgcttaatggactcatgtggcattgttcactatcatgcctttccatacttgtaatatttctgagtcacttattaatgtgaccaacagataaactgttcaagctaatacagcatttcctaacttcatagttgtcgcagatgtttgttctagtagcgattatttaataaacatacattgtactgaatcttactagcaactaactattttcaggtaatctcagtctgcttattcactttttccatttgatttgctaatgccacaatcatttttctagaaaatagtaggataatgtattttttcctgtctgctataatggagactatatttctgcattcattacctctcataggtgaaaatattaaattaaataatattgttttgaataaga

SEQ ID NO: 106581 - DNA, 931 bp, Homo sapiens
  Payload ID: 928
  Gene Symbol: ACER3
  Gene Name: alkaline ceramidase 3
  ENST ID: ENST00000530334
  CDS Start-End: 41-256
acagtgagcggagcgcctgggcggcggcggcggcggcgtgatggctccggccgcggaccgagagggctactggggccccacgacctccacgctggactggtgcgaggagaactactccgtgacctggtacatcgccgagttctgttccttcctaccatcctccctgaagagcaacctcaagttagtgagcacacatcaggcttcttttttggtcttgggactctgggctggcagaggtgacatccctgtcatatgaaggaagatgctcctttctctgaaggttattgacagggaatacagtgagtaacctgatcatgattatacctccaatgttcggtgcagttcagagtgttagagacggtctggaaaagcggtacattgcttcttatttagcactcacagtggtaggaatgggatcctggtgcttccacatgactctgaaatatgaaatgcagctattggatgaactcccaatgatatacagctgttgcatatttgtgtactgcatgtttgaatgtttcaagatcaagaactcagtaaactaccatctgctttttaccttagttctattcagtttaatagtaaccacagtttaccttaaggtaaaagagccgatattccatcaggtcatgtatggaatgttggtctttacattagtacttcgatctatttatattgttacatgggtttatccatggcttagaggactgggttatacatcattgggtatatttttattgggatttttattttggaatatagataacatattttgtgagtcactgaggtaagatatattttcattccttcagaaatatttttggaagcattttattaagtagagaattttataaacatatagaaatagtagtgccctgaaatgaatttttactattgttgacatttaaaagatatatacagtataataaag

SEQ ID NO: 106582 - DNA, 834 bp, Homo sapiens
  Payload ID: 928
  Gene Symbol: ACER3
  Gene Name: alkaline ceramidase 3
  ENST ID: ENST00000534206
  CDS Start-End: 220-834
agggccgggcggggcgcgagcgagcgcgcgggctgggccggagccggcctggtcgccagcctaacccggcacagtgagcggagcgcctgggcggcggcggcggcggcgtgatggctccggccgcggaccgagagggctactggggccccacgacctccacgctggactggtgcgaggagaactactccgtgacctgggaatacagtgagtaacctgatcatgattatacctccaatgttcggtgcagttcagagtgttagagacggtctggaaaagcggtacattgcttcttatttagcactcacagtggtaggaatgggatcctggtgcttccacatgactctgaaatatgaaatgcagctattggatgaactcccaatgatatacagctgttgcatatttgtgtactgcatgtttgaatgtttcaagatcaagaactcagtaaactaccatctgctttttaccttagttctattcagtttaatagtaaccacagtttaccttaaggtaaaagagccgatattccatcaggtcatgtatggaatgttggtctttacattagtacttcgatctatttatattgttacatgggtttatccatggcttagaggactgggttatacatcattgggtatatttttattgggatttttattttggaatatagataacatattttgtgagtcactgaggaactttcgaaagaaggtaccacctatcataggtattaccacacaatttcatgcatggtggcatattttaactggccttggttcctatcttcacatccttttcagtttgtatacaagaacactttacctgagatataggcca

SEQ ID NO: 106583 - DNA, 929 bp, Homo sapiens
  Payload ID: 928
  Gene Symbol: ACER3
  Gene Name: alkaline ceramidase 3
  ENST ID: ENST00000533873
  CDS Start-End: 36-728
gagcggagcgcctgggcggcggcggcggcggcgtgatggctccggccgcggaccgagagggctactggggccccacgacctccacgctggactggtgcgaggagaactactccgtgacctggtacatcgccgagttcttggtaggaatgggatcctggtgcttccacatgactctgaaatatgaaatgcagctattggatgaactcccaatgatatacagctgttgcatatttgtgtactgcatgtttgaatgtttcaagatcaagaactcagtaaactaccatctgctttttaccttagttctattcagtttaatagtaaccacagtttaccttaaggtaaaagagccgatattccatcaggtcatgtatggaatgttggtctttacattagtacttcgatctatttatattgttacatgggtttatccatggcttagaggactgggttatacatcattgggtatatttttattgggatttttattttggaatatagataacatattttgtgagtcactgaggaactttcgaaagaaggtaccacctatcataggtattaccacacaatttcatgcatggtggcatattttaactggccttggttcctatcttcacatccttttcagtttgtatacaagaacactttacctgagatataggccaaaagtgaagtttctctttggaatctggccagtgatcctgtttgagcctctcaggaagcattgatgaatcattccaccaagaaaacaaacaagcacctaccatagacctggcagaataaataaggaaatccttaaagatctacaagttcaaatatgtcatgaccatcacagcagaggagtgactttctgactaatgctgccacccacacagagaataaggagtagggcctgctgggtgtttagctcatggctttatcttatttgt

SEQ ID NO: 106584 - DNA, 2550 bp, Homo sapiens
  Payload ID: 929
  Gene Symbol: ALPI
  Gene Name: alkaline phosphatase, intestinal
  Uniprot ID: P09923
  ENST ID: ENST00000295463
  CDS Start-End: 78-1664
gatttaaacccaggcagcctgcgctgcagccggttcctggtgtccccacttcgcctccctcctgctgcccccaagacatgcaggggccctgggtgctgctgctgctgggcctgaggctacagctctccctgggcgtcatcccagctgaggaggagaacccggccttctggaaccgccaggcagctgaggccctggatgctgccaagaagctgcagcccatccagaaggtcgccaagaacctcatcctcttcctgggcgatgggttgggggtgcccacggtgacagccaccaggatcctaaaggggcagaagaatggcaaactggggcctgagacgcccctggccatggaccgcttcccatacctggctctgtccaagacatacaatgtggacagacaggtgccagacagcgcagccacagccacggcctacctgtgcggggtcaaggccaacttccagaccatcggcttgagtgcagccgcccgctttaaccagtgcaacacgacacgcggcaatgaggtcatctccgtgatgaaccgggccaagcaagcaggaaagtcagtaggagtggtgaccaccacacgggtgcagcacgcctcgccagccggcacctacgcacacacagtgaaccgcaactggtactcagatgctgacatgcctgcctcagcccgccaggaggggtgccaggacatcgccactcagctcatctccaacatggacattgacgtgatccttggcggaggccgcaagtacatgtttcccatggggaccccagaccctgagtacccagctgatgccagccagaatggaatcaggctggacgggaagaacctggtgcaggaatggctggcaaagcaccagggtgcctggtatgtgtggaaccgcactgagctcatgcaggcgtccctggaccagtctgtgacccatctcatgggcctctttgagcccggagacacgaaatatgagatccaccgagaccccacactggacccctccctgatggagatgacagaggctgccctgcgcctgctgagcaggaacccccgcggcttctacctctttgtggagggcggccgcatcgaccatggtcatcatgagggtgtggcttaccaggcactcactgaggcggtcatgttcgacgacgccattgagagggcgggccagctcaccagcgaggaggacacgctgaccctcgtcaccgctgaccactcccatgtcttctcctttggtggctacaccttgcgagggagctccatcttcgggttggcccccagcaaggctcaggacagcaaagcctacacgtccatcctgtacggcaatggcccgggctacgtgttcaactcaggcgtgcgaccagacgtgaatgagagcgagagcgggagccccgattaccagcagcaggcggcggtgcccctgtcgtccgagacccacggaggcgaagacgtggcggtgtttgcgcgcggcccgcaggcgcacctggtgcatggtgtgcaggagcagagcttcgtagcgcatgtcatggccttcgctgcctgtctggagccctacacggcctgcgacctggcgcctcccgcctgcaccaccgacgccgcgcacccagttgccgcgtcgctgccactgctggccgggaccctgctgctgctgggggcgtccgctgctccctgagtgccccactccggagttatcctgctccccacctccgggcgtcctgccctgttccccgtcctgagccgccacttccagcgaacacacacaggtgtcctgccgttggaccttcacctcctagagataaaccagcctcagctggcgcagcggggcccttcttccctccgcatccccttcagggagcaggagcccagggcgccctgggagctgagcctgggacttccaggacctcccctcaggttgttctctgattcttcctcccaaccccagagactgcagatttgtgccatgcggctgcctgcaccccagacaataaagggaccaaaaccacccaacccccaccctgcctctatcctaaggaagaccaagcaggcctggacccagagacgtcccccatcgtgggacacgacacacccagaccgcgtgccccaccgtcttagcttcaatcctggcagcacctggtagacccaaggacttgggtggatcaggacacctgaagaagagaagcttccggcaaccctgcaacccacccaaggaggctactggatcggggattcccaggggggctttgacacagtcctctgctgtctccccactaggatcattccacacccctgcacctgaccaagggaccaatgaggcagaggcttgccccaagtcacagccactcagatgcttcctgccccccagtgcccattccaggtcaccagatccaaggagcgcttgaggagctctgggtacagggcagcaacccagagcccatgggccctcccgggacatctggatgctgggcatagatttctcaacaaggaagactcccctgcctcctcaaggtctccattctcctaggagacaaagcaataataaaaggtgttagacaatgtaa

SEQ ID NO: 106585 - DNA, 1882 bp, Homo sapiens
  Payload ID: 929
  Gene Symbol: ALPI
  Gene Name: alkaline phosphatase, intestinal
  ENST ID: ENST00000457560
  CDS Start-End: 76-228
tttaaacccaggcagcctgcgctgcagccggttcctggtgtccccacttcgcctccctcctgctgcccccaagacatgcaggggccctgggtgctgctgctgctgggcctgaggctacagctctccctgggcgtcatcccaggtaatgaggctccccaagctgttccacacacagggcaccccctcagccaggctgacctgatctctactctccccctggccagctgaggaggagaacccggccttctggaaccgccaggcagctgaggccctggatgctgccaagaagctgcagcccatccagaaggtcgccaagaacctcatcctcttcctgggcgatgggttgggggtgcccacggtgacagccaccaggatcctaaaggggcagaagaatggcaaactggggcctgagacgcccctggccatggaccgcttcccatacctggctctgtccaagacatacaatgtggacagacaggtgccagacagcgcagccacagccacggcctacctgtgcggggtcaaggccaacttccagaccatcggcttgagtgcagccgcccgctttaaccagtgcaacacgacacgcggcaatgaggtcatctccgtgatgaaccgggccaagcaagcaggaaagtcagtaggagtggtgaccaccacacgggtgcagcacgcctcgccagccggcacctacgcacacacagtgaaccgcaactggtactcagatgctgacatgcctgcctcagcccgccaggaggggtgccaggacatcgccactcagctcatctccaacatggacattgacgtgatccttggcggaggccgcaagtacatgtttcccatggggaccccagaccctgagtacccagctgatgccagccagaatggaatcaggctggacgggaagaacctggtgcaggaatggctggcaaagcaccagggtgcctggtatgtgtggaaccgcactgagctcatgcaggcgtccctggaccagtctgtgacccatctcatgggcctctttgagcccggagacacgaaatatgagatccaccgagaccccacactggacccctccctgatggagatgacagaggctgccctgcgcctgctgagcaggaacccccgcggcttctacctctttgtggagggcggccgcatcgaccatggtcatcatgagggtgtggcttaccaggcactcactgaggcggtcatgttcgacgacgccattgagagggcgggccagctcaccagcgaggaggacacgctgaccctcgtcaccgctgaccactcccatgtcttctcctttggtggctacaccttgcgagggagctccatcttcgggttggcccccagcaaggctcaggacagcaaagcctacacgtccatcctgtacggcaatggcccgggctacgtgttcaactcaggcgtgcgaccagacgtgaatgagagcgagagcgggagccccgattaccagcagcaggcggcggtgcccctgtcgtccgagacccacggaggcgaagacgtggcggtgtttgcgcgcggcccgcaggcgcacctggtgcatggtgtgcaggagcagagcttcgtagcgcatgtcatggccttcgctgcctgtctggagccctacacggcctgcgacctggcgcctcccgcctgcaccaccgacgccgcgcacccagttgccgcgtcgctgccactgctggccgggaccctgctgctgctgggggcgtccgctgctccctgagtgccccactccggagttatcctgctccccacctccgggcgtcctgccctgttccccgtcctgagccgccacttccagcgaacacacacaggtgtcctgccgttggaccttcacctcctagagataaaccagcctcag

SEQ ID NO: 106586 - DNA, 733 bp, Homo sapiens
  Payload ID: 930
  Gene Symbol: ALPL
  Gene Name: alkaline phosphatase, liver/bone/kidney
  ENST ID: ENST00000374830
  CDS Start-End: 1-650
agcactcccacttcatctggaaccgcacggaactcctgacccttgacccccacaatgtggactacctattgggaggcagaattgaccacgggcaccatgaaggaaaagccaagcaggccctgcatgaggcggtggagatggaccgggccatcgggcaggcaggcagcttgacctcctcggaagacactctgaccgtggtcactgcggaccattcccacgtcttcacatttggtggatacaccccccgtggcaactctatctttggtctggcccccatgctgagtgacacagacaagaagcccttcactgccatcctgtatggcaatgggcctggctacaaggtggtgggcggtgaacgagagaatgtctccatggtggactatgctcacaacaactaccaggcgcagtctgctgtgcccctgcgccacgagacccacggcggggaggacgtggccgtcttctccaagggccccatggcgcacctgctgcacggcgtccacgagcagaactacgtcccccacgtgatggcgtatgcagcctgcatcggggccaacctcggccactgtgctcctgccagctcggcaggcagccttgctgcaggccccctgctgctcgcgctggccctctaccccctgagcgtcctgttctgagggcccagggcccgggcacccacaagcccgtgacagatgccaacttcccacacggcagcccccccctcaaggggcagggaggt

SEQ ID NO: 106587 - DNA, 2193 bp, Homo sapiens
  Payload ID: 930
  Gene Symbol: ALPL
  Gene Name: alkaline phosphatase, liver/bone/kidney
  Uniprot ID: P05186
  ENST ID: ENST00000374832
  CDS Start-End: 255-1829
agaaactcccggtgtggcagctgagatggcccaggaaagaactatattaccttcaaaaagagaggtacatgcgatgtttgaggtggcatgaagctcagtggtgttatattggaatgagtgagtgaccatcctggagccttcctgaaagaggattggaacatcagttaacatctgaccactgccagcccaccccctcccacccacgtcgattgcatctctgggctccagggataaagcaggtcttggggtgcaccatgatttcaccattcttagtactggccattggcacctgccttactaactccttagtgccagagaaagagaaagaccccaagtactggcgagaccaagcgcaagagacactgaaatatgccctggagcttcagaagctcaacaccaacgtggctaagaatgtcatcatgttcctgggagatgggatgggtgtctccacagtgacggctgcccgcatcctcaagggtcagctccaccacaaccctggggaggagaccaggctggagatggacaagttccccttcgtggccctctccaagacgtacaacaccaatgcccaggtccctgacagtgccggcaccgccaccgcctacctgtgtggggtgaaggccaatgagggcaccgtgggggtaagcgcagccactgagcgttcccggtgcaacaccacccaggggaacgaggtcacctccatcctgcgctgggccaaggacgctgggaaatctgtgggcattgtgaccaccacgagagtgaaccatgccacccccagcgccgcctacgcccactcggctgaccgggactggtactcagacaacgagatgccccctgaggccttgagccagggctgtaaggacatcgcctaccagctcatgcataacatcagggacattgacgtgatcatggggggtggccggaaatacatgtaccccaagaataaaactgatgtggagtatgagagtgacgagaaagccaggggcacgaggctggacggcctggacctcgttgacacctggaagagcttcaaaccgagatacaagcactcccacttcatctggaaccgcacggaactcctgacccttgacccccacaatgtggactacctattgggtctcttcgagccaggggacatgcagtacgagctgaacaggaacaacgtgacggacccgtcactctccgagatggtggtggtggccatccagatcctgcggaagaaccccaaaggcttcttcttgctggtggaaggaggcagaattgaccacgggcaccatgaaggaaaagccaagcaggccctgcatgaggcggtggagatggaccgggccatcgggcaggcaggcagcttgacctcctcggaagacactctgaccgtggtcactgcggaccattcccacgtcttcacatttggtggatacaccccccgtggcaactctatctttggtctggcccccatgctgagtgacacagacaagaagcccttcactgccatcctgtatggcaatgggcctggctacaaggtggtgggcggtgaacgagagaatgtctccatggtggactatgctcacaacaactaccaggcgcagtctgctgtgcccctgcgccacgagacccacggcggggaggacgtggccgtcttctccaagggccccatggcgcacctgctgcacggcgtccacgagcagaactacgtcccccacgtgatggcgtatgcagcctgcatcggggccaacctcggccactgtgctcctgccagctcggcaggcagccttgctgcaggccccctgctgctcgcgctggccctctaccccctgagcgtcctgttctgagggcccagggcccgggcacccacaagcccgtgacagatgccaacttcccacacggcagcccccccctcaaggggcagggaggtgggggcctcctcagcctctgcaactgcaagaaaggggacccaagaaaccaaagtctgccgcccacctcgctcccctctggaatcttccccaagggccaaacccacttctggcctccagcctttgctccctccccgctgccctttggccaacagggtagatttctcttgggcaggcagagagtacagactgcagacattctcaaagcctcttatttttctagcgaacgtatttctccagacccagaggccctgaagcctccgtggaacattctggatctgac

SEQ ID NO: 106588 - DNA, 2589 bp, Homo sapiens
  Payload ID: 930
  Gene Symbol: ALPL
  Gene Name: alkaline phosphatase, liver/bone/kidney
  Uniprot ID: P05186
  ENST ID: ENST00000374840
  CDS Start-End: 251-1825
tcactcgggccccgcggccgcctttataaggcggcgggggtggtggcccgggccgcgttgcgctcccgccactccgcgcccgctatcctggctccgtgctcccacgcgcttgtgcctggacggaccctcgccagtgctctgcgcaggattggaacatcagttaacatctgaccactgccagcccaccccctcccacccacgtcgattgcatctctgggctccagggataaagcaggtcttggggtgcaccatgatttcaccattcttagtactggccattggcacctgccttactaactccttagtgccagagaaagagaaagaccccaagtactggcgagaccaagcgcaagagacactgaaatatgccctggagcttcagaagctcaacaccaacgtggctaagaatgtcatcatgttcctgggagatgggatgggtgtctccacagtgacggctgcccgcatcctcaagggtcagctccaccacaaccctggggaggagaccaggctggagatggacaagttccccttcgtggccctctccaagacgtacaacaccaatgcccaggtccctgacagtgccggcaccgccaccgcctacctgtgtggggtgaaggccaatgagggcaccgtgggggtaagcgcagccactgagcgttcccggtgcaacaccacccaggggaacgaggtcacctccatcctgcgctgggccaaggacgctgggaaatctgtgggcattgtgaccaccacgagagtgaaccatgccacccccagcgccgcctacgcccactcggctgaccgggactggtactcagacaacgagatgccccctgaggccttgagccagggctgtaaggacatcgcctaccagctcatgcataacatcagggacattgacgtgatcatggggggtggccggaaatacatgtaccccaagaataaaactgatgtggagtatgagagtgacgagaaagccaggggcacgaggctggacggcctggacctcgttgacacctggaagagcttcaaaccgagatacaagcactcccacttcatctggaaccgcacggaactcctgacccttgacccccacaatgtggactacctattgggtctcttcgagccaggggacatgcagtacgagctgaacaggaacaacgtgacggacccgtcactctccgagatggtggtggtggccatccagatcctgcggaagaaccccaaaggcttcttcttgctggtggaaggaggcagaattgaccacgggcaccatgaaggaaaagccaagcaggccctgcatgaggcggtggagatggaccgggccatcgggcaggcaggcagcttgacctcctcggaagacactctgaccgtggtcactgcggaccattcccacgtcttcacatttggtggatacaccccccgtggcaactctatctttggtctggcccccatgctgagtgacacagacaagaagcccttcactgccatcctgtatggcaatgggcctggctacaaggtggtgggcggtgaacgagagaatgtctccatggtggactatgctcacaacaactaccaggcgcagtctgctgtgcccctgcgccacgagacccacggcggggaggacgtggccgtcttctccaagggccccatggcgcacctgctgcacggcgtccacgagcagaactacgtcccccacgtgatggcgtatgcagcctgcatcggggccaacctcggccactgtgctcctgccagctcggcaggcagccttgctgcaggccccctgctgctcgcgctggccctctaccccctgagcgtcctgttctgagggcccagggcccgggcacccacaagcccgtgacagatgccaacttcccacacggcagcccccccctcaaggggcagggaggtgggggcctcctcagcctctgcaactgcaagaaaggggacccaagaaaccaaagtctgccgcccacctcgctcccctctggaatcttccccaagggccaaacccacttctggcctccagcctttgctccctccccgctgccctttggccaacagggtagatttctcttgggcaggcagagagtacagactgcagacattctcaaagcctcttatttttctagcgaacgtatttctccagacccagaggccctgaagcctccgtggaacattctggatctgaccctcccagtctcatctcctgaccctcccactcccatctccttacctctggaaccccccaggccctacaatgctcatgtccctgtccccaggcccagccctccttcaggggagttgaggtctttctcctcaggacaaggccttgctcactcactcactccaagaccaccagggtcccaggaagccggtgcctgggtggccatcctacccagcgtggcccaggccgggaagagccacctggcagggctcacactcctgggctctgaacacacacgccagctcctctctgaagcgactctcctgtttggaacggcaaaaaaaaatttttttttctctttttggtggtggttaaaagggaacacaaaacatttaaataaaactttccaaatatttccgaggaca

SEQ ID NO: 106589 - DNA, 2241 bp, Homo sapiens
  Payload ID: 930
  Gene Symbol: ALPL
  Gene Name: alkaline phosphatase, liver/bone/kidney
  Uniprot ID: P05186
  ENST ID: ENST00000539907
  CDS Start-End: 147-1490
gcgttgcgctcccgccactccgcgcccgctatcctggctccgtgctcccacgcgcttgtgcctggacggaccctcgccagtgctctgcgcagagaaagagaaagaccccaagtactggcgagaccaagcgcaagagacactgaaatatgccctggagcttcagaagctcaacaccaacgtggctaagaatgtcatcatgttcctgggagatgacgtacaacaccaatgcccaggtccctgacagtgccggcaccgccaccgcctacctgtgtggggtgaaggccaatgagggcaccgtgggggtaagcgcagccactgagcgttcccggtgcaacaccacccaggggaacgaggtcacctccatcctgcgctgggccaaggacgctgggaaatctgtgggcattgtgaccaccacgagagtgaaccatgccacccccagcgccgcctacgcccactcggctgaccgggactggtactcagacaacgagatgccccctgaggccttgagccagggctgtaaggacatcgcctaccagctcatgcataacatcagggacattgacgtgatcatggggggtggccggaaatacatgtaccccaagaataaaactgatgtggagtatgagagtgacgagaaagccaggggcacgaggctggacggcctggacctcgttgacacctggaagagcttcaaaccgagatacaagcactcccacttcatctggaaccgcacggaactcctgacccttgacccccacaatgtggactacctattgggtctcttcgagccaggggacatgcagtacgagctgaacaggaacaacgtgacggacccgtcactctccgagatggtggtggtggccatccagatcctgcggaagaaccccaaaggcttcttcttgctggtggaaggaggcagaattgaccacgggcaccatgaaggaaaagccaagcaggccctgcatgaggcggtggagatggaccgggccatcgggcaggcaggcagcttgacctcctcggaagacactctgaccgtggtcactgcggaccattcccacgtcttcacatttggtggatacaccccccgtggcaactctatctttggtctggcccccatgctgagtgacacagacaagaagcccttcactgccatcctgtatggcaatgggcctggctacaaggtggtgggcggtgaacgagagaatgtctccatggtggactatgctcacaacaactaccaggcgcagtctgctgtgcccctgcgccacgagacccacggcggggaggacgtggccgtcttctccaagggccccatggcgcacctgctgcacggcgtccacgagcagaactacgtcccccacgtgatggcgtatgcagcctgcatcggggccaacctcggccactgtgctcctgccagctcggcaggcagccttgctgcaggccccctgctgctcgcgctggccctctaccccctgagcgtcctgttctgagggcccagggcccgggcacccacaagcccgtgacagatgccaacttcccacacggcagcccccccctcaaggggcagggaggtgggggcctcctcagcctctgcaactgcaagaaaggggacccaagaaaccaaagtctgccgcccacctcgctcccctctggaatcttccccaagggccaaacccacttctggcctccagcctttgctccctccccgctgccctttggccaacagggtagatttctcttgggcaggcagagagtacagactgcagacattctcaaagcctcttatttttctagcgaacgtatttctccagacccagaggccctgaagcctccgtggaacattctggatctgaccctcccagtctcatctcctgaccctcccactcccatctccttacctctggaaccccccaggccctacaatgctcatgtccctgtccccaggcccagccctccttcaggggagttgaggtctttctcctcaggacaaggccttgctcactcactcactccaagaccaccagggtcccaggaagccggtgcctgggtggccatcctacccagcgtggcccaggccgggaagagccacctggcagggctcacactcctgggctctgaacacacacgccagctcctctctgaagcgactctcctgtttggaacggcaaaaaaaaatttttttttctctttttggtggtggttaaaagggaacacaaaacatttaaataaaactttccaaat

SEQ ID NO: 106590 - DNA, 2131 bp, Homo sapiens
  Payload ID: 930
  Gene Symbol: ALPL
  Gene Name: alkaline phosphatase, liver/bone/kidney
  Uniprot ID: P05186
  ENST ID: ENST00000540617
  CDS Start-End: 195-1604
gttgcgctcccgccactccgcgcccgctatcctggctccgtgctcccacgcgcttgtgcctggacggaccctcgccagtgctctgcgcagagaaagagaaagaccccaagtactggcgagaccaagcgcaagagacactgaaatatgccctggagcttcagaagctcaacaccaacgtggctaagaatgtcatcatgttcctgggagatgggatgggtgtctccacagtgacggctgcccgcatcctcaagggtcagctccaccacaaccctggggaggagaccaggctggagatggacaagttccccttcgtggccctctccaagacgtacaacaccaatgcccaggtccctgacagtgccggcaccgccaccgcctacctgtgtggggtgaaggccaatgagggcaccgtgggggtaagcgcagccactgagcgttcccggtgcaacaccacccaggggaacgaggtcacctccatcctgcgctgggccaaggacgctgggaaatctgtgggcattgtgaccaccacgagagtgaaccatgccacccccagcgccgcctacgcccactcggctgaccgggactggtactcagacaacgagatgccccctgaggccttgagccagggctgtaaggacatcgcctaccagctcatgcataacatcagggacattgacgtgatcatggggggtggccggaaatacatgtaccccaagaataaaactgatgtggagtatgagagtgacgagaaagccaggggcacgaggctggacggcctggacctcgttgacacctggaagagcttcaaaccgagatacaagcactcccacttcatctggaaccgcacggaactcctgacccttgacccccacaatgtggactacctattgggtctcttcgagccaggggacatgcagtacgagctgaacaggaacaacgtgacggacccgtcactctccgagatggtggtggtggccatccagatcctgcggaagaaccccaaaggcttcttcttgctggtggaaggaggcagaattgaccacgggcaccatgaaggaaaagccaagcaggccctgcatgaggcggtggagatggaccgggccatcgggcaggcaggcagcttgacctcctcggaagacactctgaccgtggtcactgcggaccattcccacgtcttcacatttggtggatacaccccccgtggcaactctatctttggtctggcccccatgctgagtgacacagacaagaagcccttcactgccatcctgtatggcaatgggcctggctacaaggtggtgggcggtgaacgagagaatgtctccatggtggactatgctcacaacaactaccaggcgcagtctgctgtgcccctgcgccacgagacccacggcggggaggacgtggccgtcttctccaagggccccatggcgcacctgctgcacggcgtccacgagcagaactacgtcccccacgtgatggcgtatgcagcctgcatcggggccaacctcggccactgtgctcctgccagctcggcaggcagccttgctgcaggccccctgctgctcgcgctggccctctaccccctgagcgtcctgttctgagggcccagggcccgggcacccacaagcccgtgacagatgccaacttcccacacggcagcccccccctcaaggggcagggaggtgggggcctcctcagcctctgcaactgcaagaaaggggacccaagaaaccaaagtctgccgcccacctcgctcccctctggaatcttccccaagggccaaacccacttctggcctccagcctttgctccctccccgctgccctttggccaacagggtagatttctcttgggcaggcagagagtacagactgcagacattctcaaagcctcttatttttctagcgaacgtatttctccagacccagaggccctgaagcctccgtggaacattctggatctgaccctcccagtctcatctcctgaccctcccactcccatctccttacctctggaaccccccaggccctacaatgctcatgtccctgtccccaggcccagccctccttcaggggagttgaggtctttctcctcaggacaaggccttgctcactcactcactccaaga

SEQ ID NO: 106591 - DNA, 2971 bp, Homo sapiens
  Payload ID: 931
  Gene Symbol: ALPP
  Gene Name: alkaline phosphatase, placental
  Uniprot ID: P05187
  ENST ID: ENST00000392027
  CDS Start-End: 270-1877
aataccgcacccttccctgggggacacctggtcccaacctgagctgcctttctcaggaccccagccccagcccggcccagcccagccacaccctgccactcccttcagccagtgtggcttcaggtcaagaggctgggcagggtcaaggtggcaacgaggggagaagccgggacacagttctccctgatttaaacccgggcagcctggagtgcagctcatactccatgcccagaattcctgcctcgccactgtcctgctgccctccagacatgctggggccctgcatgctgctgctgctgctgctgctgggcctgaggctacagctctccctgggcatcatcccagttgaggaggagaacccggacttctggaaccgcgaggcagccgaggccctgggtgccgccaagaagctgcagcctgcacagacagccgccaagaacctcatcatcttcctgggcgatgggatgggggtgtctacggtgacagctgccaggatcctaaaagggcagaagaaggacaaactggggcctgagatacccctggccatggaccgcttcccatatgtggctctgtccaagacatacaatgtagacaaacatgtgccagacagtggagccacagccacggcctacctgtgcggggtcaagggcaacttccagaccattggcttgagtgcagccgcccgctttaaccagtgcaacacgacacgcggcaacgaggtcatctccgtgatgaatcgggccaagaaagcagggaagtcagtgggagtggtaaccaccacacgagtgcagcacgcctcgccagccggcacctacgcccacacggtgaaccgcaactggtactcggacgccgacgtgcctgcctccgcccgccaggaggggtgccaggacatcgctacgcagctcatctccaacatggacattgacgtgatcctaggtggaggccgaaagtacatgtttcgcatgggaaccccagaccctgagtacccagatgactacagccaaggtgggaccaggctggacgggaagaatctggtgcaggaatggctggcgaagcgccagggtgcccggtatgtgtggaaccgcactgagctcatgcaggcttccctggacccgtctgtgacccatctcatgggtctctttgagcctggagacatgaaatacgagatccaccgagactccacactggacccctccctgatggagatgacagaggctgccctgcgcctgctgagcaggaacccccgcggcttcttcctcttcgtggagggtggtcgcatcgaccatggtcatcatgaaagcagggcttaccgggcactgactgagacgatcatgttcgacgacgccattgagagggcgggccagctcaccagcgaggaggacacgctgagcctcgtcactgccgaccactcccacgtcttctccttcggaggctaccccctgcgagggagctccatcttcgggctggcccctggcaaggcccgggacaggaaggcctacacggtcctcctatacggaaacggtccaggctatgtgctcaaggacggcgcccggccggatgttaccgagagcgagagcgggagccccgagtatcggcagcagtcagcagtgcccctggacgaagagacccacgcaggcgaggacgtggcggtgttcgcgcgcggcccgcaggcgcacctggttcacggcgtgcaggagcagaccttcatagcgcacgtcatggccttcgccgcctgcctggagccctacaccgcctgcgacctggcgccccccgccggcaccaccgacgccgcgcacccggggcggtccgtggtccccgcgttgcttcctctgctggccgggaccctgctgctgctggagacggccactgctccctgagtgtcccgtccctggggctcctgcttccccatcccggagttctcctgctccccacctcctgtcgtcctgcctggcctccagcccgagtcgtcatccccggagtccctatacagaggtcctgccatggaaccttcccctccccgtgcgctctggggactgagcccatgacaccaaacctgccccttggctgctctcggactccctaccccaaccccagggactgcaggttgtgccctgtggctgcctgcaccccaggaaaggagggggctcaggccatccagccaccacctacagcccagtgggtaccaggcaggctcccttcctggggaaaagaagcacccagaccccgcgccccgctgatctttgcttcagtccttgaatcacctgtgggacttgaggactcgggatcttcaggacgcctggagaagggtggtttcctgccaccctgctggccaaggaggctcctggggtggggatcaccagggggattttgacacagccttcggctgccccccactaagctaattccacacccctgtacccccccagggggccctctgcctcatggcaaaggcttgccccaaatctcaacttctcagacgttccatacccccacatgccaatttcagcacccaactgagatccgaggagctcctgggaagccctgggtgcaggacactggtcgagagccaaaggtccctccccagacatctggacactgggcatagatttctcaagaaggaagactcccctgcctccccagggcctctgctctcctgggagacaaagcaataataaaaggaagtgtttgtaatcccagcactttgggaggccgaggtgggcggatcacgaggtcaggagatggagaccatcctggctaacacggtgaaaccccttatctatgcgcctgtagtcccagctacccaggaggctgaagcaggataatcgcttgaacccgggcggcggagattgcagtgagccgaggtcatgccactgcactgcagcctgggcgacagagcgagattctgcctcaaaaataaacaaataaattttaaaaataaataaataataaaaggaagtgttagacaatgtaa

SEQ ID NO: 106592 - DNA, 2493 bp, Homo sapiens
  Payload ID: 932
  Gene Symbol: ALPPL2
  Gene Name: alkaline phosphatase, placental-like 2
  Uniprot ID: P10696
  ENST ID: ENST00000295453
  CDS Start-End: 53-1651
catactccatacctgggatttccgcctcgccgctctccgactgcttccagacatgcaggggccctgggtgctgctcctgctgggcctgaggctacagctctccctgggcatcatcccagttgaggaggagaacccggacttctggaaccgccaggcagccgaggccctgggtgccgccaagaagctgcagcctgcacagacagccgccaagaacctcatcatcttcctgggtgacgggatgggggtgtctacggtgacagctgccaggatcctaaaagggcagaagaaggacaaactggggcctgagaccttcctggccatggaccgcttcccgtacgtggctctgtccaagacatacagtgtagacaagcatgtgccagacagtggagccacagccacggcctacctgtgcggggtcaagggcaacttccagaccattggcttgagtgcagccgcccgctttaaccagtgcaacacgacacgcggcaacgaggtcatctccgtgatgaatcgggccaagaaagcaggaaagtcagtgggagtggtaaccaccacacgggtgcagcatgcctcgccagccggcgcctacgcccacacggtgaaccgcaactggtactcggatgccgacgtgcctgcctcggcccgccaggaggggtgccaggacatcgccacgcagctcatctccaacatggacattgatgtgatcctaggtggaggccgaaagtacatgtttcccatggggaccccagaccctgagtacccagatgactacagccaaggtgggaccaggctggacgggaagaatctggtgcaggaatggctggcgaagcaccagggtgcccggtacgtgtggaaccgcactgagctcctgcaggcttccctggacccgtctgtgacccatctcatgggtctctttgagcctggagacatgaaatacgagatccaccgagactccacactggacccctccctgatggagatgacagaggctgccctgctcctgctgagcaggaacccccgcggcttcttcctcttcgtggagggtggtcgcatcgaccatggtcatcatgaaagcagggcttaccgggcactgactgagacgatcatgttcgacgacgccattgagagggcgggccagctcaccagcgaggaggacacgctgagcctcgtcactgccgaccactcccacgtcttctccttcggaggctaccccctgcgagggagctccatcttcgggctggcccctggcaaggcccgggacaggaaggcctacacggtcctcctatacggaaacggtccaggctatgtgctcaaggacggcgcccggccggatgttacggagagcgagagcgggagccccgagtatcggcagcagtcagcagtgcccctggacggagagacccacgcaggcgaggacgtggcggtgttcgcgcgcggcccgcaggcgcacctggttcacggcgtgcaggagcagaccttcatagcgcacgtcatggccttcgccgcctgcctggagccctacaccgcctgcgacctggcgccccgcgccggcaccaccgacgccgcgcacccggggccgtccgtggtccccgcgttgcttcctctgctggcagggaccttgctgctgctggggacggccactgctccctgagtgtcccgtccctggggctcctgcttccccatcccggagttcccctgctccccacctccagtcgtcctgccggacctccacctggagctgtcacccccggagtcgccacacagacgtcctgccatggaaccttcccctcccggtgcaccctggggaccgagcccttgacaccacgccctttgctttatcttgctcttgaaattttggccccaactccagggactggggatttgtgcctggcagctgcctgcatttcaggaaaagaggaggctcagaccatccagcccccgcccatatcctgaggtggatcaggcaggctctctccccggggacatgaggcacccatacctaggaccccctgcgccttttttagcttcagtcatggcagcacctgagggacacaaggacttgggtgcatcaggacgccttggagaagcgtggcttcctgccaccctgcaacccaccctcccagccaaggaggctgctgtggtggggatccccaggggggctttgacacagtcctctgctgtccctccactgggctaattctacacccctgtgcccctcctaggggcccatgagtcagagaggcttgccccaagtcacagccactcagatgttcgacgccccctaaggtccattccagcacccacctgagttccgaggagcacctgggaagctctgggtgcaggatagcagtccagagtccatggccccgcctaggccatctgggtgctgggcatggatttctcagcaaggaagactcattaccttccctccctgggcctccattcttctgggaaacacaaagcaataataaaaggaagtgttagacaatgtaa

SEQ ID NO: 106593 - DNA, 1596 bp, Homo sapiens
  Payload ID: 932
  Gene Symbol: ALPPL2
  Gene Name: alkaline phosphatase, placental-like 2
  ENST ID: ENST00000611550
  CDS Start-End: 1-1596
atgcaggggccctgggtgctgctcctgctgggcctgaggctacagctctccctgggcatcatcccagttgaggaggagaacccggacttctggaaccgccaggcagccgaggccctgggtgccgccaagaagctgcagcctgcacagacagccgccaagaacctcatcatcttcctgggtgacgggatgggggtgtctacggtgacagctgccaggatcctaaaagggcagaagaaggacaaactggggcctgagaccttcctggccatggaccgcttcccgtacgtggctctgtccaagacatacagtgtagacaagcatgtgccagacagtggagccacagccacggcctacctgtgcggggtcaagggcaacttccagaccattggcttgagtgcagccgcccgctttaaccagtgcaacacgacacgcggcaacgaggtcatctccgtgatgaatcgggccaagaaagcaggaaagtcagtgggagtggtaaccaccacacgggtgcagcatgcctcgccagccggcgcctacgcccacacggtgaaccgcaactggtactcggatgccgacgtgcctgcctcggcccgccaggaggggtgccaggacatcgccacgcagctcatctccaacatggacattgatgtgatcctaggtggaggccgaaagtacatgtttcccatggggaccccagaccctgagtacccagatgactacagccaaggtgggaccaggctggacgggaagaatctggtgcaggaatggctggcgaagcaccagggtgcccggtacgtgtggaaccgcactgagctcctgcaggcttccctggacccgtctgtgacccatctcatgggtctctttgagcctggagacatgaaatacgagatccaccgagactccacactggacccctccctgatggagatgacagaggctgccctgctcctgctgagcaggaacccccgcggcttcttcctcttcgtggagggtggtcgcatcgaccatggtcatcatgaaagcagggcttaccgggcactgactgagacgatcatgttcgacgacgccattgagagggcgggccagctcaccagcgaggaggacacgctgagcctcgtcactgccgaccactcccacgtcttctccttcggaggctaccccctgcgagggagctccatcttcgggctggcccctggcaaggcccgggacaggaaggcctacacggtcctcctatacggaaacggtccaggctatgtgctcaaggacggcgcccggccggatgttacggagagcgagagcgggagccccgagtatcggcagcagtcagcagtgcccctgacggagacccacgcaggcgaggacgtggcggtgttcgcgcgcggcccgcaggcgcacctggttcacggcgtgcaggagcagaccttcatagcgcacgtcatggccttcgccgcctgcctggagccctacaccgcctgcgacctggcgccccgcgccggcaccaccgacgccgcgcacccggggccgtccgtggtccccgcgttgcttcctctgctggcagggaccttgctgctgctggggacggccactgctccctga

SEQ ID NO: 106594 - DNA, 2594 bp, Homo sapiens
  Payload ID: 933
  Gene Symbol: ALKBH1
  Gene Name: alkB homolog 1, histone H2A dioxygenase
  Uniprot ID: Q13686
  ENST ID: ENST00000216489
  CDS Start-End: 17-1186
gggtataggccgcgagatggggaagatggcagcggccgtgggctctgtggcgactctggcgactgagcccggggaggacgcctttcggaaacttttccgcttctaccgtcagagccggcccgggaccgcagacctggaaggggtcatcgacttctcggcggcccacgcagcccgtggcaagggtcctggtgcccaaaaggtgatcaaatctcagctaaatgtgtcttctgtcagtgagcagaatgcatatagagcaggtcttcagcccgtcagcaagtggcaagcctatggactcaaaggctatcctgggtttatttttatcccaaaccccttcctcccaggttaccagtggcactgggtgaaacagtgccttaagttatattcccagaaacctaatgtatgtaacctggacaaacacatgtctaaagaagagacccaagatctgtgggaacagagcaaagagttcctgaggtataaagaagcgactaaacggagaccccgaagtttactggagaaactgcgttgggtgaccgtaggctaccattataactgggacagtaagaaatactcagcagatcattacacacctttcccttctgacctgggtttcctctcagagcaagtagccgctgcctgtggatttgaggatttccgagctgaagcagggatcctgaattactaccgcctggactccacactgggaatccacgtagacagatctgagctagatcactccaaacccttgctgtcattcagctttggacagtccgccatctttctcctgggtggtcttcaaagggatgaggcccccacggccatgtttatgcacagtggtgacatcatgataatgtcgggtttcagccgcctcttgaaccacgcagtccctcgtgtccttccaaatccagaaggggaaggcctgcctcactgcctagaggcacctctccctgctgtcctcccgagagattcaatggtagagccttgttctatggaggactggcaggtgtgtgccagctacttgaagaccgctcgtgttaacatgactgtccgacaggtcctggccacagaccagaatttccctctagaacccatcgaggatgaaaaaagagacatcagtacagaaggtttctgccatctggatgaccagaatagcgaagtaaaacgggccaggataaaccctgacagctgagacttggagatcccatcctttttactcaggcacctgcttaccgtaaatgatcatgttattgtgtattgccgtggacttcagcacccagacaagccaaaaacagagacagggaagaactcattgttgatcacactgttgccttggaacccacgcagaagtaaactcagccactttgctcagagaagtgtttgacatggtctgttcctagttacatgttggctgtaatgtatgttgagaagtcagtccaaggaggtatgttcttccacaacagccttctcagcctctgctatttcctttgaggaaggtagaagtgagtttccatgtttgcagagtatttaaatacctcagattttattaatgagaaatacagtacccctccctccactccatctggtaatttatggtaaaattgtggttctgtgaaccagctattagtctcatcttcttaactccctcaggcatcatcaaattctttgatcttctcttccacctctctggctctcatggaagaatcctttacacatgaaaacaatggaactggaaaatcttgtcttttagaaaagaaattaatcacaactatctctcttgcctaaaagataaatataggtaaacccaaggaaaggggaatttagtttctctacatgtcatttcggtctccaaactccctgttggctttttaatgcaattttaattgttggaataaaaaagtcccaagggtgttttgttactgttttctccatgaataaactcacttgattttaaattaaagatctatatctgtctttggggtttagtctatctgggattaaggtttttttttctgtttttctttgctgtattgttcatgctattgaagccctctagctgtttctgccctacaccattctgctgtgccctaagtattctttgtggctgtctcacagaagagagaacatttcttaatattccagtcactgctgttattgtctgagggtaggcagcttggaaaaatgtaggcaacaccaagttttaatctttatacccccaacaatttgactgactatatcatggtccaggttactttacatttctctggacctcggtttcctcatcataaaatgaagatactgtagactaccatcttcctaaagggatattggtatttgaaagagaattaagtgctcctttctacaaacatgatgtgccaaaattgttttattataagggctctttgaaacatcctaacttccttgtgtggaggactggctggaagcccatttggtacctactgtttgcaatgcatgttattaagtttacatgtctcctctgtcctgctctgccccttttttaaattactggcattgaatattgagttcatatggtaatagcagggtttttaaatgaataaaaattatggatttatctctta

SEQ ID NO: 106595 - DNA, 649 bp, Homo sapiens
  Payload ID: 933
  Gene Symbol: ALKBH1
  Gene Name: alkB homolog 1, histone H2A dioxygenase
  ENST ID: ENST00000555100
  CDS Start-End: 1-339
gcagcggccgtgggctctgtggcgactctggcgactgagcccggggaggacgcctttcggaaacttttccgcttctaccgtcagagccggcccgggaccgcagacctggaaggggtcatcgacttctcggcggcccacgcagcccgtggcaagggtcctggtgcccaaaaggtgatcaaatctcagctaaatgtgtcttctgtcagtgagcagaatgcatatagagcaggtcttcagcccgtcagcaagtggcaagcctatggactcaaaggctatcctggtataaagaagcgactaaacggagaccccgaagtttactggagaaactgcgttgggtgaccgtaggctaccattataactgggacagtaagagcaagtagccgctgcctgtggatttgaggatttccgagctgaagcagggatcctgaattactaccgcctggactccacactgggaatccacgtagacagatctgagctagatcactccaaacccttgctgtcattcagctttggacagtccgccatctttctcctgggtggtcttcaaagggatgaggcccccacggccatgtttatgcacagtggtgacatcatgataatgtcgggtttcagccgcctcttgaaccacgcagtccctcgtgtcctt

SEQ ID NO: 106596 - DNA, 1750 bp, Homo sapiens
  Payload ID: 933
  Gene Symbol: ALKBH1
  Gene Name: alkB homolog 1, histone H2A dioxygenase
  ENST ID: ENST00000557057
  CDS Start-End: 7-357
cgcgagatggggaagatggcagcggccgtgggctctgtggcgactctggcgactgagcccggggaggacgcctttcggaaacttttccgcttctaccgtcagagccggcccgggaccgcagacctggaaggggtcatcgacttctcggcggcccacgcagcccgtggcaagggtcctggtgcccaaaaggtgatcaaatctcagctaaatgtgtcttctgtcagtgagcagaatgcatatagagcaggtcttcagcccgtcagcaagtggcaagcctatggactcaaaggctatcctggtataaagaagcgactaaacggagaccccgaagtttactggagaaactgcgttgggtgaccgtaggctaccattataactgggacagtaagaaatactcagcagatcattacacacctttcccttctgacctgggtttcctctcagagcaagtagccgctgcctgtggatttgaggatttccgagctgaagcagggatcctgaattactaccgcctggactccacactgggaatccacgtagacagatctgagctagatcactccaaacccttgctgtcattcagctttggacagtccgccatctttctcctgggtggtcttcaaagggatgaggcccccacggccatgtttatgcacagtggtgacatcatgataatgtcgggtttcagccgcctcttgaaccacgcagtccctcgtgtccttccaaatccagaaggggaaggcctgcctcactgcctagaggcacctctccctgctgtcctcccgagagattcaatggtagagccttgttctatggaggactggcaggtgtgtgccagctacttgaagaccgctcgtgttaacatgactgtccgacaggtcctggccacagaccagaatttccctctagaacccatcgaggatgaaaaaagagacatcagtacagaaggtttctgccatctggatgaccagaatagcgaagtaaaacgggccaggataaaccctgacagctgagacttggagatcccatcctttttactcaggcacctgcttaccgtaaatgatcatgttattgtgtattgccgtggacttcagcacccagacaagccaaaaacagagacagggaagaactcattgttgatcacactgttgccttggaacccacgcagaagtaaactcagccactttgctcagagaagtgtttgacatggtctgttcctagttacatgttggctgtaatgtatgttgagaagtcagtccaaggaggtatgttcttccacaacagccttctcagcctctgctatttcctttgaggaaggtagaagtgagtttccatgtttgcagagtatttaaatacctcagattttattaatgagaaatacagtacccctccctccactccatctggtaatttatggtaaaattgtggttctgtgaaccagctattagtctcatcttcttaactccctcaggcatcatcaaattctttgatcttctcttccacctctctggctctcatggaagaatcctttacacatgaaaacaatggaactggaaaatcttgtcttttagaaaagaaattaatcacaactatctctcttgcctaaaagataaatataggtaaacccaaggaaaggggaatttagtttctctacatgtcatttcggtctccaaactccctgttggctttttaatgcaattttaattgttggaataaaaaagtcccaagggtgttttgttactgttttctc

SEQ ID NO: 106597 - DNA, 1030 bp, Homo sapiens
  Payload ID: 934
  Gene Symbol: ALKBH2
  Gene Name: alkB homolog 2, alpha-ketoglutarate-dependent dioxygenase
  Uniprot ID: Q6NS38
  ENST ID: ENST00000343075
  CDS Start-End: 228-1013
gtctttcccaccacgaggccaccagggtgactgcgggattccgatctgcgccggagctgcgatgctagagcactcttgccacccccaccccacggacgtgttgcagtgatatcagaattttgcgtgcggtttacccgtgtttaacctctttgcgtctcgcttctgaatcgtatccacttgagcatcactagactgatctattttaacactggtggggggcagcgaggatggacagattcctggtgaaaggggctcaagggggccttttgaggaagcaggaggagcaagagccaactggagaagagccagctgtgttgggaggagacaaagaaagcacaaggaagaggcccaggagagaggccccagggaatggaggccactcagcaggccctagctggcggcacattcgggctgagggcctggactgcagttacacagtcctgtttggcaaagctgaggcagatgagattttccaagagttggagaaagaagtagaatattttacaggagcactggccagagtccaggtattcgggaagtggcacagtgtgcccaggaagcaggcaacgtatggcgacgctgggctgacctacacattttcaggcctcacgctgtctccaaagccctggatcccagttctagagcgcatccgggatcacgtctctggggtgactggacagaccttcaactttgtgctcatcaacaggtataaagatggctgtgaccacatcggggagcaccgagatgatgaaagagaactggcccctgggagccccattgcctctgtctccttcggtgcctgcagagactttgtcttccggcataaggattcccgtgggaaaagcccctccaggagggtggcggtggtcaggctgccgctggcccacgggagcttactaatgatgaaccacccgaccaacacgcactggtaccacagtcttcccgtgagaaagaaggttctggctccacgggtgaatctgacttttcgtaaaattttgcttactaaaaaataaaaacatttttaacagtt

SEQ ID NO: 106598 - DNA, 1159 bp, Homo sapiens
  Payload ID: 934
  Gene Symbol: ALKBH2
  Gene Name: alkB homolog 2, alpha-ketoglutarate-dependent dioxygenase
  Uniprot ID: Q6NS38
  ENST ID: ENST00000429722
  CDS Start-End: 365-1150
cgaggccaccagggtgactgcgggattccgatctgcgccggagctgcgatgctagagcactcttgccacccccaccccacggacgtgttgcagtgatatcagaattttgcgtgcggtttacccgtgtttaacctctttgcgtctcgcttctgaatcgtatccacttgagcatcactagactgatctattttaacactggtggggggcagcgaggacatggttttaaactttaaaatgaaaatgtgaaactaggaatgttgctgtgagaccccttggacaaacagatttttgcactggggatagaacttgagcaatttctgtcttggcctcgccactgacgtcccttctttcctgtggggacaggatggacagattcctggtgaaaggggctcaagggggccttttgaggaagcaggaggagcaagagccaactggagaagagccagctgtgttgggaggagacaaagaaagcacaaggaagaggcccaggagagaggccccagggaatggaggccactcagcaggccctagctggcggcacattcgggctgagggcctggactgcagttacacagtcctgtttggcaaagctgaggcagatgagattttccaagagttggagaaagaagtagaatattttacaggagcactggccagagtccaggtattcgggaagtggcacagtgtgcccaggaagcaggcaacgtatggcgacgctgggctgacctacacattttcaggcctcacgctgtctccaaagccctggatcccagttctagagcgcatccgggatcacgtctctggggtgactggacagaccttcaactttgtgctcatcaacaggtataaagatggctgtgaccacatcggggagcaccgagatgatgaaagagaactggcccctgggagccccattgcctctgtctccttcggtgcctgcagagactttgtcttccggcataaggattcccgtgggaaaagcccctccaggagggtggcggtggtcaggctgccgctggcccacgggagcttactaatgatgaaccacccgaccaacacgcactggtaccacagtcttcccgtgagaaagaaggttctggctccacgggtgaatctgacttttcgtaaaattttgcttactaaaaaataaaaacatttt

SEQ ID NO: 106599 - DNA, 574 bp, Homo sapiens
  Payload ID: 934
  Gene Symbol: ALKBH2
  Gene Name: alkB homolog 2, alpha-ketoglutarate-dependent dioxygenase
  Uniprot ID: Q6NS38
  ENST ID: ENST00000440112
  CDS Start-End: 4-477
aggatggacagattcctggtgaaaggggctcaagggggccttttgaggaagcaggaggagcaagagccaactggagaagagccagctgtgttgggaggagacaaagaaagcacaaggaagaggcccaggagagaggccccagggaatggaggccactcagcaggccctagctggcggcacattcgggctgagggcctggactgcagttacacagtcctgtttggcaaagctgaggcagatgagattttccaagagttggagaaagaagtagaatattttacaggtataaagatggctgtgaccacatcggggagcaccgagatgatgaaagagaactggcccctgggagccccattgcctctgtctccttcggtgcctgcagagactttgtcttccggcataaggattcccgtgggaaaagcccctccaggagggtggcggtggtcaggctgccgctggcccacgggagcttactaatgatgaaccacccgaccaacacgcactggtaccacagtcttcccgtgagaaagaaggttctggctccacgggtgaatctgacttttcgtaaaatttt

SEQ ID NO: 106600 - DNA, 572 bp, Homo sapiens
  Payload ID: 934
  Gene Symbol: ALKBH2
  Gene Name: alkB homolog 2, alpha-ketoglutarate-dependent dioxygenase
  ENST ID: ENST00000536242
  CDS Start-End: 122-572
tttcccaccacgaggccaccagggtgactgcgggattccgatctgcgccggagctgcgatgctagagcactcttgccacccccaccccacggacgtgttgcagtgatatcagaattttgcgatggacagattcctggtgaaaggggctcaagggggccttttgaggaagcaggaggagcaagagccaactggagaagagccagctgtgttgggaggagacaaagaaagcacaaggaagaggcccaggagagaggccccagggaatggaggccactcagcaggccctagctggcggcacattcgggctgagggcctggactgcagttacacagtcctgtttggcaaagctgaggcagatgagattttccaagagttggagaaagaagtagaatattttacaggagcactggccagagtccaggtattcgggaagtggcacagtgtgcccaggaagcaggcaacgtatggcgacgctgggctgacctacacattttcaggcctcacgctgtctccaaagccctggatcccagttctagagcgcatccgggatcacgtctctggggtgactggac

SEQ ID NO: 106601 - DNA, 1049 bp, Homo sapiens
  Payload ID: 934
  Gene Symbol: ALKBH2
  Gene Name: alkB homolog 2, alpha-ketoglutarate-dependent dioxygenase
  ENST ID: ENST00000536358
  CDS Start-End: 687-1049
gtctttcccaccacgaggccaccagggtgactgcgggattccgatctgcgccggagctgcgatgctagagcactcttgccacccccaccccacggacgtgttgcagtgatatcagaattttgcgtgcggtttacccgtgtttaacctctttgcgtctcgcttctgaatcgtatccacttgagcatcactagactgatctattttaacactggtggggggcagcgaggtcagttatgggtccttcctccttaaaggggtggacagttgactttgggcaaacctcttcgcctctgtgggcaacagtttccccttctgcaaaatgagggtttggattgtagtttctaagtttagctgtggcgtgcgaattcccaggaggtagttctttaaaaattcaggtgctcaggcgtggagtgcagacctctgggtttttgcaagctagccagctgattctgatgcacaggtggacgtgggagaccctggatcagattgtccctagggtcccttccggctttaacatcttctgtttcctttctaggacatggttttaaactttaaaatgaaaatgtgaaactaggaatgttgctgtgagaccccttggacaaacagatttttgcactggggatagaacttgagcaatttctgtcttggcctcgccactgacgtcccttctttcctgtggggacaggatggacagattcctggtgaaaggggctcaagggggccttttgaggaagcaggaggagcaagagccaactggagaagagccagctgtgttgggaggagacaaagaaagcacaaggaagaggcccaggagagaggccccagggaatggaggccactcagcaggccctagctggcggcacattcgggctgagggcctggactgcagttacacagtcctgtttggcaaagctgaggcagatgagattttccaagagttggagaaagaagtagaatattttacaggagcactggccagagtccaggtattcgggaagtggcacagtgtgcccaggaagcaggcaacgtatggcgacgctgggctgacc

SEQ ID NO: 106602 - DNA, 834 bp, Homo sapiens
  Payload ID: 934
  Gene Symbol: ALKBH2
  Gene Name: alkB homolog 2, alpha-ketoglutarate-dependent dioxygenase
  ENST ID: ENST00000543444
  CDS Start-End: 1-449
gccttttgaggaagcaggaggagcaagagccaactggagaagagccagctgtgttgggaggagacaaagaaagcacaaggaagaggcccaggagagaggccccagggaatggaggccactcagcaggccctagctggcggcacattcgggctgagggcctggactgcagttacacagtcctgtttggcaaagctgaggcagatgagattttccaagagttggagaaagaagtagaatattttacaggagcactggccagagtccaggtattcgggaagtggcacagtgtgcccaggaagcaggcaacgtatggcgacgctgggctgacctacacattttcaggcctcacgctgtctccaaagccctggatcccagttctagagcgcatccgggatcacgtctctggggtgactggacagaccttcaactttgtgctcatcaacaggtgacaccctgtttagtggactcaatgttacaagtcttctgtctcctccaaaaggaagtgtttagggttccaccctatttggttcattggtacaaatcatttcttagtacactggggctctaagagtggaatagcgccagcactcggtcttcctggatcctggagctcatcccggagtaggaagtgagaggtgattaactcctgaacaaacagctgaatgagataatttcttcttctctttttctttcttttttttttttgagacagggtttttctatgttgcccaggcttggtctcaaactgctaggctcaagcgatcctcccacctcagcctcccaaagtgctgggattacaggcgtgaacgactatgcctgaccctagacgatttc

SEQ ID NO: 106603 - DNA, 895 bp, Homo sapiens
  Payload ID: 934
  Gene Symbol: ALKBH2
  Gene Name: alkB homolog 2, alpha-ketoglutarate-dependent dioxygenase
  Uniprot ID: Q6NS38
  ENST ID: ENST00000619381
  CDS Start-End: 291-764
cgattcgctggggcgcgtctttcccaccacgaggccaccagggtgactgcgggattccgatctgcgccggagctgcgatgctagagcactcttgccacccccaccccacggacgtgttgcagtgatatcagaattttgcgacatggttttaaactttaaaatgaaaatgtgaaactaggaatgttgctgtgagaccccttggacaaacagatttttgcactggggatagaacttgagcaatttctgtcttggcctcgccactgacgtcccttctttcctgtggggacaggatggacagattcctggtgaaaggggctcaagggggccttttgaggaagcaggaggagcaagagccaactggagaagagccagctgtgttgggaggagacaaagaaagcacaaggaagaggcccaggagagaggccccagggaatggaggccactcagcaggccctagctggcggcacattcgggctgagggcctggactgcagttacacagtcctgtttggcaaagctgaggcagatgagattttccaagagttggagaaagaagtagaatattttacaggtataaagatggctgtgaccacatcggggagcaccgagatgatgaaagagaactggcccctgggagccccattgcctctgtctccttcggtgcctgcagagactttgtcttccggcataaggattcccgtgggaaaagcccctccaggagggtggcggtggtcaggctgccgctggcccacgggagcttactaatgatgaaccacccgaccaacacgcactggtaccacagtcttcccgtgagaaagaaggttctggctccacgggtgaatctgacttttcgtaaaattttgcttactaaaaaataaaaacatttttaacagttt

SEQ ID NO: 106604 - DNA, 1474 bp, Homo sapiens
  Payload ID: 935
  Gene Symbol: ALKBH3
  Gene Name: alkB homolog 3, alpha-ketoglutarate-dependent dioxygenase
  Uniprot ID: Q96Q83
  ENST ID: ENST00000302708
  CDS Start-End: 412-1272
ggttccgatcacagactgcggagtgggtcaggggctgcgagggctgccccaagtcctaccgggtttgcacgggcgcgcccggctccgcccgcaagtgcgccttcctgacttactgctgggtgcgcggggctgggggtgcgagtaccacccctgaagtctcttcctgggcgacctccggggcctcattctaggcctccttaaagagaaggatctaaattaggaaaaggaagtgcccttatccacgaccaagctcttccacctgcggagctcgcttagtctgcacctcaaccgtgcggaaagtgactgccctgtttactgaggaaaaactggggctcagaaagataccatggagtagtttgaaacaggaacaaaatcttctgaaagctcggagcagaagcctttttggtcaacatggaggaaaaaagacggcgagcccgagttcagggagcctgggctgcccctgttaaaagccaggccattgctcagccagctaccactgctaagagccatctccaccagaagcctggccagacctggaagaacaaagagcatcatctctctgacagagagtttgtgttcaaagaacctcagcaggtagtacgtagagctcctgagccacgagtgattgacagagagggtgtgtatgaaatcagcctgtcacccacaggtgtatctagggtctgtttgtatcctggctttgttgacgtgaaagaagctgactggatattggaacagctttgtcaagatgttccctggaaacagaggactggcatcagagaggatataacttatcagcaaccaagacttacagcatggtatggagaacttccttacacttattcaagaatcactatggaaccaaatcctcactggcaccctgtgctgcgcacactaaagaaccgcattgaagagaacactggccacaccttcaactccttactctgcaatctttatcgcaatgagaaggacagcgtggactggcacagtgatgatgaaccctcactagggaggtgccccattattgcttcactaagttttggtgccacacgcacatttgagatgagaaagaagccaccaccagaagagaatggagactacacatatgtggaaagagtgaagatacccttggatcatgggaccttgttaatcatggaaggagcgacacaagctgactggcagcatcgagtgcccaaagaataccactctagagaaccgagagtgaacctgacctttcggacagtctatccagaccctcgaggggcaccctggtgacgtcagagctttgagagagaagcttcactgaaacggagcaaaccttccactgagaagccacttcaagaggctggtgctgctagatctcatgatgtggctgttgggaagatggtggggtttgtttgccagcttggagtcctattaaatgaaagccagcaactcatgttggtaataggtctactgtgggaacagttatccctaa

SEQ ID NO: 106605 - DNA, 764 bp, Homo sapiens
  Payload ID: 935
  Gene Symbol: ALKBH3
  Gene Name: alkB homolog 3, alpha-ketoglutarate-dependent dioxygenase
  ENST ID: ENST00000534171
  CDS Start-End: 401-601
cagactgcggagtgggtcaggggctgcgagggctgccccaagtcctaccgggtttgcacgggcgcgcccggctccgcccgcaagtgcgccttcctgacttactgctgggtgcgcggggctgggggtgcgagtaccacccctgaagtctcttcctgggcgacctccggggcctcattctaggcctccttaaagagaaggatctaaattaggaaaaggaagtgcccttatccacgaccaagctcttccacctgcggagctcgcttagtctgcacctcaaccgtgcggaaagtgactgccctgtttactgaggaaaaactggggctcagaaagataccatggagtagtttgaaacaggaacaaaatcttctgaaagctcggagcagaagcctttttggtcaacatggaggaaaaaagacggcgagcccgagttcagggagcctgggctgcccctgttaaaagccaggccattgctcagccagctaccactgctaagagccatctccaccagaagcctggccagacctggaagaacaaagagcatcatctctctgacagagagtttgtgttcaaagaacctcagcagcagagagggtgtgtatgaaatcagcctgtcacccacaggtgtatctagggtctgtttgtatcctggctttgttgacgtgaaagaagctgactggatattggaacagctttgtcaagatgttccctggaaacagaggactggcatcagagaggtggcaccctgtgctgcgcacactaaagaa

SEQ ID NO: 106606 - DNA, 725 bp, Homo sapiens
  Payload ID: 935
  Gene Symbol: ALKBH3
  Gene Name: alkB homolog 3, alpha-ketoglutarate-dependent dioxygenase
  ENST ID: ENST00000532129
  CDS Start-End: 1-469
gctgactggatattggaacagctttgtcaagatgttccctggaaacagaggactggcatcagagaggtggcaccctgtgctgcgcacactaaagaaccgcattgaagagaacactggccacaccttcaactccttactctgcaatctttatcgcaatgagaaggacagcgtggactggcacagtgatgatgaaccctcactagggaggtgccccattattgcttcactaagttttggtgccacacgcacatttgagatgagaaagaagccaccaccagaagagaatggagactacacatatgtggaaagagtgaagatacccttggatcatgggaccttgttaatcatggaaggagcgacacaagctgactggcagcatcgagtgcccaaagaataccactctagagaaccgagagtgaacctgacctttcggacagtctatccagaccctcgaggggcaccctggtgacgtcagagctttgagagagaagcttcactgaaacggagcaaaccttccactgagaagccacttcaagaggctggtgctgctagatctcatgatgtggctgttgggaagatggtggggtttgtttgccagcttggagtcctattaaatgaaagccagcaactcatgttggtaataggtctactgtgggaacagttatccctaaccacagctcaaaatcgctatcatctttaggcaaattaaaatctatgtggcagtg

SEQ ID NO: 106607 - DNA, 842 bp, Homo sapiens
  Payload ID: 935
  Gene Symbol: ALKBH3
  Gene Name: alkB homolog 3, alpha-ketoglutarate-dependent dioxygenase
  ENST ID: ENST00000524742
  CDS Start-End: 663-842
tgcggagtgggtcaggggctgcgagggctgccccaagtcctaccgggtttgcacgggcgcgcccggctccgcccgcaagtgcgccttcctgacttactgctgggtgcgcggggctgggggtgcgagtaccacccctgaagtctcttcctgggcgacctccggggcctcattctaggcctccttaaagagaaggatctaaattaggaaaaggaagtgcccttatccacgaccaagctcttccacctgcggagctcgcttagtctgcacctcaaccgtgcggaaagtgactgccctgtttactgaggaaaaactggggctcagaaaggtgaagtcatttgccatgggccatgcagctgggaagtgacagatctggattcaaagcgagttctggctggcgccagagtccttgtattttacagcactggttctcaagctttatgtgcattaagaattcctgggttgagggtggcgttagttaacaaattctgggactctacaaattgagtagatctgggatggggctctggaatctattttcaacaattgttccctggcaaataacatatggctccccagtgaatggagcaagaagataccatggagtagtttgaaacaggaacaaaatcttctgaaagctcggagcagaagcctttttggtcaacatggaggaaaaaagacggcgagcccgagttcagggagcctgggctgcccctgttaaaagccaggccattgctcagccagctaccactgctaagagccatctccaccagaagcctggccagacctggaagaacaaagagcatcatctctctgacagagagtttgtgttcaaagaacctcag

SEQ ID NO: 106608 - DNA, 1371 bp, Homo sapiens
  Payload ID: 935
  Gene Symbol: ALKBH3
  Gene Name: alkB homolog 3, alpha-ketoglutarate-dependent dioxygenase
  ENST ID: ENST00000532962
  CDS Start-End: 440-955
gttgctggagtcggtgcttcactcttaaggttccgatcacagactgcggagtgggtcaggggctgcgagggctgccccaagtcctaccgggtttgcacgggcgcgcccggctccgcccgcaagtgcgccttcctgacttactgctgggtgcgcggggctgggggtgcgagtaccacccctgaagtctcttcctgggcgacctccggggcctcattctaggcctccttaaagagaaggatctaaattaggaaaaggaagtgcccttatccacgaccaagctcttccacctgcggagctcgcttagtctgcacctcaaccgtgcggaaagtgactgccctgtttactgaggaaaaactggggctcagaaagataccatggagtagtttgaaacaggaacaaaatcttctgaaagctcggagcagaagcctttttggtcaacatggaggaaaaaagacggcgagcccgagttcagggagcctgggctgcccctgttaaaagccaggccattgctcagccagctaccactgctaagagccatctccaccagaagcctggccagacctggaagaacaaagagcatcatctctctgacagagagtttgtgttcaaagaacctcagcaggtagtacgtagagctcctgagccacgagtgattgacagagagggtgtgtatgaaatcagcctgtcacccacaggtgtatctagggtctgtttgtatcctggctttgttgacgtgaaagaagctgactggatattggaacagctttgtcaagatgttccctggaaacagaggactggcatcagagaggattccatattgcaactaacctttaagaagtcagcacctgttagtggaaccgcgactgctccgcagagctgctggtatgagcgcccgtcgccaccccacatcccaggcccagccattctgacaagaactagactttgggctccttgagaatattcagtttttggcaccctgtgctgcgcacactaaagaaccgcattgaagagaacactggccacaccttcaactccttactctgcaatctttatcgcaatgagaaggacagcgtggactggcacagtgatgatgaaccctcactagggaggtgccccattattgcttcactaagttttggtgccacacgcacatttgagatgagaaagaagccaccaccagaagagaatggagactacacatatgtggaaagagtgaagatacccttggatcatgggaccttgttaatcatggaaggagcgacacaagctgactggcagcatcgagtgcccaaagaataccactctagagaaccgagagtgaacctgacctttcggacagtctatccagaccctcgaggggcaccctggtga

SEQ ID NO: 106609 - DNA, 747 bp, Homo sapiens
  Payload ID: 935
  Gene Symbol: ALKBH3
  Gene Name: alkB homolog 3, alpha-ketoglutarate-dependent dioxygenase
  ENST ID: ENST00000529366
  CDS Start-End: 77-747
aaacagataccatggagtagtttgaaacaggaacaaaatcttctgaaagctcggagcagaagcctttttggtcaacatggaggaaaaaagacggcgagcccgagttcagggagcctgggctgcccctgttaaaagccaggccattgctcagccagctaccactgctaagagccatctccaccagaagcctggccagacctggaagaacaaagagcatcatctctctgacagagagtttgtgttcaaagaacctcagcaggtagtacgtagagctcctgagccacgagtgattgaagagggtgtgtatgaaatcagcctgtcacccacaggtgtatctagggtctgtttgtatcctggctttgttgacgtgaaagaagctgactggatattggaacagctttgtcaagatgttccctggaaacagaggactggcatcagagaggatataacttatcagcaaccaagacttacagcatggtatggagaacttccttacacttattcaagaatcactatggaaccaaatcctcactggcaccctgtgctgcgcacactaaagaaccgcattgaagagaacactggccacaccttcaactccttactctgcaatctttatcgcaatgagaaggacagcgtggactggcacagtgatgatgaaccctcactagggaggtgccccattattgcttcactaagttttggtgccacacgcacatttgagatgagaaagaagccaccaccagaaga

SEQ ID NO: 106610 - DNA, 1557 bp, Homo sapiens
  Payload ID: 935
  Gene Symbol: ALKBH3
  Gene Name: alkB homolog 3, alpha-ketoglutarate-dependent dioxygenase
  Uniprot ID: Q96Q83
  ENST ID: ENST00000530803
  CDS Start-End: 377-889
tgcgagggctgccccaagtcctaccgggtttgcacgggcgcgcccggctccgcccgcaagtgcgccttcctgacttactgctgggtgcgcggggctgggggtgcgagtaccacccctgaagtctcttcctgggcgacctccggggcctcattctaggcctccttaaagagaaggatctaaattaggaaaaggaagtgcccttatccacgaccaagctcttccacctgcggagctcgcttagtctgcacctcaaccgtgcggaaagtgactgccctgtttactgaggaaaaactggggctcagaaagataccatggagtagtttgaaacaggaacaaaatcttctgaaagctcggagcagaagcctttttggtcaacatggaggaaaaaagacggcgagcccgagttcagggagcctgggctgcccctgttaaaagccaggccattgctcagccagctaccactgctaagagccatctccaccagaagcctggccagacctggaagaacaaagagcatcatctctctgacagagagtttgtgttcaaagaacctcagcaggtagtacgtagagctcctgagccacgagtgattgaagagggtgtgtatgaaatcagcctgtcacccacaggtgtatctagggtctgtttgtatcctggctttgttgacgtgaaagaagctgactggatattggaacagctttgtcaagatgttccctggaaacagaggactggcatcagagaggattccatattgcaactaacctttaagaagtcagcacctgttagtggaaccgcgactgctccgcagagctgctggtatgagcgcccgtcgccaccccacatcccaggcccagccattctgacaagaactagactttgggctccttgagaatattcagtttttggcaccctgtgctgcgcacactaaagaaccgcattgaagagaacactggccacaccttcaactccttactctgcaatctttatcgcaatgagaaggacagcgtggactggcacagtgatgatgaaccctcactagggaggtgccccattattgcttcactaagttttggtgccacacgcacatttgagatgagaaagaagccaccaccaagaatggagactacacatatgtggaaagagtgaagatacccttggatcatgggaccttgttaatcatggaaggagcgacacaagctgactggcagcatcgagtgcccaaagaataccactctagagaaccgagagtgaacctgacctttcggacagtctatccagaccctcgaggggcaccctggtgacgtcagagctttgagagagaagcttcactgaaacggagcaaaccttccactgagaagccacttcaagaggctggtgctgctagatctcatgatgtggctgttgggaagatggtggggtttgtttgccagcttggagtcctattaaatgaaagccagcaactcatgttggtaataggtctactgtgggaacagttatccctaaccacagctcaaaatcgctatcatctttaggcaaattaaaatctatgtggcagtg

SEQ ID NO: 106611 - DNA, 2105 bp, Homo sapiens
  Payload ID: 936
  Gene Symbol: ALKBH4
  Gene Name: alkB homolog 4, lysine demthylase
  Uniprot ID: Q9NXW9
  ENST ID: ENST00000292566
  CDS Start-End: 41-949
cccacggccgcgcctgcgcactggccacgcggacggcgcgatggcggcggctgccgccgagacccccgaagtccttcgggaatgcggttgcaagggcatccggacctgtctgatctgcgagcggcagcgcggcagtgacccgccctgggagctgcccccagcgaaaacataccgtttcatttactgctccgacaccggctgggccgtgggcacagaggagtctgactttgagggctgggccttccccttcccaggagtgatgctgatcgaggactttgtgacccgggaggaagaagccgagttggtgcggctcatggaccgtgacccctggaagctctcccagtctggacggaggaagcaggactatggccccaaagtcaactttcggaaacagaagctaaagaccgagggcttctgcggcctccccagcttcagccgggaggtggtgcggaggatgggcctctacccggggctggagggcttccggcccgtcgagcagtgcaacctggactactgccccgagcggggctctgccattgacccccacctggacgacgcctggctgtggggggagcggctggtcagcctcaacctcctgtcccccaccgtgctgtccatgtgtcgggaggcgcccgggagcctgctcctctgctcggccccgtcggctgccccggaggccttggtggacagcgtgatagcacccagccggtcggtgctatgccaggaggtggaggtggccatccccttacccgcccgctccctgctggtcctcaccggggcggcacggcaccagtggaagcatgccatccaccgcagacacatcgaggcccgccgcgtctgcgtcactttccgggagctgtcggctgagtttggccctggagggaggcagcaagagctgggccaggaactgctgcggatcgccctctccttccagggaagacccgtgtgaaccgcctccttggctccagacttgactgatcccgggattgaaatgaggagcacagaacagggcctcctgcaactcacggggtttcaagagaagatggctgacccctgatgctgtgagcagtgtgagccctgcccaggagcaggttttgatgggaacgtacctccaggcagcccccttccacctggaccgtggccacacttttttggttatttagtttgtcacagtcttggggacatgggatcatttgagcttaaaaaatactgggggccgggcacagtggctcacacctgtaatcctaacactttgggaggctgaggtgggcggatcacttgatgccaggagttcgagaccagcctggccaacacggtgaaaacccgtctctacaaaaactacaaaaattagccgggtgtggtgactcacagccgtaatcccagctactcgggaggctaaggtgggagaattgcttgaacctgggaggcggaggttgcagtgagccaagatcacgccactgcactccagcctcggtgacagagcaagactgttttgaaaaaaaaaaaaaatgggaacattttaaatgattttcacctttattatgcatctattttcatggggtttcccgatatctcactgtccagtcccttcatttggggaatgtgttggattagggaacagggttgaagatttgaagtttagactaaagagctgggaacagcttcagagtcaggctcagcctgactcatgcttgacacccccacgcccagggagggttgggggatgtgaggagggcagggaaatctgagagcctccttccagccccataacgctgttaacaagtaggaaaaattaaagctcccggccaggcgcggtgactcacacctgtaatccgagtactttgcggggctcaggtgggaggattgcttgaggccagcctgggcaacatagtgagacccccatctctacaaaaaatacaaacattagctgggcgtctgggcatggtggcacacacctgtagtcccagctactcgaaaggctgaggcgggaggatggctttaccaccatgtcaaggctgcagtgagctcatgatcataccactgcacttaacttggcaacagagcaagaccctgtccctaaaataaataaaaggaaaacaaaaaaa

SEQ ID NO: 106612 - DNA, 1405 bp, Homo sapiens
  Payload ID: 936
  Gene Symbol: ALKBH4
  Gene Name: alkB homolog 4, lysine demthylase
  Uniprot ID: Q9NXW9
  ENST ID: ENST00000490528
  CDS Start-End: 28-156
ctgcgcactggccacgcggacggcgcgatggcggcggctgccgccgagacccccgaagtccttcgggaatgcggttgcaagggcatccggacctgtctgatctgcgagcggcagcgcggcagtgacccgccctgggagctgcccccagcggagtgatgctgatcgaggactttgtgacccgggaggaagaagccgagttggtgcggctcatggaccgtgacccctggaagctctcccagtctggacggaggaagcaggactatggccccaaagtcaactttcggaaacagaagctaaagaccgagggcttctgcggcctccccagcttcagccgggaggtggtgcggaggatgggcctctacccggggctggagggcttccggcccgtcgagcagtgcaacctggactactgccccgagcggggctctgccattgacccccacctggacgacgcctggctgtggggggagcggctggtcagcctcaacctcctgtcccccaccgtgctgtccatgtgtcgggaggcgcccgggagcctgctcctctgctcggccccgtcggctgccccggaggccttggtggacagcgtgatagcacccagccggtcggtgctatgccaggaggtggaggtggccatccccttacccgcccgctccctgctggtcctcaccggggcggcacggcaccagtggaagcatgccatccaccgcagacacatcgaggcccgccgcgtctgcgtcactttccgggagctgtcggctgagtttggccctggagggaggcagcaagagctgggccaggaactgctgcggatcgccctctccttccagggaagacccgtgtgaaccgcctccttggctccagacttgactgatcccgggattgaaatgaggagcacagaacagggcctcctgcaactcacggggtttcaagagaagatggctgacccctgatgctgtgagcagtgtgagccctgcccaggagcaggttttgatgggaacgtacctccaggcagcccccttccacctggaccgtggccacacttttttggttatttagtttgtcacagtcttggggacatgggatcatttgagcttaaaaaatactgggggccgggcacagtggctcacacctgtaatcctaacactttgggaggctgaggtgggcggatcacttgatgccaggagttcgagaccagcctggccaacacggtgaaaacccgtctctacaaaaactacaaaaattagccgggtgtggtgactcacagccgtaatcccagctactcgggaggctaaggtgggagaattgcttgaacctgggaggcggaggttgcagtgagccaagatcacgccactgcactccagcctcggtgacagagcaagactgttttgaaaaaaaaaaaaaa

SEQ ID NO: 106613 - DNA, 2748 bp, Homo sapiens
  Payload ID: 937
  Gene Symbol: ALKBH5
  Gene Name: alkB homolog 5, RNA demethylase
  Uniprot ID: Q6P6C2
  ENST ID: ENST00000399138
  CDS Start-End: 6-1190
gggccatggcggccgccagcggctacacggacctgcgtgagaagctcaagtccatgacgtcccgggacaactataaggcgggcagccgggaggccgccgccgctgccgcagccgccgtagccgccgcagccgcagccgccgctgccgccgaaccttaccctgtgtccggggccaagcgcaagtatcaggaggactcggaccccgagcgcagcgactatgaggagcagcagctgcagaaggaggaggaggcgcgcaaggtgaagagcggcatccgccagatgcgcctcttcagccaggacgagtgcgccaagatcgaggcccgcattgacgaggtggtgtcccgcgctgagaagggcctgtacaacgagcacacggtggaccgggccccactgcgcaacaagtacttcttcggcgaaggctacacttacggcgcccagctgcagaagcgcgggcccggccaggagcgcctctacccgccgggcgacgtggacgagatccccgagtgggtgcaccagctggtgatccaaaagctggtggagcaccgcgtcatccccgagggcttcgtcaacagcgccgtcatcaacgactaccagcccggcggctgcatcgtgtctcacgtggaccccatccacatcttcgagcgccccatcgtgtccgtgtccttctttagcgactctgcgctgtgcttcggctgcaagttccagttcaagcctattcgggtgtcggaaccagtgctttccctgccggtgcgcaggggaagcgtgactgtgctcagtggatatgctgctgatgaaatcactcactgcatacggcctcaggacatcaaggagcgccgagcagtcatcatcctcaggaagacaagattagatgcaccccggttggaaacaaagtccctgagcagctccgtgttaccacccagctatgcttcagatcgcctgtcaggaaacaacagggaccctgctctgaaacccaagcggtcccaccgcaaggcagaccctgatgctgcccacaggccacggatcctggagatggacaaggaagagaaccggcgctcggtgctgctgcccacacaccggcggaggggtagcttcagctctgagaactactggcgcaagtcatacgagtcctcagaggactgctctgaggcagcaggcagccctgcccgaaaggtgaagatgcggcggcactgagtctacccgccgccctcctgggaactctggctcatccttacgtagttgcccctccttttgttttgagggttttgtttttgttcattggggggtttttgttttttgttttttgttttttttgattctatatatttttccttggttttgttgcctgttagggctgaagaatagaattggccaggacctaggttctcatattcttggtattcctcctggatggaaaggctgttggcatcaataggggacagaggctgatgctggagtggccagtagaggtggtggagcagagcagccatcttttaagtggggctgtatcaggctgggtttatttaaaagcaacaaaatgttttggttaagaaaattattttgctttcagtgtaaatcttcgcagtgttctaaacaaagttcagtcttctgctcgcccctttccctcactgatgtctgcacttggttgaggtctcctggagcctcacaggctctgctgttctccacttctcacctgccatccacgccctgcaagctcatgcaaacaccctttcttcctcctgcggcagagttgttcaggttgcctgggcaggggcttaaacagtgccagcccctgccatcccaaagctattgttaagccccccaggcgtcctccacccacgcccactagcctgccatgtccacagttccttgggctgctgaggggctagtgcagtggtcctgacctctcttatcaagagcacacttctttgctggttgctccttttgagcatatgcgtgtgattatttggaacagttagacttgccacgttgggtcagttttagaaattgtttctagctagagggactggtgtccttccaagtctagcatttggggtatggaaaattgttgtggtgtgtggtagggtttttgttttcttttttgagttttttttccccctttagtctcctggctttttcctttcccttcccttctccactggccagcttgggcctcatcctcatgtcatccttctaggaaggcgcctgccccatcttgtctgccggcagcatgcatccaaggccagagctcaggcctgcagactgggctggtgcctcctccgcttcagggtatgggagttggtgaaggggctttcaaaaaataataaggaaaaaaaggtaaagtctttggtagcttctatccactcagatcctggaaggcagcaaggttttgtggatctagattcattaggaatgtcttcttgtcagccaggccaggacccgggcttgccaagagcagaggccctcccagcaaccaggataccaccactttgggggctttgtgtacagaggtccgggtctgagacctcataggctgcagaaatctggggcagccaccatcaagaagcccctctcaggggccagaactcctttgccagcgtggatttctcaagtcgggactgcataattaaagcagttgcagttttattttttttacagcttttttcccaaaaatgatttgtagttgtgtgtgcagcacttcgccctgatatgtgtgctctacaataaaaaccaaatctaatatattttgaaa

SEQ ID NO: 106614 - DNA, 1605 bp, Homo sapiens
  Payload ID: 937
  Gene Symbol: ALKBH5
  Gene Name: alkB homolog 5, RNA demethylase
  ENST ID: ENST00000541285
  CDS Start-End: 442-603
gaaacgtccgctccgggcggcggcggcagcggcggcaggctggcttgtaccccgacaacgcgcgtctggcttctgccggacgttcctatctgggttcagaactggggccgggtgctgcaggtcccgcagtctgagaagttttcgcgggtttcagaagtttccttaggcgttctaagggctttactcagtggatatgctgctgatgaaatcactcactgcatacggcctcaggacatcaaggagcgccgagcagtcatcatcctcaggaagacaagattagatgcaccccggttggaaacaaagtccctgagcagctccgtgttaccacccagctatgcttcagatcgcctgtcaggaaacaacagggaccctgctctgaaacccaagcggtcccaccgcaaggcagaccctgatgctgcccacaggccacggatcctggagatggacaaggaagagaaccggcgctcggtgctgctgcccacacaccggcggaggggtagcttcagctctgagaactactggcgcaagtcatacgagtcctcagaggactgctctgaggcagcaggcagccctgcccgaaaggtgaagatgcggcggcactgagtctacccgccgccctcctgggaactctggctcatccttacgtagttgcccctccttttgttttgagggttttgtttttgttcattggggggtttttgttttttgttttttgttttttttgattctatatatttttccttggttttgttgcctgttagggctgaagaatagaattggccaggacctaggttctcatattcttggtattcctcctggatggaaaggctgttggcatcaataggggacagaggctgatgctggagtggccagtagaggtggtggagcagagcagccatcttttaagtggggctgtatcaggctgggtttatttaaaagcaacaaaatgttttggttaagaaaattattttgctttcagtgtaaatcttcgcagtgttctaaacaaagttcagtcttctgctcgcccctttccctcactgatgtctgcacttggttgaggtctcctggagcctcacaggctctgctgttctccacttctcacctgccatccacgccctgcaagctcatgcaaacaccctttcttcctcctgcggcagagttgttcaggttgcctgggcaggggcttaaacagtgccagcccctgccatcccaaagctattgttaagccccccaggcgtcctccacccacgcccactagcctgccatgtccacagttccttgggctgctgaggggctagtgcagtggtcctgacctctcttatcaagagcacacttctttgctggttgctccttttgagcatatgcgtgtgattatttggaacagttagacttgccacgttgggtcagttttagaaattgtttctagctagagggactggtgtccttccaagtctagcatttggggtatggaaaattgttgtggtgtgtggtagggtttttgttttcttttttgagttttttttccccctttagtctcctggctttttcctttcccttcccttctccactggccagcttgggcctcatcctcatgtcatccttcta

SEQ ID NO: 106615 - DNA, 955 bp, Homo sapiens
  Payload ID: 938
  Gene Symbol: ALKBH6
  Gene Name: alkB homolog 6
  Uniprot ID: Q3KRA9
  ENST ID: ENST00000252984
  CDS Start-End: 154-870
gggagggggatggggatgttgaatttggaaattggaggggacgctggtggacggggctctctgtgtggcttgtaagatgctgaagactcagattttagagaccaagtgcgtttcagaagagggctgaggattgggtgcaaggagttggtgttgatggaggagcaggacgccagagtcccagccctggaaccgttcagagtggagcaggcaccacctgtaatctactatgtccctgacttcatctccaaagaagaggaggagtatttgcttcgacaggtttttaatgccccaaagccaaagtggacccagctctctgggagaaagttacagaactggggtgggcttcctcatccccgagggatggttcctgagcggctgcccccatggctccagcgctacgtggacaaagtgtcaaacctcagcctctttggaggcctcccagctaaccatgtcctcgtgaaccagtatctgcctggggagggcatcatgccccacgaggacggaccactgtactacccgactgtcagcaccatcagcctgggctcccacaccgtgctggacttctacgagccgcggcggccagaggacgatgaccctacagaacagcctcggcctccgccccggcccaccacctcgctactgctggaaccgcgcagcctgctggtgctccgcggccccgcctacacgcgtcttctccacggcatcgccgccgcccgcgtagacgcgctggacgccgcctcctcgccgcccaatgcggcagcctgcccgtcggcgcggccgggagcctgcctggtgcgcggcacccgggtctcgctgaccatccgccgcgtgccccgcgtgctgcgcgccggcctcctgctgggcaagtgaccgccagggccgggacccctcggattcccaggttcctgcccctttggggctgctgtgactccgcgacctaggaaccgtgggcaaa

SEQ ID NO: 106616 - DNA, 973 bp, Homo sapiens
  Payload ID: 938
  Gene Symbol: ALKBH6
  Gene Name: alkB homolog 6
  Uniprot ID: Q3KRA9
  ENST ID: ENST00000378875
  CDS Start-End: 7-807
gcggaaatggctgggagggggatggggatgttgaatttggaaattggaggggacgctggtggacggattgggtgcaaggagttggtgttgatggaggagcaggacgccagagtcccagccctggaaccgttcagagtggagcaggcaccacctgtaatctactatgtccctgacttcatctccaaagaagaggaggagtatttgcttcgacaggtttttaatgccccaaagccaaagtggacccagctctctgggagaaagttacagaactggggtgggcttcctcatccccgagggatggttcctgagcggctgcccccatggctccagcgctacgtggacaaagtgtcaaacctcagcctctttggaggcctcccagctaaccatgtcctcgtgaaccagtatctgcctggggagggcatcatgccccacgaggacggaccactgtactacccgactgtcagcaccatcagcctgggctcccacaccgtgctggacttctacgagccgcggcggccagaggacgatgaccctacagaacagcctcggcctccgccccggcccaccacctcgctactgctggaaccgcgcagcctgctggtgctccgcggccccgcctacacgcgtcttctccacggcatcgccgccgcccgcgtagacgcgctggacgccgcctcctcgccgcccaatgcggcagcctgcccgtcggcgcggccgggagcctgcctggtgcgcggcacccgggtctcgctgaccatccgccgcgtgccccgcgtgctgcgcgccggcctcctgctgggcaagtgaccgccagggccgggacccctcggattcccaggttcctgcccctttggggctgctgtgactccgcgacctaggaaccgtgggcaaagggggctcccctgggttatttattttcccaataattttgtgtgagctacagaagaccccataccaaataaacaaaaaaatc

SEQ ID NO: 106617 - DNA, 553 bp, Homo sapiens
  Payload ID: 938
  Gene Symbol: ALKBH6
  Gene Name: alkB homolog 6
  ENST ID: ENST00000481257
  CDS Start-End: 1-152
tggaaattggaggggacgctggtggacggattgggtgcaaggagttggtgttgatggaggagcaggacgccagagtcccagccctggaaccgttcagagtggagcaggttgtcagaactcagggcaccacctgtaatctactatgtccctgacttcatctccaaagaagaggaggagtatttgcttcgacaggtttttaatgccccaaagccaaagtggacccagctctctgggagaaagttacagaactggggtgggcttcctcatccccgagggatggttcctgagcggctgcccccatggctccagcgctacgtggacaaagtgtcaaacctcagcctctttggaggcctcccagctaaccatgtcctcgtgaaccagtatctgcctggggagggcatcatggcattcacctccctgtccctggcttgggaagcccccctttgacccagagggtgggggttgtggactcctgccctgcccagccctggtgcccactccctagccccacgaggacggaccactgtactacccgactgtcagcaccatcagc

SEQ ID NO: 106618 - DNA, 861 bp, Homo sapiens
  Payload ID: 938
  Gene Symbol: ALKBH6
  Gene Name: alkB homolog 6
  ENST ID: ENST00000490483
  CDS Start-End: 1-282
tggtggacggcaccacctgtaatctactatgtccctgacttcatctccaaagaagaggaggagtatttgcttcgacaggtttttaatgccccaaagccaaagtggacccagctctctgggagaaagttacagaactggggaccccattgccttccccaggtgggcttcctcatccccgagggatggttcctgagcggctgcccccatggctccagcgctacgtggacaaagtgtcaaacctcagcctctttggaggcctcccagctaaccatgtcctcgtgaaccagtatctgcctggggagggcatcatgccccacgaggacggaccactgtactacccgactgtcagcaccatcagcctgggctcccacaccgtgctggacttctacgagccgcggcggccagaggacgatgaccctacagaacagcctcggcctccgccccggcccaccacctcgctactgctggaaccgcgcagcctgctggtgctccgcggccccgcctacacgcgtcttctccacggcatcgccgccgcccgcgtagacgcgctggacgccgcctcctcgccgcccaatgcggcagcctgcccgtcggcgcggccgggagcctgcctggtgcgcggcacccgggtctcgctgaccatccgccgcgtgccccgcgtgctgcgcgccggcctcctgctgggcaagtgaccgccagggccgggacccctcggattcccaggttcctgcccctttggggctgctgtgactccgcgacctaggaaccgtgggcaaagggggctcccctgggttatttattttcccaataattttgtgtgagctacagaagaccccataccaaataaacaaaaaaatcttt

SEQ ID NO: 106619 - DNA, 793 bp, Homo sapiens
  Payload ID: 938
  Gene Symbol: ALKBH6
  Gene Name: alkB homolog 6
  ENST ID: ENST00000461668
  CDS Start-End: 1-142
gattgggtgcaaggagttggtgttgatggaggagcaggacgccagagtcccagccctggaaccgttcagagtggagcaggttgtcagaactcagggtgcagagggtgaaggaggcaccacctgtaatctactatgtccctgacttcatctccaaagaagaggaggagtatttgcttcgacaggtttttaatgccccaaagccaaagtggacccagctctctgggagaaagttacagaactgggccccacgaggacggaccactgtactacccgactgtcagcaccatcagcctgggctcccacaccgtgctggacttctacgagccgcggcggccagaggacgatgaccctacagaacagcctcggcctccgccccggcccaccacctcgctactgctggaaccgcgcagcctgctggtgctccgcggccccgcctacacgcgtcttctccacggcatcgccgccgcccgcgtagacgcgctggacgccgcctcctcgccgcccaatgcggcagcctgcccgtcggcgcggccgggagcctgcctggtgcgcggcacccgggtctcgctgaccatccgccgcgtgccccgcgtgctgcgcgccggcctcctgctgggcaagtgaccgccagggccgggacccctcggattcccaggttcctgcccctttggggctgctgtgactccgcgacctaggaaccgtgggcaaagggggctcccctgggttatttattttcccaataattttgtgtgagctacagaagaccccataccaaataaacaaaaaaatcttt

SEQ ID NO: 106620 - DNA, 977 bp, Homo sapiens
  Payload ID: 938
  Gene Symbol: ALKBH6
  Gene Name: alkB homolog 6
  ENST ID: ENST00000490986
  CDS Start-End: 1-398
tgaatttggaaattggaggggacgctggtggacggattgggtgcaaggagttggtgttgatggaggagcaggacgccagagtcccagccctggaaccgttcagagtggagcaggcaccacctgtaatctactatgtccctgacttcatctccaaagaagaggaggagtatttgcttcgacaggtttttaatgccccaaagccaaagtggacccagctctctgggagaaagttacagaactggggggggccctcaggaccccattgccttccccaggtgggcttcctcatccccgagggatggttcctgagcggctgcccccatggctccagcgctacgtggacaaagtgtcaaacctcagcctctttggaggcctcccagctaaccatgtcctcgtgaaccagtatctgcctggggagggcatcatgccccacgaggacggaccactgtactacccgactgtcagcaccatcagcctgggctcccacaccgtgctggacttctacgagccgcggcggccagaggacgatgaccctacagaacagcctcggcctccgccccggcccaccacctcgctactgctggaaccgcgcagcctgctggtgctccgcggccccgcctacacgcgtcttctccacggcatcgccgccgcccgcgtagacgcgctggacgccgcctcctcgccgcccaatgcggcagcctgcccgtcggcgcggccgggagcctgcctggtgcgcggcacccgggtctcgctgaccatccgccgcgtgccccgcgtgctgcgcgccggcctcctgctgggcaagtgaccgccagggccgggacccctcggattcccaggttcctgcccctttggggctgctgtgactccgcgacctaggaaccgtgggcaaagggggctcccctgggttatttattttcccaataattttgtgtgagctacagaagaccccataccaaataaacaaaaaaatcttt

SEQ ID NO: 106621 - DNA, 725 bp, Homo sapiens
  Payload ID: 938
  Gene Symbol: ALKBH6
  Gene Name: alkB homolog 6
  ENST ID: ENST00000497999
  CDS Start-End: 1-218
gggacgctggtggacggattgggtgcaaggagttggtgttgatggaggagcaggacgccagagtcccagccctggaaccgttcagagtggagcaggcaccacctgtaatctactatgtccctgacttcatctccaaagaagaggaggagtatttgcttcgacaggtgacctcagtgccctactggtgggcttcctcatccccgagggatggttcctgagcggctgcccccatggctccagcgctacgtggacaaagtgtcaaacctcagcctctttggaggcctcccagctaaccatgtcctcgtgaaccagtatctgcctggggagggcatcatgccccacgaggacggaccactgtactacccgactgtcagcaccatcagcctgggctcccacaccgtgctggacttctacgagccgcggcggccagaggacgatgaccctacagaacagcctcggcctccgccccggcccaccacctcgctactgctggaaccgcgcagcctgctggtgctccgcggccccgcctacacgcgtcttctccacggcatcgccgccgcccgcgtagacgcgctggacgccgcctcctcgccgcccaatgcggcagcctgcccgtcggcgcggccgggagcctgcctggtgcgcggcacccgggtctcgctgaccatccgccgcgtgccccgcgtgctgcgcgccggcctcctgctgggcaagtgaccgccagg

SEQ ID NO: 106622 - DNA, 959 bp, Homo sapiens
  Payload ID: 938
  Gene Symbol: ALKBH6
  Gene Name: alkB homolog 6
  ENST ID: ENST00000485128
  CDS Start-End: 166-567
gcggaaatggctgggagggggatggggatgttgaatttggaaattggaggggacgctggtggacggggctctctgtgtggcttgtaagatgctgaagactcagattttagagaccaagtgcgtttcagaagagggctgaggattgggtgcaaggagttggtgttgatggaggagcaggacgccagagtcccagccctggaaccgttcagagtggagcaggcaccacctgtaatctactatgtccctgacttcatctccaaagaagaggaggagtatttgcttcgacaggtttttaatgccccaaagccaaagtggacccagctctctgggagaaagttacagaactggggtgggcttcctcatccccgagggatggttcctgagcggctgcccccatggctccagcgctacgtggacaaagtgtcaaacctcagcctctttggaggcctcccagctaaccatgtcctcgtgaaccagtatctgcctggggagggcatcatgcaccatcagcctgggctcccacaccgtgctggacttctacgagccgcggcggccagaggacgatgaccctacagaacagcctcggcctccgccccggcccaccacctcgctactgctggaaccgcgcagcctgctggtgctccgcggccccgcctacacgcgtcttctccacggcatcgccgccgcccgcgtagacgcgctggacgccgcctcctcgccgcccaatgcggcagcctgcccgtcggcgcggccgggagcctgcctggtgcgcggcacccgggtctcgctgaccatccgccgcgtgccccgcgtgctgcgcgccggcctcctgctgggcaagtgaccgccagggccgggacccctcggattcccaggttcctgcccctttggggctgctgtgactccgcgacctaggaaccgtgggcaaagggggctcccctgggttatttattttccca

SEQ ID NO: 106623 - DNA, 1525 bp, Homo sapiens
  Payload ID: 938
  Gene Symbol: ALKBH6
  Gene Name: alkB homolog 6
  ENST ID: ENST00000486389
  CDS Start-End: 750-1082
ggaaatggctgggagggggatggggatgttgaatttggaaattggaggggacgctggtggacggtcagttttggggagtgctgggggtagagatggatgtcaatagggctgaaagtggggatccgggggagcccagagtaggagtccgaggaggctcagagcttggagtcctaaaaggctcggagtcggggatctgaatggttcagggagggaagaagatttgggagtcagcctcagagctaaagatctcagggtgctggagtgaaggggcgctcaggaggggaaatccgaggggcgtccaaatggggggatccgaggaggctgagggtggacatgtctgaggaggctcagattggggtcacaggagtgcacagaatgggattcggtggggggcgggggtcgctgagtgttgatagccgggctcacagttgcaggtctgaagcggggtctcaaggtgtttaaaggggctctggagtgcagccctgggggctatgtgtagagcttttgagaaaggctccctgtgtgtggggccagagaatgttctctgtgggaggattgagaaggcatatgtgtagttggatgggcccttagtggacagagtaatgggggattattcttggggctcattgtgtccgggcatggaacgtaggggctctctgtgtggcttgtaagatgctgaagactcagattttagagaccaagtgcgtttcagaagagggctgaggattgggtgcaaggagttggtgttgatggaggagcaggacgccagagtcccagccctggaaccgttcagagtggagcaggtttttaatgccccaaagccaaagtggacccagctctctgggagaaagttacagaactggggtgggcttcctcatccccgagggatggttcctgagcggctgcccccatggctccagcgctacgtggacaaagtgtcaaacctcagcctctttggaggcctcccagctaaccatgtcctcgtgaaccagtatctgcctggggagggcatcatgcaccatcagcctgggctcccacaccgtgctggacttctacgagccgcggcggccagaggacgatgaccctacagaacagcctcggcctccgccccggcccaccacctcgctactgctggaaccgcgcagcctgctggtgctccgcggccccgcctacacgcgtcttctccacggcatcgccgccgcccgcgtagacgcgctggacgccgcctcctcgccgcccaatgcggcagcctgcccgtcggcgcggccgggagcctgcctggtgcgcggcacccgggtctcgctgaccatccgccgcgtgccccgcgtgctgcgcgccggcctcctgctgggcaagtgaccgccagggccgggacccctcggattcccaggttcctgcccctttggggctgctgtgactccgcgacctaggaaccgtgggcaaagggggctcccctgggttatttattttcccaataattttgtgtgagctacagaagaccccataccaaataaacaaaaaaatc

SEQ ID NO: 106624 - DNA, 1332 bp, Homo sapiens
  Payload ID: 939
  Gene Symbol: ALKBH7
  Gene Name: alkB homolog 7
  Uniprot ID: Q9BT30
  ENST ID: ENST00000245812
  CDS Start-End: 389-1054
gactccataaccgtggccttggccccagtccccctgacttccggacttcagaccagatactgcccatatccccttatgaagtcttggccaggcaacccctagggtgtacgttttctaatgattaaagaggcggtgctaagctgcagacggacttgcgactcagccactggtgtaagtcaggcgggaggtggcgcccaataagctcaagagaggaggcgggttctggaaaaaggccaatagcctgtgaaggcgagtctagcagcaaccaatagctatgagcgagaggcgggactctgagggaagtcaatcgctgccgcaggtaccgccaatggcttttggcgggggcgttccccaaccctgccctctctcatgaccccgctccgggattatggccgggactgggctgctggcgctgcggacgctgccagggcccagctgggtgcgaggctcgggcccttccgtgctgagccgcctgcaggacgcggccgtggtgcggcctggcttcctgagcacggcagaggaggagacgctgagccgagaactggagcccgagctgcgccgccgccgctacgaatacgatcactgggacgcggccatccacggcttccgagagacagagaagtcgcgctggtcagaagccagccgggccatcctgcagcgcgtgcaggcggccgcctttggccccggccagaccctgctctcctccgtgcacgtgctggacctggaagcccgcggctacatcaagccccacgtggacagcatcaagttctgcggggccaccatcgccggcctgtctctcctgtctcccagcgttatgcggctggtgcacacccaggagccgggggagtggctggaactcttgctggagccgggctccctctacatccttaggggctcagcccgttatgacttctcccatgagatccttcgggatgaagagtccttctttggggaacgccggattccccggggccggcgcatctccgtgatctgccgctccctccctgagggcatggggccaggggagtctggacagccgcccccagcctgctgacccccagctttctacagacaccagatttgtgaataaagttggggaatggacagcctaactgggacattgcagtggctgcttgctggggccgggatttgcaggggaacccaggatggcactggcccatagggagctccaggtgtggctggctggacacatggtcaaagtcacaaggccgggagagtggtgtcctttattgcactcactgctggtcgccccagcccactcccctcctcgttgtctctgcatccaggtctccaataaataagtcagccgag

SEQ ID NO: 106625 - DNA, 603 bp, Homo sapiens
  Payload ID: 939
  Gene Symbol: ALKBH7
  Gene Name: alkB homolog 7
  ENST ID: ENST00000596657
  CDS Start-End: 310-549
ggagtcgggtgtagggttggggtgcgattacgctgctagcagttacagtgcagaagaacgtggcggctgggattggggcgtggtcaggccatccacggcttccgagagacagagaagtcgcgctggtcagaagccagccgggccatcctgcagcgcgtgcaggcggccgcctttggccccggccagaccctgctctcctccgtgcacgtgctggacctggaagcccgcggctacatcaagccccacgtggacagcatcaagttctgcggggccaccatcgccggcctgtctctcctgtctcccagcgttatgcggctggtgcacacccaggagccgggggagtggctggaactcttgctggagccgggctccctctacatccttaggggctcagcccgttatgacttctcccatgagatccttcgggatgaagagtccttctttggggaacgccggattccccggggccggcgcatctccgtgatctgccgctccctccctgagggcatggggccaggggagtctggacagccgcccccagcctgctgacccccagctttctacagacaccagatttgtgaataaagttggggaatggacagc

SEQ ID NO: 106626 - DNA, 556 bp, Homo sapiens
  Payload ID: 939
  Gene Symbol: ALKBH7
  Gene Name: alkB homolog 7
  ENST ID: ENST00000599849
  CDS Start-End: 16-498
gagacacatgctgggatggggcagggcctttttggggccatccacggcttccgagagacagagaagtcgcgctggtcagaagccagccgggccatcctgcagcgcgtgcaggcggccgcctttggccccggccagaccctgctctcctccgtgcacgtgctggacctggaagcccgcggctacatcaagccccacgtggacagcatcaagttctgcggggccaccatcgccggcctgtctctcctgtctcccagcgttatgcggctggtgcacacccaggagccgggggagtggctggaactcttgctggagccgggctccctctacatccttaggggctcagcccgttatgacttctcccatgagatccttcgggatgaagagtccttctttggggaacgccggattccccggggccggcgcatctccgtgatctgccgctccctccctgagggcatggggccaggggagtctggacagccgcccccagcctgctgacccccagctttctacagacaccagatttgtgaataaagttggggaatggacagcctaa

SEQ ID NO: 106627 - DNA, 1684 bp, Homo sapiens
  Payload ID: 940
  Gene Symbol: ALKBH8
  Gene Name: alkB homolog 8, tRNA methyltransferase
  Uniprot ID: Q96BT7
  ENST ID: ENST00000260318
  CDS Start-End: 108-824
ggcgtgcaagtatccgctgcggtgttctggtgctagagtggagaggctggcaaagaagaaggcacacgcatggtgagaatccggcctgagccgaagcggagtttgctatggacagcaaccatcaaagtaattacaaactcagtaaaactgagaagaagttcttaaggaaacagattaaagccaagcatactttgctgagacatgaaggcattgagacagtatcctatgccactcagagcctggttgttgccaatggtggtttgggtaatggtgtgagtcggaaccagctgctcccggttttagagaaatgtggactggtggatgctctcttaatgccacctaacaagccgtactcatttgcaagatacagaactacagaagaatctaagagagcctatgttaccctcaatggaaaagaagtagtggatgatttaggacaaaagatcactctgtatttgaattttgtggaaaaagtgcagtggaaggagttgaggcctcaagccttaccaccaggactcatggtagtagaagaaataatttcttctgaggaggagaaaatgcttttggaaagtgttgattggacagaagatacagacaatcaaaactctcaaaaatccttaaaacacagaagagtaaagcattttggttatgagttccactatgagaacaacaatgtagataaagataagccattatctgggggtcttcctgacatttgtgaaagctttttggagaaatggttgaggaaaggttacattaaacataaacctgatcaaatgaccataaatcagtatgaacctgggcaagattgtcatggattttaagcacccagatggcattgcagtgccagttatgttgcctcgtcggagtttgctggtgatgacaggagaatctagatacctttggacccatggaatcacgtgcagaaaatttgatactgttcaagcatctgagagtcttaaaagtggaattatcaccagtgatgttggagacttaactttaagcaagaggggactacgaacatcatttacatttaggaaagtgaggcaaacaccttgtaactgtagagcgtagagtggcagctctccaagaaattgttcgactcctgagaccaggtgggaaggcactcatttatgtctgggcaatggaacaagaatataataagcagaagtccaagtatcttagaggaaacagaaatagccaaggaaagaaagaggagatgaacagtgatacctcagtgcagaggtcacttgtggagcaaatgcgtgacatgggcagtcgagactcggcatcttctgtcccccgcattaatgactctcaggaaggaggatgtaattcaaggcaagtttctaattccaagctgcctgttcatgttaacaggacttctttttattctcaagatgtactggttccctggcaccttaagggaaatcctgataaaggcaaacctgttgagccatttggtcccataggatcccaggacccaagtcctgtgtttcatcgttactaccatgtgttccgtgagggagaactggaaggtgcctgcaggactgtgagtgatgtcagaattctgcaaagctactacgatcaaggaaactggtgtgtgattcttcaaaaggcctgattatttacctgaacacatcatatataaagaagaaatgctcacttaaaaaaaaagagagaa

SEQ ID NO: 106628 - DNA, 2491 bp, Homo sapiens
  Payload ID: 940
  Gene Symbol: ALKBH8
  Gene Name: alkB homolog 8, tRNA methyltransferase
  Uniprot ID: Q96BT7
  ENST ID: ENST00000389568
  CDS Start-End: 434-2428
gccttgccagctagggctgagaacctagggaaaggggatggatcccagaggcgcccttggtgcagtctgagtcttcctgtgctcttatttgagcaatccctgcgactcctggacctctgtgtttgctcatgtgaaatattaaaaattctgtagtgcagtcatcccttgttctccatgacatactgcaaagttgctgttccacagatgaagatcttgaaatggaatggctctaaaatagctcctttgaagggcctcagatattctttgttttgttaagccattttgatctgctgcttctgaaaatcaacacctagatcaggccagcatttctaattaacaagctggattattattattattttttttacctctcatctctctgctatgctgccagccagcctgcctgcctcactggccttacatcctatttgctatggacagcaaccatcaaagtaattacaaactcagtaaaactgagaagaagttcttaaggaaacagattaaagccaagcatactttgctgagacatgaaggcattgagacagtatcctatgccactcagagcctggttgttgccaatggtggtttgggtaatggtgtgagtcggaaccagctgctcccggttttagagaaatgtggactggtggatgctctcttaatgccacctaacaagccgtactcatttgcaagatacagaactacagaagaatctaagagagcctatgttaccctcaatggaaaagaagtagtggatgatttaggacaaaagatcactctgtatttgaattttgtggaaaaagtgcagtggaaggagttgaggcctcaagccttaccaccaggactcatggtagtagaagaaataatttcttctgaggaggagaaaatgcttttggaaagtgttgattggacagaagatacagacaatcaaaactctcaaaaatccttaaaacacagaagagtaaagcattttggttatgagttccactatgagaacaacaatgtagataaagataagccattatctgggggtcttcctgacatttgtgaaagctttttggagaaatggttgaggaaaggttacattaaacataaacctgatcaaatgaccataaatcagtatgaacctgggcaaggaattcccgctcatattgatacacattccgcttttgaggatgagatcgtttctctcagtttggggtcagagattgtcatggattttaagcacccagatggcattgcagtgccagttatgttgcctcgtcggagtttgctggtgatgacaggagaatctagatacctttggacccatggaatcacgtgcagaaaatttgatactgttcaagcatctgagagtcttaaaagtggaattatcaccagtgatgttggagacttaactttaagcaagaggggactacgaacatcatttacatttaggaaagtgaggcaaacaccttgtaactgtagttacccgttggtctgtgatagccagaggaaagagactcccccctcatttccagagagtgataaagaagcctcacggctggagcaagagtacgtccatcaggtttatgaagagattgctgggcacttcagcagcacaagacataccccttggccgcacattgtggagtttttgaaggctttgccaagtggttcaatagtggctgatattggatgtggtaatggaaagtatcttggcatcaataaggagttatatatgattggttgtgatcgtagccaaaaccttgtggacatttgtagagagaggcaatttcaggcttttgtctgtgatgcattggcagtaccagtccgcagtgggtcttgtgatgcctgcatctccattgctgttattcatcattttgcaacagcagagcgtagagtggcagctctccaagaaattgttcgactcctgagaccaggtgggaaggcactcatttatgtctgggcaatggaacaagaatataataagcagaagtccaagtatcttagaggaaacagaaatagccaaggaaagaaagaggagatgaacagtgatacctcagtgcagaggtcacttgtggagcaaatgcgtgacatgggcagtcgagactcggcatcttctgtcccccgcattaatgactctcaggaaggaggatgtaattcaaggcaagtttctaattccaagctgcctgttcatgttaacaggacttctttttattctcaagatgtactggttccctggcaccttaagggaaatcctgataaaggcaaacctgttgagccatttggtcccataggatcccaggacccaagtcctgtgtttcatcgttactaccatgtgttccgtgagggagaactggaaggtgcctgcaggactgtgagtgatgtcagaattctgcaaagctactacgatcaaggaaactggtgtgtgattcttcaaaaggcctgattatttacctgaacacatcatatataaagaagaaatgctcacttaaaaaaaaagagagaataa

SEQ ID NO: 106629 - DNA, 999 bp, Homo sapiens
  Payload ID: 940
  Gene Symbol: ALKBH8
  Gene Name: alkB homolog 8, tRNA methyltransferase
  ENST ID: ENST00000393100
  CDS Start-End: 141-575
gttttctccaacatggccgcgcccaggggagatggcgtgcaagtatccgctgcggtgttctggtgctagagtggagaggctggcaaagaagaaggcacacgcatggtgagaatccggcctgagccgaagcggagtttgctatggacagcaaccatcaaagtaattacaaactcagtaaaactgagaagaagttcttaaggaaacagattaaagccaagcatactttgctgagacatgaaggcattgagacagtatcctatgccactcagagcctggttgttgccaatggtggtttgggtaatggtgtgagtcggaaccagctgctcccggttttagagaaatgtggactggtggatgctctcttaatgccacctaacaagccgtactcatttgcaagatacagaactacagaagaatctaagagagcctatgttaccctcaatggaaaagaagtagtggatgatttaggacaaaagatcactctgtatttgaattttgtggaaaaagtggaaggagttgaggcctcaagccttaccaccaggactcatggtagtagaagaaataatttcttctgaggaggagaaaatgcttttggaaagtgttgattggacagaagatacagacaatcaaaactctcaaaaatccttaaaacacagaagagtaaagcattttggttatgagttccactatgagaacaacaatgtagataaagataagccattatctgggggtcttcctgacatttgtgaaagctttttggagaaatggttgaggaaaggttacattaaacataaacctgatcaaatgaccataaatcagtatgaacctgggcaaggaattcccgctcatattgatacacattccgcttttgaggatgagatcgtttctctcagtttggggtcagagattgtcatggattttaagcacccagatggcattgcagtgccagttatgttgcctcgtcggagtttgctggtgatgacaggagaatctagatac

SEQ ID NO: 106630 - DNA, 2296 bp, Homo sapiens
  Payload ID: 940
  Gene Symbol: ALKBH8
  Gene Name: alkB homolog 8, tRNA methyltransferase
  Uniprot ID: Q96BT7
  ENST ID: ENST00000429370
  CDS Start-End: 142-816
agttttctccaacatggccgcgcccaggggagatggcgtgcaagtatccgctgcggtgttctggtgctagagtggagaggctggcaaagaagaaggcacacgcatggtgagaatccggcctgagccgaagcggagtttgctatggacagcaaccatcaaagtaattacaaactcagtaaaactgagaagaagttcttaaggaaacagattaaagccaagcatactttgctgagacatgaaggcattgagacagtatcctatgccactcagagcctggttgttgccaatggtggtttgggtaatggtgtgagtcggaaccagctgctcccggttttagagaaatgtggactggtggatgctctcttaatgccacctaacaagccgtactcatttgcaagatacagaactacagaagaatctaagagagcctatgttaccctcaatggaaaagaagtagtggatgatttaggacaaaagatcactctgtatttgaattttgtggaaaaagtgcagtggaaggagttgaggcctcaagccttaccaccaggactcatggtagtagaagaaataatttcttctgaggaggagaaaatgcttttggaaagtgttgattggacagaagatacagacaatcaaaactctcaaaaatccttaaaacacagaagagtaaagcattttggttatgagttccactatgagaacaacaatgtagataaagataagccattatctgggggtcttcctgacatttgtgaaagctttttggagaaatggttgaggaaagctgagaaaaatttggaagtagggattcattaggagacattcaaatgtctcctgttggctgacatcacagatgtggtgttggctcctcctacttccctaggagaggtggtttctaaaagtgattgaagcagtttgtgcagtgtttgtaattcttgggtaagagcccaggattttgaagataatagttttttagtaaagtgctactaaatgtagtaaatcatgtaggattttagggatgtaattatatgttaatacagaaaatagtcctggtcaatagaaaattgtctgaagttttacctatgatttttagctctgtaaaatcatagacaataaccattctatttccatgcctgactagcccagggctggacgtatagcgggtgtccaataacgtttagtcaatcagataatacccagaacttagtaggagtttcattcaaaaactattttttgaacccaaccatgtaccagttactattttaagtactgataatgaagcagtgaataagaaagagcaaagctcttgcccttatggtgcttacattctagacggggagacagacagcaggcaaatcaataaatagatactatgtgccagatagtgataaatgccatgaaaaacataaaatgagagacgattcaccttggagcaaaagattacttttaagtgactgaaataactactaatcctgactaatttattatcaagagttaattggtattccaaattcattgagcagggtgctaaaaacaacccaaatgtgctcctttaactcctttgtttaaatgacaaaagttagaatgtggtcactcagacctaactgtgcccttagagccaaagctgtggtgtcattattggttatttctagttgattcatagtttgtcccaatccaggttcaatcgggttatttttaagatctgtacaatattgcataatagtaacccagttaacttaccacttaggttagatttcctggaggaacaaaggtagaaattcaaccataggtcaaattatcacatagaaggaaaaggctttttttcaaagaaaaaattttttgaacactttactcccagtatgcattacttttgtagtagtaatgcttaagactgttttaaagaaaaattgctttctgtttaattaatgtttactgttattaatgctagtgatacttaatcttgaagcatcaagttttcagaaacctatagtgatcaataatgggtctcagatgagaggatgattatttttttcatggaatttcagtccaacatcctggtgtactggtccctctgggatgaatttataaggctcatgatataggaaaaggaatatagggctaaaaatagttttatttctgatataaattctggtacttgacaccaaagtttgaagtcaagtcatgccaataaattttaacatccaaatgaaatagatgattttctatgaagatgaaaaataccaaaattgactcaagaagggagagaaaatggaagatgttgaaaaatagcatagga

SEQ ID NO: 106631 - DNA, 2114 bp, Homo sapiens
  Payload ID: 940
  Gene Symbol: ALKBH8
  Gene Name: alkB homolog 8, tRNA methyltransferase
  Uniprot ID: Q96BT7
  ENST ID: ENST00000417449
  CDS Start-End: 111-2114
gtagtgcagttttctccaacatggccgcgcccaggggagatggcgtgcaagtatccgctgcggtgttctggtgctagagtggagaggctggcaaagaagaaggcacacgcatgtttgctatggacagcaaccatcaaagtaattacaaactcagtaaaactgagaagaagttcttaaggaaacagattaaagccaagcatactttgctgagacatgaaggcattgagacagtatcctatgccactcagagcctggttgttgccaatggtggtttgggtaatggtgtgagtcggaaccagctgctcccggttttagagaaatgtggactggtggatgctctcttaatgccacctaacaagccgtactcatttgcaagatacagaactacagaagaatctaagagagcctatgttaccctcaatggaaaagaagtagtggatgatttaggacaaaagatcactctgtatttgaattttgtggaaaaagtgcagtggaaggagttgaggcctcaagccttaccaccaggactcatggtagtagaagaaataatttcttctgaggaggagaaaatgcttttggaaagtgttgattggacagaagatacagacaatcaaaactctcaaaaatccttaaaacacagaagagtaaagcattttggttatgagttccactatgagaacaacaatgtagataaagataagccattatctgggggtcttcctgacatttgtgaaagctttttggagaaatggttgaggaaaggttacattaaacataaacctgatcaaatgaccataaatcagtatgaacctgggcaaggaattcccgctcatattgatacacattccgcttttgaggatgagatcgtttctctcagtttggggtcagagattgtcatggattttaagcacccagatggcattgcagtgccagttatgttgcctcgtcggagtttgctggtgatgacaggagaatctagatacctttggacccatggaatcacgtgcagaaaatttgatactgttcaagcatctgagagtcttaaaagtggaattatcaccagtgatgttggagacttaactttaagcaagaggggactacgaacatcatttacatttaggaaagtgaggcaaacaccttgtaactgtagttacccgttggtctgtgatagccagaggaaagagactcccccctcatttccagagagtgataaagaagcctcacggctggagcaagagtacgtccatcaggtttatgaagagattgctgggcacttcagcagcacaagacataccccttggccgcacattgtggagtttttgaaggctttgccaagtggttcaatagtggctgatattggatgtggtaatggaaagtatcttggcatcaataaggagttatatatgattggttgtgatcgtagccaaaaccttgtggacatttgtagagagaggcaatttcaggcttttgtctgtgatgcattggcagtaccagtccgcagtgggtcttgtgatgcctgcatctccattgctgttattcatcattttgcaacagcagagcgtagagtggcagctctccaagaaattgttcgactcctgagaccaggtgggaaggcactcatttatgtctgggcaatggaacaagaatataataagcagaagtccaagtatcttagaggaaacagaaatagccaaggaaagaaagaggagatgaacagtgatacctcagtgcagaggtcacttgtggagcaaatgcgtgacatgggcagtcgagactcggcatcttctgtcccccgcattaatgactctcaggaaggaggatgtaattcaaggcaagtttctaattccaagctgcctgttcatgttaacaggacttctttttattctcaagatgtactggttccctggcaccttaagggaaatcctgataaaggcaaacctgttgagccatttggtcccataggatcccaggacccaagtcctgtgtttcatcgttactaccatgtgttccgtgagggagaactggaaggtgcctgcaggactgtgagtgatgtcagaattctgcaaagctactacgatcaaggaaactggtgtgtgattcttcaaaaggcctga

SEQ ID NO: 106632 - DNA, 4079 bp, Homo sapiens
  Payload ID: 940
  Gene Symbol: ALKBH8
  Gene Name: alkB homolog 8, tRNA methyltransferase
  Uniprot ID: Q96BT7
  ENST ID: ENST00000428149
  CDS Start-End: 153-2147
aaatgtagtgcagttttctccaacatggccgcgcccaggggagatggcgtgcaagtatccgctgcggtgttctggtgctagagtggagaggctggcaaagaagaaggcacacgcatggtgagaatccggcctgagccgaagcggagtttgctatggacagcaaccatcaaagtaattacaaactcagtaaaactgagaagaagttcttaaggaaacagattaaagccaagcatactttgctgagacatgaaggcattgagacagtatcctatgccactcagagcctggttgttgccaatggtggtttgggtaatggtgtgagtcggaaccagctgctcccggttttagagaaatgtggactggtggatgctctcttaatgccacctaacaagccgtactcatttgcaagatacagaactacagaagaatctaagagagcctatgttaccctcaatggaaaagaagtagtggatgatttaggacaaaagatcactctgtatttgaattttgtggaaaaagtgcagtggaaggagttgaggcctcaagccttaccaccaggactcatggtagtagaagaaataatttcttctgaggaggagaaaatgcttttggaaagtgttgattggacagaagatacagacaatcaaaactctcaaaaatccttaaaacacagaagagtaaagcattttggttatgagttccactatgagaacaacaatgtagataaagataagccattatctgggggtcttcctgacatttgtgaaagctttttggagaaatggttgaggaaaggttacattaaacataaacctgatcaaatgaccataaatcagtatgaacctgggcaaggaattcccgctcatattgatacacattccgcttttgaggatgagatcgtttctctcagtttggggtcagagattgtcatggattttaagcacccagatggcattgcagtgccagttatgttgcctcgtcggagtttgctggtgatgacaggagaatctagatacctttggacccatggaatcacgtgcagaaaatttgatactgttcaagcatctgagagtcttaaaagtggaattatcaccagtgatgttggagacttaactttaagcaagaggggactacgaacatcatttacatttaggaaagtgaggcaaacaccttgtaactgtagttacccgttggtctgtgatagccagaggaaagagactcccccctcatttccagagagtgataaagaagcctcacggctggagcaagagtacgtccatcaggtttatgaagagattgctgggcacttcagcagcacaagacataccccttggccgcacattgtggagtttttgaaggctttgccaagtggttcaatagtggctgatattggatgtggtaatggaaagtatcttggcatcaataaggagttatatatgattggttgtgatcgtagccaaaaccttgtggacatttgtagagagaggcaatttcaggcttttgtctgtgatgcattggcagtaccagtccgcagtgggtcttgtgatgcctgcatctccattgctgttattcatcattttgcaacagcagagcgtagagtggcagctctccaagaaattgttcgactcctgagaccaggtgggaaggcactcatttatgtctgggcaatggaacaagaatataataagcagaagtccaagtatcttagaggaaacagaaatagccaaggaaagaaagaggagatgaacagtgatacctcagtgcagaggtcacttgtggagcaaatgcgtgacatgggcagtcgagactcggcatcttctgtcccccgcattaatgactctcaggaaggaggatgtaattcaaggcaagtttctaattccaagctgcctgttcatgttaacaggacttctttttattctcaagatgtactggttccctggcaccttaagggaaatcctgataaaggcaaacctgttgagccatttggtcccataggatcccaggacccaagtcctgtgtttcatcgttactaccatgtgttccgtgagggagaactggaaggtgcctgcaggactgtgagtgatgtcagaattctgcaaagctactacgatcaaggaaactggtgtgtgattcttcaaaaggcctgattatttacctgaacacatcatatataaagaagaaatgctcacttaaaaaaaaagagagaataaattaattacccttttaattaaagagaaaacttgtgggaaagtaccaaaggaaagctgagaaaaatttggaagtagggattcattaggagacattcaaatgtctcctgttggctgacatcacagatgtggtgttggctcctcctacttccctaggagaggtggtttctaaaagtgattgaagcagtttgtgcagtgtttgtaattcttgggtaagagcccaggattttgaagataatagttttttagtaaagtgctactaaatgtagtaaatcatgtaggattttagggatgtaattatatgttaatacagaaaatagtcctggtcaatagaaaattgtctgaagttttacctatgatttttagctctgtaaaatcatagacaataaccattctatttccatgcctgactagcccagggctggacgtatagcgggtgtccaataacgtttagtcaatcagataatacccagaacttagtaggagtttcattcaaaaactattttttgaacccaaccatgtaccagttactattttaagtactgataatgaagcagtgaataagaaagagcaaagctcttgcccttatggtgcttacattctagacggggagacagacagcaggcaaatcaataaatagatactatgtgccagatagtgataaatgccatgaaaaacataaaatgagagacgattcaccttggagcaaaagattacttttaagtgactgaaataactactaatcctgactaatttattatcaagagttaattggtattccaaattcattgagcagggtgctaaaaacaacccaaatgtgctcctttaactcctttgtttaaatgacaaaagttagaatgtggtcactcagacctaactgtgcccttagagccaaagctgtggtgtcattattggttatttctagttgattcatagtttgtcccaatccaggttcaatcgggttatttttaagatctgtacaatattgcataatagtaacccagttaacttaccacttaggttagatttcctggaggaacaaaggtagaaattcaaccataggtcaaattatcacatagaaggaaaaggctttttttcaaagaaaaaattttttgaacactttactcccagtatgcattacttttgtagtagtaatgcttaagactgttttaaagaaaaattgctttctgtttaattaatgtttactgttattaatgctagtgatacttaatcttgaagcatcaagttttcagaaacctatagtgatcaataatgggtctcagatgagaggatgattatttttttcatggaatttcagtccaacatcctggtgtactggtccctctgggatgaatttataaggctcatgatataggaaaaggaatatagggctaaaaatagttttatttctgatataaattctggtacttgacaccaaagtttgaagtcaagtcatgccaataaattttaacatccaaatgaaatagatgattttctatgaagatgaaaaataccaaaattgactcaagaagggagagaaaatggaagatgttgaaaaatagcataggaattcagaactgggctctagaatcagatttcctgagagttgaattctagatctgccatttattagctgtgggattttgggcaaatttcttgactttctgtgcttcagttttcttagctgtaaaattggaagagttgttatgaaaattcactgaaagtatatttgtatacatcataggatagtgtaagaatatagtatggctttgagaaatgttcattattattactcccagaggagttttaggtattaagtgatgccaaatataatttgttaattgtataataaaaatctatattcttactgac

SEQ ID NO: 106633 - DNA, 2475 bp, Homo sapiens
  Payload ID: 941
  Gene Symbol: AGMO
  Gene Name: alkylglycerol monooxygenase
  Uniprot ID: Q6ZNB7
  ENST ID: ENST00000342526
  CDS Start-End: 171-1508
ctctctacacagaatcggctgttgagtgtgctctcagtggagctttggttttagctgttctctgacaaagagcttgttctgagctgcacatctcgtcctctttgttcagcctcaggcttcaagcattgaatcctaaatattctccagctgggaatcagacaagggcagaaatgaagaacccagaagcccagcaggatgtttcagtttcccagggatttcgcatgttgttttacacgatgaaacccagtgaaacttcattccaaacattagaagaggtgcctgattatgtaaaaaaggcaactccatttttcatttctttgatgctgcttgaacttgttgtcagctggattctcaaaggaaagccaccaggtcgcctggatgatgctttaacgtcaatctcagctggtgttctgtctcgacttccaagtctatttttcaggagcattgaactgaccagttatatttatatctgggagaactacaggctgttcaatttgccttgggattctccatggacttggtattcagccttcttaggagttgactttggctactactggttccatcgtatggctcatgaagttaatattatgtgggccggacaccaaacacatcatagttctgaagactataacttatccacagcactgagacagtctgtcctccagatatatacttcctggattttctactctcccctggccctcttcatacccccttcagtatatgctgttcatcttcaattcaatcttctttaccaattttggatccatacagaggtcatcaataaccttggtcctttggaactgattcttaatactcctagccatcatagggttcatcatggcagaaatcgttattgcatagacaaaaattatgctggtgttcttattatttgggataaaatttttgggacatttgaagcagaaaatgaaaaagttgtatatggcttaacacatcccattaatacatttgaaccaatcaaagtgcagttccatcacttattttccatatggactacattctgggccacacctggattcttcaataagttttctgtcatatttaagggaccgggatggggtccaggtaaaccaagacttggtctcagtgaagaaattccagaggtcaccggcaaagaagttcccttctcatcatcttcatctcagctattaaagatatatacagttgtacagtttgctctgatgttggcattttatgaagagacctttgcagatacagctgcactgtcgcaagttactctccttctgagggtttgcttcattatcctgaccttgacttccattggatttcttctggatcaaagacccaaggcagctattatggaaactctccgttgcttgatgttcttaatgctgtaccgatttggtcacctgaagcctcttgtcccttcattgtcatctgcttttgagattgttttttccatttgcattgctttctggggagttagaagcatgaaacaactcacctctcacccttggaaataacctgaatttgtacataattctcttcttttaatgagttgtccacacgcatattatgactgcatattaaaatgtaattattttatgtaatgcttatatgaactatttcttcaatgaaaagtaaaattacttatttactattgtttgcctttcacatttgttattttctattaaaaattaaagtcagttttggttacttcccccctttactacaattaaaaaaagatttcaaatataatgatgttatattaactgatagccttatatgacaagtataaaaagaagggatgaaacttaaaaacagtaaaaacaagaaggaatattgcctttacatcaatttgaaaacaatgtttcctttgatgtttgctaaaattatgcatagatacatgtttgtagtcataaaaatgtattacattggttgtcttcctaaggccacagttacctttgcaatccatataacctaagaagctgcattccagaaaaagacatcactgaggccaggcgcggtggctcacccctgtaatcccagcactttgtggggctgaggtgggcggatcatgaggtccagagatagagaccatcctggccaacatggtgaagtcctgtctctactaaaaatataaaaatttagctggacatggtggtgtgcgcctgtagtcccagctactctggaggctgaggcaggagaatcgcttgaacctgggaggcagaagttggagtgagtggagattgcaccactgcactccagcctgggcgacagagcgagactccgtctcaaagaaaaaagacatcactgaaagaaaaatgaacagaatttgtcagaattagttttttcaacaggttactttgtcatacatttctctaatatgcttggtcaatttgttttggcagactgggcagcatgcagcaattctgcattatttaaagttatcagaacaatgttaattctctaaataaaattacccaaggt

SEQ ID NO: 106634 - DNA, 485 bp, Homo sapiens
  Payload ID: 941
  Gene Symbol: AGMO
  Gene Name: alkylglycerol monooxygenase
  ENST ID: ENST00000407277
  CDS Start-End: 1-262
cttcattatcctgaccttgacttccattggatttcttctggatcaaagacccaaggcagctattatggaaactctccgttgcttgatgttcttaatgctgtaccgatttggtcacctgaagcctcttgtcccttcattgtcatctgcttttgagtcatattctgttataagtgaaattgggctccaggccaaggagaactttggagaacttttaagtttgagtgactgtctcacagctggaaaccaccccaaagtgcattgattgcagaagaatatgtttcctattatccagttctctaccaaactatttttttgtagcttgaaaataataaagattttgtaagccccaaggggtctttttgatccatgaatgaagttaccctggattcatataactaaaatctgacttcctttcagccattgaaattcaaaaccctttccatttattagtatgaaataaaaaaagaccttcaaaaatgtcaaaa

SEQ ID NO: 106635 - DNA, 421 bp, Homo sapiens
  Payload ID: 941
  Gene Symbol: AGMO
  Gene Name: alkylglycerol monooxygenase
  ENST ID: ENST00000418075
  CDS Start-End: 1-225
gcactgtcgcaagttactctccttctgagggtttgcttcattatcctgaccttgacttccattggatttcttctggatcaaagacccaaggcagctattatggaaactctccgttgcttgatgttcttaatgctgtaccgatttggtcacctgaagcctcttgtcccttcattgtcatctgcttttgaggaaacaccctacttgtcttccaactctgcaatctaattattatgccttcttattatcctttccacgttatcatctcgtctgggcagctcttttgaaaaagcattaacccaaggttaacaatttgctgcctcagccattttatgtgcagaagaaaccaatactcaaagcagcaaccttaagactcttcaatttttattgatctattcaataaatattaaatgtgcactgacaa

SEQ ID NO: 106636 - DNA, 7764 bp, Homo sapiens
  Payload ID: 942
  Gene Symbol: AGPS
  Gene Name: alkylglycerone phosphate synthase
  Uniprot ID: O00116
  ENST ID: ENST00000264167
  CDS Start-End: 147-2123
gtgaagctccagacgcatggcacccgccgccaagtcgccgcggtggctgccgggatgcgccgcagcgaatggtcgcgccgggcgccgctctgagtgacctttcacccgcgcccagcggttccgggcggcagcacaaggcggtagccatggcggaggcggcggctgcagcgggtgggactggcttgggcgcgggcgcgagctacgggtctgcagcggaccgggaccgggacccggacccggaccgcgccgggcggaggctgcgggttctctctggccatctgctgggccggccccgggaggctctgagtaccaatgagtgcaaagcgcggagagccgcgtcggcggccacggcagcgcccacggccactcccgccgcgcaggagtcgggcaccatcccaaagaagcggcaagaagttatgaaatggaatggatggggatataatgattctaaattcatcttcaataagaagggccaaattgaattgactgggaaaaggtaccctcttagtggcatgggtttaccaacatttaaagaatggatccaaaatacccttggagtaaatgtggagcataaaactacctctaaagcatccttaaatcctagtgatacacctccttctgttgtaaatgaagattttcttcatgaccttaaagaaactaatatttcatattcacaagaggcagatgatcgagtatttagagctcatggtcattgtcttcatgagatatttttgctcagggaaggaatgtttgagcgaattcctgatatagttttatggccaacatgccatgatgatgtagttaagattgtgaatctagcttgcaaatataatctttgtatcataccaattggtggaggaacaagtgtttcatatggcctgatgtgtcctgcagatgagacaagaacaattatttctttggacacttcacaaatgaatcgaattctctgggttgatgagaacaatttgacagctcatgtagaggctggcataacaggacaagagttggaaagacagcttaaagaaagtggttattgtacaggtcatgaaccagattccctggagttcagtactgtaggaggatgggtatctactcgcgcatcaggcatgaagaagaatatctatggcaatatcgaggacctggtggttcatataaaaatggtaacacctagaggtataatagaaaaaagctgtcaaggacctcgtatgtcaacaggccctgatatccatcacttcatcatgggatctgaaggaactcttggtgtaataacagaagctacaataaaaatcagaccagtccctgaataccaaaagtatggctcagtagctttccctaattttgaacaaggagtagcctgtttaagagaaattgcaaaacagagatgtgctccggcatctattcgcctcatggacaacaagcagtttcagtttggtcatgctcttaaacctcaggtttcctctatttttacatcatttttggacggattaaaaaagttttatattacaaagtttaaaggatttgacccaaatcagctaagtgtagccacattactgtttgagggggatcgtgagaaggttcttcaacatgaaaaacaagtgtatgatattgctgcaaaatttggtgggttggcagctggagaagataatggacagagaggttatttgctgacctatgttattgcatacattcgagacttggctttggaatactatgtattaggagaatcttttgagacttctgctccttgggacagggtggtagatctctgtagaaatgtaaaagaaagaataacaagggaatgcaaagagaagggtgttcagtttgctcctttttctacatgcagggtgacgcagacttacgatgcaggtgcttgtatctacttctattttgcctttaactacaggggaattagtgacccactgaccgtatttgaacaaactgaggcagctgctagagaagaaatccttgctaatggagggagcctgtcacatcaccatggagtgggcaagttacggaagcaatggctaaaggaaagtatctctgatgtcggctttgggatgctgaagtctgtcaaggaatatgtggaccccaataacatctttggaaacagaaaccttttataaatccattagtaccattacaaaaaaatgtcaattttttttttaagttttcaactgtggttatactagtaatcaaatatatcatggactatattttggatacatttgtttctttggtttaaaataagtttgttttcattctgtagtttgttttgtttctacatctatggattgacagatagtattcctaaatctctctcattgtaggtacatcattttacattcagcggttgtcatttcaaattttagtcaggcagcacaaagctgtcaattattccagaggaagctgctgccagctgttttgtattgttgcttcctcttggggaacaaagacagatttggtatcattgattgctcagctagcctctttttaaaagaacgtttctgggaatcagatgtctagggaaggattccactgaggagtgatacacgtgtacattgtttaagagcatagtctagtgtgagtaggccattaaggggaaggatattcatgaaagaatttaggcaacctgttatttagaaagccttcacgtctgtaaggtgcttggcctacttttttttttaaattagtatacatgcataaaaccttgtatcatcaatatacaaattattctgttaggggacatgtttttgttctccatgtttctgtttctattgtggtatgagttgtatttgtatcactgagataacctattgttatattctaattcattgataatatgttttgtaagaaaagctgacatccttcattgcaagtgaagaacaggtttaccatgaaatgaatgcctttattcaacttagagtcctaatgtttctgatttcacattcttgttgctgaaatgcagaagaaacagctacagcaagagcagaaggaaaactcttagacttaatgtctccaattgcaagaattgtttcactaaagaaacagtcatcattcaactactgaatttgaaagcctcagcagtttcaatgacaaaaatcatttttgattttttaaaattaatcccaatggcatgataaattttcatataaaaagtaaagtttcaatttagtttttaataatggtttaatgccttttttgaataactggtttaacctaattttttttaaatgtaatgtattaatgcatataccataatcaaaagtttgaaatatcctgtttcttaaataatgagaacattaatcacatttagcaagcatttgtacattcaaacctggatattaaagtgaaatgattactttgaatcactgtctgccaaggttcatgattcacattttgagatggattcttttcttaatgcaatacctaacttttgataattttttaaaactaatatttgatcagataatgtaagtcaaaatgcagacgatcctttaaaaggatgcattgtctgtgtatgtagcaacagctccaaagtatttttgggcagtttgataccttttatatctgaagtagccttaaccagaaaaatggtaatttaaaattgacaaaatgatatttttaagacttcaaaatgataaataatttttaactattaaaattggcctcaaactaataaatctgtaattaaattagaattaaatatcagtttaacaacaaaatgaaatatttattttttagaagctgcctctcttcattggtcatttatttttaattataaaatttccaacagatctttgctttaagcccttgatatttgacctagttggacacttgatgaggaagttgcctctagaattataaaaatctcagctttataaaatgcatctgttcacgaaggtaatttctttaattggtgatcaaaatataaaattaaggtactaatgtctcactggaagtatatatatatatatatatatatgtatgcatgtgtgtgtgtgtatatatatatatatatatatgtatatgtttctgagtaatttttaaaaaataaaacaggttaataagaagatccattcctttgcatgtgattgttataacattctttcccagggagttcaatttcagcaacctcagaaatccatacttgatattaggaaactgtaaatgtaacacctgaaattattatgttcactattctacatgaaccttatggaaattcatgatttatgtctttgtttttctttttccaagtatatgcaggactccccaaccttgattttataatggtgactgcattttgtaggtggaatcatttctaccgaaatcattttgaaacacaagaatattgatcagtactgtttcactctgatttagtaaatcagaaagcctccccctacccccagcccccactttcacataccttctgggaggtgcctcagtatagacttggtatctgtgaaggactgagttcatgaatatgcacagaagcacttaaaccatgcctcttatttctataatatctgaaaatggcttcataaaagttaagtcaggagaacactgtttacatgacacttcttaactcatttttaatgtttatttttaatttcaaaaacttgttgcctatttggttttcagtactgcataacactgactttcttaaattagtcatagttgcaataatttacttaaatttggtaatgtcacatttgggttggggtttcagtgggaatagtaacttgccgctagtgagaaatggcattgaatactaaagactcaatatgaacaggctttatagacccttagagaaactgttgccttaatgtttggtgcaatttctagtagtgcataagtgaatttagtcttatgataagtaactttgagctgtttttagcttagtaagaattgtggaaaccacatgtttattgtgcccatcattttacacaaagaaaagaggattatattatttcttctaaggaagtaggagttttcttcctaaaagtgcttacatattgtagtactattacttaaaagttatttatgaagttgggagccttctagtttgcctgtgttgatgtattttgaaaacaaaattgcaataaaggatgagcttccatcggtgtgtatggtataccagatacagatggttgcaaggaaaccttttcccccactagaatagtctattagtaactgctaagtcctagcttgcatttttgaaaatgcctttctgcatgttagcacccagactttcctttgtcatattcctttatagctacaacttaactgtagcttatcagagaagctctgtagtcctacactgaagtgtgttcccttggctgttcatatggggctgggtttggttgaacttccattctgtataaatgctagaacacagttactacagattgattcacaaactgcatgtgctggtgcttgaggcagccaaaatggaatgctgtggaaagcatatctatatcttaaaaaacactcagacaggagttaaggacagctttaataatttttttgtttaccacttaatctttatcaactttgattttagttagggcttagctcatggttgaagaaaagtggaaaataacaagtgcccatttaggtttgaagaatccagaatgttttacctttgactttatgagttatagaagcttggctttgctctaggcttcatgttcccaaatgagccatctgtcagtatattcacttaattcttactaatttcagtttcctgtaaaggaaacaacttacatattgatgcttaaatccagaaagtgtaaaaggttttcttaaactgttaaaatatagtgtctgatataaaggatgtaagttactcagctttctgctccctaagccaaacagtgtttgtcttcagtgtgaaatttaactgtaaaaactacttgtaatgtcaagagattatagatcatattattaataaaatggacctgggtctaatattttttttcttcaaagggagtgtgaagctgtttattcttttatttgcatatgagtttttcttttagttttagtttttcatgttcatatttccactgatttgaaaacacaaaatttatttttataattttgttgcttgtagcataatcaagtgcaaaatcaagtgcaacctacttgtgactaaatctctttggatttatagctgaggatattgttagctaggttttgtcaatccctaatcattttttaaaatcaatgctgtattcccaggaggctttgagactcctatgaacctgaagcactcccttttgaaccttggaagatcctcaaagagtgagcactcttgtgctcttctaatcataattaattccttaacaaatcagagtaaggaccactgacatatagaaccctcaagccaaagaaccatcacagaatttagtaactttagttctgtgaacatgaaaagatttcttttttggtttccaaaggagattatttatttttccacaaggaaaaacatcttgcagagactctgaattccaaatctgagtgagaaagaaaaggaaaaaaatctgtttcatggtggatttctaagcaacatatatacatgtttttaagacaaccttttgttggcagtgtttttcctgaacaccatatgcaccctaggaaacatgtttttcctttaatcttgttcacatatcagaaaaggacatgaaatgctcatactggcatacaagtttctataagtagttattttttgagctacttatactatatccccaaaagctcacagtgccttgttgggattttttttttccatgaactagccattattttaaatgagtgggagagggtaagtctttagacagaggtcattcagcagttcaagactattcctcttcaagaacatgtcaggaattaagcagttatatgtggaaacactggtaattctttccacagtgttgttttggataatctgttctagtatatttaactaattgtatggtggacctgtactctgatacacatcgaatcagtcaatgggatttgtatgtgcttttccttcctacattttcattcctactgccccaacctagtagccctaagttgtggcttggtgggtttggcattgagcctcaagacactcactacattctttctggatgtttgctcacaggctccctgaggagcagaacctgtggagctggggagtgcgggtggtttctattcctaatattgtgtgtcagtcctttttcgtgtgatggtgccttcagaataacgaatatttctgttctggacaatgattaaatcttatgagaaatatatgtaggttatattaattcttgtccatttttgctaagcctgtgaaatactttggctctgatacaacttaacttgaataatatcttatcctgagtcttcctccaaggcagtacatattcctgccaggactgtagtaatcctttgggaactacatgtgagtaagcacttgtatgtaagccattatactgctgtaactaatgcatacaaacaattcttctctttacatttatagtctaaaaggggatatgcagtgggaaggaaaattcctgagagattccagcatagctttgtcaattccgactgagccatactgttttccacaagggctcaacacatagtcagtattccgtgctttcagtgtgtgttcagattctcctcttactggttttcttagactgtattgttctataagcaaatgcccatgtgtgatttttaagatgtgctggggaaaaataaatcaataccacaaccacc

SEQ ID NO: 106637 - DNA, 815 bp, Homo sapiens
  Payload ID: 942
  Gene Symbol: AGPS
  Gene Name: alkylglycerone phosphate synthase
  ENST ID: ENST00000409888
  CDS Start-End: 23-592
gcggcagcacaaggcggtagccatggcggaggcggcggctgcagcgggtgggactggcttgggcgcgggcgcgagctacgggtctgcagcggaccgggaccgggacccggacccggaccgcgccgggcggaggctgcgggttctctctggccatctgctgggccggccccgggaggctctgagtaccaatgagtgcaaagcgcggagagccgcgtcggcggccacggcagcgcccacggccactcccgccgcgcaggagtcgggcaccatcccaaagaagcggcaagaagttatgaaatggaatggatggggatataatgattctaaattcatcttcaataagaagggccaaattgaattgactgggaaaaggggaattagtgacccactgaccgtatttgaacaaactgaggcagctgctagagaagaaatccttgctaatggagggagcctgtcacatcaccatggagtgggcaagttacggaagcaatggctaaaggaaagtatctctgatgtcggctttgggatgctgaagtctgtcaaggaatatgtggaccccaataacatctttggaaacagaaaccttttataaatccattagtaccattacaaaaaaatgtcaattttttttttaagttttcaactgtggttatactagtaatcaaatatatcatggactatattttggatacatttgtttctttggtttaaaataagtttgttttcattctgtagtttgttttgtttctacatctatggattgacagatagtattcctaaatctctctcattgtaggtacatcattttacattca

SEQ ID NO: 106638 - DNA, 1446 bp, Homo sapiens
  Payload ID: 943
  Gene Symbol: ALLC
  Gene Name: allantoicase
  ENST ID: ENST00000252505
  CDS Start-End: 163-1338
tatacattctctctgagctggcactcaagcaccgtgggaccttggctggcttctggggagcaagagatccatttatgaatacttgatttctgactgctgggaagcacggctgatgctccgaaggagggaagactgacccggtttctggacttcacccagctgatggacatggcatctgaatccgtaggaggaaaaattttatttgcaacagatgacttttttgctcctgcagaaaacctcataaagagtgacagcccgtgcttcaaagagcatgaatatacggagtttgggaaatggatggatggctgggagaccaggaggaaaaggattccaggtcacgactggtgtgtcctcaggctggggatccaaggagtcatccggggcttcgacgtggacgtttcttacttcacgggagattacgctcctcgagtgtccattcaagcagcaaacttggaagaagataaactaccagaaatcccagaaagaggaaccaggacaggagctgcagccactcctgaggagtttgaagccattgctgagctaaaatccgacgactggagttacttggttcccatgactgagcttaagccaggaaaccctgcttccggccacaactattttcttgtcaattcccagcagagatggactcatatcagactcaacattttcccagatggtggaattgcacgacttagagtattcggtactggacaaaaagactggactgcaactgaccccaaagaacctgcagacctagtggccatcgcttttgggggtgtctgtgtaggatttagtaatgctaagtttgggcacccaaacaatataataggagttggcggggcaaagtctatggcggatggttgggaaactgcaagaaggctggaccggccaccaatattagaaaatgatgagaatggcattctcttggttccgggttgtgaatgggcagttttccgattggcacatcctggagtaataactcgaattgaaattgacacaaaatattttgaaggcaatgctcctgacagctgtaaagtggatgggtgcatcctgacaactcaggaagaagaagccgtgatcaggcaaaagtggattctcccggcccacaagtggaaaccactgcttccagtgaccaagttgtctcccaaccaaagtcatctgttcgatagcctgaccctagagctccaagatgtcatcactcacgccaggctcaccatcgtccccgacgggggagtgagccgccttcggctccggggcttccccagctccatctgcctcctgaggccccgggagaagcccatgttgaagttctcggtgagcttcaaagcaaacccttaacacacacaaagccccggtgtcggacacacagcagtaatttcccagtcatagtcttcttttcaaatgttttgaacacctggtgatttaataaagtggtcgtctcacaaa

SEQ ID NO: 106639 - DNA, 607 bp, Homo sapiens
  Payload ID: 944
  Gene Symbol: AIF1
  Gene Name: allograft inflammatory factor 1
  ENST ID: ENST00000337917
  CDS Start-End: 1-486
gggaggaaggcttctgagaagactggtgggagagaaggagagcctgcagacagaggcctccagcttggaggaaaagctttcggactgctgaaggcccagcaggaagagaggctggatgagatcaacaagcaattcctagacgatcccaaatatagcagtgatgaggatctgccctccaaactggaaggcttcaaagagaaatacatggagtttgaccttaatggaaatggcgatattgatatcatgtccctgaaacgaatgctggagaaacttggagtccccaagactcacctagagctaaagaaattaattggagaggtgtccagtggctccggggagacgttcagctaccctgactttctcaggatgatgctgggcaagagatctgccatcctaaaaatgatcctgatgtatgaggaaaaagcgagagaaaaggaaaagccaacaggccccccagccaagaaagctatctctgagttgccctgatttgaagggaaaagggatgatgggattgaaggggcttctaatgacccagatatggaaacagaagacaaaattgtaagccagagtcaacaaattaaataaattaccccctcctccagatcaa

SEQ ID NO: 106640 - DNA, 524 bp, Homo sapiens
  Payload ID: 944
  Gene Symbol: AIF1
  Gene Name: allograft inflammatory factor 1
  Uniprot ID: P55008
  ENST ID: ENST00000376049
  CDS Start-End: 122-403
ctccttccacgttgtctcctccacctagcagttggttggcaaccccttcctcagtcccctgctgaaaaccctccagtcagcgcttatcccttctgctctctcccctcacccagagaaatacatggagtttgaccttaatggaaatggcgatattgatatcatgtccctgaaacgaatgctggagaaacttggagtccccaagactcacctagagctaaagaaattaattggagaggtgtccagtggctccggggagacgttcagctaccctgactttctcaggatgatgctgggcaagagatctgccatcctaaaaatgatcctgatgtatgaggaaaaagcgagagaaaaggaaaagccaacaggccccccagccaagaaagctatctctgagttgccctgatttgaagggaaaagggatgatgggattgaaggggcttctaatgacccagatatggaaacagaagacaaaattgtaagccagagtcaacaaattaaataaattaccccctcctccagatcaa

SEQ ID NO: 106641 - DNA, 711 bp, Homo sapiens
  Payload ID: 944
  Gene Symbol: AIF1
  Gene Name: allograft inflammatory factor 1
  Uniprot ID: P55008
  ENST ID: ENST00000376059
  CDS Start-End: 147-590
ctgggaggcagaggaggaaggaatgaggggaaaggggaagtttgggaggaaggcttctgagaagactggtgggagagaaggagagcctgcagacagaggcctccagcttggtctgtctccccacctctaccagcatctgctgagctatgagccaaaccagggatttacagggaggaaaagctttcggactgctgaaggcccagcaggaagagaggctggatgagatcaacaagcaattcctagacgatcccaaatatagcagtgatgaggatctgccctccaaactggaaggcttcaaagagaaatacatggagtttgaccttaatggaaatggcgatattgatatcatgtccctgaaacgaatgctggagaaacttggagtccccaagactcacctagagctaaagaaattaattggagaggtgtccagtggctccggggagacgttcagctaccctgactttctcaggatgatgctgggcaagagatctgccatcctaaaaatgatcctgatgtatgaggaaaaagcgagagaaaaggaaaagccaacaggccccccagccaagaaagctatctctgagttgccctgatttgaagggaaaagggatgatgggattgaaggggcttctaatgacccagatatggaaacagaagacaaaattgtaagccagagtcaacaaattaaataaattaccccctcctccagatcaa

SEQ ID NO: 106642 - DNA, 524 bp, Homo sapiens; identical to SEQ ID NO: 106640
  Payload ID: 944
  Gene Symbol: AIF1
  Gene Name: allograft inflammatory factor 1
  Uniprot ID: P55008
  ENST ID: ENST00000383473
  CDS Start-End: 122-403

SEQ ID NO: 106643 - DNA, 711 bp, Homo sapiens; identical to SEQ ID NO: 106641
  Payload ID: 944
  Gene Symbol: AIF1
  Gene Name: allograft inflammatory factor 1
  Uniprot ID: P55008
  ENST ID: ENST00000383474
  CDS Start-End: 147-590

SEQ ID NO: 106644 - DNA, 711 bp, Homo sapiens; identical to SEQ ID NO: 106641
  Payload ID: 944
  Gene Symbol: AIF1
  Gene Name: allograft inflammatory factor 1
  Uniprot ID: P55008
  ENST ID: ENST00000414149
  CDS Start-End: 147-590

SEQ ID NO: 106645 - DNA, 607 bp, Homo sapiens; identical to SEQ ID NO: 106639
  Payload ID: 944
  Gene Symbol: AIF1
  Gene Name: allograft inflammatory factor 1
  ENST ID: ENST00000454372
  CDS Start-End: 1-486

SEQ ID NO: 106646 - DNA, 607 bp, Homo sapiens; identical to SEQ ID NO: 106639
  Payload ID: 944
  Gene Symbol: AIF1
  Gene Name: allograft inflammatory factor 1
  ENST ID: ENST00000454573
  CDS Start-End: 1-486

SEQ ID NO: 106647 - DNA, 607 bp, Homo sapiens; identical to SEQ ID NO: 106639
  Payload ID: 944
  Gene Symbol: AIF1
  Gene Name: allograft inflammatory factor 1
  ENST ID: ENST00000417200
  CDS Start-End: 1-486

SEQ ID NO: 106648 - DNA, 711 bp, Homo sapiens; identical to SEQ ID NO: 106641
  Payload ID: 944
  Gene Symbol: AIF1
  Gene Name: allograft inflammatory factor 1
  Uniprot ID: P55008
  ENST ID: ENST00000440907
  CDS Start-End: 147-590

SEQ ID NO: 106649 - DNA, 711 bp, Homo sapiens; identical to SEQ ID NO: 106641
  Payload ID: 944
  Gene Symbol: AIF1
  Gene Name: allograft inflammatory factor 1
  Uniprot ID: P55008
  ENST ID: ENST00000425748
  CDS Start-End: 147-590

SEQ ID NO: 106650 - DNA, 524 bp, Homo sapiens; identical to SEQ ID NO: 106640
  Payload ID: 944
  Gene Symbol: AIF1
  Gene Name: allograft inflammatory factor 1
  Uniprot ID: P55008
  ENST ID: ENST00000424944
  CDS Start-End: 122-403

SEQ ID NO: 106651 - DNA, 524 bp, Homo sapiens
  Payload ID: 944
  Gene Symbol: AIF1
  Gene Name: allograft inflammatory factor 1
  Uniprot ID: P55008
  ENST ID: ENST00000416422
  CDS Start-End: 122-403
ctccttccacgttgtctcctccacctagcagttggttggcaaccccttcctcagtccccggctgaaaaccctccagtcagcgcttatcccttctgctctctcccctcacccagagaaatacatggagtttgaccttaatggaaatggcgatattgatatcatgtccctgaaacgaatgctggagaaacttggagtccccaagactcacctagagctaaagaaattaattggagaggtgtccagtggctccggggagacgttcagctaccctgactttctcaggatgatgctgggcaagagatctgccatcctaaaaatgatcctgatgtatgaggaaaaagcgagagaaaaggaaaagccaacaggccccccagccaagaaagctatctctgagttgccctgatttgaagggaaaagggatgatgggattgaaggggcttctaatgacccagatatggaaacagaagacaaaattgtaagccagagtcaacaaattaaataaattaccccctcctccagatcaa

SEQ ID NO: 106652 - DNA, 607 bp, Homo sapiens; identical to SEQ ID NO: 106639
  Payload ID: 944
  Gene Symbol: AIF1
  Gene Name: allograft inflammatory factor 1
  ENST ID: ENST00000437985
  CDS Start-End: 1-486

SEQ ID NO: 106653 - DNA, 524 bp, Homo sapiens; identical to SEQ ID NO: 106640
  Payload ID: 944
  Gene Symbol: AIF1
  Gene Name: allograft inflammatory factor 1
  Uniprot ID: P55008
  ENST ID: ENST00000419376
  CDS Start-End: 122-403

SEQ ID NO: 106654 - DNA, 524 bp, Homo sapiens
  Payload ID: 944
  Gene Symbol: AIF1
  Gene Name: allograft inflammatory factor 1
  Uniprot ID: P55008
  ENST ID: ENST00000415830
  CDS Start-End: 122-403
ctccttccacgttgtctcctccacctagcagttggttggcaaccccttcctcagtccccggctgaaaaccctcgagtcagcgcttatcccttctgctctctcccctcacccagagaaatacatggagtttgaccttaatggaaatggcgatattgatatcatgtccctgaaacgaatgctggagaaacttggagtccccaagactcacctagagctaaagaaattaattggagaggtgtccagtggctccggggagacgttcagctaccctgactttctcaggatgatgctgggcaagagatctgccatcctaaaaatgatcctgatgtatgaggaaaaagcgagagaaaaggaaaagccaacaggccccccagccaagaaagctatctctgagttgccctgatttgaagggaaaagggatgatgggattgaaggggcttctaatgacccagatatggaaacagaagacaaaattgtaagccagagtcaacaaattaaataaattaccccctcctccagatcaa

SEQ ID NO: 106655 - DNA, 607 bp, Homo sapiens; identical to SEQ ID NO: 106639
  Payload ID: 944
  Gene Symbol: AIF1
  Gene Name: allograft inflammatory factor 1
  ENST ID: ENST00000412407
  CDS Start-End: 1-486

SEQ ID NO: 106656 - DNA, 711 bp, Homo sapiens; identical to SEQ ID NO: 106641
  Payload ID: 944
  Gene Symbol: AIF1
  Gene Name: allograft inflammatory factor 1
  Uniprot ID: P55008
  ENST ID: ENST00000413349
  CDS Start-End: 147-590

SEQ ID NO: 106657 - DNA, 3364 bp, Homo sapiens
  Payload ID: 945
  Gene Symbol: AIF1L
  Gene Name: allograft inflammatory factor 1-like
  Uniprot ID: Q9BQI0
  ENST ID: ENST00000247291
  CDS Start-End: 89-541
gccggagcccggaccaggcgcctgtgcctcctcctcgtccctcgccgcgtccgcgaagcctggagccggcgggagccccgcgctcgccatgtcgggcgagctcagcaacaggttccaaggagggaaggcgttcggcttgctcaaagcccggcaggagaggaggctggccgagatcaaccgggagtttctgtgtgaccagaagtacagtgatgaagagaaccttccagaaaagctcacagccttcaaagagaagtacatggagtttgacctgaacaatgaaggcgagattgacctgatgtctttaaagaggatgatggagaagcttggtgtccccaagacccacctggagatgaagaagatgatctcagaggtgacaggaggggtcagtgacactatatcctaccgagactttgtgaacatgatgctggggaaacggtcggctgtcctcaagttagtcatgatgtttgaaggaaaagccaacgagagcagccccaagccagttggcccccctccagagagagacattgctagcctgccctgaggaccccgcctggactccccagccttcccaccccatacctccctcccgatcttgctgcccttcttgacacactgtgatctctctctctctcatttgtttggtcattgagggtttgtttgtgttttcatcaatgtctttgtaaagcacaaattatctgccttaaaggggctctgggtcggggaatcctgagccttgggtcccctccctctcttcttccctccttccccgctccctgtgcagaagggctgacatcaaaccaaaaactagagggggcagggccagggcagggaggcttccagcctgtgttcccctcacttggaggaaccagcactctccatcctttcagaaagtctccaagccaagttcaggctcactgacctggctctgacgaggaccccaggccactctgagaagaccttggagtagggacaaggctgcagggcctctttcgggtttccttggacagtgccatggctccagtgctctggtgtcacccaggacacagccactcggggccccgctgccccagctgatccccactcattccacacctcttctcatcctcagtgatgtgaaggtgggaaggaaaggagcttggcattgggagcccttcaagaaggtaccagaaggaaccctccagtcctgctctctggccacacctgtgcaggcagctgagaggcagcgtgcagccctactgtcccttactggggcagcagagggcttcggaggcagaagtgaggcctggggttttgggggaaaggtcagctcagtgctgttccaccttttagggaggttactgaggggaccaggatgggagaatgaggagtaaaatgctcacggcaaagtcagcagcactggtaagccaagactgagaaatacaaggttgcttgtctgaccccaatctgcttgaaacctgactctgcttctctcatttgtcttcctaccctactcacataattcactcattgactcactcattcaccagatatttattgacctgctattataagctttacatcctcccatgttgtcctggcatgtgcagtatacacggtctaactcatctctccccagatctctcagaaccttgagcttgggaattgaactggggtcacctgtgtcctttcttatggactcgcaggattttagaaccctaatgcaccctggagggtagctgggccagacttctcatttcacaggtgaggagactggtgccccacagggattaagtgccttgcccaaggtcaggcttatctccagagggaggtgccctggactggggcccagatgttcagggaccctgcctacacctcatttccagtgtgggctgccttagttagttatgagaacagggaagggctgggaagagacagcctccaaggtcaacacttggagagggtttcacttgctctgaagaccctggtccaggattcgccctctcccatgccttcaagtcagcatcaggcttagggcaaagaccaggcctctgaagctgcctcttgtaattcatgcaggaagatgtcaaagtcagccccatcttggctgatcagggtgttcagccttaaccccacctgtgttctgaagtctcttaccctacctgctcaggactgagacagttattcactgaacatatttattaagcacttgctgtaggccaacagttaagaatccaataatgaaatggacagattcatggaacttagagtccaataggaaagtgagacccagacaatgacaatgagataaatgttaggaagggggaggtatggggtgacttccctgcagtcctgggggcctagatgggcccaagactgggtgagagtcttggcagagcctttgcaacaccttaagtggacaggactgggaggtcttggtggttggagccaacgtgggttccctgcggctccttagtcacctctgatagcagattgagggaggaaaacaggtaaggcatgaggaaatggccaggttgggttaacccactggtttcaaccagttcaggaatgaggttatttggccatgactggctgatcttgagctcaaggatctgcttcaaatgcacacaggcctagttgaagtttaaaccccagcaaaacattcctccctgtaaatggaaaatcctacttctacccccaccctgccctgttttttgttttttttttccccaagatcattagatgtcctcacccctcctcactgcctctcctctctgggacaggctgggacctttgaggaagataaagccttccttcactacccatcatattcagtgtccctgttcctcactcagagaggaaggcagaaccagtcaggcttatttcagtaagttccacagttctacaagactgcaggaattctccttaagggaggagagcaagcaggtgtggccccagcttctggaaatggcagaagagagggttttctcattgaatgggggtgggggctcgtgtgtcctgggaaaccccatcagtcccttcatttcttgagactcaactcctgggaggagagggtctcaagagttgtccctggaaggagggcgggggcagtctgcatctatttcaggttgtggctcttggttctaggactcttacttctctggctaagggctcagcttcttgggacttcaaccatcttctttctgaaagaccaaatctaatgtaaccagtaacgtgaggactgccaagtatggctttgtccctatgactcagaggagggtttgtcgggcaaattcaggtggatgaagtatgtgtgtgcgtgtgcatgggagtgtgcgtggactgggatatcatctctacagcctgcaaataaaccagacaaacttac

SEQ ID NO: 106658 - DNA, 418 bp, Homo sapiens
  Payload ID: 945
  Gene Symbol: AIF1L
  Gene Name: allograft inflammatory factor 1-like
  ENST ID: ENST00000372297
  CDS Start-End: 184-324
tggactgcttggatgtaggcagcctgtctgttttccatccgctggctacaggactcccattcggtccccagctacagggctctggggacctcagggttccccctccaggagtttctgtgtgaccagaagtacagtgatgaagagaaccttccagaaaagctcacagccttcaaagagaagtacatggagtttgacctgaacaatgaaggcgagattgacctgatgtctttaaagaggatgatggagaagcttggtgtccccaagacccacctggagatgaagaagatgatctcagaggtgacaggagggagtcatgatgtttgaaggaaaagccaacgagagcagccccaagccagttggcccccctccagagagagacattgctagcctgccctgaggaccccgcctggactcccca

SEQ ID NO: 106659 - DNA, 849 bp, Homo sapiens
  Payload ID: 945
  Gene Symbol: AIF1L
  Gene Name: allograft inflammatory factor 1-like
  ENST ID: ENST00000372298
  CDS Start-End: 75-368
caggcgcctgtgcctcctcctcgtccctcgccgcgtccgcgaagcctggagccggcgggagccccgcgctcgccatgtcgggcgagctcagcaacaggttccaaggagggaaggcgttcggcttgctcaaagcccggcaggagaggaggctggccgagatcaaccgggagtttctgtgtgaccagaagtacagtgatgaagagaaccttccagaaaagctcacagccttcaaagagaagtacatggagtttgacctgaacaatgaaggcgagattgacctgatgtctttaaagaggatgatggagaagcttggtgtccccaagacccacctggagatgaagaagatgatctcagagggaggttactgaggggaccaggatgggagaatgaggagtaaaatgctcacggcaaagtcagcagcactggtaagccaagactgagaaatacaaggttgcttgtctgaccccaatctgcttgaaacctgactctgcttctctcatttgtcttcctaccctactcacataattcactcattgactcactcattcaccagatatttattgacctgctattataagctttacatcctcccatgttgtcctggcatgtgcagtatacacggtctaactcatctctccccagatctctcagaaccttgagcttgggaattgaactggggtcacctgtgtcctttcttatggactcgcaggattttagaaccctaatgcaccctggagggtagctgggccagacttctcatttcacaggtgaggagactggtgccccacagggattaagtgccttgcccaaggtcaggcttatctccagagggaggtgccctggactggg

SEQ ID NO: 106660 - DNA, 3284 bp, Homo sapiens
  Payload ID: 945
  Gene Symbol: AIF1L
  Gene Name: allograft inflammatory factor 1-like
  Uniprot ID: Q9BQI0
  ENST ID: ENST00000372300
  CDS Start-End: 80-388
cggaccaggcgcctgtgcctcctcctcgtccctcgccgcgtccgcgaagcctggagccggcgggagccccgcgctcgccatgtcgggcgagctcagcaacaggttccaaggagggaaggcgttcggcttgctcaaagcccggcaggagaggaggctggccgagatcaaccgggagtttctgtgtgaccagaagtacagtgatgaagagaaccttccagaaaagctcacagccttcaaagagaagtacatggagtttgacctgaacaatgaaggcgagattgacctgatgtctttaaagaggatgatggagaagcttggtgtccccaagacccacctggagatgaagaagatgatctcagaggtgacaggagggagtcatgatgtttgaaggaaaagccaacgagagcagccccaagccagttggcccccctccagagagagacattgctagcctgccctgaggaccccgcctggactccccagccttcccaccccatacctccctcccgatcttgctgcccttcttgacacactgtgatctctctctctctcatttgtttggtcattgagggtttgtttgtgttttcatcaatgtctttgtaaagcacaaattatctgccttaaaggggctctgggtcggggaatcctgagccttgggtcccctccctctcttcttccctccttccccgctccctgtgcagaagggctgacatcaaaccaaaaactagagggggcagggccagggcagggaggcttccagcctgtgttcccctcacttggaggaaccagcactctccatcctttcagaaagtctccaagccaagttcaggctcactgacctggctctgacgaggaccccaggccactctgagaagaccttggagtagggacaaggctgcagggcctctttcgggtttccttggacagtgccatggctccagtgctctggtgtcacccaggacacagccactcggggccccgctgccccagctgatccccactcattccacacctcttctcatcctcagtgatgtgaaggtgggaaggaaaggagcttggcattgggagcccttcaagaaggtaccagaaggaaccctccagtcctgctctctggccacacctgtgcaggcagctgagaggcagcgtgcagccctactgtcccttactggggcagcagagggcttcggaggcagaagtgaggcctggggttttgggggaaaggtcagctcagtgctgttccaccttttagggaggttactgaggggaccaggatgggagaatgaggagtaaaatgctcacggcaaagtcagcagcactggtaagccaagactgagaaatacaaggttgcttgtctgaccccaatctgcttgaaacctgactctgcttctctcatttgtcttcctaccctactcacataattcactcattgactcactcattcaccagatatttattgacctgctattataagctttacatcctcccatgttgtcctggcatgtgcagtatacacggtctaactcatctctccccagatctctcagaaccttgagcttgggaattgaactggggtcacctgtgtcctttcttatggactcgcaggattttagaaccctaatgcaccctggagggtagctgggccagacttctcatttcacaggtgaggagactggtgccccacagggattaagtgccttgcccaaggtcaggcttatctccagagggaggtgccctggactggggcccagatgttcagggaccctgcctacacctcatttccagtgtgggctgccttagttagttatgagaacagggaagggctgggaagagacagcctccaaggtcaacacttggagagggtttcacttgctctgaagaccctggtccaggattcgccctctcccatgccttcaagtcagcatcaggcttagggcaaagaccaggcctctgaagctgcctcttgtaattcatgcaggaagatgtcaaagtcagccccatcttggctgatcagggtgttcagccttaaccccacctgtgttctgaagtctcttaccctacctgctcaggactgagacagttattcactgaacatatttattaagcacttgctgtaggccaacagttaagaatccaataatgaaatggacagattcatggaacttagagtccaataggaaagtgagacccagacaatgacaatgagataaatgttaggaagggggaggtatggggtgacttccctgcagtcctgggggcctagatgggcccaagactgggtgagagtcttggcagagcctttgcaacaccttaagtggacaggactgggaggtcttggtggttggagccaacgtgggttccctgcggctccttagtcacctctgatagcagattgagggaggaaaacaggtaaggcatgaggaaatggccaggttgggttaacccactggtttcaaccagttcaggaatgaggttatttggccatgactggctgatcttgagctcaaggatctgcttcaaatgcacacaggcctagttgaagtttaaaccccagcaaaacattcctccctgtaaatggaaaatcctacttctacccccaccctgccctgttttttgttttttttttccccaagatcattagatgtcctcacccctcctcactgcctctcctctctgggacaggctgggacctttgaggaagataaagccttccttcactacccatcatattcagtgtccctgttcctcactcagagaggaaggcagaaccagtcaggcttatttcagtaagttccacagttctacaagactgcaggaattctccttaagggaggagagcaagcaggtgtggccccagcttctggaaatggcagaagagagggttttctcattgaatgggggtgggggctcgtgtgtcctgggaaaccccatcagtcccttcatttcttgagactcaactcctgggaggagagggtctcaagagttgtccctggaaggagggcgggggcagtctgcatctatttcaggttgtggctcttggttctaggactcttacttctctggctaagggctcagcttcttgggacttcaaccatcttctttctgaaagaccaaatctaatgtaaccagtaacgtgaggactgccaagtatggctttgtccctatgactcagaggagggtttgtcgggcaaattcaggtggatgaagtatgtgtgtgcgtgtgcatgggagtgtgcgtggactgggatatcatctctacagcctgcaaataaaccagacaaacttac

SEQ ID NO: 106661 - DNA, 671 bp, Homo sapiens
  Payload ID: 945
  Gene Symbol: AIF1L
  Gene Name: allograft inflammatory factor 1-like
  ENST ID: ENST00000372301
  CDS Start-End: 271-555
aaacttcctacccacagggtggccagtgcagatctgcctccaaggggcgacaggaagccggggtgaacaagggacaaactgggtctggtcgcacctggttacccgataggagggaaggcccccggacagtgggcccatgtgtgggtgacttctgtccccagtcccttgctcagcactgtcctctcacctctgtaggagtttctgtgtgaccagaagtacagtgatgaagagaaccttccagaaaagctcacagccttcaaagagaagtacatggagtttgacctgaacaatgaaggcgagattgacctgatgtctttaaagaggatgatggagaagcttggtgtccccaagacccacctggagatgaagaagatgatctcagaggtgacaggaggggtcagtgacactatatcctaccgagactttgtgaacatgatgctggggaaacggtcggctgtcctcaagttagtcatgatgtttgaaggaaaagccaacgagagcagccccaagccagttggcccccctccagagagagacattgctagcctgccctgaggaccccgcctggactccccagccttcccaccccatacctccctcccgatcttgctgcccttcttgacacactgtgatctctctctctctcatttgtttggtcattgagggtttgt

SEQ ID NO: 106662 - DNA, 3340 bp, Homo sapiens
  Payload ID: 945
  Gene Symbol: AIF1L
  Gene Name: allograft inflammatory factor 1-like
  Uniprot ID: Q9BQI0
  ENST ID: ENST00000372302
  CDS Start-End: 89-517
gccggagcccggaccaggcgcctgtgcctcctcctcgtccctcgccgcgtccgcgaagcctggagccggcgggagccccgcgctcgccatgtcgggcgagctcagcaacaggttccaaggagggaaggcgttcggcttgctcaaagcccggcaggagaggaggctggccgagatcaaccgggagtttctgtgtgaccagaagtacagtgatgaagagaaccttccagaaaagctcacagccttcaaagagaagtacatggagtttgacctgatgtctttaaagaggatgatggagaagcttggtgtccccaagacccacctggagatgaagaagatgatctcagaggtgacaggaggggtcagtgacactatatcctaccgagactttgtgaacatgatgctggggaaacggtcggctgtcctcaagttagtcatgatgtttgaaggaaaagccaacgagagcagccccaagccagttggcccccctccagagagagacattgctagcctgccctgaggaccccgcctggactccccagccttcccaccccatacctccctcccgatcttgctgcccttcttgacacactgtgatctctctctctctcatttgtttggtcattgagggtttgtttgtgttttcatcaatgtctttgtaaagcacaaattatctgccttaaaggggctctgggtcggggaatcctgagccttgggtcccctccctctcttcttccctccttccccgctccctgtgcagaagggctgacatcaaaccaaaaactagagggggcagggccagggcagggaggcttccagcctgtgttcccctcacttggaggaaccagcactctccatcctttcagaaagtctccaagccaagttcaggctcactgacctggctctgacgaggaccccaggccactctgagaagaccttggagtagggacaaggctgcagggcctctttcgggtttccttggacagtgccatggctccagtgctctggtgtcacccaggacacagccactcggggccccgctgccccagctgatccccactcattccacacctcttctcatcctcagtgatgtgaaggtgggaaggaaaggagcttggcattgggagcccttcaagaaggtaccagaaggaaccctccagtcctgctctctggccacacctgtgcaggcagctgagaggcagcgtgcagccctactgtcccttactggggcagcagagggcttcggaggcagaagtgaggcctggggttttgggggaaaggtcagctcagtgctgttccaccttttagggaggttactgaggggaccaggatgggagaatgaggagtaaaatgctcacggcaaagtcagcagcactggtaagccaagactgagaaatacaaggttgcttgtctgaccccaatctgcttgaaacctgactctgcttctctcatttgtcttcctaccctactcacataattcactcattgactcactcattcaccagatatttattgacctgctattataagctttacatcctcccatgttgtcctggcatgtgcagtatacacggtctaactcatctctccccagatctctcagaaccttgagcttgggaattgaactggggtcacctgtgtcctttcttatggactcgcaggattttagaaccctaatgcaccctggagggtagctgggccagacttctcatttcacaggtgaggagactggtgccccacagggattaagtgccttgcccaaggtcaggcttatctccagagggaggtgccctggactggggcccagatgttcagggaccctgcctacacctcatttccagtgtgggctgccttagttagttatgagaacagggaagggctgggaagagacagcctccaaggtcaacacttggagagggtttcacttgctctgaagaccctggtccaggattcgccctctcccatgccttcaagtcagcatcaggcttagggcaaagaccaggcctctgaagctgcctcttgtaattcatgcaggaagatgtcaaagtcagccccatcttggctgatcagggtgttcagccttaaccccacctgtgttctgaagtctcttaccctacctgctcaggactgagacagttattcactgaacatatttattaagcacttgctgtaggccaacagttaagaatccaataatgaaatggacagattcatggaacttagagtccaataggaaagtgagacccagacaatgacaatgagataaatgttaggaagggggaggtatggggtgacttccctgcagtcctgggggcctagatgggcccaagactgggtgagagtcttggcagagcctttgcaacaccttaagtggacaggactgggaggtcttggtggttggagccaacgtgggttccctgcggctccttagtcacctctgatagcagattgagggaggaaaacaggtaaggcatgaggaaatggccaggttgggttaacccactggtttcaaccagttcaggaatgaggttatttggccatgactggctgatcttgagctcaaggatctgcttcaaatgcacacaggcctagttgaagtttaaaccccagcaaaacattcctccctgtaaatggaaaatcctacttctacccccaccctgccctgttttttgttttttttttccccaagatcattagatgtcctcacccctcctcactgcctctcctctctgggacaggctgggacctttgaggaagataaagccttccttcactacccatcatattcagtgtccctgttcctcactcagagaggaaggcagaaccagtcaggcttatttcagtaagttccacagttctacaagactgcaggaattctccttaagggaggagagcaagcaggtgtggccccagcttctggaaatggcagaagagagggttttctcattgaatgggggtgggggctcgtgtgtcctgggaaaccccatcagtcccttcatttcttgagactcaactcctgggaggagagggtctcaagagttgtccctggaaggagggcgggggcagtctgcatctatttcaggttgtggctcttggttctaggactcttacttctctggctaagggctcagcttcttgggacttcaaccatcttctttctgaaagaccaaatctaatgtaaccagtaacgtgaggactgccaagtatggctttgtccctatgactcagaggagggtttgtcgggcaaattcaggtggatgaagtatgtgtgtgcgtgtgcatgggagtgtgcgtggactgggatatcatctctacagcctgcaaataaaccagacaaacttac

SEQ ID NO: 106663 - DNA, 3515 bp, Homo sapiens
  Payload ID: 945
  Gene Symbol: AIF1L
  Gene Name: allograft inflammatory factor 1-like
  Uniprot ID: Q9BQI0
  ENST ID: ENST00000372309
  CDS Start-End: 155-685
agggaggggtgtgtcggccgcccgcgccgttcctccgcccctcggtcccgcggccacacgcagctagccggagcccggaccaggcgcctgtgcctcctcctcgtccctcgccgcgtccgcgaagcctggagccggcgggagccccgcgctcgccatgtcgggcgagctcagcaacaggttccaaggagggaaggcgttcggcttgctcaaagcccggcaggagaggaggctggccgagatcaaccggtactgtgcagggagggagccgcagctacagaggatttcatgttcccagcacagctgcttgctggctctgctgtttcaggagtttctgtgtgaccagaagtacagtgatgaagagaaccttccagaaaagctcacagccttcaaagagaagtacatggagtttgacctgaacaatgaaggcgagattgacctgatgtctttaaagaggatgatggagaagcttggtgtccccaagacccacctggagatgaagaagatgatctcagaggtgacaggaggggtcagtgacactatatcctaccgagactttgtgaacatgatgctggggaaacggtcggctgtcctcaagttagtcatgatgtttgaaggaaaagccaacgagagcagccccaagccagttggcccccctccagagagagacattgctagcctgccctgaggaccccgcctggactccccagccttcccaccccatacctccctcccgatcttgctgcccttcttgacacactgtgatctctctctctctcatttgtttggtcattgagggtttgtttgtgttttcatcaatgtctttgtaaagcacaaattatctgccttaaaggggctctgggtcggggaatcctgagccttgggtcccctccctctcttcttccctccttccccgctccctgtgcagaagggctgacatcaaaccaaaaactagagggggcagggccagggcagggaggcttccagcctgtgttcccctcacttggaggaaccagcactctccatcctttcagaaagtctccaagccaagttcaggctcactgacctggctctgacgaggaccccaggccactctgagaagaccttggagtagggacaaggctgcagggcctctttcgggtttccttggacagtgccatggctccagtgctctggtgtcacccaggacacagccactcggggccccgctgccccagctgatccccactcattccacacctcttctcatcctcagtgatgtgaaggtgggaaggaaaggagcttggcattgggagcccttcaagaaggtaccagaaggaaccctccagtcctgctctctggccacacctgtgcaggcagctgagaggcagcgtgcagccctactgtcccttactggggcagcagagggcttcggaggcagaagtgaggcctggggttttgggggaaaggtcagctcagtgctgttccaccttttagggaggttactgaggggaccaggatgggagaatgaggagtaaaatgctcacggcaaagtcagcagcactggtaagccaagactgagaaatacaaggttgcttgtctgaccccaatctgcttgaaacctgactctgcttctctcatttgtcttcctaccctactcacataattcactcattgactcactcattcaccagatatttattgacctgctattataagctttacatcctcccatgttgtcctggcatgtgcagtatacacggtctaactcatctctccccagatctctcagaaccttgagcttgggaattgaactggggtcacctgtgtcctttcttatggactcgcaggattttagaaccctaatgcaccctggagggtagctgggccagacttctcatttcacaggtgaggagactggtgccccacagggattaagtgccttgcccaaggtcaggcttatctccagagggaggtgccctggactggggcccagatgttcagggaccctgcctacacctcatttccagtgtgggctgccttagttagttatgagaacagggaagggctgggaagagacagcctccaaggtcaacacttggagagggtttcacttgctctgaagaccctggtccaggattcgccctctcccatgccttcaagtcagcatcaggcttagggcaaagaccaggcctctgaagctgcctcttgtaattcatgcaggaagatgtcaaagtcagccccatcttggctgatcagggtgttcagccttaaccccacctgtgttctgaagtctcttaccctacctgctcaggactgagacagttattcactgaacatatttattaagcacttgctgtaggccaacagttaagaatccaataatgaaatggacagattcatggaacttagagtccaataggaaagtgagacccagacaatgacaatgagataaatgttaggaagggggaggtatggggtgacttccctgcagtcctgggggcctagatgggcccaagactgggtgagagtcttggcagagcctttgcaacaccttaagtggacaggactgggaggtcttggtggttggagccaacgtgggttccctgcggctccttagtcacctctgatagcagattgagggaggaaaacaggtaaggcatgaggaaatggccaggttgggttaacccactggtttcaaccagttcaggaatgaggttatttggccatgactggctgatcttgagctcaaggatctgcttcaaatgcacacaggcctagttgaagtttaaaccccagcaaaacattcctccctgtaaatggaaaatcctacttctacccccaccctgccctgttttttgttttttttttccccaagatcattagatgtcctcacccctcctcactgcctctcctctctgggacaggctgggacctttgaggaagataaagccttccttcactacccatcatattcagtgtccctgttcctcactcagagaggaaggcagaaccagtcaggcttatttcagtaagttccacagttctacaagactgcaggaattctccttaagggaggagagcaagcaggtgtggccccagcttctggaaatggcagaagagagggttttctcattgaatgggggtgggggctcgtgtgtcctgggaaaccccatcagtcccttcatttcttgagactcaactcctgggaggagagggtctcaagagttgtccctggaaggagggcgggggcagtctgcatctatttcaggttgtggctcttggttctaggactcttacttctctggctaagggctcagcttcttgggacttcaaccatcttctttctgaaagaccaaatctaatgtaaccagtaacgtgaggactgccaagtatggctttgtccctatgactcagaggagggtttgtcgggcaaattcaggtggatgaagtatgtgtgtgcgtgtgcatgggagtgtgcgtggactgggatatcatctctacagcctgcaaataaaccagacaaacttaccaacgtc

SEQ ID NO: 106664 - DNA, 3398 bp, Homo sapiens
  Payload ID: 945
  Gene Symbol: AIF1L
  Gene Name: allograft inflammatory factor 1-like
  ENST ID: ENST00000372314
  CDS Start-End: 101-229
cacacgcagctagccggagcccggaccaggcgcctgtgcctcctcctcgtccctcgccgcgtccgcgaagcctggagccggcgggagccccgcgctcgccatgtcgggcgagctcagcaacaggttccaaggccgcctctttgtctcctccaggagggaaggcgttcggcttgctcaaagcccggcaggagaggaggctggccgagatcaaccgggagtttctgtgtgaccagaagtacagtgatgaagagaaccttccagaaaagctcacagccttcaaagagaagtacatggagtttgacctgaacaatgaaggcgagattgacctgatgtctttaaagaggatgatggagaagcttggtgtccccaagacccacctggagatgaagaagatgatctcagaggtgacaggaggggtcagtgacactatatcctaccgagactttgtgaacatgatgctggggaaacggtcggctgtcctcaagttagtcatgatgtttgaaggaaaagccaacgagagcagccccaagccagttggcccccctccagagagagacattgctagcctgccctgaggaccccgcctggactccccagccttcccaccccatacctccctcccgatcttgctgcccttcttgacacactgtgatctctctctctctcatttgtttggtcattgagggtttgtttgtgttttcatcaatgtctttgtaaagcacaaattatctgccttaaaggggctctgggtcggggaatcctgagccttgggtcccctccctctcttcttccctccttccccgctccctgtgcagaagggctgacatcaaaccaaaaactagagggggcagggccagggcagggaggcttccagcctgtgttcccctcacttggaggaaccagcactctccatcctttcagaaagtctccaagccaagttcaggctcactgacctggctctgacgaggaccccaggccactctgagaagaccttggagtagggacaaggctgcagggcctctttcgggtttccttggacagtgccatggctccagtgctctggtgtcacccaggacacagccactcggggccccgctgccccagctgatccccactcattccacacctcttctcatcctcagtgatgtgaaggtgggaaggaaaggagcttggcattgggagcccttcaagaaggtaccagaaggaaccctccagtcctgctctctggccacacctgtgcaggcagctgagaggcagcgtgcagccctactgtcccttactggggcagcagagggcttcggaggcagaagtgaggcctggggttttgggggaaaggtcagctcagtgctgttccaccttttagggaggttactgaggggaccaggatgggagaatgaggagtaaaatgctcacggcaaagtcagcagcactggtaagccaagactgagaaatacaaggttgcttgtctgaccccaatctgcttgaaacctgactctgcttctctcatttgtcttcctaccctactcacataattcactcattgactcactcattcaccagatatttattgacctgctattataagctttacatcctcccatgttgtcctggcatgtgcagtatacacggtctaactcatctctccccagatctctcagaaccttgagcttgggaattgaactggggtcacctgtgtcctttcttatggactcgcaggattttagaaccctaatgcaccctggagggtagctgggccagacttctcatttcacaggtgaggagactggtgccccacagggattaagtgccttgcccaaggtcaggcttatctccagagggaggtgccctggactggggcccagatgttcagggaccctgcctacacctcatttccagtgtgggctgccttagttagttatgagaacagggaagggctgggaagagacagcctccaaggtcaacacttggagagggtttcacttgctctgaagaccctggtccaggattcgccctctcccatgccttcaagtcagcatcaggcttagggcaaagaccaggcctctgaagctgcctcttgtaattcatgcaggaagatgtcaaagtcagccccatcttggctgatcagggtgttcagccttaaccccacctgtgttctgaagtctcttaccctacctgctcaggactgagacagttattcactgaacatatttattaagcacttgctgtaggccaacagttaagaatccaataatgaaatggacagattcatggaacttagagtccaataggaaagtgagacccagacaatgacaatgagataaatgttaggaagggggaggtatggggtgacttccctgcagtcctgggggcctagatgggcccaagactgggtgagagtcttggcagagcctttgcaacaccttaagtggacaggactgggaggtcttggtggttggagccaacgtgggttccctgcggctccttagtcacctctgatagcagattgagggaggaaaacaggtaaggcatgaggaaatggccaggttgggttaacccactggtttcaaccagttcaggaatgaggttatttggccatgactggctgatcttgagctcaaggatctgcttcaaatgcacacaggcctagttgaagtttaaaccccagcaaaacattcctccctgtaaatggaaaatcctacttctacccccaccctgccctgttttttgttttttttttccccaagatcattagatgtcctcacccctcctcactgcctctcctctctgggacaggctgggacctttgaggaagataaagccttccttcactacccatcatattcagtgtccctgttcctcactcagagaggaaggcagaaccagtcaggcttatttcagtaagttccacagttctacaagactgcaggaattctccttaagggaggagagcaagcaggtgtggccccagcttctggaaatggcagaagagagggttttctcattgaatgggggtgggggctcgtgtgtcctgggaaaccccatcagtcccttcatttcttgagactcaactcctgggaggagagggtctcaagagttgtccctggaaggagggcgggggcagtctgcatctatttcaggttgtggctcttggttctaggactcttacttctctggctaagggctcagcttcttgggacttcaaccatcttctttctgaaagaccaaatctaatgtaaccagtaacgtgaggactgccaagtatggctttgtccctatgactcagaggagggtttgtcgggcaaattcaggtggatgaagtatgtgtgtgcgtgtgcatgggagtgtgcgtggactgggatatcatctctacagcctgcaaataaaccagacaaacttac

SEQ ID NO: 106665 - DNA, 1240 bp, Homo sapiens
  Payload ID: 946
  Gene Symbol: ATRAID
  Gene Name: all-trans retinoic acid-induced differentiation factor
  Uniprot ID: Q6UW56
  ENST ID: ENST00000380171
  CDS Start-End: 178-1032
ggatggaggggcccgagtttctgcgaagccgcgacctcggcgtccggacgcggggaacaccgggctgagggagtctgcagtcggctccgggaagccgcgcggcgacgggggaggccttcactaaaggggaaaaggaagagggggtcggccagtatccccgaaagagggctagggcgcatgaagaccagcgcagagctccacgagcaggaaaagcccccaagcagccccagggcgactggaccgggccgcttaggccacgcccggggaagagggcctgacgcgctgcggggcggggccgcggggccgggtcgcgcgagcagcggagcaccaagggaacggaaaatggcgcctcacgacccgggtagtcttacgaccctggtgccctgggctgccgccctgctcctcgctctgggcgtggaaagggctctggcgctacccgagatatgcacccaatgtccagggagcgtgcaaaatttgtcaaaagtggccttttattgtaaaacgacacgagagctaatgctgcatgcccgttgctgcctgaatcagaagggcaccatcttggggctggatctccagaactgttctctggaggaccctggtccaaactttcatcaggcacataccactgtcatcatagacctgcaagcaaaccccctcaaaggtgacttggccaacaccttccgtggctttactcagctccagactctgatactgccacaacatgtcaactgtcctggaggaattaatgcctggaatactatcacctcttatatagacaaccaaatctgtcaagggcaaaagaacctttgcaataacactggggacccagaaatgtgtcctgagaatggatcttgtgtacctgatggtccaggtcttttgcagtgtgtttgtgctgatggtttccatggatacaagtgtatgcgccagggctcgttctcactgcttatgttcttcgggattctgggagccaccactctatccgtctccattctgctttgggcgacccagcgccgaaaagccaagacttcatgaactacataggtcttaccattgacctaagatcaatctgaactatcttagcccagtcagggagctctgcttcctagaaaggcatctttcgccagtggattcgcctcaaggttgaggccgccattggaagatgaaaaattgcactcccttggtgtagacaaataccagttcccattggtgttgttgcctataataaacacttttttctttt

SEQ ID NO: 106666 - DNA, 1059 bp, Homo sapiens
  Payload ID: 946
  Gene Symbol: ATRAID
  Gene Name: all-trans retinoic acid-induced differentiation factor
  Uniprot ID: Q6UW56
  ENST ID: ENST00000405489
  CDS Start-End: 314-829
tggcgcctcacgacccgggtagtcttacgaccctggtgccctgggctgccgccctgctcctcgctctgggcgtggaaagggctctggcgctacccgaggtacagaagcaagtttgaggtcgggctgaagcagggtcgctggccagccgtgcgtcgcgctcgccagcggctcccccttctcctcggcgggcctgcggttctgatttcgtccctgacgcttcccgaccctgcccagccagatatgcacccaatgtccagggagcgtgcaaaatttgtcaaaagtggccttttattgtaaaacgacacgagagctaatgctgcatgcccgttgctgcctgaatcagaagggcaccatcttggggctggatctccagaactgttctctggaggaccctggtccaaactttcatcaggcacataccactgtcatcatagacctgcaagcaaaccccctcaaaggtgacttggccaacaccttccgtggctttactcagctccagactctgatactgccacaacatgtcaactgtcctggaggaattaatgcctggaatactatcacctcttatatagacaaccaaatctgtcaagggcaaaagaacctttgcaataacactggggacccagaaatgtgtcctgagaatggatcttgtgtacctgatggtccaggtcttttgcagtgtgtttgtgctgatggtttccatggatacaagtgtatgcgccagggctcgttctcactgcttatgttcttcgggattctgggagccaccactctatccgtctccattctgctttgggcgacccagcgccgaaaagccaagacttcatgaactacataggtcttaccattgacctaagatcaatctgaactatcttagcccagtcagggagctctgcttcctagaaaggcatctttcgccagtggattcgcctcaaggttgaggccgccattggaagatgaaaaattgcactcccttggtgtagacaaataccagttcccattggtgttgttgcctataataaacacttttttctttttttttcctctctttctttttaa

SEQ ID NO: 106667 - DNA, 612 bp, Homo sapiens
  Payload ID: 946
  Gene Symbol: ATRAID
  Gene Name: all-trans retinoic acid-induced differentiation factor
  ENST ID: ENST00000419744
  CDS Start-End: 387-612
gtcagattgagaagtctctgcagaaagcataataaataagttcgaatagtgatcttcagagatgaggaccttccctgtgcgatatctggtactgaaagtgtcgggagctgattcggcgcaggactctggaggaagagatggcatctcctagcctagcctgttacaagggtgggacacgagccgtttatccatttatcggccccgtgttagaggaattctggaaacgtgtactggcagttaattcttgatcgccgtttgttcttttcttggcttttctttctggagttctaatgtttctttctcttctgcagatatgcacccaatgtccagggagcgtgcaaaatttgtcaaaagtggccttttattgtaaaacgacacgagagctaatgctgcatgcccgttgctgcctgaatcagaagggcaccatcttggggctggatctccagaactgttctctggaggaccctggtccaaactttcatcaggcacataccactgtcatcatagacctgcaagcaaaccccctcaaaggtgacttggccaacaccttccgtggctttactcagctccagactctgatactgccacaacatgtcaactgtcctggaggaa

SEQ ID NO: 106668 - DNA, 956 bp, Homo sapiens
  Payload ID: 946
  Gene Symbol: ATRAID
  Gene Name: all-trans retinoic acid-induced differentiation factor
  Uniprot ID: Q6UW56
  ENST ID: ENST00000606999
  CDS Start-End: 59-748
gcggggcggggccgcggggccgggtcgcgcgagcagcggagcaccaagggaacggaaaatggcgcctcacgacccgggtagtcttacgaccctggtgccctgggctgccgccctgctcctcgctctgggcgtggaaagggctctggcgctacccgagatatgcacccaatgtccagggagcgtgcaaaatttgtcaaaagtggccttttattgtaaaacgacacgagagctaatgctgcatgcccgttgctgcctgaatcagaagggcaccatcttggggctggatctccagaactgttctctggaggaccctggtccaaactttcatcaggcacataccactgtcatcatagacctgcaagcaaaccccctcaaaggtgacttggccaacaccttccgtggctttactcagctccagactctgatactgccacaacatgtcaactgtcctggaggaattaatgcctggaatactatcacctcttatatagacaaccaaatctgtcaagggcaaaagaacctttgcaataacactggggacccagaaatgtgtcctgagaatggatcttgtgtacctgatggtccaggtcttttgcagtgtgtttgtgctgatggtttccatggatacaagtgtatgcgccagggctcgttctcactgcttatgttcttcgggattctgggagccaccactctatccgtctccattctgctttgggcgacccagcgccgaaaagccaagacttcatgaactacataggtcttaccattgacctaagatcaatctgaactatcttagcccagtcagggagctctgcttcctagaaaggcatctttcgccagtggattcgcctcaaggttgaggccgccattggaagatgaaaaattgcactcccttggtgtagacaaataccagttcccattggtgttgttgcctataataaacacttttttctttt

SEQ ID NO: 106669 - DNA, 1256 bp, Homo sapiens
  Payload ID: 946
  Gene Symbol: ATRAID
  Gene Name: all-trans retinoic acid-induced differentiation factor
  Uniprot ID: Q6UW56
  ENST ID: ENST00000611786
  CDS Start-End: 174-1028
ggaggggcccgagtttctgcgaagccgcgacctcggcgtccggacgcggggaacaccgggctgagggagtctgcagtcggctccgggaagccgcgcggcgacgggggaggccttcactaaaggggaaaaggaagagggggtcggccagtatccccgaaagagggctagggcgcatgaagaccagcgcagagctccacgagcaggaaaagcccccaagcagccccagggcgactggaccgggccgcttaggccacgcccggggaagagggcctgacgcgctgcggggcggggccgcggggccgggtcgcgcgagcagcggagcaccaagggaacggaaaatggcgcctcacgacccgggtagtcttacgaccctggtgccctgggctgccgccctgctcctcgctctgggcgtggaaagggctctggcgctacccgagatatgcacccaatgtccagggagcgtgcaaaatttgtcaaaagtggccttttattgtaaaacgacacgagagctaatgctgcatgcccgttgctgcctgaatcagaagggcaccatcttggggctggatctccagaactgttctctggaggaccctggtccaaactttcatcaggcacataccactgtcatcatagacctgcaagcaaaccccctcaaaggtgacttggccaacaccttccgtggctttactcagctccagactctgatactgccacaacatgtcaactgtcctggaggaattaatgcctggaatactatcacctcttatatagacaaccaaatctgtcaagggcaaaagaacctttgcaataacactggggacccagaaatgtgtcctgagaatggatcttgtgtacctgatggtccaggtcttttgcagtgtgtttgtgctgatggtttccatggatacaagtgtatgcgccagggctcgttctcactgcttatgttcttcgggattctgggagccaccactctatccgtctccattctgctttgggcgacccagcgccgaaaagccaagacttcatgaactacataggtcttaccattgacctaagatcaatctgaactatcttagcccagtcagggagctctgcttcctagaaaggcatctttcgccagtggattcgcctcaaggttgaggccgccattggaagatgaaaaattgcactcccttggtgtagacaaataccagttcccattggtgttgttgcctataataaacacttttttctttttttttcctctctttcttttt

SEQ ID NO: 106670 - DNA, 1023 bp, Homo sapiens
  Payload ID: 947
  Gene Symbol: A3GALT2
  Gene Name: alpha 1,3-galactosyltransferase 2
  ENST ID: ENST00000442999
  CDS Start-End: 1-1023
atggctctcaaggagggactcagggcctggaagagaatcttctggcggcagatcctacttacacttggcctcttaggcctgtttctgtatggcctccctaaattcaggcatctggaagccctcatccccatgggcgtctgcccttcggccacaatgtcccagctgagagacaacttcacaggtgccctgcgtccctgggcccggcctgaagttctgacctgtaccccctggggggctcccattatttgggatggctctttcgacccagatgtggccaagcaagaggctagacagcagaacctcaccattgggctgactatctttgctgtaggcagatacctggagaagtacctggagcgcttcctggagacggcggagcagcacttcatggcgggccagagcgtgatgtactacgtgttcaccgagcttccgggagcggtgccccgcgtggcgctgggcccgggacgccggctgcccgtggagcgcgtggcgcgcgagcggcgctggcaagacgtgtcgatggcgcgcatgcgcacgttgcacgcggcgctgggcgggctgccgggccgcgaggcgcacttcatgttctgcatggacgtggaccagcacttcagcggcacttttgggcccgaggcgctggccgagtcggtggcgcagctgcactcctggcactaccactggccgtcgtggctgctgcccttcgaacgcgacgcgcattcggccgccgcgatggcgtggggccagggcgacttctataaccacgcggcggtgttcgggggcagcgtggcggcgctgcgcgggctgacggcgcactgtgcggggggcctggactgggaccgcgcgcgcggcctggaggcgcgctggcacgacgagagccacctcaacaagttcttctggctgcacaagcccgccaaggtgctgtcgcccgagttctgctggagcccggacatcggcccgcgggccgagatccgccgcccgcgactgctgtgggcgcccaaggggtaccggctgctgcggaactag

SEQ ID NO: 106671 - DNA, 2020 bp, Homo sapiens
  Payload ID: 948
  Gene Symbol: A4GALT
  Gene Name: alpha 1,4-galactosyltransferase
  Uniprot ID: Q9NPC4
  ENST ID: ENST00000249005
  CDS Start-End: 190-1251
agatggatttgcagccgctgcaagtgtgtggaagggccgtgttcgtgttggcaaagaaggtcggctgctgagccagggcgtgtctcccggaggcctgtgggctgccaggatccccacctctctgcaatgggctgcccaggctgaccagccggttcctgctggaagctcctggtctgatctggggataccatgtccaagccccccgacctcctgctgcggctgctccggggcgccccaaggcagcgggtctgcaccctgttcatcatcggcttcaagttcacgtttttcgtctccatcatgatctactggcacgttgtgggagagcccaaggagaaagggcagctctataacctgccagcagagatcccctgccccaccttgacaccccccaccccaccctcccacggccccactccaggcaacatcttcttcctggagacttcagaccggaccaaccccaacttcctgttcatgtgctcggtggagtcggccgccagaactcaccccgaatcccacgtgctggtcctgatgaaagggcttccgggtggcaacgcctctctgccccggcacctgggcatctcacttctgagctgcttcccgaatgtccagatgctcccgctggacctgcgggagctgttccgggacacacccctggccgactggtacgcggccgtgcaggggcgctgggagccctacctgctgcccgtgctctccgacgcctccaggatcgcactcatgtggaagttcggcggcatctacctggacacggacttcattgttctcaagaacctgcggaacctgaccaacgtgctgggcacccagtcccgctacgtcctcaacggcgcgttcctggccttcgagcgccggcacgagttcatggcgctgtgcatgcgggacttcgtggaccactacaacggctggatctggggtcaccagggcccgcagctgctcacgcgggtcttcaagaagtggtgttccatccgcagcctggccgagagccgcgcctgccgcggcgtcaccaccctgccccctgaggccttctaccccatcccctggcaggactggaagaagtactttgaggacatcaaccccgaggagctgccgcggctgctcagtgccacctatgctgtccacgtgtggaacaagaagagccagggcacgcggttcgaggccacgtccagggcactgctggcccagctgcatgcccgctactgccccacgacgcacgaggccatgaaaatgtacttgtgaggggcccgccaggtcacctccccaacctgctcctgatggggcactgggccgcccttcccggggaggcaagattgagggcccgggagagggaggcccgagctgccaccgggcttaggcaggctgttgaggagctgtgggagcaggcccagtgggaggctgtggacaccccgaggacagtgtcctgtctcgaggcagggctgacacatggtgccatagccagcggagggcgctcagtgagtgccccgggccttctagacaacaggcaggaaggatgaacctcagggcacccccaggtggtgcggaaagccaggcagttgggacagaggtgcccacgagggcagaggccggtgctaaggggatggggaagaagggacaagattcccagagaggagaggaggctgttggtaggaaagtggcagggctgggggagacccagccccaagggtccggggcggaggatgctttgttcttttctggttttggttcctctttcgcggggggtgggggaggtcaacagggactgagtggggcagaggcccagaagtgccagcctggggagccgtttgggggcagccccttctgcccaccccatccttcttcctctccagagatgccaggggggcgtgtatgctctgccccttccctcagacaggggctgggtggggaggctctttaggctcaggagaagcattttaaagaaacccccaccctgccgcccgcattataaacacaggagaataatcaatagaataaaagtgaccgactgtca

SEQ ID NO: 106672 - DNA, 1935 bp, Homo sapiens
  Payload ID: 948
  Gene Symbol: A4GALT
  Gene Name: alpha 1,4-galactosyltransferase
  Uniprot ID: Q9NPC4
  ENST ID: ENST00000381278
  CDS Start-End: 106-1167
agatggatttgcagccgctgcaagtgtgtggaagggccgtgttcgtgttggcaaagaagaccagccggttcctgctggaagctcctggtctgatctggggataccatgtccaagccccccgacctcctgctgcggctgctccggggcgccccaaggcagcgggtctgcaccctgttcatcatcggcttcaagttcacgtttttcgtctccatcatgatctactggcacgttgtgggagagcccaaggagaaagggcagctctataacctgccagcagagatcccctgccccaccttgacaccccccaccccaccctcccacggccccactccaggcaacatcttcttcctggagacttcagaccggaccaaccccaacttcctgttcatgtgctcggtggagtcggccgccagaactcaccccgaatcccacgtgctggtcctgatgaaagggcttccgggtggcaacgcctctctgccccggcacctgggcatctcacttctgagctgcttcccgaatgtccagatgctcccgctggacctgcgggagctgttccgggacacacccctggccgactggtacgcggccgtgcaggggcgctgggagccctacctgctgcccgtgctctccgacgcctccaggatcgcactcatgtggaagttcggcggcatctacctggacacggacttcattgttctcaagaacctgcggaacctgaccaacgtgctgggcacccagtcccgctacgtcctcaacggcgcgttcctggccttcgagcgccggcacgagttcatggcgctgtgcatgcgggacttcgtggaccactacaacggctggatctggggtcaccagggcccgcagctgctcacgcgggtcttcaagaagtggtgttccatccgcagcctggccgagagccgcgcctgccgcggcgtcaccaccctgccccctgaggccttctaccccatcccctggcaggactggaagaagtactttgaggacatcaaccccgaggagctgccgcggctgctcagtgccacctatgctgtccacgtgtggaacaagaagagccagggcacgcggttcgaggccacgtccagggcactgctggcccagctgcatgcccgctactgccccacgacgcacgaggccatgaaaatgtacttgtgaggggcccgccaggtcacctccccaacctgctcctgatggggcactgggccgcccttcccggggaggcaagattgagggcccgggagagggaggcccgagctgccaccgggcttaggcaggctgttgaggagctgtgggagcaggcccagtgggaggctgtggacaccccgaggacagtgtcctgtctcgaggcagggctgacacatggtgccatagccagcggagggcgctcagtgagtgccccgggccttctagacaacaggcaggaaggatgaacctcagggcacccccaggtggtgcggaaagccaggcagttgggacagaggtgcccacgagggcagaggccggtgctaaggggatggggaagaagggacaagattcccagagaggagaggaggctgttggtaggaaagtggcagggctgggggagacccagccccaagggtccggggcggaggatgctttgttcttttctggttttggttcctctttcgcggggggtgggggaggtcaacagggactgagtggggcagaggcccagaagtgccagcctggggagccgtttgggggcagccccttctgcccaccccatccttcttcctctccagagatgccaggggggcgtgtatgctctgccccttccctcagacaggggctgggtggggaggctctttaggctcaggagaagcattttaaagaaacccccaccctgccgcccgcattataaacacaggagaataatcaatagaataaaagtgaccgactgtc

SEQ ID NO: 106673 - DNA, 2321 bp, Homo sapiens
  Payload ID: 948
  Gene Symbol: A4GALT
  Gene Name: alpha 1,4-galactosyltransferase
  Uniprot ID: Q9NPC4
  ENST ID: ENST00000401850
  CDS Start-End: 491-1552
tgcacttctgtgcctcaatttcctcatctgtagggtgggggtggtgattgccaccccatagggtggttataaggggccacacatgttcctatgtgtgagatgctgagaaagtcacctggcatggacaggatggacagccagtatttatcgaactatgaatgaatgaatgttaccctttagtgggttccagcgtcctatcctgtcggtgggaagactgaggctcagagagctccgtaacttgccccaggtcacacagccggttcaggcagagttggggtctcatgcctcccaggtgttcccacagtcttttccccaggagcagggtccaagcctgctgctcctccaaccacctgcgaggcacctgggcatgttcctggccaccaggaaagagaggtctaatggcagtagtaccagtcagcgtcatgtgcctggagcgagtgccctaccagccggttcctgctggaagctcctggtctgatctggggataccatgtccaagccccccgacctcctgctgcggctgctccggggcgccccaaggcagcgggtctgcaccctgttcatcatcggcttcaagttcacgtttttcgtctccatcatgatctactggcacgttgtgggagagcccaaggagaaagggcagctctataacctgccagcagagatcccctgccccaccttgacaccccccaccccaccctcccacggccccactccaggcaacatcttcttcctggagacttcagaccggaccaaccccaacttcctgttcatgtgctcggtggagtcggccgccagaactcaccccgaatcccacgtgctggtcctgatgaaagggcttccgggtggcaacgcctctctgccccggcacctgggcatctcacttctgagctgcttcccgaatgtccagatgctcccgctggacctgcgggagctgttccgggacacacccctggccgactggtacgcggccgtgcaggggcgctgggagccctacctgctgcccgtgctctccgacgcctccaggatcgcactcatgtggaagttcggcggcatctacctggacacggacttcattgttctcaagaacctgcggaacctgaccaacgtgctgggcacccagtcccgctacgtcctcaacggcgcgttcctggccttcgagcgccggcacgagttcatggcgctgtgcatgcgggacttcgtggaccactacaacggctggatctggggtcaccagggcccgcagctgctcacgcgggtcttcaagaagtggtgttccatccgcagcctggccgagagccgcgcctgccgcggcgtcaccaccctgccccctgaggccttctaccccatcccctggcaggactggaagaagtactttgaggacatcaaccccgaggagctgccgcggctgctcagtgccacctatgctgtccacgtgtggaacaagaagagccagggcacgcggttcgaggccacgtccagggcactgctggcccagctgcatgcccgctactgccccacgacgcacgaggccatgaaaatgtacttgtgaggggcccgccaggtcacctccccaacctgctcctgatggggcactgggccgcccttcccggggaggcaagattgagggcccgggagagggaggcccgagctgccaccgggcttaggcaggctgttgaggagctgtgggagcaggcccagtgggaggctgtggacaccccgaggacagtgtcctgtctcgaggcagggctgacacatggtgccatagccagcggagggcgctcagtgagtgccccgggccttctagacaacaggcaggaaggatgaacctcagggcacccccaggtggtgcggaaagccaggcagttgggacagaggtgcccacgagggcagaggccggtgctaaggggatggggaagaagggacaagattcccagagaggagaggaggctgttggtaggaaagtggcagggctgggggagacccagccccaagggtccggggcggaggatgctttgttcttttctggttttggttcctctttcgcggggggtgggggaggtcaacagggactgagtggggcagaggcccagaagtgccagcctggggagccgtttgggggcagccccttctgcccaccccatccttcttcctctccagagatgccaggggggcgtgtatgctctgccccttccctcagacaggggctgggtggggaggctctttaggctcaggagaagcattttaaagaaacccccaccctgccgcccgcattataaacacaggagaataatcaatagaataaaagtgaccgactgtca

SEQ ID NO: 106674 - DNA, 2841 bp, Homo sapiens
  Payload ID: 949
  Gene Symbol: AAGAB
  Gene Name: alpha- and gamma-adaptin binding protein
  Uniprot ID: Q6PD74
  ENST ID: ENST00000261880
  CDS Start-End: 106-1053
attccgagaacgccctctccggcctgtctccccctcgcgccggcggccgtggtgcagcccaaggcggaagcggctgcctgacggaaccggctcgcgagcgcagctatggctgctggcgtaccctgtgcgttagtcaccagctgctcctccgtcttctcaggagaccagctggtccaacatatccttggaacagaagatcttattgtggaagtgacttccaatgatgctgtgagattttatccctggaccattgataataaatactattcagcagacatcaatctatgtgtggtgccaaacaaatttcttgttactgcagagattgcagaatctgtccaagcatttgtggtttactttgacagcacacaaaaatcgggccttgatagtgtctcctcatggcttccactggcaaaagcatggttacctgaggtgatgatcttggtctgcgatagagtgtctgaagatggtataaaccgacaaaaagctcaagaatggtgcatcaaacatggctttgaattggtagaacttagtccagaggagttgcctgaggaggatgatgacttcccagaatctacaggagtaaagcgaattgtccaagccctgaatgccaatgtgtggtccaatgtagtgatgaagaatgataggaaccaaggctttagccttctcaactcattgactggaacaaaccatagcattgggtcagcagatccctgtcacccagagcaaccccatttgccagcagcagatagtactgaatccctctctgatcatcggggtggtgcatctaacacaacagatgcccaggttgatagcattgtggatcccatgttagatctggatattcaagaattagccagtcttaccactggaggaggagatgtggagaattttgaaagactcttttcaaagttaaaggaaatgaaagacaaggctgcgacgcttcctcatgagcaaagaaaagtgcatgcagaaaaggtggccaaagcattctggatggcaatcgggggagacagagatgaaattgaaggcctttcatctgatgaagagcactgaattattcatactagggtttgaccaacaaagatgctagctgtctctgagatacctctctactcagcccagtcatattttgccaaaattgcccttatcatgttggctgcctgacttgtttatagggtccccttaattttagtttttagtaggaggttaaggagaaatcttttttttcctcagtatattgtaagagagtgaggaatacagtgatagtaatgagtgaggatttcttaaatatactttttttttgttctaggaatgagggtaggataaatctcagaggtctgtgtgatttactcaagttgaagacaacctccaggccattcctggtcaaccttttaagtagcatttccagcattcacacttgatactgcacatcaggagttgtgtcacctttcctgggtgatttgggttttctccattcaaggagcttgtagctctgagctatgatgcttttattgggaggaaaggaggcagctgcagaattgatgtgagctatgtggggccgaagtctcagcccgcagctaagtctctacctaagaaaatgcctctgggcattcttttgaagtatagtgtctgagctcatgctagaaagaatcaaaaagccagtgtggatttttagactgtaataaatgaggcaaaggatttctattccagtgggaagaaaacctctctactgagttgtgggggatatgttgtatgttagagagaaccttaaggagtccttgtatgggccatggagacagtatgtgataacataccgtgattttcatgaagaaattcttctgtcttagagttctcccctgctgcttgagatgccagagctgtgttgttgcacacctgcaaaacaaggcacatttccccctttctctttaaagccaaagagagatcactgccaaagtgggagcactaaggggtgggtggggaagtgaaatgttaggcgatgaattcctgagcaccttgtttttcttccaaggttcgtagctcctctctgcccttccaagcctgtaacctcggaggactatcttttgttctttatcctttgtcttgtttgagtgggtcagccccagaggaactgataagcaaatggcaagtttttaaaggaagagtggaaagtactgcaaataaaaatccttatttgtttttgtagactttgtaatgcatatcattagccctcactgtgatcattactgctgtggctctgaactggcacatagtacagtggatggaaggtgcccgcacaccagctgagaactggttctggcctaggtgggctctagaaccatttacacagcatgaaagaaacaggttgggttaggagcagaaagaaataaggctcacacccctccagacactaccttataagcactgcagaacctgaaacagatggcagaaggaatggaatgctacaggggccagcaggagtgaccacagggaggggacagctcagtgactggagcattcaggaagaggctttccagggaacactggacattgcttagtgaccttttgttcctttttttttttttttcttttactgttctgaaagactttgagtctgtggttcaccaccagcccatcagtgtttctttgaggtgattgcattagggaagttggctctgggattgcaaaaaaaaaaaaaaggtggaacatgttttccttaaaagatggaaggttttagaaaatatactaggccatctggttagaaaaaacagaccagactagaaaaagctgtgaatttgattttgtagattaaacaaagccagatgattaaaatgtgatttattt

SEQ ID NO: 106675 - DNA, 1015 bp, Homo sapiens
  Payload ID: 949
  Gene Symbol: AAGAB
  Gene Name: alpha- and gamma-adaptin binding protein
  Uniprot ID: Q6PD74
  ENST ID: ENST00000542650
  CDS Start-End: 314-934
aacggttttagagttttcccagaggcagaaagtcctgcttctggggcgtaacctacaggatatccttggaacagaagatcttattgtggaagtgacttccaatgatgctgtgagattttatccctggaccattgataataaatactattcagcagacatcaatctatgtgtggtgccaaacaaatttcttgttactgcagagattgcagaatctgtccaagcatttgtggtttactttgacagcacacaaaaatcgggccttgatagtgtctcctcatggcttccactggcaaaagcatggttacctgaggtgatgatcttggtctgcgatagagtgtctgaagatggtataaaccgacaaaaagctcaagaatggtgcatcaaacatggctttgaattggtagaacttagtccagaggagttgcctgaggaggatgatgacttcccagaatctacaggagtaaagcgaattgtccaagccctgaatgccaatgtgtggtccaatgtagtgatgaagaatgataggaaccaaggctttagccttctcaactcattgactggaacaaaccatagcattgggtcagcagatccctgtcacccagagcaaccccatttgccagcagcagatagtactgaatccctctctgatcatcggggtggtgcatctaacacaacagatgcccaggttgatagcattgtggatcccatgttagatctggatattcaagaattagccagtcttaccactggaggaggagatgtggagaattttgaaagactcttttcaaagttaaaggaaatgaaagacaaggctgcgacgcttcctcatgagcaaagaaaagtgcatgcagaaaaggtggccaaagcattctggatggcaatcgggggagacagagatgaaattgaaggcctttcatctgatgaagagcactgaattattcatactagggtttgaccaacaaagatgctagctgtctctgagatacctctctactcagcccagtcatattttgcc

SEQ ID NO: 106676 - DNA, 563 bp, Homo sapiens
  Payload ID: 949
  Gene Symbol: AAGAB
  Gene Name: alpha- and gamma-adaptin binding protein
  ENST ID: ENST00000560362
  CDS Start-End: 390-563
aatccagttactcttccctcagcaagtctatgctactccagtgactcttacctcagcaagtccatactactccagtgatcgacctgtcatataaactgcaacaaatactgcataaacttgcaccagaagactgggatatccttggaacagaagatcttattgtggaagtgacttccaatgatgctgtgagattttatccctggaccattgataataaatactattcagcagacatcaatctatgtgtggtgccaaacaaatttcttgttactgcagagattgcagaatctgtccaagcatttgtggtttactttgacagcacacaaaaatcgggccttgatagtgtctcctcatggcttccactggcaaaagcatggttacctgaggtgatgatcttggtctgcgatagagtgtctgaagatggtataaaccgacaaaaagctcaagaatggtgcatcaaacatggctttgaattggtagaacttagtccagaggagttgcctgaggaggatgatgacttcccagaatctacaggagtaaagcgaattgtccaagccctgaat

SEQ ID NO: 106677 - DNA, 2251 bp, Homo sapiens
  Payload ID: 949
  Gene Symbol: AAGAB
  Gene Name: alpha- and gamma-adaptin binding protein
  Uniprot ID: Q6PD74
  ENST ID: ENST00000561452
  CDS Start-End: 517-1137
aggcggaagcggctgcctgacggaaccggctcgcgagcgcagctatggctgctggcgtaccctgtgcgttagtcaccagctgctcctccgtcttctcaggagaccagctggtccaacgtgagtagataggcgcctgggccgacctccaaggcccctgagcctcagcgggcgacggacccagcaccacggcctctctgggccttgtccccgcagcgggccctgcgttcttcctccagtcagtggaggcgcccagtctccccagatatccttggaacagaagatcttattgtggaagtgacttccaatgatgctgtgagattttatccctggaccattgataataaatactattcagcagacatcaatctatgtgtggtgccaaacaaatttcttgttactgcagagattgcagaatctgtccaagcatttgtggtttactttgacagcacacaaaaatcgggccttgatagtgtctcctcatggcttccactggcaaaagcatggttacctgaggtgatgatcttggtctgcgatagagtgtctgaagatggtataaaccgacaaaaagctcaagaatggtgcatcaaacatggctttgaattggtagaacttagtccagaggagttgcctgaggaggatgatgacttcccagaatctacaggagtaaagcgaattgtccaagccctgaatgccaatgtgtggtccaatgtagtgatgaagaatgataggaaccaaggctttagccttctcaactcattgactggaacaaaccatagcattgggtcagcagatccctgtcacccagagcaaccccatttgccagcagcagatagtactgaatccctctctgatcatcggggtggtgcatctaacacaacagatgcccaggttgatagcattgtggatcccatgttagatctggatattcaagaattagccagtcttaccactggaggaggagatgtggagaattttgaaagactcttttcaaagttaaaggaaatgaaagacaaggctgcgacgcttcctcatgagcaaagaaaagtgcatgcagaaaaggtggccaaagcattctggatggcaatcgggggagacagagatgaaattgaaggcctttcatctgatgaagagcactgaattattcatactagggtttgaccaacaaagatgctagctgtctctgagatacctctctactcagcccagtcatattttgccaaaattgcccttatcatgttggctgcctgacttgtttatagggtccccttaattttagtttttagtaggaggttaaggagaaatcttttttttcctcagtatattgtaagagagtgaggaatacagtgatagtaatgagtgaggatttcttaaatatactttttttttgttctaggaatgagggtaggataaatctcagaggtctgtgtgatttactcaagttgaagacaacctccaggccattcctggtcaaccttttaagtagcatttccagcattcacacttgatactgcacatcaggagttgtgtcacctttcctgggtgatttgggttttctccattcaaggagcttgtagctctgagctatgatgcttttattgggaggaaaggaggcagctgcagaattgatgtgagctatgtggggccgaagtctcagcccgcagctaagtctctacctaagaaaatgcctctgggcattcttttgaagtatagtgtctgagctcatgctagaaagaatcaaaaagccagtgtggatttttagactgtaataaatgaggcaaaggatttctattccagtgggaagaaaacctctctactgagttgtgggggatatgttgtatgttagagagaaccttaaggagtccttgtatgggccatggagacagtatgtgataacataccgtgattttcatgaagaaattcttctgtcttagagttctcccctgctgcttgagatgccagagctgtgttgttgcacacctgcaaaacaaggcacatttccccctttctctttaaagccaaagagagatcactgccaaagtgggagcactaaggggtgggtggggaagtgaaatgttaggcgatgaattcctgagcaccttgtttttcttccaaggttcgtagctcctctctgcccttccaagcctgtaacctcggaggactatcttttgttctttatcctttgtcttgtttgagtgggtcagccccagaggaactgataagcaaatggcaagtttttaaaggaagagtggaa

SEQ ID NO: 106678 - DNA, 524 bp, Homo sapiens
  Payload ID: 950
  Gene Symbol: AHSP
  Gene Name: alpha hemoglobin stabilizing protein
  Uniprot ID: Q9NZD4
  ENST ID: ENST00000302312
  CDS Start-End: 104-412
tgacacttgactccttgcctacatctatagcttggcacagagagattcacgcaccctcaagagtgtgggtgagacatatacagcctgttagacctgaaggcagatggctcttcttaaggccaataaggatctcatttccgcaggattgaaggagttcagcgttctgctgaatcagcaggtcttcaatgatcctctcgtctctgaagaagacatggtgactgtggtggaggactggatgaacttctacatcaactattacaggcagcaggtgacaggggagccccaagagcgagacaaggctctgcaggagcttcggcaagagctgaacactctggccaaccctttcctggccaagtacagggacttcctgaagtctcatgagctcccgagtcacccaccgccctcctcctagctcagggacccagcccctcctctctgagaaactctgaccttcatgtccttaggctgtgctcctgccactctaccctgacacctcaataaagaccagtgctggttttgttgga

SEQ ID NO: 106679 - DNA, 213 bp, Homo sapiens
  Payload ID: 950
  Gene Symbol: AHSP
  Gene Name: alpha hemoglobin stabilizing protein
  ENST ID: ENST00000564707
  CDS Start-End: 43-213
ggaaaatcgtgacctcagagcagggcaggatgtgaaaggcagatggctcttcttaaggccaataaggatctcatttccgcaggattgaaggagttcagcgttctgctgaatcagcaggtcttcaatgatcctctcgtctctgaagaagacatggtgactgtggtggaggactggatgaacttctacatcaactattacaggcagcaggtgaca

SEQ ID NO: 106680 - DNA, 11220 bp, Homo sapiens
  Payload ID: 951
  Gene Symbol: ATRX
  Gene Name: alpha thalassemia/mental retardation syndrome X-linked
  Uniprot ID: P46100
  ENST ID: ENST00000373344
  CDS Start-End: 269-7747
aatggctgacggaaagagaaagagggaggacgcgccaattctcctgcctgagcctcggcccaacaaaatggcggcggcagcggtgtcgctttgtttccgcggctcctgcggcggtggcagtggtagcggcctttgagctgtggggaggttccagcagcagctacagtgacgactaagactccagtgcatttctatcgtaaccgggcgcgggggagcgcagatcggcgcccagcaatcacagaagccgacaaggcgttcaagcgaaaacatgaccgctgagcccatgagtgaaagcaagttgaatacattggtgcagaagcttcatgacttccttgcacactcatcagaagaatctgaagaaacaagttctcctccacgacttgcaatgaatcaaaacacagataaaatcagtggttctggaagtaactctgatatgatggaaaacagcaaggaagagggaactagctcttcagaaaaatccaagtcttcaggatcgtcacgatcaaagaggaaaccttcaattgtaacaaagtatgtagaatcagatgatgaaaaacctttggatgatgaaactgtaaatgaagatgcgtctaatgaaaattcagaaaatgatattactatgcagagcttgccaaaaggtacagtgattgtacagccagagccagtgctgaatgaagacaaagatgattttaaagggcctgaatttagaagcagaagtaaaatgaaaactgaaaatctcaaaaaacgcggagaagatgggcttcatgggattgtgagctgcactgcttgtggacaacaggtcaatcattttcaaaaagattccatttatagacacccttcattgcaagttcttatttgtaagaattgctttaagtattacatgagtgatgatattagccgtgactcagatggaatggatgaacaatgtaggtggtgtgcggaaggtggaaacttgatttgttgtgacttttgccataatgctttctgcaagaaatgcattctacgcaaccttggtcgaaaggagttgtccacaataatggatgaaaacaaccaatggtattgctacatttgtcacccagagcctttgttggacttggtcactgcatgtaacagcgtatttgagaatttagaacagttgttgcagcaaaataagaagaagataaaagttgacagtgaaaagagtaataaagtatatgaacatacatccagattttctccaaagaagactagttcaaattgtaatggagaagaaaagaaattagatgattcctgttctggctctgtaacctactcttattccgcactaattgtgcccaaagagatgattaagaaggcaaaaaaactgattgagaccacagccaacatgaactccagttatgttaaatttttaaagcaggcaacagataattcagaaatcagttctgctacaaaattacgtcagcttaaggcttttaagtctgtgttggctgatattaagaaggctcatcttgcattggaagaagacttaaattccgagtttcgagcgatggatgctgtaaacaaagagaaaaataccaaagagcataaagtcatagatgctaagtttgaaacaaaagcacgaaaaggagaaaaaccttgtgctttggaaaagaaggatatttcaaagtcagaagctaaactttcaagaaaacaggtagatagtgagcacatgcatcagaatgttccaacagaggaacaaagaacaaataaaagtaccggtggtgaacataagaaatctgatagaaaagaagaacctcaatatgaacctgccaacacttctgaagatttagacatggatattgtgtctgttccttcctcagttccagaagacatttttgagaatcttgagactgctatggaagttcagagttcagttgatcatcaaggggatggcagcagtggaactgaacaagaagtggagagttcatctgtaaaattaaatatttcttcaaaagacaacagaggaggtattaaatcaaaaactacagctaaagtaacaaaagaattatatgttaaactcactcctgtttccctttctaattccccaattaaaggtgctgattgtcaggaagttccacaagataaagatggctataaaagttgtggtctgaaccccaagttagagaaatgtggacttggacaggaaaacagtgataatgagcatttggttgaaaatgaagtttcattacttttagaggaatctgatcttcgaagatccccacgtgtaaagactacacccttgaggcgaccgacagaaactaaccctgtaacatctaattcagatgaagaatgtaatgaaacagttaaggagaaacaaaaactatcagttccagtgagaaaaaaggataagcgtaattcttctgacagtgctatagataatcctaagcctaataaattgccaaaatctaagcaatcagagactgtggatcaaaattcagattctgatgaaatgctagcaatcctcaaagaggtgagcaggatgagtcacagttcttcttcagatactgatattaatgaaattcatacaaaccataagactttgtatgatttaaagactcaggcggggaaagatgataaaggaaaaaggaaacgaaaaagttctacatctggctcagattttgatactaaaaagggcaaatcagctaagagctctataatttctaaaaagaaacgacaaacccagtctgagtcttctaattatgactcagaattagaaaaagagataaagagcatgagtaaaattggtgctgccagaaccaccaaaaaaagaattccaaatacaaaagattttgactcttctgaagatgagaaacacagcaaaaaaggaatggataatcaagggcacaaaaatttgaagacctcacaagaaggatcatctgatgatgctgaaagaaaacaagagagagagactttctcttcagcagaaggcacagttgataaagacacgaccatcatggaattaagagatcgacttcctaagaagcagcaagcaagtgcttccactgatggtgtcgataagctttctgggaaagaggagagttttacttctttggaagttagaaaagttgctgaaactaaagaaaagagcaagcatctcaaaaccaaaacatgtaaaaaagtacaggatggcttatctgatattgcagagaaattcctaaagaaagaccagagcgatgaaacttctgaagatgataaaaagcagagcaaaaagggaactgaagaaaaaaagaaaccttcagactttaagaaaaaagtaattaaaatggaacaacagtatgaatcttcatctgatggcactgaaaagttacctgagcgagaagaaatttgtcattttcctaagggcataaaacaaattaagaatggaacaactgatggagaaaagaaaagtaaaaaaataagagataaaacttctaaaaagaaggatgaattatctgattatgctgagaagtcaacagggaaaggagatagttgtgactcttcagaggataaaaagagtaagaatggagcatatggtagagagaagaaaaggtgcaagttgcttggaaagagttcaaggaagagacaagattgttcatcatctgatactgagaaatattccatgaaagaagatggttgtaactcttctgataagagactgaaaagaatagaattgagggaaagaagaaatttaagttcaaagagaaatactaaggaaatacaaagtggctcatcatcatctgatgctgaggaaagttctgaagataataaaaagaagaagcaaagaacttcatctaaaaagaaggcagtcattgtcaaggagaaaaagagaaactccctaagaacaagcactaaaaggaagcaagctgacattacatcctcatcttcttctgatatagaagatgatgatcagaattctataggtgagggaagcagcgatgaacagaaaattaagcctgtgactgaaaatttagtgctgtcttcacatactggattttgccaatcttcaggagatgaagccttatctaaatcagtgcctgtcacagtggatgatgatgatgacgacaatgatcctgagaatagaattgccaagaagatgcttttagaagaaattaaagccaatctttcctctgatgaggatggatcttcagatgatgagccagaagaagggaaaaaaagaactggaaaacaaaatgaagaaaacccaggagatgaggaagcaaaaaatcaagtcaattctgaatcagattcagattctgaagaatctaagaagccaagatacagacataggcttttgcggcacaaattgactgtgagtgacggagaatctggagaagaaaaaaagacaaagcctaaagagcataaagaagtcaaaggcagaaacagaagaaaggtgagcagtgaagattcagaagattctgattttcaggaatcaggagttagtgaagaagttagtgaatccgaagatgaacagcggcccagaacaaggtctgcaaagaaagcagagttggaagaaaatcagcggagctataaacagaaaaagaaaaggcgacgtattaaggttcaagaagattcatccagtgaaaacaagagtaattctgaggaagaagaggaggaaaaagaagaggaggaggaagaggaggaggaggaggaagaggaggaggaagatgaaaatgatgattccaagtctcctggaaaaggcagaaagaaaattcggaagattcttaaagatgataaactgagaacagaaacacaaaatgctcttaaggaagaggaagagagacgaaaacgtattgctgagagggagcgtgagcgagaaaaattgagagaggtgatagaaattgaagatgcttcacccaccaagtgtccaataacaaccaagttggttttagatgaagatgaagaaaccaaagaacctttagtgcaggttcatagaaatatggttatcaaattgaaaccccatcaagtagatggtgttcagtttatgtgggattgctgctgtgagtctgtgaaaaaaacaaagaaatctccaggttcaggatgcattcttgcccactgtatgggccttggtaagactttacaggtggtaagttttcttcatacagttcttttgtgtgacaaactggatttcagcacggcgttagtggtttgtcctcttaatactgctttgaattggatgaatgaatttgagaagtggcaagagggattaaaagatgatgagaagcttgaggtttctgaattagcaactgtgaaacgtcctcaggagagaagctacatgctgcagaggtggcaagaagatggtggtgttatgatcataggctatgagatgtatagaaatcttgctcaaggaaggaatgtgaagagtcggaaacttaaagaaatatttaacaaagctttggttgatccaggccctgattttgttgtttgtgatgaaggccatattctaaaaaatgaagcatctgctgtttctaaagctatgaattctatacgatcaaggaggaggattattttaacaggaacaccacttcaaaataacctaattgagtatcattgtatggttaattttatcaaggaaaatttacttggatccattaaggagttcaggaatagatttataaatccaattcaaaatggtcagtgtgcagattctaccatggtagatgtcagagtgatgaaaaaacgtgctcacattctctatgagatgttagctggatgtgttcagaggaaagattatacagcattaacaaaattcttgcctccaaaacacgaatatgtgttagctgtgagaatgacttctattcagtgcaagctctatcagtactacttagatcacttaacaggtgtgggcaataatagtgaaggtggaagaggaaaggcaggtgcaaagcttttccaagattttcagatgttaagtagaatatggactcatccttggtgtttgcagctagactacattagcaaagaaaataagggttattttgatgaagacagtatggatgaatttatagcctcagattctgatgaaacctccatgagtttaagctccgatgattatacaaaaaagaagaaaaaagggaaaaaggggaaaaaagatagtagctcaagtggaagtggcagtgacaatgatgttgaagtgattaaggtctggaattcaagatctcggggaggtggtgaaggaaatgtggatgaaacaggaaacaatccttctgtttctttaaaactggaagaaagtaaagctacttcttcttctaatccaagcagcccagctccagactggtacaaagattttgttacagatgctgatgctgaggttttagagcattctgggaaaatggtacttctctttgaaattcttcgaatggcagaggaaattggggataaagtccttgttttcagccagtccctcatatctctggacttgattgaagattttcttgaattagctagtagggagaagacagaagataaagataaaccccttatttataaaggtgaggggaagtggcttcgaaacattgactattaccgtttagatggttccactactgcacagtcaaggaagaagtgggctgaagaatttaatgatgaaactaatgtgagaggacgattatttatcatttctactaaagcaggatctctaggaattaatctggtagctgctaatcgagtaattatattcgacgcttcttggaatccatcttatgacatccagagtatattcagagtttatcgctttggacaaactaagcctgtttatgtatataggttcttagctcagggaaccatggaagataagatttatgatcggcaagtaactaagcagtcactgtcttttcgagttgttgatcagcagcaggtggagcgtcattttactatgaatgagcttactgaactttatacttttgagccagacttattagatgaccctaattcagaaaagaagaagaagagggatactcccatgctgccaaaggataccatacttgcagagctccttcagatacataaagaacacattgtaggataccatgaacatgattctcttttggaccacaaagaagaagaagagttgactgaagaagaaagaaaagcagcttgggctgagtatgaagcagagaagaagggactgaccatgcgtttcaacataccaactgggaccaatttaccccctgtcagtttcaactctcaaactccttatattcctttcaatttgggagccctgtcagcaatgagtaatcaacagctggaggacctcattaatcaaggaagagaaaaagttgtagaagcaacaaacagtgtgacagcagtgaggattcaacctcttgaggatataatttcagctgtatggaaggagaacatgaatctctcagaggcccaagtacaggcgttagcattaagtagacaagccagccaggagcttgatgttaaacgaagagaagcaatctacaatgatgtattgacaaaacaacagatgttaatcagctgtgttcagcgaatacttatgaacagaaggctccagcagcagtacaatcagcagcaacagcaacaaatgacttatcaacaagcaacactgggtcacctcatgatgccaaagcccccaaatttgatcatgaatccttctaactaccagcagattgatatgagaggaatgtatcagccagtggctggtggtatgcagccaccaccattacagcgtgcaccacccccaatgagaagcaaaaatccaggaccttcccaagggaaatcaatgtgattttgcactaaaagcttaatggattgttaaaatcatagaaagatcttttatttttttaggaatcaatgacttaacagaactcaactgtataaatagtttggtccccttaaatgccaatcttccatattagttttactttttttttttttaaatagggcataccatttcttcctgacatttgtcagtgatgttgcctagaatcttcttacacacgctgagtacagaagatatttcaaattgttttcagtgaaaacaagtccttccataatagtaacaactccacagatttcctctctaaatttttatgcctgcttttagcaaccataaaattgtcataaaattaataaatttaggaaagaataaagatttatatattcattctttacatataaaaacacacagctgagttcttagagttgattcctcaagttatgaaatacttttgtacttaatccatttcttgattaaagtgattgaaatggttttaatgttcttttgactgaagtctgaaactgggctcctgctttattgtctctgtgactgaaagttagaaactgagggttatctttgacacagaattgtgtgcaatattcttaaatactactgctctaaaagttggagaagtcttgcagttatcttagcattgtataaacagccttaagtatagcctaagaagagaattcctttttcttctttagtccttctgccattttttattttcagttatatgtgctgaaataattactggtaaaatttcagggttgtggattatcttccacacatgaattttctctctcctggcacgaatataaagcacatctcttaactgcatggtgccagtgctaatgcttcatcctgttgctggcagtgggatgtggacttagaaaatcaagttctagcattttagtaggttaacactgaagttgtggttgttaggttcacaccctgttttataaacaacatcaaaatggcagaaccattgctgactttaggttcacatgaggaatgtacttttaacaattcccagtactatcagtattgtgaaataattcctctgaaagataagaatcactggcttctatgcgcttcttttctctcatcatcatgttcttttaccccagtttccttacatttttttaaattgtttcagagtttgttttttttttagtttagattgtgaggcaattattaaatcaaaattaattcatccaatacccctttactagaagttttactagaaaatgtattacattttattttttcttaatccagttctgcaaaaatgacctataaatttattcatgtacaattttggttacttgaattgttaaagaaaacattgtttttgactatgggagtcaactcaacatggcagaaccatttttgagatgatgatacaacaggtagtgaaacagcttaagaattccaaaaaaaaaaaaaaaaaaaaaaaaaagaaaactgggtttgggctttgctttaggtatcactggattagaatgagtttaacattagctaaaactgctttgagttgtttggatgattaagagattgccatttttatcttggaagaactagtggtaaaacatccaagagcactaggattgtgatacagaatttgtgaggtttggtggatccacgcccctctcccccactttcccatgatgaaatatcactaataaatcctgtatatttagatattatgctagccatgtaatcagatttatttaattgggtggggcaggtgtgtatttactttagaaaaaatgaaaaagacaagatttatgagaaatatttgaaggcagtacactctggccaactgttaccagttggtatttctacaagttcagaatattttaaacctgatttactagacctgggaattttcaacatggtctaattatttactcaaagacatagatgtgaaaattttaggcaaccttctaaatctttttcaccatggatgaaactataacttaaagaataatacttagaagggttaattggaaatcagagtttgaaataaaacttggaccactttgtatacactcttctcacttgacattttagctatataatatgtactttgagtataacatcaagctttaacaaatatttaaagacaaaaaaatcacgtcagtaaaatactaaaaggctcatttttatatttgttttagatgttttaaatagttgcaatggattaaaaatgatgatttaaaatgttgcttgtaatacagttttgcctgctaaattctccacattttgtaacctgttttatttctttgggtgtaaagcgtttttgcttagtattgtgatattgtatatgttttgtcccagttgtatagtaatgtttcagtccatcatccagctttggctgctgaaatcatacagctgtgaagacttgcctttgtttctgttagactgcttttcagttctgtattgagtatcttaagtactgtagaaaagatgtcacttcttcctttaaggctgttttgtaatatatataaggactggaattgtgtttttaaagaaaagcattcaagtatgacaatatactatctgtgttttcaccattcaaagtgctgtttagtagttgaaacttaaactatttaatgtcatttaataaagtgaccaaaatgtgttgtgctctttattgtattttcacagctttgaaaatctgtgcacatactgtttcatagaaaatgtatagcttttgttgtcctatataatggtggttcttttgcacatttagttatttaatattgagaggtcacgaagtttggttattgaatctgttatatactaaattctgtaaagggagatctctcatctcaaaaagaatttacataccaggaagtccatgtgtgtttgtgttagttttggatgtctttgtgtaatccagccccatttcctgtttcccaacagctgtaacactcattttaagtcaagcagggctaccaacccacacttgatagaaaagctgcttaccattcagaagcttccttattacctggcctccaaatgagctgaatattttgtagccttcccttagctatgttcattttccctccattatcataaaatcagatcgatatttatgtgccccaaacaaaactttaagagcagttacattctgtcccagtagcccttgtttcctttgagagtagcatgttgtgaggctatagagacttattctaccagtaaaacaggtcaatccttttacatgtttattatactaaaaattatgttcagggtatttactactttatttcaccagactcagtctcaagtgacttggctatctccaaatcagatctacccttagagaataaacatttttctaccgttattttttttcaagtctataatctgagccagtcccaaaggagtgatcaagtttcagaaatgctttcatcttcacaacattttatatatactattatatggggtgaataaagttttaaatccgaaatata

SEQ ID NO: 106681 - DNA, 10218 bp, Homo sapiens
  Payload ID: 951
  Gene Symbol: ATRX
  Gene Name: alpha thalassemia/mental retardation syndrome X-linked
  Uniprot ID: P46100
  ENST ID: ENST00000395603
  CDS Start-End: 216-7580
ctcggcccaacaaaatggcggcggcagcggtgtcgctttgtttccgcggctcctgcggcggtggcagtggtagcggcctttgagctgtggggaggttccagcagcagctacagtgacgactaagactccagtgcatttctatcgtaaccgggcgcgggggagcgcagatcggcgcccagcaatcacagaagccgacaaggcgttcaagcgaaaacatgaccgctgagcccatgagtgaaagcaagttgaatacattggtgcagaagcttcatgacttccttgcacactcatcagaagaatctgaagaaacaagttctcctccacgacttgcaatgaatcaaaacacagataaaatcagtggttctggaagtaactctgatatgatggaaaacagcaaggaagagggaactagctcttcagaaaaatccaagtcttcaggatcgtcacgatcaaagaggaaaccttcaattgtaacaaagtatgtagaatcagatgatgaaaaacctttggatgatgaaactgtaaatgaagatgcgtctaatgaaaattcagaaaatgatattactatgcagagcttgccaaaagaagatgggcttcatgggattgtgagctgcactgcttgtggacaacaggtcaatcattttcaaaaagattccatttatagacacccttcattgcaagttcttatttgtaagaattgctttaagtattacatgagtgatgatattagccgtgactcagatggaatggatgaacaatgtaggtggtgtgcggaaggtggaaacttgatttgttgtgacttttgccataatgctttctgcaagaaatgcattctacgcaaccttggtcgaaaggagttgtccacaataatggatgaaaacaaccaatggtattgctacatttgtcacccagagcctttgttggacttggtcactgcatgtaacagcgtatttgagaatttagaacagttgttgcagcaaaataagaagaagataaaagttgacagtgaaaagagtaataaagtatatgaacatacatccagattttctccaaagaagactagttcaaattgtaatggagaagaaaagaaattagatgattcctgttctggctctgtaacctactcttattccgcactaattgtgcccaaagagatgattaagaaggcaaaaaaactgattgagaccacagccaacatgaactccagttatgttaaatttttaaagcaggcaacagataattcagaaatcagttctgctacaaaattacgtcagcttaaggcttttaagtctgtgttggctgatattaagaaggctcatcttgcattggaagaagacttaaattccgagtttcgagcgatggatgctgtaaacaaagagaaaaataccaaagagcataaagtcatagatgctaagtttgaaacaaaagcacgaaaaggagaaaaaccttgtgctttggaaaagaaggatatttcaaagtcagaagctaaactttcaagaaaacaggtagatagtgagcacatgcatcagaatgttccaacagaggaacaaagaacaaataaaagtaccggtggtgaacataagaaatctgatagaaaagaagaacctcaatatgaacctgccaacacttctgaagatttagacatggatattgtgtctgttccttcctcagttccagaagacatttttgagaatcttgagactgctatggaagttcagagttcagttgatcatcaaggggatggcagcagtggaactgaacaagaagtggagagttcatctgtaaaattaaatatttcttcaaaagacaacagaggaggtattaaatcaaaaactacagctaaagtaacaaaagaattatatgttaaactcactcctgtttccctttctaattccccaattaaaggtgctgattgtcaggaagttccacaagataaagatggctataaaagttgtggtctgaaccccaagttagagaaatgtggacttggacaggaaaacagtgataatgagcatttggttgaaaatgaagtttcattacttttagaggaatctgatcttcgaagatccccacgtgtaaagactacacccttgaggcgaccgacagaaactaaccctgtaacatctaattcagatgaagaatgtaatgaaacagttaaggagaaacaaaaactatcagttccagtgagaaaaaaggataagcgtaattcttctgacagtgctatagataatcctaagcctaataaattgccaaaatctaagcaatcagagactgtggatcaaaattcagattctgatgaaatgctagcaatcctcaaagaggtgagcaggatgagtcacagttcttcttcagatactgatattaatgaaattcatacaaaccataagactttgtatgatttaaagactcaggcggggaaagatgataaaggaaaaaggaaacgaaaaagttctacatctggctcagattttgatactaaaaagggcaaatcagctaagagctctataatttctaaaaagaaacgacaaacccagtctgagtcttctaattatgactcagaattagaaaaagagataaagagcatgagtaaaattggtgctgccagaaccaccaaaaaaagaattccaaatacaaaagattttgactcttctgaagatgagaaacacagcaaaaaaggaatggataatcaagggcacaaaaatttgaagacctcacaagaaggatcatctgatgatgctgaaagaaaacaagagagagagactttctcttcagcagaaggcacagttgataaagacacgaccatcatggaattaagagatcgacttcctaagaagcagcaagcaagtgcttccactgatggtgtcgataagctttctgggaaagaggagagttttacttctttggaagttagaaaagttgctgaaactaaagaaaagagcaagcatctcaaaaccaaaacatgtaaaaaagtacaggatggcttatctgatattgcagagaaattcctaaagaaagaccagagcgatgaaacttctgaagatgataaaaagcagagcaaaaagggaactgaagaaaaaaagaaaccttcagactttaagaaaaaagtaattaaaatggaacaacagtatgaatcttcatctgatggcactgaaaagttacctgagcgagaagaaatttgtcattttcctaagggcataaaacaaattaagaatggaacaactgatggagaaaagaaaagtaaaaaaataagagataaaacttctaaaaagaaggatgaattatctgattatgctgagaagtcaacagggaaaggagatagttgtgactcttcagaggataaaaagagtaagaatggagcatatggtagagagaagaaaaggtgcaagttgcttggaaagagttcaaggaagagacaagattgttcatcatctgatactgagaaatattccatgaaagaagatggttgtaactcttctgataagagactgaaaagaatagaattgagggaaagaagaaatttaagttcaaagagaaatactaaggaaatacaaagtggctcatcatcatctgatgctgaggaaagttctgaagataataaaaagaagaagcaaagaacttcatctaaaaagaaggcagtcattgtcaaggagaaaaagagaaactccctaagaacaagcactaaaaggaagcaagctgacattacatcctcatcttcttctgatatagaagatgatgatcagaattctataggtgagggaagcagcgatgaacagaaaattaagcctgtgactgaaaatttagtgctgtcttcacatactggattttgccaatcttcaggagatgaagccttatctaaatcagtgcctgtcacagtggatgatgatgatgacgacaatgatcctgagaatagaattgccaagaagatgcttttagaagaaattaaagccaatctttcctctgatgaggatggatcttcagatgatgagccagaagaagggaaaaaaagaactggaaaacaaaatgaagaaaacccaggagatgaggaagcaaaaaatcaagtcaattctgaatcagattcagattctgaagaatctaagaagccaagatacagacataggcttttgcggcacaaattgactgtgagtgacggagaatctggagaagaaaaaaagacaaagcctaaagagcataaagaagtcaaaggcagaaacagaagaaaggtgagcagtgaagattcagaagattctgattttcaggaatcaggagttagtgaagaagttagtgaatccgaagatgaacagcggcccagaacaaggtctgcaaagaaagcagagttggaagaaaatcagcggagctataaacagaaaaagaaaaggcgacgtattaaggttcaagaagattcatccagtgaaaacaagagtaattctgaggaagaagaggaggaaaaagaagaggaggaggaagaggaggaggaggaggaagaggaggaggaagatgaaaatgatgattccaagtctcctggaaaaggcagaaagaaaattcggaagattcttaaagatgataaactgagaacagaaacacaaaatgctcttaaggaagaggaagagagacgaaaacgtattgctgagagggagcgtgagcgagaaaaattgagagaggtgatagaaattgaagatgcttcacccaccaagtgtccaataacaaccaagttggttttagatgaagatgaagaaaccaaagaacctttagtgcaggttcatagaaatatggttatcaaattgaaaccccatcaagtagatggtgttcagtttatgtgggattgctgctgtgagtctgtgaaaaaaacaaagaaatctccaggttcaggatgcattcttgcccactgtatgggccttggtaagactttacaggtggtaagttttcttcatacagttcttttgtgtgacaaactggatttcagcacggcgttagtggtttgtcctcttaatactgctttgaattggatgaatgaatttgagaagtggcaagagggattaaaagatgatgagaagcttgaggtttctgaattagcaactgtgaaacgtcctcaggagagaagctacatgctgcagaggtggcaagaagatggtggtgttatgatcataggctatgagatgtatagaaatcttgctcaaggaaggaatgtgaagagtcggaaacttaaagaaatatttaacaaagctttggttgatccaggccctgattttgttgtttgtgatgaaggccatattctaaaaaatgaagcatctgctgtttctaaagctatgaattctatacgatcaaggaggaggattattttaacaggaacaccacttcaaaataacctaattgagtatcattgtatggttaattttatcaaggaaaatttacttggatccattaaggagttcaggaatagatttataaatccaattcaaaatggtcagtgtgcagattctaccatggtagatgtcagagtgatgaaaaaacgtgctcacattctctatgagatgttagctggatgtgttcagaggaaagattatacagcattaacaaaattcttgcctccaaaacacgaatatgtgttagctgtgagaatgacttctattcagtgcaagctctatcagtactacttagatcacttaacaggtgtgggcaataatagtgaaggtggaagaggaaaggcaggtgcaaagcttttccaagattttcagatgttaagtagaatatggactcatccttggtgtttgcagctagactacattagcaaagaaaataagggttattttgatgaagacagtatggatgaatttatagcctcagattctgatgaaacctccatgagtttaagctccgatgattatacaaaaaagaagaaaaaagggaaaaaggggaaaaaagatagtagctcaagtggaagtggcagtgacaatgatgttgaagtgattaaggtctggaattcaagatctcggggaggtggtgaaggaaatgtggatgaaacaggaaacaatccttctgtttctttaaaactggaagaaagtaaagctacttcttcttctaatccaagcagcccagctccagactggtacaaagattttgttacagatgctgatgctgaggttttagagcattctgggaaaatggtacttctctttgaaattcttcgaatggcagaggaaattggggataaagtccttgttttcagccagtccctcatatctctggacttgattgaagattttcttgaattagctagtagggagaagacagaagataaagataaaccccttatttataaaggtgaggggaagtggcttcgaaacattgactattaccgtttagatggttccactactgcacagtcaaggaagaagtgggctgaagaatttaatgatgaaactaatgtgagaggacgattatttatcatttctactaaagcaggatctctaggaattaatctggtagctgctaatcgagtaattatattcgacgcttcttggaatccatcttatgacatccagagtatattcagagtttatcgctttggacaaactaagcctgtttatgtatataggttcttagctcagggaaccatggaagataagatttatgatcggcaagtaactaagcagtcactgtcttttcgagttgttgatcagcagcaggtggagcgtcattttactatgaatgagcttactgaactttatacttttgagccagacttattagatgaccctaattcagaaaagaagaagaagagggatactcccatgctgccaaaggataccatacttgcagagctccttcagatacataaagaacacattgtaggataccatgaacatgattctcttttggaccacaaagaagaagaagagttgactgaagaagaaagaaaagcagcttgggctgagtatgaagcagagaagaagggactgaccatgcgtttcaacataccaactgggaccaatttaccccctgtcagtttcaactctcaaactccttatattcctttcaatttgggagccctgtcagcaatgagtaatcaacagctggaggacctcattaatcaaggaagagaaaaagttgtagaagcaacaaacagtgtgacagcagtgaggattcaacctcttgaggatataatttcagctgtatggaaggagaacatgaatctctcagaggcccaagtacaggcgttagcattaagtagacaagccagccaggagcttgatgttaaacgaagagaagcaatctacaatgatgtattgacaaaacaacagatgttaatcagctgtgttcagcgaatacttatgaacagaaggctccagcagcagtacaatcagcagcaacagcaacaaatgacttatcaacaagcaacactgggtcacctcatgatgccaaagcccccaaatttgatcatgaatccttctaactaccagcagattgatatgagaggaatgtatcagccagtggctggtggtatgcagccaccaccattacagcgtgcaccacccccaatgagaagcaaaaatccaggaccttcccaagggaaatcaatgtgattttgcactaaaagcttaatggattgttaaaatcatagaaagatcttttatttttttaggaatcaatgacttaacagaactcaactgtataaatagtttggtccccttaaatgccaatcttccatattagttttactttttttttttttaaatagggcataccatttcttcctgacatttgtcagtgatgttgcctagaatcttcttacacacgctgagtacagaagatatttcaaattgttttcagtgaaaacaagtccttccataatagtaacaactccacagatttcctctctaaatttttatgcctgcttttagcaaccataaaattgtcataaaattaataaatttaggaaagaataaagatttatatattcattctttacatataaaaacacacagctgagttcttagagttgattcctcaagttatgaaatacttttgtacttaatccatttcttgattaaagtgattgaaatggttttaatgttcttttgactgaagtctgaaactgggctcctgctttattgtctctgtgactgaaagttagaaactgagggttatctttgacacagaattgtgtgcaatattcttaaatactactgctctaaaagttggagaagtcttgcagttatcttagcattgtataaacagccttaagtatagcctaagaagagaattcctttttcttctttagtccttctgccattttttattttcagttatatgtgctgaaataattactggtaaaatttcagggttgtggattatcttccacacatgaattttctctctcctggcacgaatataaagcacatctcttaactgcatggtgccagtgctaatgcttcatcctgttgctggcagtgggatgtggacttagaaaatcaagttctagcattttagtaggttaacactgaagttgtggttgttaggttcacaccctgttttataaacaacatcaaaatggcagaaccattgctgactttaggttcacatgaggaatgtacttttaacaattcccagtactatcagtattgtgaaataattcctctgaaagataagaatcactggcttctatgcgcttcttttctctcatcatcatgttcttttaccccagtttccttacatttttttaaattgtttcagagtttgttttttttttagtttagattgtgaggcaattattaaatcaaaattaattcatccaatacccctttactagaagttttactagaaaatgtattacattttattttttcttaatccagttctgcaaaaatgacctataaatttattcatgtacaattttggttacttgaattgttaaagaaaacattgtttttgactatgggagtcaactcaacatggcagaaccatttttgagatgatgatacaacaggtagtgaaacagcttaagaattccaaaaaaaaaaaaaaaaaaaaaaaaaagaaaactgggtttgggctttgctttaggtatcactggattagaatgagtttaacattagctaaaactgctttgagttgtttggatgattaagagattgccatttttatcttggaagaactagtggtaaaacatccaagagcactaggattgtgatacagaatttgtgaggtttggtggatccacgcccctctcccccactttcccatgatgaaatatcactaataaatcctgtatatttagatattatgctagccatgtaatcagatttatttaattgggtggggcaggtgtgtatttactttagaaaaaatgaaaaagacaagatttatgagaaatatttgaaggcagtacactctggccaactgttaccagttggtatttctacaagttcagaatattttaaacctgatttactagacctgggaattttcaacatggtctaattatttactcaaagacatagatgtgaaaattttaggcaaccttctaaatctttttcaccatggatgaaactataacttaaagaataatacttagaagggttaattggaaatcagagtttgaaataaaacttggaccactttgtatacactcttctcacttgacattttagctatataatatgtactttgagtataacatcaagctttaacaaatatttaaagacaaaaaaatcacgtcagtaaaatactaaaaggctcatttttatatttgttttagatgttttaaatagttgcaatggattaaaaatgatgatttaaaatgttgcttgtaatacagttttgcctgctaaattctccacattttgtaacctgttttatttctttgggtgtaaagcgtttttgcttagtattgtgatattgtatatgttttgtcccagttgtatagtaatgtttcagtccatcatccagctttggctgctgaaatcatacagctgtgaagacttgcctttgtttctgttagactgcttttcagttctgtattgagtatcttaagtactgtagaaaagatgtcacttcttcctttaaggctgttttgtaatatatataaggactggaattgtgtttttaaagaaaagcattcaagtatgacaatatactatctgtgttttcaccattcaaagtgctgtttagtagttgaaacttaaactatttaatgtcatttaataaagtgaccaaaatgtg

SEQ ID NO: 106682 - DNA, 814 bp, Homo sapiens
  Payload ID: 951
  Gene Symbol: ATRX
  Gene Name: alpha thalassemia/mental retardation syndrome X-linked
  ENST ID: ENST00000400866
  CDS Start-End: 1-597
gaagatggtggtgttatgatcataggctatgagatgtatagaaatcttgctcaaggaaggaatgtgaagagtcggaaacttaaagaaatatttaacaaagctttggttgatccaggccctgattttgttgtttgtgatgaaggccatattctaaaaaatgaagcatctgctgtttctaaagctatgaattctatacgatcaaggaggaggattattttaacaggaacaccacttcaaaataacctaattgagtatcattgtatggttaattttatcaaggaaaatttacttggatccattaaggagttcaggaatagatttataaatccaattcaaaatggtcagtgtgcagattctaccatggtagatgtcagagtgatgaaaaaacgtgctcacattctctatgagatgttagctggatgtgttcagaggaaagattatacagcattaacaaaattcttgcctccaaaacacgaatatgtgttagctgtgagaatgacttctattcagtgcaagctctatcagtactacttagatcacttaacagttttgcatttgaataaaatgggtatgcttaaaagcataaaatatttctaattaaaacactgatgctgtcaaaattaaaatcaagaagcaaattgatgaaaaagatatacagcacatatgaataatgcccttaatttgtaaagagcttttatttcagaaaaattatgaatgtgaataaatccataaaagaagatatacaaaattccagagtatttttttaaaaagtatttacccacattaataataaaaggtgtataagttaaattca

SEQ ID NO: 106683 - DNA, 10455 bp, Homo sapiens
  Payload ID: 951
  Gene Symbol: ATRX
  Gene Name: alpha thalassemia/mental retardation syndrome X-linked
  ENST ID: ENST00000480283
  CDS Start-End: 216-710
ctcggcccaacaaaatggcggcggcagcggtgtcgctttgtttccgcggctcctgcggcggtggcagtggtagcggcctttgagctgtggggaggttccagcagcagctacagtgacgactaagactccagtgcatttctatcgtaaccgggcgcgggggagcgcagatcggcgcccagcaatcacagaagccgacaaggcgttcaagcgaaaacatgaccgctgagcccatgagtgaaagcaagttgaatacattggtgcagaagcttcatgacttccttgcacactcatcagaagaatctgaagaaacaagttctcctccacgacttgcaatgaatcaaaacacagataaaatcagtggttctggaagtaactctgatatgatggaaaacagcaaggaagagggaactagctcttcagaaaaatccaagtcttcaggatcgtcacgatcaaagaggaaaccttcaattgtaacaaagtatgtagaatcagatgatgaaaaacctttggatgatgaaactgtaaatgaagatgcgtctaatgaaaattcagaaaatgatattactatgcagagcttgccaaaaggtacagtgattgtacagccagagccagtgctgaatgaagacaaagatgattttaaagggcctgaatttagaagcagaagtaaaatgaaaactgaaaatctcaaaaaacgcggagtgctgtggtgaatatccttatatttgattccttgtgcacatgtgggagaaaatctccaaagaattacctagttttgtttaattcttgagcgatgtatgcaccaaagcacatagaagatacttaaagatgggcttcatgggattgtgagctgcactgcttgtggacaacaggtcaatcattttcaaaaagattccatttatagacacccttcattgcaagttcttatttgtaagaattgctttaagtattacatgagtgatgatattagccgtgactcagatggaatggatgaacaatgtaggtggtgtgcggaaggtggaaacttgatttgttgtgacttttgccataatgctttctgcaagaaatgcattctacgcaaccttggtcgaaaggagttgtccacaataatggatgaaaacaaccaatggtattgctacatttgtcacccagagcctttgttggacttggtcactgcatgtaacagcgtatttgagaatttagaacagttgttgcagcaaaataagaagaagataaaagttgacagtgaaaagagtaataaagtatatgaacatacatccagattttctccaaagaagactagttcaaattgtaatggagaagaaaagaaattagatgattcctgttctggctctgtaacctactcttattccgcactaattgtgcccaaagagatgattaagaaggcaaaaaaactgattgagaccacagccaacatgaactccagttatgttaaatttttaaagcaggcaacagataattcagaaatcagttctgctacaaaattacgtcagcttaaggcttttaagtctgtgttggctgatattaagaaggctcatcttgcattggaagaagacttaaattccgagtttcgagcgatggatgctgtaaacaaagagaaaaataccaaagagcataaagtcatagatgctaagtttgaaacaaaagcacgaaaaggagaaaaaccttgtgctttggaaaagaaggatatttcaaagtcagaagctaaactttcaagaaaacaggtagatagtgagcacatgcatcagaatgttccaacagaggaacaaagaacaaataaaagtaccggtggtgaacataagaaatctgatagaaaagaagaacctcaatatgaacctgccaacacttctgaagatttagacatggatattgtgtctgttccttcctcagttccagaagacatttttgagaatcttgagactgctatggaagttcagagttcagttgatcatcaaggggatggcagcagtggaactgaacaagaagtggagagttcatctgtaaaattaaatatttcttcaaaagacaacagaggaggtattaaatcaaaaactacagctaaagtaacaaaagaattatatgttaaactcactcctgtttccctttctaattccccaattaaaggtgctgattgtcaggaagttccacaagataaagatggctataaaagttgtggtctgaaccccaagttagagaaatgtggacttggacaggaaaacagtgataatgagcatttggttgaaaatgaagtttcattacttttagaggaatctgatcttcgaagatccccacgtgtaaagactacacccttgaggcgaccgacagaaactaaccctgtaacatctaattcagatgaagaatgtaatgaaacagttaaggagaaacaaaaactatcagttccagtgagaaaaaaggataagcgtaattcttctgacagtgctatagataatcctaagcctaataaattgccaaaatctaagcaatcagagactgtggatcaaaattcagattctgatgaaatgctagcaatcctcaaagaggtgagcaggatgagtcacagttcttcttcagatactgatattaatgaaattcatacaaaccataagactttgtatgatttaaagactcaggcggggaaagatgataaaggaaaaaggaaacgaaaaagttctacatctggctcagattttgatactaaaaagggcaaatcagctaagagctctataatttctaaaaagaaacgacaaacccagtctgagtcttctaattatgactcagaattagaaaaagagataaagagcatgagtaaaattggtgctgccagaaccaccaaaaaaagaattccaaatacaaaagattttgactcttctgaagatgagaaacacagcaaaaaaggaatggataatcaagggcacaaaaatttgaagacctcacaagaaggatcatctgatgatgctgaaagaaaacaagagagagagactttctcttcagcagaaggcacagttgataaagacacgaccatcatggaattaagagatcgacttcctaagaagcagcaagcaagtgcttccactgatggtgtcgataagctttctgggaaagaggagagttttacttctttggaagttagaaaagttgctgaaactaaagaaaagagcaagcatctcaaaaccaaaacatgtaaaaaagtacaggatggcttatctgatattgcagagaaattcctaaagaaagaccagagcgatgaaacttctgaagatgataaaaagcagagcaaaaagggaactgaagaaaaaaagaaaccttcagactttaagaaaaaagtaattaaaatggaacaacagtatgaatcttcatctgatggcactgaaaagttacctgagcgagaagaaatttgtcattttcctaagggcataaaacaaattaagaatggaacaactgatggagaaaagaaaagtaaaaaaataagagataaaacttctaaaaagaaggatgaattatctgattatgctgagaagtcaacagggaaaggagatagttgtgactcttcagaggataaaaagagtaagaatggagcatatggtagagagaagaaaaggtgcaagttgcttggaaagagttcaaggaagagacaagattgttcatcatctgatactgagaaatattccatgaaagaagatggttgtaactcttctgataagagactgaaaagaatagaattgagggaaagaagaaatttaagttcaaagagaaatactaaggaaatacaaagtggctcatcatcatctgatgctgaggaaagttctgaagataataaaaagaagaagcaaagaacttcatctaaaaagaaggcagtcattgtcaaggagaaaaagagaaactccctaagaacaagcactaaaaggaagcaagctgacattacatcctcatcttcttctgatatagaagatgatgatcagaattctataggtgagggaagcagcgatgaacagaaaattaagcctgtgactgaaaatttagtgctgtcttcacatactggattttgccaatcttcaggagatgaagccttatctaaatcagtgcctgtcacagtggatgatgatgatgacgacaatgatcctgagaatagaattgccaagaagatgcttttagaagaaattaaagccaatctttcctctgatgaggatggatcttcagatgatgagccagaagaagggaaaaaaagaactggaaaacaaaatgaagaaaacccaggagatgaggaagcaaaaaatcaagtcaattctgaatcagattcagattctgaagaatctaagaagccaagatacagacataggcttttgcggcacaaattgactgtgagtgacggagaatctggagaagaaaaaaagacaaagcctaaagagcataaagaagtcaaaggcagaaacagaagaaaggtgagcagtgaagattcagaagattctgattttcaggaatcaggagttagtgaagaagttagtgaatccgaagatgaacagcggcccagaacaaggtctgcaaagaaagcagagttggaagaaaatcagcggagctataaacagaaaaagaaaaggcgacgtattaaggttcaagaagattcatccagtgaaaacaagagtaattctgaggaagaagaggaggaaaaagaagaggaggaggaagaggaggaggaggaggaagaggaggaggaagatgaaaatgatgattccaagtctcctggaaaaggcagaaagaaaattcggaagattcttaaagatgataaactgagaacagaaacacaaaatgctcttaaggaagaggaagagagacgaaaacgtattgctgagagggagcgtgagcgagaaaaattgagagaggtgatagaaattgaagatgcttcacccaccaagtgtccaataacaaccaagttggttttagatgaagatgaagaaaccaaagaacctttagtgcaggttcatagaaatatggttatcaaattgaaaccccatcaagtagatggtgttcagtttatgtgggattgctgctgtgagtctgtgaaaaaaacaaagaaatctccaggttcaggatgcattcttgcccactgtatgggccttggtaagactttacaggtggtaagttttcttcatacagttcttttgtgtgacaaactggatttcagcacggcgttagtggtttgtcctcttaatactgctttgaattggatgaatgaatttgagaagtggcaagagggattaaaagatgatgagaagcttgaggtttctgaattagcaactgtgaaacgtcctcaggagagaagctacatgctgcagaggtggcaagaagatggtggtgttatgatcataggctatgagatgtatagaaatcttgctcaaggaaggaatgtgaagagtcggaaacttaaagaaatatttaacaaagctttggttgatccaggccctgattttgttgtttgtgatgaaggccatattctaaaaaatgaagcatctgctgtttctaaagctatgaattctatacgatcaaggaggaggattattttaacaggaacaccacttcaaaataacctaattgagtatcattgtatggttaattttatcaaggaaaatttacttggatccattaaggagttcaggaatagatttataaatccaattcaaaatggtcagtgtgcagattctaccatggtagatgtcagagtgatgaaaaaacgtgctcacattctctatgagatgttagctggatgtgttcagaggaaagattatacagcattaacaaaattcttgcctccaaaacacgaatatgtgttagctgtgagaatgacttctattcagtgcaagctctatcagtactacttagatcacttaacaggtgtgggcaataatagtgaaggtggaagaggaaaggcaggtgcaaagcttttccaagattttcagatgttaagtagaatatggactcatccttggtgtttgcagctagactacattagcaaagaaaataagggttattttgatgaagacagtatggatgaatttatagcctcagattctgatgaaacctccatgagtttaagctccgatgattatacaaaaaagaagaaaaaagggaaaaaggggaaaaaagatagtagctcaagtggaagtggcagtgacaatgatgttgaagtgattaaggtctggaattcaagatctcggggaggtggtgaaggaaatgtggatgaaacaggaaacaatccttctgtttctttaaaactggaagaaagtaaagctacttcttcttctaatccaagcagcccagctccagactggtacaaagattttgttacagatgctgatgctgaggttttagagcattctgggaaaatggtacttctctttgaaattcttcgaatggcagaggaaattggggataaagtccttgttttcagccagtccctcatatctctggacttgattgaagattttcttgaattagctagtagggagaagacagaagataaagataaaccccttatttataaaggtgaggggaagtggcttcgaaacattgactattaccgtttagatggttccactactgcacagtcaaggaagaagtgggctgaagaatttaatgatgaaactaatgtgagaggacgattatttatcatttctactaaagcaggatctctaggaattaatctggtagctgctaatcgagtaattatattcgacgcttcttggaatccatcttatgacatccagagtatattcagagtttatcgctttggacaaactaagcctgtttatgtatataggttcttagctcagggaaccatggaagataagatttatgatcggcaagtaactaagcagtcactgtcttttcgagttgttgatcagcagcaggtggagcgtcattttactatgaatgagcttactgaactttatacttttgagccagacttattagatgaccctaattcagaaaagaagaagaagagggatactcccatgctgccaaaggataccatacttgcagagctccttcagatacataaagaacacattgtaggataccatgaacatgattctcttttggaccacaaagaagaagaagagttgactgaagaagaaagaaaagcagcttgggctgagtatgaagcagagaagaagggactgaccatgcgtttcaacataccaactgggaccaatttaccccctgtcagtttcaactctcaaactccttatattcctttcaatttgggagccctgtcagcaatgagtaatcaacagctggaggacctcattaatcaaggaagagaaaaagttgtagaagcaacaaacagtgtgacagcagtgaggattcaacctcttgaggatataatttcagctgtatggaaggagaacatgaatctctcagaggcccaagtacaggcgttagcattaagtagacaagccagccaggagcttgatgttaaacgaagagaagcaatctacaatgatgtattgacaaaacaacagatgttaatcagctgtgttcagcgaatacttatgaacagaaggctccagcagcagtacaatcagcagcaacagcaacaaatgacttatcaacaagcaacactgggtcacctcatgatgccaaagcccccaaatttgatcatgaatccttctaactaccagcagattgatatgagaggaatgtatcagccagtggctggtggtatgcagccaccaccattacagcgtgcaccacccccaatgagaagcaaaaatccaggaccttcccaagggaaatcaatgtgattttgcactaaaagcttaatggattgttaaaatcatagaaagatcttttatttttttaggaatcaatgacttaacagaactcaactgtataaatagtttggtccccttaaatgccaatcttccatattagttttactttttttttttttaaatagggcataccatttcttcctgacatttgtcagtgatgttgcctagaatcttcttacacacgctgagtacagaagatatttcaaattgttttcagtgaaaacaagtccttccataatagtaacaactccacagatttcctctctaaatttttatgcctgcttttagcaaccataaaattgtcataaaattaataaatttaggaaagaataaagatttatatattcattctttacatataaaaacacacagctgagttcttagagttgattcctcaagttatgaaatacttttgtacttaatccatttcttgattaaagtgattgaaatggttttaatgttcttttgactgaagtctgaaactgggctcctgctttattgtctctgtgactgaaagttagaaactgagggttatctttgacacagaattgtgtgcaatattcttaaatactactgctctaaaagttggagaagtcttgcagttatcttagcattgtataaacagccttaagtatagcctaagaagagaattcctttttcttctttagtccttctgccattttttattttcagttatatgtgctgaaataattactggtaaaatttcagggttgtggattatcttccacacatgaattttctctctcctggcacgaatataaagcacatctcttaactgcatggtgccagtgctaatgcttcatcctgttgctggcagtgggatgtggacttagaaaatcaagttctagcattttagtaggttaacactgaagttgtggttgttaggttcacaccctgttttataaacaacatcaaaatggcagaaccattgctgactttaggttcacatgaggaatgtacttttaacaattcccagtactatcagtattgtgaaataattcctctgaaagataagaatcactggcttctatgcgcttcttttctctcatcatcatgttcttttaccccagtttccttacatttttttaaattgtttcagagtttgttttttttttagtttagattgtgaggcaattattaaatcaaaattaattcatccaatacccctttactagaagttttactagaaaatgtattacattttattttttcttaatccagttctgcaaaaatgacctataaatttattcatgtacaattttggttacttgaattgttaaagaaaacattgtttttgactatgggagtcaactcaacatggcagaaccatttttgagatgatgatacaacaggtagtgaaacagcttaagaattccaaaaaaaaaaaaaaaaaaaaaaaaaagaaaactgggtttgggctttgctttaggtatcactggattagaatgagtttaacattagctaaaactgctttgagttgtttggatgattaagagattgccatttttatcttggaagaactagtggtaaaacatccaagagcactaggattgtgatacagaatttgtgaggtttggtggatccacgcccctctcccccactttcccatgatgaaatatcactaataaatcctgtatatttagatattatgctagccatgtaatcagatttatttaattgggtggggcaggtgtgtatttactttagaaaaaatgaaaaagacaagatttatgagaaatatttgaaggcagtacactctggccaactgttaccagttggtatttctacaagttcagaatattttaaacctgatttactagacctgggaattttcaacatggtctaattatttactcaaagacatagatgtgaaaattttaggcaaccttctaaatctttttcaccatggatgaaactataacttaaagaataatacttagaagggttaattggaaatcagagtttgaaataaaacttggaccactttgtatacactcttctcacttgacattttagctatataatatgtactttgagtataacatcaagctttaacaaatatttaaagacaaaaaaatcacgtcagtaaaatactaaaaggctcatttttatatttgttttagatgttttaaatagttgcaatggattaaaaatgatgatttaaaatgttgcttgtaatacagttttgcctgctaaattctccacattttgtaacctgttttatttctttgggtgtaaagcgtttttgcttagtattgtgatattgtatatgttttgtcccagttgtatagtaatgtttcagtccatcatccagctttggctgctgaaatcatacagctgtgaagacttgcctttgtttctgttagactgcttttcagttctgtattgagtatcttaagtactgtagaaaagatgtcacttcttcctttaaggctgttttgtaatatatataaggactggaattgtgtttttaaagaaaagcattcaagtatgacaatatactatctgtgttttcaccattcaaagtgctgtttagtagttgaaacttaaactatttaatgtcatttaataaagtgaccaaaatgtg

SEQ ID NO: 106684 - DNA, 593 bp, Homo sapiens
  Payload ID: 951
  Gene Symbol: ATRX
  Gene Name: alpha thalassemia/mental retardation syndrome X-linked
  ENST ID: ENST00000625063
  CDS Start-End: 1-593
ggaagagggaactagctcttcagaaaaatccaagtcttcaggatcgtcacgatcaaagaggaaaccttcaattgtaacaaagtatgtagaatcagatgatgaaaaacctttggatgatgaaactgtaaatgaagatgcgtctaatgaaaattcagaaaatgatattactatgcagagcttgccaaaaggtacagtgattgtacagccagagccagtgctgaatgaagacaaagatgattttaaagggcctgaatttagaagcagaagtaaaatgaaaactgaaaatctcaaaaaacgcggagatgggcttcatgggattgtgagctgcactgcttgtggacaacaggtcaatcattttcaaaaagattccatttatagacacccttcattgcaagttcttatttgtaagaattgctttaagtattacatgagtgatgatattagccgtgactcagatggaatggatgaacaatgtaggtggtgtgcggaaggtggaaacttgatttgttgtgacttttgccataatgctttctgcaagaaatgcattctacgcaaccttggtcgaaaggagttgtccacaataatggatgaaa

SEQ ID NO: 106685 - DNA, 583 bp, Homo sapiens
  Payload ID: 951
  Gene Symbol: ATRX
  Gene Name: alpha thalassemia/mental retardation syndrome X-linked
  ENST ID: ENST00000624668
  CDS Start-End: 260-583
aacaaaatggcggcggcagcggtgtcgctttgtttccgcggctcctgcggcggtggcagtggtagcggcctttgagctgtggggaggttccagcagcagctacagtgacgactaagactccagtgcatttctatcgtaaccgggcgcgggggagcgcagatcggcgcccagcaatcacagaagccgacaaggcgttcaagcgaaaacatgaccgctgagcccatgagataaaatcagtggttctggaagtaactctgatatgatggaaaacagcaaggaagagggaactagctcttcagaaaaatccaagtcttcaggatcgtcacgatcaaagaggaaaccttcaattgtaacaaagtatgtagaatcagatgatgaaaaacctttggatgatgaaactgtaaatgaagatgcgtctaatgaaaattcagaaaatgatattactatgcagagcttgccaaaagaagatgggcttcatgggattgtgagctgcactgcttgtggacaacaggtcaatcattttcaaaaagattccatttatagacacccttcattgcaagttcttatttgtaagaattgcttt

SEQ ID NO: 106686 - DNA, 4272 bp, Homo sapiens
  Payload ID: 951
  Gene Symbol: ATRX
  Gene Name: alpha thalassemia/mental retardation syndrome X-linked
  ENST ID: ENST00000624166
  CDS Start-End: 220-4272
gagcctcggcccaacaaaatggcggcggcagcggtgtcgctttgtttccgcggctcctgcggcggtggcagtggtagcggcctttgagctgtggggaggttccagcagcagctacagtgacgactaagactccagtgcatttctatcgtaaccgggcgcgggggagcgcagatcggcgcccagcaatcacagaagccgacaaggcgttcaagcgaaaacatgaccgctgagcccatgagtgaaagcaagttgaatacattggtgcagaagcttcatgacttccttgcacactcatcagaagaatctgaagaaacaagttctcctccacgacttgcaatgaatcaaaacacagataaaatcagtggttctggaagtaactctgatatgatggaaaacagcaaggaagagggaactagctcttcagaaaaatccaagtcttcaggatcgtcacgatcaaagaggaaaccttcaattgtaacaaagtatgtagaatcagatgatgaaaaacctttggatgatgaaactgtaaatgaagatgcgtctaatgaaaattcagaaaatgatattactatgcagagcttgccaaaagatgggcttcatgggattgtgagctgcactgcttgtggacaacaggtcaatcattttcaaaaagattccatttatagacacccttcattgcaagttcttatttgtaagaattgctttaagtattacatgagtgatgatattagccgtgactcagatggaatggatgaacaatgtaggtggtgtgcggaaggtggaaacttgatttgttgtgacttttgccataatgctttctgcaagaaatgcattctacgcaaccttggtcgaaaggagttgtccacaataatggatgaaaacaaccaatggtattgctacatttgtcacccagagcctttgttggacttggtcactgcatgtaacagcgtatttgagaatttagaacagttgttgcagcaaaataagaagaagataaaagttgacagtgaaaagagtaataaagtatatgaacatacatccagattttctccaaagaagactagttcaaattgtaatggagaagaaaagaaattagatgattcctgttctggctctgtaacctactcttattccgcactaattgtgcccaaagagatgattaagaaggcaaaaaaactgattgagaccacagccaacatgaactccagttatgttaaatttttaaagcaggcaacagataattcagaaatcagttctgctacaaaattacgtcagcttaaggcttttaagtctgtgttggctgatattaagaaggctcatcttgcattggaagaagacttaaattccgagtttcgagcgatggatgctgtaaacaaagagaaaaataccaaagagcataaagtcatagatgctaagtttgaaacaaaagcacgaaaaggagaaaaaccttgtgctttggaaaagaaggatatttcaaagtcagaagctaaactttcaagaaaacaggtagatagtgagcacatgcatcagaatgttccaacagaggaacaaagaacaaataaaagtaccggtggtgaacataagaaatctgatagaaaagaagaacctcaatatgaacctgccaacacttctgaagatttagacatggatattgtgtctgttccttcctcagttccagaagacatttttgagaatcttgagactgctatggaagttcagagttcagttgatcatcaaggggatggcagcagtggaactgaacaagaagtggagagttcatctgtaaaattaaatatttcttcaaaagacaacagaggaggtgctgattgtcaggaagttccacaagataaagatggctataaaagttgtggtctgaaccccaagttagagaaatgtggacttggacaggaaaacagtgataatgagcatttggttgaaaatgaagtttcattacttttagaggaatctgatcttcgaagatccccacgtgtaaagactacacccttgaggcgaccgacagaaactaaccctgtaacatctaattcagatgaagaatgtaatgaaacagttaaggagaaacaaaaactatcagttccagtgagaaaaaaggataagcgtaattcttctgacagtgctatagataatcctaagcctaataaattgccaaaatctaagcaatcagagactgtggatcaaaattcagattctgatgaaatgctagcaatcctcaaagaggtgagcaggatgagtcacagttcttcttcagatactgatattaatgaaattcatacaaaccataagactttgtatgatttaaagactcaggcggggaaagatgataaaggaaaaaggaaacgaaaaagttctacatctggctcagattttgatactaaaaagggcaaatcagctaagagctctataatttctaaaaagaaacgacaaacccagtctgagtcttctaattatgactcagaattagaaaaagagataaagagcatgagtaaaattggtgctgccagaaccaccaaaaaaagaattccaaatacaaaagattttgactcttctgaagatgagaaacacagcaaaaaaggaatggataatcaagggcacaaaaatttgaagacctcacaagaaggatcatctgatgatgctgaaagaaaacaagagagagagactttctcttcagcagaaggcacagttgataaagacacgaccatcatggaattaagagatcgacttcctaagaagcagcaagcaagtgcttccactgatggtgtcgataagctttctgggaaagaggagagttttacttctttggaagttagaaaagttgctgaaactaaagaaaagagcaagcatctcaaaaccaaaacatgtaaaaaagtacaggatggcttatctgatattgcagagaaattcctaaagaaagaccagagcgatgaaacttctgaagatgataaaaagcagagcaaaaagggaactgaagaaaaaaagaaaccttcagactttaagaaaaaagtaattaaaatggaacaacagtatgaatcttcatctgatggcactgaaaagttacctgagcgagaagaaatttgtcattttcctaagggcataaaacaaattaagaatggaacaactgatggagaaaagaaaagtaaaaaaataagagataaaacttctaaaaagaaggatgaattatctgattatgctgagaagtcaacagggaaaggagatagttgtgactcttcagaggataaaaagagtaagaatggagcatatggtagagagaagaaaaggtgcaagttgcttggaaagagttcaaggaagagacaagattgttcatcatctgatactgagaaatattccatgaaagaagatggttgtaactcttctgataagagactgaaaagaatagaattgagggaaagaagaaatttaagttcaaagagaaatactaaggaaatacaaagtggctcatcatcatctgatgctgaggaaagttctgaagataataaaaagaagaagcaaagaacttcatctaaaaagaaggcagtcattgtcaaggagaaaaagagaaactccctaagaacaagcactaaaaggaagcaagctgacattacatcctcatcttcttctgatatagaagatgatgatcagaattctataggtgagggaagcagcgatgaacagaaaattaagcctgtgactgaaaatttagtgctgtcttcacatactggattttgccaatcttcaggagatgaagccttatctaaatcagtgcctgtcacagtggatgatgatgatgacgacaatgatcctgagaatagaattgccaagaagatgcttttagaagaaattaaagccaatctttcctctgatgaggatggatcttcagatgatgagccagaagaagggaaaaaaagaactggaaaacaaaatgaagaaaacccaggagatgaggaagcaaaaaatcaagtcaattctgaatcagattcagattctgaagaatctaagaagccaagatacagacataggcttttgcggcacaaattgactgtgagtgacggagaatctggagaagaaaaaaagacaaagcctaaagagcataaagaagtcaaaggcagaaacagaagaaaggtgagcagtgaagattcagaagattctgattttcaggaatcaggagttagtgaagaagttagtgaatccgaagatgaacagcggcccagaacaaggtctgcaaagaaagcagagttggaagaaaatcagcggagctat

SEQ ID NO: 106687 - DNA, 1860 bp, Homo sapiens
  Payload ID: 951
  Gene Symbol: ATRX
  Gene Name: alpha thalassemia/mental retardation syndrome X-linked
  ENST ID: ENST00000623321
  CDS Start-End: 277-1860
tgcctgagcctcggcccaacaaaatggcggcggcagcggtgtcgctttgtttccgcggctcctgcggcggtggcagtggtagcggcctttgagctgtggggaggttccagcagcagctacagtgacgactaagactccagtgcatttctatcgtaaccgggcgcgggggagcgcagatcggcgcccagcaatcacagaagccgacaaggcgttcaagcgaaaacatgaccgctgagcccatgagataaaatcagtggttctggaagtaactctgatatgatggaaaacagcaaggaagagggaactagctcttcagaaaaatccaagtcttcaggatcgtcacgatcaaagaggaaaccttcaattgtaacaaagtatgtagaatcagatgatgaaaaacctttggatgatgaaactgtaaatgaagatgcgtctaatgaaaattcagaaaatgatattactatgcagagcttgccaaaaggtacagtgattgtacagccagagccagtgctgaatgaagacaaagatgattttaaagggcctgaatttagaagcagaagtaaaatgaaaactgaaaatctcaaaaaacgcggagaagatgggcttcatgggattgtgagctgcactgcttgtggacaacaggtcaatcattttcaaaaagattccatttatagacacccttcattgcaagttcttatttgtaagaattgctttaagtattacatgagtgatgatattagccgtgactcagatggaatggatgaacaatgtaggtggtgtgcggaaggtggaaacttgatttgttgtgacttttgccataatgctttctgcaagaaatgcattctacgcaaccttggtcgaaaggagttgtccacaataatggatgaaaacaaccaatggtattgctacatttgtcacccagagcctttgttggacttggtcactgcatgtaacagcgtatttgagaatttagaacagttgttgcagcaaaataagaagaagataaaagttgacagtgaaaagagtaataaagtatatgaacatacatccagattttctccaaagaagactagttcaaattgtaatggagaagaaaagaaattagatgattcctgttctggctctgtaacctactcttattccgcactaattgtgcccaaagagatgattaagaaggcaaaaaaactgattgagaccacagccaacatgaactccagttatgttaaatttttaaagcaggcaacagataattcagaaatcagttctgctacaaaattacgtcagcttaaggcttttaagtctgtgttggctgatattaagaaggctcatcttgcattggaagaagacttaaattccgagtttcgagcgatggatgctgtaaacaaagagaaaaataccaaagagcataaagtcatagatgctaagtttgaaacaaaagcacgaaaaggagaaaaaccttgtgctttggaaaagaaggatatttcaaagtcagaagctaaactttcaagaaaacaggtagatagtgagcacatgcatcagaatgttccaacagaggaacaaagaacaaataaaagtaccggtggtgaacataagaaatctgatagaaaagaagaacctcaatatgaacctgccaacacttctgaagatttagacatggatattgtgtctgttccttcctcagttccagaagacatttttgagaatcttgagactgctatggaagttcagagttcagttgatcatcaaggggatggcagcagtggaactgaacaagaagtggagagttcatctgtaaaattaaatatttcttcaaaagacaacagaggaggtattaaatcaaaaactacagctaaagtaaca

SEQ ID NO: 106688 - DNA, 725 bp, Homo sapiens
  Payload ID: 951
  Gene Symbol: ATRX
  Gene Name: alpha thalassemia/mental retardation syndrome X-linked
  ENST ID: ENST00000623242
  CDS Start-End: 1-199
tgaaaatgatgattccaagtctcctggaaaaggcagaaagaaaattcggaagattcttaaagatgataaactgagaacagaaacacaaaatgctcttaaggaagaggaagagagacgaaaacgtattgctgagagggagcgtgagcgagaaaaattgagagaggtaactaatttctttcttcttctttttcttttgtagctacagggtcttgctctgttgcccaggctggcctcgaactcttgggctcaagtgatcctcctaccttggcctcctaaacttctgggattacaggcgtgatagaaattgaagatgcttcacccaccaagtgtccaataacaaccaagttggttttagatgaagatgaagaaaccaaagaacctttagtgcaggttcatagaaatatggttatcaaattgaaaccccatcaagtagatggtgttcagtttatgtgggattgctgctgtgagtctgtgaaaaaaacaaagaaatctccaggttcaggatgcattcttgcccactgtatgggccttggtaagactttacaggtggtaagttttcttcatacagttcttttgtgtgacaaactggatttcagcacggcgttagtggtttgtcctcttaatactgctttgaattggatgaatgaatttgagaagtggcaagagggattaaaagatgatgagaagcttgaggtttctgaattagcaactgtgaaacgtcctca

SEQ ID NO: 106689 - DNA, 3071 bp, Homo sapiens
  Payload ID: 951
  Gene Symbol: ATRX
  Gene Name: alpha thalassemia/mental retardation syndrome X-linked
  ENST ID: ENST00000624032
  CDS Start-End: 208-3071
aacaaaatggcggcggcagcggtgtcgctttgtttccgcggctcctgcggcggtggcagtggtagcggcctttgagctgtggggaggttccagcagcagctacagtgacgactaagactccagtgcatttctatcgtaaccgggcgcgggggagcgcagatcggcgcccagcaatcacagaagccgacaaggcgttcaagcgaaaacatgaccgctgagcccatgagtgaaagcaagttgaatacattggtgcagaagcttcatgacttccttgcacactcatcagaagaatctgaagaaacaagttctcctccacgacttgcaatgaatcaaaacacagataaaatcagtggttctggaagtaactctgatatgatggaaaacagcaaggaagagggaactagctcttcagaaaaatccaagtcttcaggatcgtcacgatcaaagaggaaaccttcaattgtaacaaagtatgtagaatcagatgatgaaaaacctttggatgatgaaactgtaaatgaagatgcgtctaatgaaaattcagaaaatgatattactatgcagagcttgccaaaaggtacagtgattgtacagccagagccagtgctgaatgaagacaaagatgattttaaagggcctgaatttagaagcagaagtaaaatgaaaactgaaaatctcaaaaaacgcggagaagatgggcttcatgggattgtgagctgcactgcttgtggacaacaggtcaatcattttcaaaaagattccatttatagacacccttcattgcaagttcttatttgtaagaattgctttaagtattacatgagtgatgatattagccgtgactcagatggaatggatgaacaatgtaggtggtgtgcggaaggtggaaacttgatttgttgtgacttttgccataatgctttctgcaagaaatgcattctacgcaaccttggtcgaaaggagttgtccacaataatggatgaaaacaaccaatggtattgctacatttgtcacccagagcctttgttggacttggtcactgcatgtaacagcgtatttgagaatttagaacagttgttgcagcaaaataagaagaagataaaagttgacagtgaaaagagtaataaagtatatgaacatacatccagattttctccaaagaagactagttcaaattgtaatggagaagaaaagaaattagatgattcctgttctggctctgtaacctactcttattccgcactaattgtgcccaaagagatgattaagaaggcaaaaaaactgattgagaccacagccaacatgaactccagttatgttaaatttttaaagcaggcaacagataattcagaaatcagttctgctacaaaattacgtcagcttaaggcttttaagtctgtgttggctgatattaagaaggctcatcttgcattggaagaagacttaaattccgagtttcgagcgatggatgctgtaaacaaagagaaaaataccaaagagcataaagtcatagatgctaagtttgaaacaaaagcacgaaaaggagaaaaaccttgtgctttggaaaagaaggatatttcaaagtcagaagctaaactttcaagaaaacaggtagatagtgagcacatgcatcagaatgttccaacagaggaacaaagaacaaataaaagtaccggtggtgaacataagaaatctgatagaaaagaagaacctcaatatgaacctgccaacacttctgaagatttagacatggatattgtgtctgttccttcctcagttccagaagacatttttgagaatcttgagactgctatggaagttcagagttcagttgatcatcaaggggatggcagcagtggaactgaacaagaagtggagagttcatctgtaaaattaaatatttcttcaaaagacaacagaggaggtgctgattgtcaggaagttccacaagataaagatggctataaaagttgtggtctgaaccccaagttagagaaatgtggacttggacaggaaaacagtgataatgagcatttggttgaaaatgaagtttcattacttttagaggaatctgatcttcgaagatccccacgtgtaaagactacacccttgaggcgaccgacagaaactaaccctgtaacatctaattcagatgaagaatgtaatgaaacagttaaggagaaacaaaaactatcagttccagtgagaaaaaaggataagcgtaattcttctgacagtgctatagataatcctaagcctaataaattgccaaaatctaagcaatcagagactgtggatcaaaattcagattctgatgaaatgctagcaatcctcaaagaggtgagcaggatgagtcacagttcttcttcagatactgatattaatgaaattcatacaaaccataagactttgtatgatttaaagactcaggcggggaaagatgataaaggaaaaaggaaacgaaaaagttctacatctggctcagattttgatactaaaaagggcaaatcagctaagagctctataatttctaaaaagaaacgacaaacccagtctgagtcttctaattatgactcagaattagaaaaagagataaagagcatgagtaaaattggtgctgccagaaccaccaaaaaaagaattccaaatacaaaagattttgactcttctgaagatgagaaacacagcaaaaaaggaatggataatcaagggcacaaaaatttgaagacctcacaagaaggatcatctgatgatgctgaaagaaaacaagagagagagactttctcttcagcagaaggcacagttgataaagacacgaccatcatggaattaagagatcgacttcctaagaagcagcaagcaagtgcttccactgatggtgtcgataagctttctgggaaagaggagagttttacttctttggaagttagaaaagttgctgaaactaaagaaaagagcaagcatctcaaaaccaaaacatgtaaaaaagtacaggatggcttatctgatattgcagagaaattcctaaagaaagaccagagcgatgaaacttctgaagatgataaaaagca

SEQ ID NO: 106690 - DNA, 803 bp, Homo sapiens
  Payload ID: 951
  Gene Symbol: ATRX
  Gene Name: alpha thalassemia/mental retardation syndrome X-linked
  ENST ID: ENST00000623316
  CDS Start-End: 1-527
gaagaggaaaggcaggtgcaaagcttttccaagattttcagatgttaagtagaatatggactcatccttggtgtttgcagctagactacattagcaaagaaaataagggttattttgatgaagacagtatggatgaatttatagcctcagattctgatgaaacctccatgagtttaagctccgatgattatacaaaaaagaagaaaaaagggaaaaaggggaaaaaagatagtagctcaagtggaagtggcagtgacaatgatgttgaagtgattaaggtctggaattcaagatctcggggaggtggtgaaggaaatgtggatgaaacaggaaacaatccttctgtttctttaaaactggaagaaaatatttataaagtgcttactatatgcccagacataaggagggaactgataagcctaaatggtaaattgaagaaggtaaagctacttcttcttctaatccaagcagcccagctccagactggtacaaagattttgttacagatgctgatgctgaggttttagagcattctgggaaaatggtacttctctttgaaattcttcgaatggcagaggaaattggggataaagtccttgttttcagccagtccctcatatctctggacttgattgaagattttcttgaattagctagtagggagaagacagaagataaagataaaccccttatttataaaggtgaggggaagtggcttcgaaacattgactattaccgtttagatggttccactactgcacagtcaaggaagaagtgggctgaagaatttaatgatgaaacta

SEQ ID NO: 106691 - DNA, 2967 bp, Homo sapiens
  Payload ID: 951
  Gene Symbol: ATRX
  Gene Name: alpha thalassemia/mental retardation syndrome X-linked
  ENST ID: ENST00000493470
  CDS Start-End: 1-882
acaactgatggagaaaagaaaagtaaaaaaataagagataaaacttctaaaaagaaggatgaattatctgattatgctgagaagtcaacagggaaaggagatagttgtgactcttcagaggataaaaagagtaagaatggagcatatggtagagagaagaaaaggtgcaagttgcttggaaagagttcaaggaagagacaagattgttcatcatctgatactgagaaatattccatgaaagaagatggttgtaactcttctgataagagactgaaaagaatagaattgagggaaagaagaaatttaagttcaaagagaaatactaaggaaatacaaagtggctcatcatcatctgatgctgaggaaagttctgaagataataaaaagaagaagcaaagaacttcatctaaaaagaaggcagtcattgtcaaggagaaaaagagaaactccctaagaacaagcactaaaaggaagcaagctgacattacatcctcatcttcttctgatatagaagatgatgatcagaattctataggtgagggaagcagcgatgaacagaaaattaagcctgtgactgaaaatttagtgctgtcttcacatactggattttgccaatcttcaggagatgaagccttatctaaatcagtgcctgtcacagtggatgatgatgatgacgacaatgatcctgagaataggtatgattccatctgtaaggactttaaaaagattataacacaccctaggcatgggcacaaacagcagcaacggaacagcaagcaggttgtaaaaaccaggagtgcctgccttagaaagactcgctcacagtcttcctgcaagtttgaaagaaaggccagaaaatgggctaaaactcagaaaccttaagagaaagtaatatcattatttacacacctagcatagggtgtgttataaatacagaactgtcaattttatgttgctatgtaaactgcagtaatttttttggaataatttattttgacagattattgatgaaagtaaatcatatctcagtaaattggtaacaacagacatctcctctatatttgactattgttaattgccatccaatatggtggtcctatttattaaggcctgttgagaagaaacaaaaagagagattactcagatatttaagattaagaaattgctttcaaaataagtgtcagtttacaaggtatctagactgagttagagtttaaccagttttcaaataaaatagaaatacacggtatgagagcatttactttaataagacttaataggtttaaatgtcaacagtgtagcctatacagatatacttaagtaaggggtggctgggtgaagaaaaaaaaagacactatcagtgtagtgaagaataaggaaaacaacagtattaaagactatagctataatgtttcaacataacttttaaacacttcctggacaatagcataccccatgctcataatcttcaacaagaagacagcatggtatagtgcatggaattttggaataatgggcataagggtatctgatttctaacatttttaacaactgtctgtgtcatcatgggcaagtgactttactttttgtcaaaaatttactatatttaagaagaaaaagttgggcgaaattttctgtaattctagtaccaaaaaatccatgatagatttgagatgatttcattaaagagcactacattaaccattcatttattcctaatagtaagttctaacattaagaaaacataaaaatatacatgtaattttctgtcataattttgtaagaaattaactgacttagtaaatgccctgggttcagctgttagtttcgctcttttgtatcttgctgatgctgttaggtttctctgtttcaaaggtcagcattctgctaattaacagaagaatgtttttattaaggtgaatgaacagttttattttacagttttgaatagagcttaattgtggacacaaatattcagattctgcttgcctacttttttaaattaaaaaatgtatatccatttattttatgggataggtggtaggttccagaatggagtgataagggcatacaatttattcatcagggattttacattatatcatcacagccagatactgaaagcatttaaaattttactcttttttaagatgctttaatttttcttcatttatatttgctatttgattttctatacatcatgaggcctcagatgttactcaaaggctaataatgttttaaacattctatatcttaatttaactgtgaatgatttactttaatttcatatttaaccaccaaataagagtgttgttaaggtataatttttttgtgtgtgttagagcttgtcaaaatataaatatcattttcaacttttaagttacctgatcgtatctctctgtaactggcaagtattttattggaaagtatctttaattccaccttgaatttgtgattaaaaaatacaaccctgttgagtacttttgagaagaattgaattttatcttgagcatgtctttctatactcagtttaatttgtttttataaaatatacaatttattaacttgtttaatattcactataccaaagaggtatctaatacccatgggttatgtagtcatgatggggatacaaatactttcttgcactattttagtatagattatatatttgagcatatttgaatatgcactaagcaacttaaaaaattcatttgcagatcacgattaagtcttagaattatttttctaacttcctaatttttgagtaggttgtattttggtagacagcatattgtaattgtatgtaaatttgtacacaattgtgtgtaaattgtgtataaatcttatatgctttgtctttttagcagtattgtaatacattttcagtgttggtgtttatgaagcgatagtgtattattgcaaatggttaactatttggatgcaataaatttttgtaaacctttt

SEQ ID NO: 106692 - DNA, 628 bp, Homo sapiens
  Payload ID: 951
  Gene Symbol: ATRX
  Gene Name: alpha thalassemia/mental retardation syndrome X-linked
  ENST ID: ENST00000622960
  CDS Start-End: 487-628
aattctcctgcctgagcctcggcccaacaaaatggcggcggcagcggtgtcgctttgtttccgcggctcctgcggcggtggcagtggtagcggcctttgagctgtggggaggttccagcagcagctacagtgacgactaagactccagtgcatttctatcgtaaccgggcgcgggggagcgcagatcggcgcccagcaatcacagaagccgacaaggcgttcaagcgaaaacatgaccgctgagcccatgaggtaaaacgcaaccccgtctcatgggccccagcggtctgggcccaggcaccgtctgagtcgggtgtttgggaaggcgttcgcttggtgggttaggcctgtgtgttgcttagccgaaagaggcatcgttttctctttagtgaaagcaagttgaatacattggtgcagaagcttcatgacttccttgcacactcatcagaagaatctgaagaaacaagttctcctccacgacttgcaatgaatcaaaacacagataaaatcagtggttctggaagtaactctgatatgatggaaaacagcaaggaagagggaactagctcttcagaaaaatccaagtcttcaggatcgtcacgatcaaagaggaaaccttcaattgtaa

SEQ ID NO: 106693 - DNA, 2611 bp, Homo sapiens
  Payload ID: 952
  Gene Symbol: ATAT1
  Gene Name: alpha tubulin acetyltransferase 1
  Uniprot ID: Q5SQI0
  ENST ID: ENST00000318999
  CDS Start-End: 45-947
gaagtgacgtcgtgtggggcgggtccgaccgcgcacaatgggccatggagttcccgttcgatgtggacgcgctgttcccggagcggatcacggtgctggaccagcacctgaggcccccagcccgccgacccggaaccacaacgccggcccgtgttgatctacagcagcaaattatgaccattatagatgaactgggcaaggcttctgccaaggcccagaatctttccgctcctatcactagtgcatcaaggatgcagagtaaccgccatgttgtttatattctcaaagacagttcagcccgaccggctggaaaaggagccattattggtttcatcaaagttggatacaagaagctctttgtactggatgatcgtgaggctcataatgaggtagaaccactttgcatcctggacttttacatccatgagtctgtgcaacgccatggccatgggcgagaactcttccagtatatgttgcagaaggagcgagtggaaccgcaccaactggcaattgaccgaccctcacagaagctgctgaaattcctgaataagcactacaatctggagaccacagtcccacaggtgaacaactttgtgatctttgaaggcttctttgcccatcaacatcctccagcaaggaagctgccacccaagagagcagagggagacatcaagccatactcctctagtgaccgagaatttctgaaggtagctgtggagcctccttggcccctaaacagggcccctcgccgcgccacacctccagcccacccacccccccgctccagcagcctgggaaactcaccagaacgaggtcccctccgcccctttgtgccagagcaggagctgctgcgttccttgcgcctctgccccccacaccctaccgcccgccttctgttggctgctgaccctgggggcagcccagctcaacgtcgtcgcaccaggtaataggagttgaagggctaaggagcctcacagctataaaagaggatgttagaaatggcaaagggcaatttgaatccatcagagagatggatcaataagatgggtggcttggggggggtcctgaaacctttcaagaaaaatatttgtgcaagtgatctgggaaaaaaatgcagtgaaggagcagaataggaccttatatggagcctagggaccctggctttaatgtgagagttatgtggaatggtaggaagaacaccgagatccatcgagttgggggaacagagccttctaagattgggaaaatcttcgcttaatacttgctggggaaggggcagtgtctgacagagagtgggaagccactggcttgtgtgccaagagtccatcgcagcaggcagggagtgggcatttcctttatttctctccctttctcttcacctctgacttctctgtttttctctcccccgccccccgccatttcccatctcccttcctcccatccataacatccttccacagctcccttccccgctctgaggagagtcgatactaacagctaccctctccctgccctgggagacctggggtgggcagggaacccctccctgagaacctcagacccactcttccattgcatcctgtaggacccagtggaacctgacagagcccataggattccctcttctactttcttagacagcagggatgtcagggtctcaaactgcctaacactttgtagcttttcttaacacaaaagcaccccttctctcctaacttgggctctgaatactttcccaacaggaagtctgatctgttgccagacttcttggttagatggctcatacatttatctagagaagcacactcttgcttgctgtcaaactttagaccaccatggaaggtctaagggcatcctgtgccagggaaactttttaaggaattttatctatgggataaaccccatattccctctagtgtctactggtggctctaatactgctttgtgctgcctgccacacttgccctttgagcctgcgaatggccgctagtgagcaagctctgcttcagagcagtctagttaggtagaacagggacttaccagcttcccaaagggatctactcaccattgccaaactcttcatttccacattttgtgtaggtgtcagggaaccccaaactggtgttgctttggggtctctaaaggagattggctgacaccaccatttcccccagatccagattctctgagggaggttgtttcttgagagtagatccagagtgtcaaggatctgttagatcctggaatcccttcttgcatccatccctccctggtagctaggtcccgatatactcctgtcttgtgagattgtcgagatgagatgggggaccactcttcctctgtccttcctctctcctttcctccatagcaaggacgaccttccctgctccatgcccagagtatagctagatcccttcccctccctaccctctgaatgtgtgctagatcaggtgccccactgtgtttcctgaaatccttgggagccggatctccccatctcccctactcactcttcccttttcttctctcagtgttgtctgaataaagtgtgaaatcttttgtgttttctaaattgacattttcaatgaaaaaaagaatcacaaaaaaaaaa

SEQ ID NO: 106694 - DNA, 2061 bp, Homo sapiens
  Payload ID: 952
  Gene Symbol: ATAT1
  Gene Name: alpha tubulin acetyltransferase 1
  Uniprot ID: Q5SQI0
  ENST ID: ENST00000319027
  CDS Start-End: 12-944
cacaatgggccatggagttcccgttcgatgtggacgcgctgttcccggagcggatcacggtgctggaccagcacctgaggcccccagcccgccgacccggaaccacaacgccggcccgtgttgatctacagcagcaaattatgaccattatagatgaactgggcaaggcttctgccaaggcccagaatctttccgctcctatcactagtgcatcaaggatgcagagtaaccgccatgttgtttatattctcaaagacagttcagcccgaccggctggaaaaggagccattattggtttcatcaaagttggatacaagaagctctttgtactggatgatcgtgaggctcataatgaggtagaaccactttgcatcctggacttttacatccatgagtctgtgcaacgccatggccatgggcgagaactcttccagtatatgttgcagaaggagcgagtggaaccgcaccaactggcaattgaccgaccctcacagaagctgctgaaattcctgaataagcactacaatctggagaccacagtcccacaggtgaacaactttgtgatctttgaaggcttctttgcccatcaacatcctccagcaaggaagctgccacccaagagagcagagggagacatcaagccatactcctctagtgaccgagaatttctgaaggtagctgtggagcctccttggcccctaaacagggcccctcgccgcgccacacctccagcccacccacccccccgctccagcagcctgggaaactcaccagaacgaggtcccctccgcccctttgtgccagagcaggagctgctgcgttccttgcgcctctgccccccacaccctaccgcccgccttctgttggctgctgaccctgggggcagcccagctcaacgtcgtcgcaccagctcccttccccgctctgaggagagtcgatactaacagctaccctctccctgccctgggagacctggggtgggcagggaacccctccctgagaacctcagacccactcttccattgcatcctgtaggacccagtggaacctgacagagcccataggattccctcttctactttcttagacagcagggatgtcagggtctcaaactgcctaacactttgtagcttttcttaacacaaaagcaccccttctctcctaacttgggctctgaatactttcccaacaggaagtctgatctgttgccagacttcttggttagatggctcatacatttatctagagaagcacactcttgcttgctgtcaaactttagaccaccatggaaggtctaagggcatcctgtgccagggaaactttttaaggaattttatctatgggataaaccccatattccctctagtgtctactggtggctctaatactgctttgtgctgcctgccacacttgccctttgagcctgcgaatggccgctagtgagcaagctctgcttcagagcagtctagttaggtagaacagggacttaccagcttcccaaagggatctactcaccattgccaaactcttcatttccacattttgtgtaggtgtcagggaaccccaaactggtgttgctttggggtctctaaaggagattggctgacaccaccatttcccccagatccagattctctgagggaggttgtttcttgagagtagatccagagtgtcaaggatctgttagatcctggaatcccttcttgcatccatccctccctggtagctaggtcccgatatactcctgtcttgtgagattgtcgagatgagatgggggaccactcttcctctgtccttcctctctcctttcctccatagcaaggacgaccttccctgctccatgcccagagtatagctagatcccttcccctccctaccctctgaatgtgtgctagatcaggtgccccactgtgtttcctgaaatccttgggagccggatctccccatctcccctactcactcttcccttttcttctctcagtgttgtctgaataaagtgtgaaatcttttgtgttttctaaattgacattttcaatgaaaaaaagaatcacaaaaaaaaaa

SEQ ID NO: 106695 - DNA, 1728 bp, Homo sapiens
  Payload ID: 952
  Gene Symbol: ATAT1
  Gene Name: alpha tubulin acetyltransferase 1
  Uniprot ID: Q5SQI0
  ENST ID: ENST00000330083
  CDS Start-End: 319-1548
atggagttcccgttcgatgtggacgcgctgttcccggagcggatcacggtgctggaccagcacctgaggcccccagcccgccgacccggaaccacaacgccggcccggtgacagctcaaacccaccctctggcccttttctcccggttcctctccaaacctggtccaggcaccacgcccccttctcactgactagtgatcgccccttttgatgtccaggcctgcctttttggtgacctctgaccctgggcctagtgggattgatcagcgcttggatctgtgacctttcaccccgggcccaaaatgtcccaatcaaaggatgtggttgacctggcctttctgcttcctcacaataaccttaagggaggagggagtgtgccaccttgaaagtgttgatctacagcagcaaattatgaccattatagatgaactgggcaaggcttctgccaaggcccagaatctttccgctcctatcactagtgcatcaaggatgcagagtaaccgccatgttgtttatattctcaaagacagttcagcccgaccggctggaaaaggagccattattggtttcatcaaagttggatacaagaagctctttgtactggatgatcgtgaggctcataatgaggtagaaccactttgcatcctggacttttacatccatgagtctgtgcaacgccatggccatgggcgagaactcttccagtatatgttgcagaaggagcgagtggaaccgcaccaactggcaattgaccgaccctcacagaagctgctgaaattcctgaataagcactacaatctggagaccacagtcccacaggtgaacaactttgtgatctttgaaggcttctttgcccatcaacatcggccccctgctccctctctgagggcaactcgacactctcgtgctgctgcagtcgatcccacgcccgctgctccagcaaggaagctgccacccaagagagcagagggagacatcaagccatactcctctagtgaccgagaatttctgaaggtagctgtggagcctccttggcccctaaacagggcccctcgccgcgccacacctccagcccacccacccccccgctccagcagcctgggaaactcaccagaacgaggtcccctccgcccctttgtgccagagcaggagctgctgcgttccttgcgcctctgccccccacaccctaccgcccgccttctgttggctgctgaccctgggggcagcccagctcaacgtcgtcgcaccagggggactcccccaggtctggtagcccaaagctgctgctacagccgccatgggggggtgaattcctcatcccccaatacaggcaaccaagactccaagcagggagaacaggaaacaaagaataggtctgccagtgaggagcaggccttgtcacaggatgggtctggggagaagcccatgcacacagctcctccacaggccccggccccgccagcccagtcctggacagtgggtggggacatactcaacgccaggttcattcgaaacctgcaggaacgtcgcagcaccaggccttggtgaccgcagccccgtcaaacatcttcaaagtattatttctccctcactacaggaaagagccaaagcccaaccctcataatagatggatacattcattcattcattcattcagcaggcttatcagattcaagtcatttgtatcttttaaccagaccaataaaagtatttatttttatcacaaga

SEQ ID NO: 106696 - DNA, 2119 bp, Homo sapiens
  Payload ID: 952
  Gene Symbol: ATAT1
  Gene Name: alpha tubulin acetyltransferase 1
  Uniprot ID: Q5SQI0
  ENST ID: ENST00000329992
  CDS Start-End: 1-1002
atggagttcccgttcgatgtggacgcgctgttcccggagcggatcacggtgctggaccagcacctgaggcccccagcccgccgacccggaaccacaacgccggcccgtgttgatctacagcagcaaattatgaccattatagatgaactgggcaaggcttctgccaaggcccagaatctttccgctcctatcactagtgcatcaaggatgcagagtaaccgccatgttgtttatattctcaaagacagttcagcccgaccggctggaaaaggagccattattggtttcatcaaagttggatacaagaagctctttgtactggatgatcgtgaggctcataatgaggtagaaccactttgcatcctggacttttacatccatgagtctgtgcaacgccatggccatgggcgagaactcttccagtatatgttgcagaaggagcgagtggaaccgcaccaactggcaattgaccgaccctcacagaagctgctgaaattcctgaataagcactacaatctggagaccacagtcccacaggtgaacaactttgtgatctttgaaggcttctttgcccatcaacatcggccccctgctccctctctgagggcaactcgacactctcgtgctgctgcagtcgatcccacgcccgctgctccagcaaggaagctgccacccaagagagcagagggagacatcaagccatactcctctagtgaccgagaatttctgaaggtagctgtggagcctccttggcccctaaacagggcccctcgccgcgccacacctccagcccacccacccccccgctccagcagcctgggaaactcaccagaacgaggtcccctccgcccctttgtgccagagcaggagctgctgcgttccttgcgcctctgccccccacaccctaccgcccgccttctgttggctgctgaccctgggggcagcccagctcaacgtcgtcgcaccagctcccttccccgctctgaggagagtcgatactaacagctaccctctccctgccctgggagacctggggtgggcagggaacccctccctgagaacctcagacccactcttccattgcatcctgtaggacccagtggaacctgacagagcccataggattccctcttctactttcttagacagcagggatgtcagggtctcaaactgcctaacactttgtagcttttcttaacacaaaagcaccccttctctcctaacttgggctctgaatactttcccaacaggaagtctgatctgttgccagacttcttggttagatggctcatacatttatctagagaagcacactcttgcttgctgtcaaactttagaccaccatggaaggtctaagggcatcctgtgccagggaaactttttaaggaattttatctatgggataaaccccatattccctctagtgtctactggtggctctaatactgctttgtgctgcctgccacacttgccctttgagcctgcgaatggccgctagtgagcaagctctgcttcagagcagtctagttaggtagaacagggacttaccagcttcccaaagggatctactcaccattgccaaactcttcatttccacattttgtgtaggtgtcagggaaccccaaactggtgttgctttggggtctctaaaggagattggctgacaccaccatttcccccagatccagattctctgagggaggttgtttcttgagagtagatccagagtgtcaaggatctgttagatcctggaatcccttcttgcatccatccctccctggtagctaggtcccgatatactcctgtcttgtgagattgtcgagatgagatgggggaccactcttcctctgtccttcctctctcctttcctccatagcaaggacgaccttccctgctccatgcccagagtatagctagatcccttcccctccctaccctctgaatgtgtgctagatcaggtgccccactgtgtttcctgaaatccttgggagccggatctccccatctcccctactcactcttcccttttcttctctcagtgttgtctgaataaagtgtgaaatcttttgtgttttctaaattgacattttcaatgaaaaaaagaatcacaaaaaaaaaa

SEQ ID NO: 106697 - DNA, 2646 bp, Homo sapiens
  Payload ID: 952
  Gene Symbol: ATAT1
  Gene Name: alpha tubulin acetyltransferase 1
  Uniprot ID: Q5SQI0
  ENST ID: ENST00000376483
  CDS Start-End: 11-982
acaatgggccatggagttcccgttcgatgtggacgcgctgttcccggagcggatcacggtgctggaccagcacctgaggcccccagcccgccgacccggaaccacaacgccggcccgtgttgatctacagcagcaaattatgaccattatagatgaactgggcaaggcttctgccaaggcccagaatctttccgctcctatcactagtgcatcaaggatgcagagtaaccgccatgttgtttatattctcaaagacagttcagcccgaccggctggaaaaggagccattattggtttcatcaaagttggatacaagaagctctttgtactggatgatcgtgaggctcataatgaggtagaaccactttgcatcctggacttttacatccatgagtctgtgcaacgccatggccatgggcgagaactcttccagtatatgttgcagaaggagcgagtggaaccgcaccaactggcaattgaccgaccctcacagaagctgctgaaattcctgaataagcactacaatctggagaccacagtcccacaggtgaacaactttgtgatctttgaaggcttctttgcccatcaacatcggccccctgctccctctctgagggcaactcgacactctcgtgctgctgcagtcgatcccacgcccgctgctccagcaaggaagctgccacccaagagagcagagggagacatcaagccatactcctctagtgaccgagaatttctgaaggtagctgtggagcctccttggcccctaaacagggcccctcgccgcgccacacctccagcccacccacccccccgctccagcagcctgggaaactcaccagaacgaggtcccctccgcccctttgtgccagagcaggagctgctgcgttccttgcgcctctgccccccacaccctaccgcccgccttctgttggctgctgaccctgggggcagcccagctcaacgtcgtcgcaccaggtaataggagttgaagggctaaggagcctcacagctataaaagaggatgttagaaatggcaaagggcaatttgaatccatcagagagatggatcaataagatgggtggcttggggggggtcctgaaacctttcaagaaaaatatttgtgcaagtgatctgggaaaaaaatgcagtgaaggagcagaataggaccttatatggagcctagggaccctggctttaatgtgagagttatgtggaatggtaggaagaacaccgagatccatcgagttgggggaacagagccttctaagattgggaaaatcttcgcttaatacttgctggggaaggggcagtgtctgacagagagtgggaagccactggcttgtgtgccaagagtccatcgcagcaggcagggagtgggcatttcctttatttctctccctttctcttcacctctgacttctctgtttttctctcccccgccccccgccatttcccatctcccttcctcccatccataacatccttccacagctcccttccccgctctgaggagagtcgatactaacagctaccctctccctgccctgggagacctggggtgggcagggaacccctccctgagaacctcagacccactcttccattgcatcctgtaggacccagtggaacctgacagagcccataggattccctcttctactttcttagacagcagggatgtcagggtctcaaactgcctaacactttgtagcttttcttaacacaaaagcaccccttctctcctaacttgggctctgaatactttcccaacaggaagtctgatctgttgccagacttcttggttagatggctcatacatttatctagagaagcacactcttgcttgctgtcaaactttagaccaccatggaaggtctaagggcatcctgtgccagggaaactttttaaggaattttatctatgggataaaccccatattccctctagtgtctactggtggctctaatactgctttgtgctgcctgccacacttgccctttgagcctgcgaatggccgctagtgagcaagctctgcttcagagcagtctagttaggtagaacagggacttaccagcttcccaaagggatctactcaccattgccaaactcttcatttccacattttgtgtaggtgtcagggaaccccaaactggtgttgctttggggtctctaaaggagattggctgacaccaccatttcccccagatccagattctctgagggaggttgtttcttgagagtagatccagagtgtcaaggatctgttagatcctggaatcccttcttgcatccatccctccctggtagctaggtcccgatatactcctgtcttgtgagattgtcgagatgagatgggggaccactcttcctctgtccttcctctctcctttcctccatagcaaggacgaccttccctgctccatgcccagagtatagctagatcccttcccctccctaccctctgaatgtgtgctagatcaggtgccccactgtgtttcctgaaatccttgggagccggatctccccatctcccctactcactcttcccttttcttctctcagtgttgtctgaataaagtgtgaaatcttttgtgttttctaaattgacattttcaatgaaaaaaagaatcacaaaaaaaaaa

SEQ ID NO: 106698 - DNA, 1476 bp, Homo sapiens
  Payload ID: 952
  Gene Symbol: ATAT1
  Gene Name: alpha tubulin acetyltransferase 1
  Uniprot ID: Q5SQI0
  ENST ID: ENST00000376485
  CDS Start-End: 31-1296
tggggcgggtccgaccgcgcacaatgggccatggagttcccgttcgatgtggacgcgctgttcccggagcggatcacggtgctggaccagcacctgaggcccccagcccgccgacccggaaccacaacgccggcccgtgttgatctacagcagcaaattatgaccattatagatgaactgggcaaggcttctgccaaggcccagaatctttccgctcctatcactagtgcatcaaggatgcagagtaaccgccatgttgtttatattctcaaagacagttcagcccgaccggctggaaaaggagccattattggtttcatcaaagttggatacaagaagctctttgtactggatgatcgtgaggctcataatgaggtagaaccactttgcatcctggacttttacatccatgagtctgtgcaacgccatggccatgggcgagaactcttccagtatatgttgcagaaggagcgagtggaaccgcaccaactggcaattgaccgaccctcacagaagctgctgaaattcctgaataagcactacaatctggagaccacagtcccacaggtgaacaactttgtgatctttgaaggcttctttgcccatcaacatcggccccctgctccctctctgagggcaactcgacactctcgtgctgctgcagtcgatcccacgcccgctgctccagcaaggaagctgccacccaagagagcagagggagacatcaagccatactcctctagtgaccgagaatttctgaaggtagctgtggagcctccttggcccctaaacagggcccctcgccgcgccacacctccagcccacccacccccccgctccagcagcctgggaaactcaccagaacgaggtcccctccgcccctttgtgccagagcaggagctgctgcgttccttgcgcctctgccccccacaccctaccgcccgccttctgttggctgctgaccctgggggcagcccagctcaacgtcgtcgcaccagggggactcccccaggtctggtagcccaaagctgctgctacagccgccatgggggggtgaattcctcatcccccaatacaggcaaccaagactccaagcagggagaacaggaaacaaagaataggtctgccagtgaggagcaggccttgtcacaggatgggtctggggagaagcccatgcacacagctcctccacaggccccggccccgccagcccagtcctggacagtgggtggggacatactcaacgccaggttcattcgaaacctgcaggaacgtcgcagcaccaggccttggtgaccgcagccccgtcaaacatcttcaaagtattatttctccctcactacaggaaagagccaaagcccaaccctcataatagatggatacattcattcattcattcattcagcaggcttatcagattcaagtcatttgtatcttttaaccagaccaataaaagtatttatttttatcacaaga

SEQ ID NO: 106699 - DNA, 1728 bp, Homo sapiens; identical to SEQ ID NO: 106695
  Payload ID: 952
  Gene Symbol: ATAT1
  Gene Name: alpha tubulin acetyltransferase 1
  Uniprot ID: Q5SQI0
  ENST ID: ENST00000383582
  CDS Start-End: 319-1548

SEQ ID NO: 106700 - DNA, 2119 bp, Homo sapiens
  Payload ID: 952
  Gene Symbol: ATAT1
  Gene Name: alpha tubulin acetyltransferase 1
  Uniprot ID: Q5SQI0
  ENST ID: ENST00000383583
  CDS Start-End: 1-1002
atggagttcccgttcgatgtggacgcgctgttcccggagcggatcacggtgctggaccagcacctgaggcccccagcccgccgacccggaaccacaacgccggcccgtgttgatctacagcagcaaattatgaccattatagatgaactgggcaaggcttctgccaaggcccagaatctttccgctcctatcactagtgcatcaaggatgcagagtaaccgccatgttgtttatattctcaaagacagttcagcccgaccggctggaaaaggagccattattggtttcatcaaagttggatacaagaagctctttgtactggatgatcgtgaggctcataatgaggtagaaccactttgcatcctggacttttacatccatgagtctgtgcaacgccatggccatgggcgagaactcttccagtatatgttgcagaaggagcgagtggaaccgcaccaactggcaattgaccgaccctcacagaagctgctgaaattcctgaataagcactacaatctggagaccacagtcccacaggtgaacaactttgtgatctttgaaggcttctttgcccatcaacatcggccccctgctccctctctgagggcaactcgacactctcgtgctgctgcagtcgatcccacgcccgctgctccagcaaggaagctgccacccaagagagcagagggagacatcaagccatactcctctagtgaccgagaatttctgaaggtagctgtggagcctccttggcccctaaacagggcccctcgccgcgccacacctccagcccacccacccccccgctccagcagcctgggaaactcaccagaacgaggtcccctccgcccctttgtgccagagcaggagctgctgcgttccttgcgcctctgccccccacaccctaccgcccgccttctgttggctgctgaccctgggggcagcccagctcaacgtcgtcgcaccagctcccttccccgctctgaggagagtcgatactaacagctaccctctccctgccctgggagacctggggtgggcagggaacccctccctgagaacctcagacccactcttccattgcatcctgtaggacccagtggaacctgacagagcccataggattccctcttctactttcttagacagcagggatgtcagggtctcaaactgcctaacactttgtagcttttcttaacacaaaagcaccccttctctcctaacttgggctctgaatactttcccaacaggaagtctgatctgttgccagacttcttggttagatggctcatacatttatctagagaagcacactcttgcttgctgtcaaactttagaacaccatggaaggtctaagggcatcctgtgccagggaaactttttaaggaattttatctatgggataaaccccatattccctctagtgtctactggtggctctaatactgctttgtgctgcctgccacacttgccctttgagcctgcgaatggccgctagtgagcaagctctgcttcagagcagtctagttaggtagaacagggacttaccagcttcccaaagggatctactcaccattgccaaactcttcatttccacattttgtgtaggtgtcagggaaccccaaactggtgttgctttggggtctctaaaggagattggctgacaccaccatttcccccagatccagattctctgagggaggttgtttcttgagagtagatccagagtgtcaaggatctgttagatcctggaatcccttcttgcatccatccctccctggtagctaggtcccgatatactcctgtcttgtgagattgtcgagatgagatgggggaccactcttcctctgtccttcctctctcctttcctccatagcaaggacgaccttccctgctccatgcccagagtatagctagatcccttcccctccctaccctctgaatgtgtgctagatcaggtgccccactgtgtttcctgaaatccttgggagccggatctccccatctcccctactcactcttcccttttcttctctcagtgttgtctgaataaagtgtgaaatcttttgtgttttctaaattgacattttcaatgaaaaaaagaatcacaaaaaaaaaa

SEQ ID NO: 106701 - DNA, 2611 bp, Homo sapiens
  Payload ID: 952
  Gene Symbol: ATAT1
  Gene Name: alpha tubulin acetyltransferase 1
  Uniprot ID: Q5SQI0
  ENST ID: ENST00000383584
  CDS Start-End: 45-947
gaagtgacgtcgtgtggggcgggtccgaccgcgcacaatgggccatggagttcccgttcgatgtggacgcgctgttcccggagcggatcacggtgctggaccagcacctgaggcccccagcccgccgacccggaaccacaacgccggcccgtgttgatctacagcagcaaattatgaccattatagatgaactgggcaaggcttctgccaaggcccagaatctttccgctcctatcactagtgcatcaaggatgcagagtaaccgccatgttgtttatattctcaaagacagttcagcccgaccggctggaaaaggagccattattggtttcatcaaagttggatacaagaagctctttgtactggatgatcgtgaggctcataatgaggtagaaccactttgcatcctggacttttacatccatgagtctgtgcaacgccatggccatgggcgagaactcttccagtatatgttgcagaaggagcgagtggaaccgcaccaactggcaattgaccgaccctcacagaagctgctgaaattcctgaataagcactacaatctggagaccacagtcccacaggtgaacaactttgtgatctttgaaggcttctttgcccatcaacatcctccagcaaggaagctgccacccaagagagcagagggagacatcaagccatactcctctagtgaccgagaatttctgaaggtagctgtggagcctccttggcccctaaacagggcccctcgccgcgccacacctccagcccacccacccccccgctccagcagcctgggaaactcaccagaacgaggtcccctccgcccctttgtgccagagcaggagctgctgcgttccttgcgcctctgccccccacaccctaccgcccgccttctgttggctgctgaccctgggggcagcccagctcaacgtcgtcgcaccaggtaataggagttgaagggctaaggagcctcacagctataaaagaggatgttagaaatggcaaagggcaatttgaatccatcagagagatggatcaataagatgggtggcttggggggggtcctgaaacctttcaagaaaaatatttgtgcaagtgatctgggaaaaaaatgcagtgaaggagcagaataggaccttatatggagcctagggaccctggctttaatgtgagagttatgtggaatggtaggaagaacaccgagatccatcgagttgggggaacagagccttctaagattgggaaaatcttcgcttaatacttgctggggaaggggcagtgtctgacagagagtgggaagccactggcttgtgtgccaagagtccatcgcagcaggcagggagtgggcatttcctttatttctctccctttctcttcacctctgacttctctgtttttctctcccccgccccccgccatttcccatctcccttcctcccatccataacatccttccacagctcccttccccgctctgaggagagtcgatactaacagctaccctctccctgccctgggagacctggggtgggcagggaacccctccctgagaacctcagacccactcttccattgcatcctgtaggacccagtggaacctgacagagcccataggattccctcttctactttcttagacagcagggatgtcagggtctcaaactgcctaacactttgtagcttttcttaacacaaaagcaccccttctctcctaacttgggctctgaatactttcccaacaggaagtctgatctgttgccagacttcttggttagatggctcatacatttatctagagaagcacactcttgcttgctgtcaaactttagaacaccatggaaggtctaagggcatcctgtgccagggaaactttttaaggaattttatctatgggataaaccccatattccctctagtgtctactggtggctctaatactgctttgtgctgcctgccacacttgccctttgagcctgcgaatggccgctagtgagcaagctctgcttcagagcagtctagttaggtagaacagggacttaccagcttcccaaagggatctactcaccattgccaaactcttcatttccacattttgtgtaggtgtcagggaaccccaaactggtgttgctttggggtctctaaaggagattggctgacaccaccatttcccccagatccagattctctgagggaggttgtttcttgagagtagatccagagtgtcaaggatctgttagatcctggaatcccttcttgcatccatccctccctggtagctaggtcccgatatactcctgtcttgtgagattgtcgagatgagatgggggaccactcttcctctgtccttcctctctcctttcctccatagcaaggacgaccttccctgctccatgcccagagtatagctagatcccttcccctccctaccctctgaatgtgtgctagatcaggtgccccactgtgtttcctgaaatccttgggagccggatctccccatctcccctactcactcttcccttttcttctctcagtgttgtctgaataaagtgtgaaatcttttgtgttttctaaattgacattttcaatgaaaaaaagaatcacaaaaaaaaaa

SEQ ID NO: 106702 - DNA, 1476 bp, Homo sapiens; identical to SEQ ID NO: 106698
  Payload ID: 952
  Gene Symbol: ATAT1
  Gene Name: alpha tubulin acetyltransferase 1
  Uniprot ID: Q5SQI0
  ENST ID: ENST00000383585
  CDS Start-End: 31-1296

SEQ ID NO: 106703 - DNA, 2646 bp, Homo sapiens
  Payload ID: 952
  Gene Symbol: ATAT1
  Gene Name: alpha tubulin acetyltransferase 1
  Uniprot ID: Q5SQI0
  ENST ID: ENST00000400575
  CDS Start-End: 11-982
acaatgggccatggagttcccgttcgatgtggacgcgctgttcccggagcggatcacggtgctggaccagcacctgaggcccccagcccgccgacccggaaccacaacgccggcccgtgttgatctacagcagcaaattatgaccattatagatgaactgggcaaggcttctgccaaggcccagaatctttccgctcctatcactagtgcatcaaggatgcagagtaaccgccatgttgtttatattctcaaagacagttcagcccgaccggctggaaaaggagccattattggtttcatcaaagttggatacaagaagctctttgtactggatgatcgtgaggctcataatgaggtagaaccactttgcatcctggacttttacatccatgagtctgtgcaacgccatggccatgggcgagaactcttccagtatatgttgcagaaggagcgagtggaaccgcaccaactggcaattgaccgaccctcacagaagctgctgaaattcctgaataagcactacaatctggagaccacagtcccacaggtgaacaactttgtgatctttgaaggcttctttgcccatcaacatcggccccctgctccctctctgagggcaactcgacactctcgtgctgctgcagtcgatcccacgcccgctgctccagcaaggaagctgccacccaagagagcagagggagacatcaagccatactcctctagtgaccgagaatttctgaaggtagctgtggagcctccttggcccctaaacagggcccctcgccgcgccacacctccagcccacccacccccccgctccagcagcctgggaaactcaccagaacgaggtcccctccgcccctttgtgccagagcaggagctgctgcgttccttgcgcctctgccccccacaccctaccgcccgccttctgttggctgctgaccctgggggcagcccagctcaacgtcgtcgcaccaggtaataggagttgaagggctaaggagcctcacagctataaaagaggatgttagaaatggcaaagggcaatttgaatccatcagagagatggatcaataagatgggtggcttggggggggtcctgaaacctttcaagaaaaatatttgtgcaagtgatctgggaaaaaaatgcagtgaaggagcagaataggaccttatatggagcctagggaccctggctttaatgtgagagttatgtggaatggtaggaagaacaccgagatccatcgagttgggggaacagagccttctaagattgggaaaatcttcgcttaatacttgctggggaaggggcagtgtctgacagagagtgggaagccactggcttgtgtgccaagagtccatcgcagcaggcagggagtgggcatttcctttatttctctccctttctcttcacctctgacttctctgtttttctctcccccgccccccgccatttcccatctcccttcctcccatccataacatccttccacagctcccttccccgctctgaggagagtcgatactaacagctaccctctccctgccctgggagacctggggtgggcagggaacccctccctgagaacctcagacccactcttccattgcatcctgtaggacccagtggaacctgacagagcccataggattccctcttctactttcttagacagcagggatgtcagggtctcaaactgcctaacactttgtagcttttcttaacacaaaagcaccccttctctcctaacttgggctctgaatactttcccaacaggaagtctgatctgttgccagacttcttggttagatggctcatacatttatctagagaagcacactcttgcttgctgtcaaactttagaacaccatggaaggtctaagggcatcctgtgccagggaaactttttaaggaattttatctatgggataaaccccatattccctctagtgtctactggtggctctaatactgctttgtgctgcctgccacacttgccctttgagcctgcgaatggccgctagtgagcaagctctgcttcagagcagtctagttaggtagaacagggacttaccagcttcccaaagggatctactcaccattgccaaactcttcatttccacattttgtgtaggtgtcagggaaccccaaactggtgttgctttggggtctctaaaggagattggctgacaccaccatttcccccagatccagattctctgagggaggttgtttcttgagagtagatccagagtgtcaaggatctgttagatcctggaatcccttcttgcatccatccctccctggtagctaggtcccgatatactcctgtcttgtgagattgtcgagatgagatgggggaccactcttcctctgtccttcctctctcctttcctccatagcaaggacgaccttccctgctccatgcccagagtatagctagatcccttcccctccctaccctctgaatgtgtgctagatcaggtgccccactgtgtttcctgaaatccttgggagccggatctccccatctcccctactcactcttcccttttcttctctcagtgttgtctgaataaagtgtgaaatcttttgtgttttctaaattgacattttcaatgaaaaaaagaatcacaaaaaaaaaa

SEQ ID NO: 106704 - DNA, 2061 bp, Homo sapiens
  Payload ID: 952
  Gene Symbol: ATAT1
  Gene Name: alpha tubulin acetyltransferase 1
  Uniprot ID: Q5SQI0
  ENST ID: ENST00000400576
  CDS Start-End: 12-944
cacaatgggccatggagttcccgttcgatgtggacgcgctgttcccggagcggatcacggtgctggaccagcacctgaggcccccagcccgccgacccggaaccacaacgccggcccgtgttgatctacagcagcaaattatgaccattatagatgaactgggcaaggcttctgccaaggcccagaatctttccgctcctatcactagtgcatcaaggatgcagagtaaccgccatgttgtttatattctcaaagacagttcagcccgaccggctggaaaaggagccattattggtttcatcaaagttggatacaagaagctctttgtactggatgatcgtgaggctcataatgaggtagaaccactttgcatcctggacttttacatccatgagtctgtgcaacgccatggccatgggcgagaactcttccagtatatgttgcagaaggagcgagtggaaccgcaccaactggcaattgaccgaccctcacagaagctgctgaaattcctgaataagcactacaatctggagaccacagtcccacaggtgaacaactttgtgatctttgaaggcttctttgcccatcaacatcctccagcaaggaagctgccacccaagagagcagagggagacatcaagccatactcctctagtgaccgagaatttctgaaggtagctgtggagcctccttggcccctaaacagggcccctcgccgcgccacacctccagcccacccacccccccgctccagcagcctgggaaactcaccagaacgaggtcccctccgcccctttgtgccagagcaggagctgctgcgttccttgcgcctctgccccccacaccctaccgcccgccttctgttggctgctgaccctgggggcagcccagctcaacgtcgtcgcaccagctcccttccccgctctgaggagagtcgatactaacagctaccctctccctgccctgggagacctggggtgggcagggaacccctccctgagaacctcagacccactcttccattgcatcctgtaggacccagtggaacctgacagagcccataggattccctcttctactttcttagacagcagggatgtcagggtctcaaactgcctaacactttgtagcttttcttaacacaaaagcaccccttctctcctaacttgggctctgaatactttcccaacaggaagtctgatctgttgccagacttcttggttagatggctcatacatttatctagagaagcacactcttgcttgctgtcaaactttagaacaccatggaaggtctaagggcatcctgtgccagggaaactttttaaggaattttatctatgggataaaccccatattccctctagtgtctactggtggctctaatactgctttgtgctgcctgccacacttgccctttgagcctgcgaatggccgctagtgagcaagctctgcttcagagcagtctagttaggtagaacagggacttaccagcttcccaaagggatctactcaccattgccaaactcttcatttccacattttgtgtaggtgtcagggaaccccaaactggtgttgctttggggtctctaaaggagattggctgacaccaccatttcccccagatccagattctctgagggaggttgtttcttgagagtagatccagagtgtcaaggatctgttagatcctggaatcccttcttgcatccatccctccctggtagctaggtcccgatatactcctgtcttgtgagattgtcgagatgagatgggggaccactcttcctctgtccttcctctctcctttcctccatagcaaggacgaccttccctgctccatgcccagagtatagctagatcccttcccctccctaccctctgaatgtgtgctagatcaggtgccccactgtgtttcctgaaatccttgggagccggatctccccatctcccctactcactcttcccttttcttctctcagtgttgtctgaataaagtgtgaaatcttttgtgttttctaaattgacattttcaatgaaaaaaagaatcacaaaaaaaaaa

SEQ ID NO: 106705 - DNA, 2646 bp, Homo sapiens
  Payload ID: 952
  Gene Symbol: ATAT1
  Gene Name: alpha tubulin acetyltransferase 1
  Uniprot ID: Q5SQI0
  ENST ID: ENST00000457161
  CDS Start-End: 11-982
acaatgggccatggagttcccgttcgatgtggacgcgctgttcccggagcggatcacggtgctggaccagcacctgaggcccccagcccgccgacccggaaccacaacgccggcccgtgttgatctacagcagcaaattatgaccattatagatgaactgggcaaggcttctgccaaggcccagaatctttccgctcctatcactagtgcatcaaggatgcagagtaaccgccatgttgtttatattctcaaagacagttcagcccgaccggctggaaaaggagccattattggtttcatcaaagttggatacaagaagctctttgtactggatgatcgtgaggctcataatgaggtagaaccactttgcatcctggacttttacatccatgagtctgtgcaacgccatggccatgggcgagaactcttccagtatatgttgcagaaggagcgagtggaaccgcaccaactggcaattgaccgaccctcacagaagctgctgaaattcctgaataagcactacaatctggagaccacagtcccacaggtgaacaactttgtgatctttgaaggcttctttgcccatcaacatcggccccctgctccctctctgagggcaactcgacactctcgtgctgctgcagtcgatcccacgcccgctgctccagcaaggaagctgccacccaagagagcagagggagacatcaagccatactcctctagtgaccgagaatttctgaaggtagctgtggagcctccttggcccctaaacagggcccctcgccgcgccacacctccagcccacccacccccccgctccagcagcctgggaaactcaccagaacgaggtcccctccgcccctttgtgccagagcaggagctgctgcgttccttgcgcctctgccccccacaccctaccgcccgccttctgttggctgctgaccctgggggcagcccagctcaacgtcgtcgcaccaggtaataggagttgaagggctaaggagcctcacagctataaaagaggatgttagaaatggcaaagggcaatttgaatccatcagagagatggatcaataagatgggtggcttggggggggtcctgaaacctttcaagaaaaatatttgtgcaagtgatctgggaaaaaaatgcagtgaaggagcagaataggaccttatatggagcctagggaccctggctttaatgtgagagttatgtggaatggtaggaagaacaccgagatccatcgagttgggggaacagagccttctaagattgggaaaatcttcgcttaatacttgctggggaaggggcagtgtctgacagagagtgggaagccactggcttgtgtgccaagagtccatcgcagcaggcagggagtgggcatttcctttatttctctccctttctcttcacctctgacttctctgtttttctctcccccgccccccgccatttcccatctcccttcctcccatccataacatccttccacagctcccttccccgctctgaggagagtcgatactaacagctaccctatccctgccctgggagacctggggtgggcagggaacccctccctgagaacctcagacccactcttccattgcatcctgtaggacccagtggaacctgacagagcccataggattccctcttctactttcttagacagcagggatgtcagggtctcaaactgcctaacactttgtagcttttcttaacacaaaagcaccccttctctcctaacttgggctctgaatactttcccaacaggaagtctgatctgttgccagacttcttggttagatggctcatacatttatctagagaagcacactcttgcttgctgtcaaactttagaacaccatggaaggtctaagggcatcctgtgccagggaaactttttaaggaattttatctatgggataaaccccatattccctctagtgtctactggtggctctaatactgctttgtgctgcctgccacacttgccctttgagcctgcgaatggccgctagtgagcaagctctgcttcagagcagtctagttaggtagaacagggacttaccagcttcccaaagggatctactcaccattgccaaactcttcatttccacattttgtgtaggtgtcagggaaccccaaactggtgttgctttggggtctctaaaggagattggctgacaccaccatttcccccagatccagattctctgagggaggttgtttcttgagagtagatccagagtgtcaaggatctgttagatcctggaatcccttcttgcatccatccctccctggtagctaggtcccgatatactcctgtcttgtgagattgtcgagatgagatgggggaccactcttcctctgtccttcctctctcctttcctccatagcaaggacgaccttccctgctccatgcccagagtatagctagatcccttcccctccctaccctctgaatgtgtgctagatcaggtgccccactgtgtttcctgaaatccttgggagccggatctccccatctcccctactcactcttcccttttcttctctcagtgttgtctgaataaagtgtgaaatcttttgtgttttctaaattgacattttcaatgaaaaaaagaatcacaaaaaaaaaa

SEQ ID NO: 106706 - DNA, 2646 bp, Homo sapiens; identical to SEQ ID NO: 106703
  Payload ID: 952
  Gene Symbol: ATAT1
  Gene Name: alpha tubulin acetyltransferase 1
  Uniprot ID: Q5SQI0
  ENST ID: ENST00000411724
  CDS Start-End: 11-982

SEQ ID NO: 106707 - DNA, 1728 bp, Homo sapiens; identical to SEQ ID NO: 106695
  Payload ID: 952
  Gene Symbol: ATAT1
  Gene Name: alpha tubulin acetyltransferase 1
  Uniprot ID: Q5SQI0
  ENST ID: ENST00000448670
  CDS Start-End: 319-1548

SEQ ID NO: 106708 - DNA, 1728 bp, Homo sapiens; identical to SEQ ID NO: 106695
  Payload ID: 952
  Gene Symbol: ATAT1
  Gene Name: alpha tubulin acetyltransferase 1
  Uniprot ID: Q5SQI0
  ENST ID: ENST00000425448
  CDS Start-End: 319-1548

SEQ ID NO: 106709 - DNA, 2646 bp, Homo sapiens; identical to SEQ ID NO: 106703
  Payload ID: 952
  Gene Symbol: ATAT1
  Gene Name: alpha tubulin acetyltransferase 1
  Uniprot ID: Q5SQI0
  ENST ID: ENST00000446100
  CDS Start-End: 11-982

SEQ ID NO: 106710 - DNA, 2611 bp, Homo sapiens; identical to SEQ ID NO: 106693
  Payload ID: 952
  Gene Symbol: ATAT1
  Gene Name: alpha tubulin acetyltransferase 1
  Uniprot ID: Q5SQI0
  ENST ID: ENST00000417183
  CDS Start-End: 45-947

SEQ ID NO: 106711 - DNA, 2119 bp, Homo sapiens; identical to SEQ ID NO: 106700
  Payload ID: 952
  Gene Symbol: ATAT1
  Gene Name: alpha tubulin acetyltransferase 1
  Uniprot ID: Q5SQI0
  ENST ID: ENST00000456704
  CDS Start-End: 1-1002

SEQ ID NO: 106712 - DNA, 1476 bp, Homo sapiens; identical to SEQ ID NO: 106698
  Payload ID: 952
  Gene Symbol: ATAT1
  Gene Name: alpha tubulin acetyltransferase 1
  Uniprot ID: Q5SQI0
  ENST ID: ENST00000442844
  CDS Start-End: 31-1296

SEQ ID NO: 106713 - DNA, 1728 bp, Homo sapiens; identical to SEQ ID NO: 106695
  Payload ID: 952
  Gene Symbol: ATAT1
  Gene Name: alpha tubulin acetyltransferase 1
  Uniprot ID: Q5SQI0
  ENST ID: ENST00000457334
  CDS Start-End: 319-1548

SEQ ID NO: 106714 - DNA, 1476 bp, Homo sapiens; identical to SEQ ID NO: 106698
  Payload ID: 952
  Gene Symbol: ATAT1
  Gene Name: alpha tubulin acetyltransferase 1
  Uniprot ID: Q5SQI0
  ENST ID: ENST00000445486
  CDS Start-End: 31-1296

SEQ ID NO: 106715 - DNA, 2119 bp, Homo sapiens; identical to SEQ ID NO: 106700
  Payload ID: 952
  Gene Symbol: ATAT1
  Gene Name: alpha tubulin acetyltransferase 1
  Uniprot ID: Q5SQI0
  ENST ID: ENST00000456215
  CDS Start-End: 1-1002

SEQ ID NO: 106716 - DNA, 2119 bp, Homo sapiens; identical to SEQ ID NO: 106696
  Payload ID: 952
  Gene Symbol: ATAT1
  Gene Name: alpha tubulin acetyltransferase 1
  Uniprot ID: Q5SQI0
  ENST ID: ENST00000428764
  CDS Start-End: 1-1002

SEQ ID NO: 106717 - DNA, 2611 bp, Homo sapiens; identical to SEQ ID NO: 106693
  Payload ID: 952
  Gene Symbol: ATAT1
  Gene Name: alpha tubulin acetyltransferase 1
  Uniprot ID: Q5SQI0
  ENST ID: ENST00000449905
  CDS Start-End: 45-947

SEQ ID NO: 106718 - DNA, 2611 bp, Homo sapiens; identical to SEQ ID NO: 106701
  Payload ID: 952
  Gene Symbol: ATAT1
  Gene Name: alpha tubulin acetyltransferase 1
  Uniprot ID: Q5SQI0
  ENST ID: ENST00000416917
  CDS Start-End: 45-947

SEQ ID NO: 106719 - DNA, 2646 bp, Homo sapiens; identical to SEQ ID NO: 106697
  Payload ID: 952
  Gene Symbol: ATAT1
  Gene Name: alpha tubulin acetyltransferase 1
  Uniprot ID: Q5SQI0
  ENST ID: ENST00000423654
  CDS Start-End: 11-982

SEQ ID NO: 106720 - DNA, 2119 bp, Homo sapiens; identical to SEQ ID NO: 106696
  Payload ID: 952
  Gene Symbol: ATAT1
  Gene Name: alpha tubulin acetyltransferase 1
  Uniprot ID: Q5SQI0
  ENST ID: ENST00000450220
  CDS Start-End: 1-1002

SEQ ID NO: 106721 - DNA, 2611 bp, Homo sapiens; identical to SEQ ID NO: 106701
  Payload ID: 952
  Gene Symbol: ATAT1
  Gene Name: alpha tubulin acetyltransferase 1
  Uniprot ID: Q5SQI0
  ENST ID: ENST00000443114
  CDS Start-End: 45-947

SEQ ID NO: 106722 - DNA, 2061 bp, Homo sapiens; identical to SEQ ID NO: 106704
  Payload ID: 952
  Gene Symbol: ATAT1
  Gene Name: alpha tubulin acetyltransferase 1
  Uniprot ID: Q5SQI0
  ENST ID: ENST00000443391
  CDS Start-End: 12-944

SEQ ID NO: 106723 - DNA, 2119 bp, Homo sapiens
  Payload ID: 952
  Gene Symbol: ATAT1
  Gene Name: alpha tubulin acetyltransferase 1
  Uniprot ID: Q5SQI0
  ENST ID: ENST00000450003
  CDS Start-End: 1-1002
atggagttcccgttcgatgtggacgcgctgttcccggagcggatcacggtgctggaccagcacctgaggcccccagcccgccgacccggaaccacaacgccggcccgtgttgatctacagcagcaaattatgaccattatagatgaactgggcaaggcttctgccaaggcccagaatctttccgctcctatcactagtgcatcaaggatgcagagtaaccgccatgttgtttatattctcaaagacagttcagcccgaccggctggaaaaggagccattattggtttcatcaaagttggatacaagaagctctttgtactggatgatcgtgaggctcataatgaggtagaaccactttgcatcctggacttttacatccatgagtctgtgcaacgccatggccatgggcgagaactcttccagtatatgttgcagaaggagcgagtggaaccgcaccaactggcaattgaccgaccctcacagaagctgctgaaattcctgaataagcactacaatctggagaccacagtcccacaggtgaacaactttgtgatctttgaaggcttctttgcccatcaacatcggccccctgctccctctctgagggcaactcgacactctcgtgctgctgcagtcgatcccacgcccgctgctccagcaaggaagctgccacccaagagagcagagggagacatcaagccatactcctctagtgaccgagaatttctgaaggtagctgtggagcctccttggcccctaaacagggcccctcgccgcgccacacctccagcccacccacccccccgctccagcagcctgggaaactcaccagaacgaggtcccctccgcccctttgtgccagagcaggagctgctgcgttccttgcgcctctgccccccacaccctaccgcccgccttctgttggctgctgaccctgggggcagcccagctcaacgtcgtcgcaccagctcccttccccgctctgaggagagtcgatactaacagctaccctatccctgccctgggagacctggggtgggcagggaacccctccctgagaacctcagacccactcttccattgcatcctgtaggacccagtggaacctgacagagcccataggattccctcttctactttcttagacagcagggatgtcagggtctcaaactgcctaacactttgtagcttttcttaacacaaaagcaccccttctctcctaacttgggctctgaatactttcccaacaggaagtctgatctgttgccagacttcttggttagatggctcatacatttatctagagaagcacactcttgcttgctgtcaaactttagaacaccatggaaggtctaagggcatcctgtgccagggaaactttttaaggaattttatctatgggataaaccccatattccctctagtgtctactggtggctctaatactgctttgtgctgcctgccacacttgccctttgagcctgcgaatggccgctagtgagcaagctctgcttcagagcagtctagttaggtagaacagggacttaccagcttcccaaagggatctactcaccattgccaaactcttcatttccacattttgtgtaggtgtcagggaaccccaaactggtgttgctttggggtctctaaaggagattggctgacaccaccatttcccccagatccagattctctgagggaggttgtttcttgagagtagatccagagtgtcaaggatctgttagatcctggaatcccttcttgcatccatccctccctggtagctaggtcccgatatactcctgtcttgtgagattgtcgagatgagatgggggaccactcttcctctgtccttcctctctcctttcctccatagcaaggacgaccttccctgctccatgcccagagtatagctagatcccttcccctccctaccctctgaatgtgtgctagatcaggtgccccactgtgtttcctgaaatccttgggagccggatctccccatctcccctactcactcttcccttttcttctctcagtgttgtctgaataaagtgtgaaatcttttgtgttttctaaattgacattttcaatgaaaaaaagaatcacaaaaaaaaaa

SEQ ID NO: 106724 - DNA, 1476 bp, Homo sapiens; identical to SEQ ID NO: 106698
  Payload ID: 952
  Gene Symbol: ATAT1
  Gene Name: alpha tubulin acetyltransferase 1
  Uniprot ID: Q5SQI0
  ENST ID: ENST00000454794
  CDS Start-End: 31-1296

SEQ ID NO: 106725 - DNA, 2061 bp, Homo sapiens; identical to SEQ ID NO: 106694
  Payload ID: 952
  Gene Symbol: ATAT1
  Gene Name: alpha tubulin acetyltransferase 1
  Uniprot ID: Q5SQI0
  ENST ID: ENST00000430611
  CDS Start-End: 12-944

SEQ ID NO: 106726 - DNA, 2061 bp, Homo sapiens; identical to SEQ ID NO: 106704
  Payload ID: 952
  Gene Symbol: ATAT1
  Gene Name: alpha tubulin acetyltransferase 1
  Uniprot ID: Q5SQI0
  ENST ID: ENST00000454987
  CDS Start-End: 12-944

SEQ ID NO: 106727 - DNA, 1476 bp, Homo sapiens; identical to SEQ ID NO: 106698
  Payload ID: 952
  Gene Symbol: ATAT1
  Gene Name: alpha tubulin acetyltransferase 1
  Uniprot ID: Q5SQI0
  ENST ID: ENST00000420586
  CDS Start-End: 31-1296

SEQ ID NO: 106728 - DNA, 2646 bp, Homo sapiens; identical to SEQ ID NO: 106697
  Payload ID: 952
  Gene Symbol: ATAT1
  Gene Name: alpha tubulin acetyltransferase 1
  Uniprot ID: Q5SQI0
  ENST ID: ENST00000418248
  CDS Start-End: 11-982

SEQ ID NO: 106729 - DNA, 2061 bp, Homo sapiens
  Payload ID: 952
  Gene Symbol: ATAT1
  Gene Name: alpha tubulin acetyltransferase 1
  Uniprot ID: Q5SQI0
  ENST ID: ENST00000424121
  CDS Start-End: 12-944
cacaatgggccatggagttcccgttcgatgtggacgcgctgttcccggagcggatcacggtgctggaccagcacctgaggcccccagcccgccgacccggaaccacaacgccggcccgtgttgatctacagcagcaaattatgaccattatagatgaactgggcaaggcttctgccaaggcccagaatctttccgctcctatcactagtgcatcaaggatgcagagtaaccgccatgttgtttatattctcaaagacagttcagcccgaccggctggaaaaggagccattattggtttcatcaaagttggatacaagaagctctttgtactggatgatcgtgaggctcataatgaggtagaaccactttgcatcctggacttttacatccatgagtctgtgcaacgccatggccatgggcgagaactcttccagtatatgttgcagaaggagcgagtggaaccgcaccaactggcaattgaccgaccctcacagaagctgctgaaattcctgaataagcactacaatctggagaccacagtcccacaggtgaacaactttgtgatctttgaaggcttctttgcccatcaacatcctccagcaaggaagctgccacccaagagagcagagggagacatcaagccatactcctctagtgaccgagaatttctgaaggtagctgtggagcctccttggcccctaaacagggcccctcgccgcgccacacctccagcccacccacccccccgctccagcagcctgggaaactcaccagaacgaggtcccctccgcccctttgtgccagagcaggagctgctgcgttccttgcgcctctgccccccacaccctaccgcccgccttctgttggctgctgaccctgggggcagcccagctcaacgtcgtcgcaccagctcccttccccgctctgaggagagtcgatactaacagctaccctatccctgccctgggagacctggggtgggcagggaacccctccctgagaacctcagacccactcttccattgcatcctgtaggacccagtggaacctgacagagcccataggattccctcttctactttcttagacagcagggatgtcagggtctcaaactgcctaacactttgtagcttttcttaacacaaaagcaccccttctctcctaacttgggctctgaatactttcccaacaggaagtctgatctgttgccagacttcttggttagatggctcatacatttatctagagaagcacactcttgcttgctgtcaaactttagaacaccatggaaggtctaagggcatcctgtgccagggaaactttttaaggaattttatctatgggataaaccccatattccctctagtgtctactggtggctctaatactgctttgtgctgcctgccacacttgccctttgagcctgcgaatggccgctagtgagcaagctctgcttcagagcagtctagttaggtagaacagggacttaccagcttcccaaagggatctactcaccattgccaaactcttcatttccacattttgtgtaggtgtcagggaaccccaaactggtgttgctttggggtctctaaaggagattggctgacaccaccatttcccccagatccagattctctgagggaggttgtttcttgagagtagatccagagtgtcaaggatctgttagatcctggaatcccttcttgcatccatccctccctggtagctaggtcccgatatactcctgtcttgtgagattgtcgagatgagatgggggaccactcttcctctgtccttcctctctcctttcctccatagcaaggacgaccttccctgctccatgcccagagtatagctagatcccttcccctccctaccctctgaatgtgtgctagatcaggtgccccactgtgtttcctgaaatccttgggagccggatctccccatctcccctactcactcttcccttttcttctctcagtgttgtctgaataaagtgtgaaatcttttgtgttttctaaattgacattttcaatgaaaaaaagaatcacaaaaaaaaaa

SEQ ID NO: 106730 - DNA, 1728 bp, Homo sapiens; identical to SEQ ID NO: 106695
  Payload ID: 952
  Gene Symbol: ATAT1
  Gene Name: alpha tubulin acetyltransferase 1
  Uniprot ID: Q5SQI0
  ENST ID: ENST00000416435
  CDS Start-End: 319-1548

SEQ ID NO: 106731 - DNA, 2611 bp, Homo sapiens
  Payload ID: 952
  Gene Symbol: ATAT1
  Gene Name: alpha tubulin acetyltransferase 1
  Uniprot ID: Q5SQI0
  ENST ID: ENST00000423338
  CDS Start-End: 45-947
gaagtgacgtcgtgtggggcgggtccgaccgcgcacaatgggccatggagttcccgttcgatgtggacgcgctgttcccggagcggatcacggtgctggaccagcacctgaggcccccagcccgccgacccggaaccacaacgccggcccgtgttgatctacagcagcaaattatgaccattatagatgaactgggcaaggcttctgccaaggcccagaatctttccgctcctatcactagtgcatcaaggatgcagagtaaccgccatgttgtttatattctcaaagacagttcagcccgaccggctggaaaaggagccattattggtttcatcaaagttggatacaagaagctctttgtactggatgatcgtgaggctcataatgaggtagaaccactttgcatcctggacttttacatccatgagtctgtgcaacgccatggccatgggcgagaactcttccagtatatgttgcagaaggagcgagtggaaccgcaccaactggcaattgaccgaccctcacagaagctgctgaaattcctgaataagcactacaatctggagaccacagtcccacaggtgaacaactttgtgatctttgaaggcttctttgcccatcaacatcctccagcaaggaagctgccacccaagagagcagagggagacatcaagccatactcctctagtgaccgagaatttctgaaggtagctgtggagcctccttggcccctaaacagggcccctcgccgcgccacacctccagcccacccacccccccgctccagcagcctgggaaactcaccagaacgaggtcccctccgcccctttgtgccagagcaggagctgctgcgttccttgcgcctctgccccccacaccctaccgcccgccttctgttggctgctgaccctgggggcagcccagctcaacgtcgtcgcaccaggtaataggagttgaagggctaaggagcctcacagctataaaagaggatgttagaaatggcaaagggcaatttgaatccatcagagagatggatcaataagatgggtggcttggggggggtcctgaaacctttcaagaaaaatatttgtgcaagtgatctgggaaaaaaatgcagtgaaggagcagaataggaccttatatggagcctagggaccctggctttaatgtgagagttatgtggaatggtaggaagaacaccgagatccatcgagttgggggaacagagccttctaagattgggaaaatcttcgcttaatacttgctggggaaggggcagtgtctgacagagagtgggaagccactggcttgtgtgccaagagtccatcgcagcaggcagggagtgggcatttcctttatttctctccctttctcttcacctctgacttctctgtttttctctcccccgccccccgccatttcccatctcccttcctcccatccataacatccttccacagctcccttccccgctctgaggagagtcgatactaacagctaccctatccctgccctgggagacctggggtgggcagggaacccctccctgagaacctcagacccactcttccattgcatcctgtaggacccagtggaacctgacagagcccataggattccctcttctactttcttagacagcagggatgtcagggtctcaaactgcctaacactttgtagcttttcttaacacaaaagcaccccttctctcctaacttgggctctgaatactttcccaacaggaagtctgatctgttgccagacttcttggttagatggctcatacatttatctagagaagcacactcttgcttgctgtcaaactttagaacaccatggaaggtctaagggcatcctgtgccagggaaactttttaaggaattttatctatgggataaaccccatattccctctagtgtctactggtggctctaatactgctttgtgctgcctgccacacttgccctttgagcctgcgaatggccgctagtgagcaagctctgcttcagagcagtctagttaggtagaacagggacttaccagcttcccaaagggatctactcaccattgccaaactcttcatttccacattttgtgtaggtgtcagggaaccccaaactggtgttgctttggggtctctaaaggagattggctgacaccaccatttcccccagatccagattctctgagggaggttgtttcttgagagtagatccagagtgtcaaggatctgttagatcctggaatcccttcttgcatccatccctccctggtagctaggtcccgatatactcctgtcttgtgagattgtcgagatgagatgggggaccactcttcctctgtccttcctctctcctttcctccatagcaaggacgaccttccctgctccatgcccagagtatagctagatcccttcccctccctaccctctgaatgtgtgctagatcaggtgccccactgtgtttcctgaaatccttgggagccggatctccccatctcccctactcactcttcccttttcttctctcagtgttgtctgaataaagtgtgaaatcttttgtgttttctaaattgacattttcaatgaaaaaaagaatcacaaaaaaaaaa

SEQ ID NO: 106732 - DNA, 2061 bp, Homo sapiens; identical to SEQ ID NO: 106694
  Payload ID: 952
  Gene Symbol: ATAT1
  Gene Name: alpha tubulin acetyltransferase 1
  Uniprot ID: Q5SQI0
  ENST ID: ENST00000445973
  CDS Start-End: 12-944

SEQ ID NO: 106733 - DNA, 1728 bp, Homo sapiens; identical to SEQ ID NO: 106695
  Payload ID: 952
  Gene Symbol: ATAT1
  Gene Name: alpha tubulin acetyltransferase 1
  Uniprot ID: Q5SQI0
  ENST ID: ENST00000432643
  CDS Start-End: 319-1548

SEQ ID NO: 106734 - DNA, 1476 bp, Homo sapiens; identical to SEQ ID NO: 106698
  Payload ID: 952
  Gene Symbol: ATAT1
  Gene Name: alpha tubulin acetyltransferase 1
  Uniprot ID: Q5SQI0
  ENST ID: ENST00000432356
  CDS Start-End: 31-1296

SEQ ID NO: 106735 - DNA, 1771 bp, Homo sapiens
  Payload ID: 953
  Gene Symbol: A4GNT
  Gene Name: alpha-1,4-N-acetylglucosaminyltransferase
  Uniprot ID: Q9UNA3
  ENST ID: ENST00000236709
  CDS Start-End: 203-1225
atttctaagacctcaaatactggttaactgcatttgcagctagaagttaggctctgattcactgttttgtattttctaaaagggttatatgtaatttgaaagatagacctgccaagacgtgagatctgtgttctccttggttagagctaacatttttggtgaggaaagcactgcaggagcaggctggcacagagaagaggacatgcggaaggagctccagctctccctgtcagtcaccttgctgcttgtctgtggcttcctctaccagttcaccctgaagtccagctgcctcttctgtttgccttctttcaagtcccaccaggggctggaagccctcctgagccacagacgtggcattgtgtttctagagacctcagagagaatggagccaccccatttggtctcctgttccgtagagtctgctgccaagatttatcctgagtggcctgtggtgttctttatgaagggtcttactgattccacaccgatgccctcaaactccacatacccagctttttccttcctgtcagcaatagacaacgttttcctcttccctttggatatgaaaaggctgcttgaagacacaccattgttttcatggtacaatcaaatcaacgccagcgcagagagaaactggctccacatcagctcggatgcatcccgcctggccatcatctggaaatacggtggcatctacatggacaccgatgtcatctccatcaggcccatccctgaggagaactttttggctgcgcaggcttctcggtactctagtaatggaatatttgggttcctcccccaccacccctttttgtgggaatgcatggaaaactttgttgaacactataattcagccatttggggcaaccaaggccctgagttgatgacaaggatgttgagggtatggtgtaaacttgaagacttccaggaggtgagcgacctcaggtgtctgaacatatccttcttacacccccaaagattttaccccatctcctatcgagagtggaggcgctactatgaagtgtgggatacagagccaagcttcaatgtctcttatgccctgcatttgtggaaccacatgaaccaggaggggcgggctgtgattagaggaagcaacacactggtggaaaatctctatcgcaagcactgtcccaggacttacagggacctgattaaaggcccagaggggtcagtgactggggagctgggtccaggtaacaaataaagctaacactcgtttgctgctgctgcagtgtggaaatggacatttcctggagtgccacattttcacttgatctccactgtctcttggcggggtgggcagagggttgcctctcaaatgtcagttaggattagctttctctgtctgtaatagaaaaatcccaaatgatactggctataaaacatacacccatggtccatttgactgcttgacctccaacccaccatgtttgcatttcaggcagtaggatgaagaaaagaggaaaggtgcacttgctttattttgtgaagacttcctgcaagtaccgtataacactttctcttacattgcactgactgagatgtagctgcaagagaggctgggaagtttaaggaggaagaaaaaatgggtactgggataggcagctaacagttttgctacatgttctatttaatacagtaagattaattccaggacctgttagagcattgactgaggtaaaaagagacttgatttctagtcctgattttgacattcattaatgcattcagtcaataaatattaactgag

SEQ ID NO: 106736 - DNA, 1722 bp, Homo sapiens
  Payload ID: 954
  Gene Symbol: A1BG
  Gene Name: alpha-1-B glycoprotein
  Uniprot ID: P04217
  ENST ID: ENST00000263100
  CDS Start-End: 63-1550
gggcctcattgctgcagacgctcaccccagacactcactgcaccggagtgagcgcgaccatcatgtccatgctcgtggtctttctcttgctgtggggtgtcacctggggcccagtgacagaagcagccatattttatgagacgcagcccagcctgtgggcagagtccgaatcactgctgaaacccttggccaatgtgacgctgacgtgccaggcccacctggagactccagacttccagctgttcaagaatggggtggcccaggagcctgtgcaccttgactcacctgccatcaagcaccagttcctgctgacgggtgacacccagggccgctaccgctgccgctcgggcttgtccacaggatggacccagctgagcaagctcctggagctgacagggccaaagtccttgcctgctccctggctctcgatggcgccagtgtcctggatcacccccggcctgaaaacaacagcagtgtgccgaggtgtgctgcggggtgtgacttttctgctgaggcgggagggcgaccatgagtttctggaggtgcctgaggcccaggaggatgtggaggccacctttccagtccatcagcctggcaactacagctgcagctaccggaccgatggggaaggcgccctctctgagcccagcgctactgtgaccattgaggagctcgctgcaccaccaccgcctgtgctgatgcaccatggagagtcctcccaggtcctgcaccctggcaacaaggtgaccctcacctgcgtggctcccctgagtggagtggacttccagctacggcgcggggagaaagagctgctggtacccaggagcagcaccagcccagatcgcatcttctttcacctgaacgcggtggccctgggggatggaggtcactacacctgccgctaccggctgcatgacaaccaaaacggctggtccggggacagcgcgccggtcgagctgattctgagcgatgagacgctgcccgcgccggagttctccccggagccggagtccggcagggccttgcggctgcggtgcctggcgcccctggagggcgcgcgcttcgccctggtgcgcgaggacaggggcgggcgccgcgtgcaccgtttccagagccccgctgggaccgaggcgctcttcgagctgcacaacatttccgtggctgactccgccaactacagctgcgtctacgtggacctgaagccgcctttcgggggctccgcgcccagcgagcgcttggagctgcacgtggacggaccccctcccaggcctcagctccgggcgacgtggagtggggcggtcctggcgggccgagatgccgtcctgcgctgcgagggacccatccccgacgtcaccttcgagctgctgcgcgagggcgagacgaaggccgtgaagacggtccgcacccccggggccgcggcgaacctcgagctgatcttcgtggggccccagcacgccggcaactacaggtgccgctaccgctcctgggtgccccacaccttcgaatcggagctcagcgaccctgtggagctcctggtggcagaaagctgatgcagccgcgggcccagggtgctgttggtgtcctcagaagtgccggggattctggactggctccctcccctcctgttgcagcacaaggccggggtctctggggggctggagaagcctccctcattcctcccaggaattaataaatgtgaagagaggctctgtttaaaatgtc

SEQ ID NO: 106737 - DNA, 917 bp, Homo sapiens
  Payload ID: 954
  Gene Symbol: A1BG
  Gene Name: alpha-1-B glycoprotein
  ENST ID: ENST00000600966
  CDS Start-End: 1-917
ctgacgtgccaggcccacctggagactccagacttccagctgttcaagaatggggtggcccaggagcctgtgcaccttgactcacctgccatcaagcaccagttcctgctgacgggtgacacccagggccgctaccgctgccgctcgggcttgtccacaggatggacccagctgagcaagctcctggagctgacagggccaaagtccttgcctgctccctggctctcgatggcgccagtgtcctggatcacccccggcctgaaaacaacagcagtgtgccgaggtgtgctgcggggtgtgacttttctgctgaggcgggagggcgaccatgagtttctggaggtgcctgaggcccaggaggatgtggaggccacctttccagtccatcagcctggcaactacagctgcagctaccggaccgatggggaaggcgccctctctgagcccagcgctactgtgaccattgaggagctcggaccaggtccaggaagctggccacacggttgcctgggtctgatggttgcaaaggagtttgggcagaggatgcccaaagaatggaaggctgcaccaccaccgcctgtgctgatgcaccatggagagtcctcccaggtcctgcaccctggcaacaaggtgaccctcacctgcgtggctcccctgagtggagtggacttccagctacggcgcggggagaaagagctgctggtacccaggagcagcaccagcccagatcgcatcttctttcacctgaacgcggtggccctgggggatggaggtcactacacctgccgctaccggctgcatgacaaccaaaacggctggtccggggacagcgcgccggtcgagctgattctgagcgatgagacgctgcccgcgccggagttctccccggagccggagtccggcagggccttgcggct

SEQ ID NO: 106738 - DNA, 1434 bp, Homo sapiens
  Payload ID: 955
  Gene Symbol: AMBP
  Gene Name: alpha-1-microglobulin/bikunin precursor
  Uniprot ID: P02760
  ENST ID: ENST00000265132
  CDS Start-End: 264-1322
attgtgcttggccaatgcctcttctgaagcagccatcccggcctcttggtactgctgaccccagccaggctacagggatcgattggagctgtccttggggctgtaattggccccagctgagcagggcaaacactgaggtcaactacaagccacaggccccttccccagcctcagttcacagctgccctgttgcagggaggcggtggcccttctgttgctagaccgagcctgtgggatataccaaggcagaggagcccatagccatgaggagcctcggggccctgctcttgctgctgagcgcctgcctggcggtgagcgctggccctgtgccaacgccgcccgacaacatccaagtgcaggaaaacttcaatatctctcggatctatgggaagtggtacaacctggccatcggttccacctgcccctggctgaagaagatcatggacaggatgacagtgagcacgctggtgctgggagagggcgctacagaggcggagatcagcatgaccagcactcgttggcggaaaggtgtctgtgaggagacgtctggagcttatgagaaaacagatactgatgggaagtttctctatcacaaatccaaatggaacataaccatggagtcctatgtggtccacaccaactatgatgagtatgccattttcctgaccaagaaattcagccgccatcatggacccaccattactgccaagctctacgggcgggcgccgcagctgagggaaactctcctgcaggacttcagagtggttgcccagggtgtgggcatccctgaggactccatcttcaccatggctgaccgaggtgaatgtgtccctggggagcaggaaccagagcccatcttaatcccgagagtccggagggctgtgctaccccaagaagaggaaggatcagggggtgggcaactggtaactgaagtcaccaagaaagaagattcctgccagctgggctactcggccggtccctgcatgggaatgaccagcaggtatttctataatggtacatccatggcctgtgagactttccagtacggcggctgcatgggcaacggtaacaacttcgtcacagaaaaggagtgtctgcagacctgccgaactgtggcggcctgcaatctccccatagtccggggcccctgccgagccttcatccagctctgggcatttgatgctgtcaaggggaagtgcgtcctcttcccctacgggggctgccagggcaacgggaacaagttctactcagagaaggagtgcagagagtactgcggtgtccctggtgatggtgatgaggagctgctgcgcttctccaactgacaactggccggtctgcaagtcagaggatggccagtgtctgtcccggggtcctgtggcaggcagcgccaagcaacctgggtccaaataaaaactaaattgtaaactcctgaaa

SEQ ID NO: 106739 - DNA, 1057 bp, Homo sapiens
  Payload ID: 955
  Gene Symbol: AMBP
  Gene Name: alpha-1-microglobulin/bikunin precursor
  ENST ID: ENST00000603230
  CDS Start-End: 120-836
acaagccacaggccccttccccagcctcagttcacagctgccctgttgcagggaggcggtggcccttctgttgctagaccgagcctgtgggatataccaaggcagaggagcccatagccatgaggagcctcggggccctgctcttgctgctgagcgcctgcctggcggtgagcgctggccctgtgccaacgccgcccgacaacatccaagtgcaggaaaacttcaatatctctcggatctatgggaagtggtacaacctggccatcggttccacctgcccctggctgaagaagatcatggacaggatgacagtgagcacgctggtgctgggagagggcgctacagaggcggagatcagcatgaccagcactcgttggcggaaaggtgtctgtgaggagacgtctggagcttatgagaaaacagatactgatgggaagtttctctatcacaaatccaaatggaacataaccatggagtcctatgtggtccacaccaactatgatgagtatgccattttcctgaccaagaaattcagccgccatcatggacccaccattactgccaagctctacgggcgggcgccgcagctgagggaaactctcctgcaggacttcagagtggttgcccagggtgtgggcatccctgaggactccatcttcaccatggctgaccgagtgaatggccttgagcaagccacacaggcaggaccattcatgaagtggactaaggcacgacaagttcccagcacgatgctcaccaaagatacaaatccgggtctaggatggcccctgggcctggtcctgttattcactcctctctcctgctctgtgacctaggtgaatgtgtccctggggagcaggaaccagagcccatcttaatcccgagagtccggagggctgtgctaccccaagaagaggaaggatcagggggtgggcaactggtaactgaagtcaccaagaaagaagattcctgccagctgggctactcggccggtccctgcatgggaatgaccagcaggtatttctataatggtacatccatggcctgtgagactttc

SEQ ID NO: 106740 - DNA, 579 bp, Homo sapiens
  Payload ID: 955
  Gene Symbol: AMBP
  Gene Name: alpha-1-microglobulin/bikunin precursor
  ENST ID: ENST00000466610
  CDS Start-End: 1-579
cacaaatccaaatggaacataaccatggagtcctatgtggtccacaccaactatgatgagtatgccattttcctgaccaagaaattcagccgccatcatggacccaccattactgccaagctctacgggcgggcgccgcagctgagggaaactctcctgcaggacttcagagtggttgcccagggtgtgggcatccctgaggactccatcttcaccatggctgaccgaggtgaatgtgtccctggggagcaggaaccagagcccatcttaatcccgagagtccggagggctgtgctaccccaagaagaggaaggatcagggggtgggcaactggtaactgaagtcaccaagaaagaagattcctgccagctgggctactcggccggtccctgcatgggaatgaccagcaggtatttctataatggtacatccatggcctgtgagactttccagtacggcggctgcatgggcaacggtaacaacttcgtcacagtccggggcccctgccgagccttcatccagctctgggcatttgatgctgtcaaggggaagtgcgtcctcttcccctacgggggctgc

SEQ ID NO: 106741 - DNA, 1307 bp, Homo sapiens
  Payload ID: 956
  Gene Symbol: AZGP1
  Gene Name: alpha-2-glycoprotein 1, zinc-binding
  Uniprot ID: P25311
  ENST ID: ENST00000292401
  CDS Start-End: 138-1034
atcatttttttttctctattaggggaggagcccgtcctggcactcccattggcctgtagattcacctcccctgggcagggccccaggacccaggataatatctgtgcctcctgcccagaaccctccaagcagacacaatggtaagaatggtgcctgtcctgctgtctctgctgctgcttctgggtcctgctgtcccccaggagaaccaagatggtcgttactctctgacctatatctacactgggctgtccaagcatgttgaagacgtccccgcgtttcaggcccttggctcactcaatgacctccagttctttagatacaacagtaaagacaggaagtctcagcccatgggactctggagacaggtggaaggaatggaggattggaagcaggacagccaacttcagaaggccagggaggacatctttatggagaccctgaaagacatcgtggagtattacaacgacagtaacgggtctcacgtattgcagggaaggtttggttgtgagatcgagaataacagaagcagcggagcattctggaaatattactatgatggaaaggactacattgaattcaacaaagaaatcccagcctgggtccccttcgacccagcagcccagataaccaagcagaagtgggaggcagaaccagtctacgtgcagcgggccaaggcttacctggaggaggagtgccctgcgactctgcggaaatacctgaaatacagcaaaaatatcctggaccggcaagatcctccctctgtggtggtcaccagccaccaggccccaggagaaaagaagaaactgaagtgcctggcctacgacttctacccagggaaaattgatgtgcactggactcgggccggcgaggtgcaggagcctgagttacggggagatgttcttcacaatggaaatggcacttaccagtcctgggtggtggtggcagtgcccccgcaggacacagccccctactcctgccacgtgcagcacagcagcctggcccagcccctcgtggtgccctgggaggccagctaggaagcaagggttggaggcaatgtgggatctcagacccagtagctgcccttcctgcctgatgtgggagctgaaccacagaaatcacagtcaatggatccacaaggcctgaggagcagtgtggggggacagacaggaggtggatttggagaccgaagactgggatgcctgtcttgagtagacttggacccaaaaaatcatctcaccttgagcccacccccaccccattgtctaatctgtagaagctaataaataatcatccctccttgcctagca

SEQ ID NO: 106742 - DNA, 719 bp, Homo sapiens
  Payload ID: 956
  Gene Symbol: AZGP1
  Gene Name: alpha-2-glycoprotein 1, zinc-binding
  ENST ID: ENST00000419575
  CDS Start-End: 1-257
tgacctatatctacactgggctgtccaagcatgttgaagacgtccccgcgtttcaggcccttggctcactcaatgacctccagttctttagatacaacagtaaagacaggaagtctcagcccatgggactctggagacagcaaaaatatcctggaccggcaagatcctccctctgtggtggtcaccagccaccaggccccaggagaaaagaagaaactgaagtgcctggcctacgacttctacccagggaaaattgatgtgcactggactcgggccggcgaggtgcaggagcctgagttacggggagatgttcttcacaatggaaatggcacttaccagtcctgggtggtggtggcagtgcccccgcaggacacagccccctactcctgccacgtgcagcacagcagcctggcccagcccctcgtggtgccctgggaggccagctaggaagcaagggttggaggcaatgtgggatctcagacccagtagctgcccttcctgcctgatgtgggagctgaaccacagaaatcacagtcaatggatccacaaggcctgaggagcagtgtggggggacagacaggaggtggatttggagaccgaagactgggatgcctgtcttgagtagacttggacccaaaaaatcatctcaccttgagcccacccccaccccattgtctaatctgtagaagctaataaataatcatccctccttgcctagc

SEQ ID NO: 106743 - DNA, 2027 bp, Homo sapiens
  Payload ID: 956
  Gene Symbol: AZGP1
  Gene Name: alpha-2-glycoprotein 1, zinc-binding
  ENST ID: ENST00000411734
  CDS Start-End: 7-690
gtaagaatggtgcctgtcctgctgtctctgctgctgcttctgggtcctgctgtcccccaggagaaccaagatggtcgttactctctgacctatatctacactgggctgtccaagcatgttgaagacgtccccgcgtttcaggcccttggctcactcaatgacctccagttctttagatacaacagtaaagacaggaagtctcagcccatgggactctggagacaggtggaaggaatggaggattggaagcaggacagccaacttcagaaggccagggaggacatctttatggagaccctgaaagacatcgtggagtattacaacgacagtaacgggtctcacgtattgcagggaaggtttggttgtgagatcgagaataacagaagcagcggagcattctggaaatattactatgatggaaaggactacattgaattcaacaaagaaatcccagcctgggtccccttcgacccagcagcccagataaccaagcagaagtgggaggcagaaccagtctacgtgcagcgggccaaggcttacctggaggaggagtgccctgcgactctgcggaaatacctgaaatacagcaaaaatatcctggaccggcaaggtactcactgcttcctgctccccagtactgagcccagaataaaagacgatctcaggctaggagctcaggcaacatcttagtccggtctcatctgttcctggatgtccctcagacccccagctttcatcttttaggatttattccttccctgggataatataatttgtggtccaaaaagaacatcatcaaaatttcaggcagaatgggccaggaaggccattctttcttgatgagtgtccccaaatcatctccaattaacagacaaggagcttgaggttagggaggtgagggtaacactgtctgtaagaggcagagctgggactcaaattccagatttcagattccaaatcccatcgttttttatctctacaatgatgcctcccatctgggtggtggagagaagggaggcgtgtaaaatgtcagccccagaaggacaagagcaagccagtgtgagcggaattgatggctgcaagctgagacttggattggagacgtagtgagactcaggattgtgcagtgctgcagggaagtggttgctggatagaggcatgggctgaaccaagcagctggactgagactgggggacagaactccaaagcccactgagatgtgggaaaacatggagaagcacacggagcattcacaacttattgccgtcagagtcaatacatgggtgaggtggggattgggcaagagggaaagcgtcagccttccctgatattctggaaagtctcccggggctgggggtgggcaggtacagagcttcgagctctgctgatcgctgacatccaggggtgggggtaggaagagacctgggccgggagaagtccacctcaagcctgcagtgtcacactctatccctccacagatcctccctctgtggtggtcaccagccaccaggccccaggagaaaagaagaaactgaagtgcctggcctacgacttctacccagggaaaattgatgtgcactggactcgggccggcgaggtgcaggagcctgagttacggggagatgttcttcacaatggaaatggcacttaccagtcctgggtggtggtggcagtgcccccgcaggacacagccccctactcctgccacgtgcagcacagcagcctggcccagcccctcgtggtgccctgggaggccagctaggaagcaagggttggaggcaatgtgggatctcagacccagtagctgcccttcctgcctgatgtgggagctgaaccacagaaatcacagtcaatggatccacaaggcctgaggagcagtgtggggggacagacaggaggtggatttggagaccgaagactgggatgcctgtcttgagtagacttggacccaaaaaatcatctcaccttgagcccacccccaccccattgtctaatctgtagaagctaataaataatcatccctcctt

SEQ ID NO: 106744 - DNA, 1553 bp, Homo sapiens
  Payload ID: 957
  Gene Symbol: AHSG
  Gene Name: alpha-2-HS-glycoprotein
  ENST ID: ENST00000273784
  CDS Start-End: 77-1183
ttcccagcagagcacctgggttggtcccgaagcctccaaccacctgcacgcctgccagggcctctctggggcagccatgaagtccctcgtcctgctcctttgtcttgctcagctctggggctgccactcagccccacatggcccagggctgatttatagacaaccgaactgcgatgatccagaaactgaggaagcagctctggtggctatagactacatcaatcaaaaccttccttggggatacaaacacaccttgaaccagattgatgaagtaaaggtgtggcctcagcagccctccggagagctgtttgagattgaaatagacaccctggaaaccacctgccatgtgctggaccccacccctgtggcaagatgcagcgtgaggcagctgaaggagcatgctgtcgaaggagactgtgatttccagctgttgaaactagatggcaagttttccgtggtatacgcaaaatgtgattccagtccagcagactcagccgaggacgtgcgcaaggtgtgccaagactgccccctgctggccccgctgaacgacaccagggtggtgcacgccgcgaaagctgccctggccgccttcaacgctcagaacaacggctccaattttcagctggaggaaatttcccgggctcagcttgtgcccctcccaccttctacctatgtggagtttacagtgtctggcactgactgtgttgctaaagaggccacagaggcagccaagtgtaacctgctggcagaaaagcaatatggcttttgtaaggcaacactcagtgagaagcttggtggggcagaggttgcagtgacctgcatggtgttccaaacacagcccgtgagctcacagccccaaccagaaggtgccaatgaagcagtccccacacccgtggtggacccagatgcacctccgtcccctccacttggcgcacctggactccctccagctggctcacccccagactcccatgtgttactggcagctcctccaggacaccagttgcaccgggcgcactacgacctgcgccacaccttcatgggtgtggtctcattggggtcaccctcaggagaagtgtcgcacccccggaaaacacgcacagtggtgcagcctagtgttggtgctgctgctgggccagtggttcctccatgtccggggaggatcagacacttcaaggtctaggctagacatggcagagatgaggaggtttggcacagaaaacatagccaccattttgtccaagcctgggcatgggtggggggccttgtctgctggccacgcaagtgtcacatgcgatctacattaatatcaagtcttgactccctacttcccgtcattcctcacaggacagaagcagagtgggtggtggttatgtttgacagaaggcattaggttgacaacttgtcatgattttgacggtaagccaccatgattgtgttctctgcctctggttgaccttacaaaaaccattggaactgtgactttgaaaggtgctcttgctaagcttatatgtgcctgttaatgaaagtgcctgaaagaccttccttaataa

SEQ ID NO: 106745 - DNA, 1711 bp, Homo sapiens
  Payload ID: 957
  Gene Symbol: AHSG
  Gene Name: alpha-2-HS-glycoprotein
  Uniprot ID: P02765
  ENST ID: ENST00000411641
  CDS Start-End: 220-1323
tgtttgcttttccagggctgatgtttgcagggtgtttttttttttcttttgaaccaaagcagaaatcatcctgtatccttatgcaattcttccggcaggctccaacagataaataaagcccaccaccctccatgggtctacctttcccagcagagcacctgggttggtcccgaagcctccaaccacctgcacgcctgccagggcctctctggggcagccatgaagtccctcgtcctgctcctttgtcttgctcagctctggggctgccactcagccccacatggcccagggctgatttatagacaaccgaactgcgatgatccagaaactgaggaagcagctctggtggctatagactacatcaatcaaaaccttccttggggatacaaacacaccttgaaccagattgatgaagtaaaggtgtggcctcagcagccctccggagagctgtttgagattgaaatagacaccctggaaaccacctgccatgtgctggaccccacccctgtggcaagatgcagcgtgaggcagctgaaggagcatgctgtcgaaggagactgtgatttccagctgttgaaactagatggcaagttttccgtggtatacgcaaaatgtgattccagtccagactcagccgaggacgtgcgcaaggtgtgccaagactgccccctgctggccccgctgaacgacaccagggtggtgcacgccgcgaaagctgccctggccgccttcaacgctcagaacaacggctccaattttcagctggaggaaatttcccgggctcagcttgtgcccctcccaccttctacctatgtggagtttacagtgtctggcactgactgtgttgctaaagaggccacagaggcagccaagtgtaacctgctggcagaaaagcaatatggcttttgtaaggcaacactcagtgagaagcttggtggggcagaggttgcagtgacctgcatggtgttccaaacacagcccgtgagctcacagccccaaccagaaggtgccaatgaagcagtccccacacccgtggtggacccagatgcacctccgtcccctccacttggcgcacctggactccctccagctggctcacccccagactcccatgtgttactggcagctcctccaggacaccagttgcaccgggcgcactacgacctgcgccacaccttcatgggtgtggtctcattggggtcaccctcaggagaagtgtcgcacccccggaaaacacgcacagtggtgcagcctagtgttggtgctgctgctgggccagtggttcctccatgtccggggaggatcagacacttcaaggtctaggctagacatggcagagatgaggaggtttggcacagaaaacatagccaccattttgtccaagcctgggcatgggtggggggccttgtctgctggccacgcaagtgtcacatgcgatctacattaatatcaagtcttgactccctacttcccgtcattcctcacaggacagaagcagagtgggtggtggttatgtttgacagaaggcattaggttgacaacttgtcatgattttgacggtaagccaccatgattgtgttctctgcctctggttgaccttacaaaaaccattggaactgtgactttgaaaggtgctcttgctaagcttatatgtgcctgttaatgaaagtgcctgaaagaccttccttaataaagaaggttctaagctgaa

SEQ ID NO: 106746 - DNA, 4844 bp, Homo sapiens
  Payload ID: 958
  Gene Symbol: A2M
  Gene Name: alpha-2-macroglobulin
  Uniprot ID: P01023
  ENST ID: ENST00000318602
  CDS Start-End: 309-4733
gaaaagcttattagctgctgtacggtaaaagtgagctcttacgggaatgggaatgtagttttagccctccagggattctatttagcccgccaggaattaaccttgactataaataggccatcaatgacctttccagagaatgttcagagacctcaactttgtttagagatcttgtgtgggtggaacttcctgtttgcacacagagcagcataaagcccagttgctttgggaagtgtttgggaccagatggattgtagggagtagggtacaatacagtctgttctcctccagctccttctttctgcaacatggggaagaacaaactccttcatccaagtctggttcttctcctcttggtcctcctgcccacagacgcctcagtctctggaaaaccgcagtatatggttctggtcccctccctgctccacactgagaccactgagaagggctgtgtccttctgagctacctgaatgagacagtgactgtaagtgcttccttggagtctgtcaggggaaacaggagcctcttcactgacctggaggcggagaatgacgtactccactgtgtcgccttcgctgtcccaaagtcttcatccaatgaggaggtaatgttcctcactgtccaagtgaaaggaccaacccaagaatttaagaagcggaccacagtgatggttaagaacgaggacagtctggtctttgtccagacagacaaatcaatctacaaaccagggcagacagtgaaatttcgtgttgtctccatggatgaaaactttcaccccctgaatgagttgattccactagtatacattcaggatcccaaaggaaatcgcatcgcacaatggcagagtttccagttagagggtggcctcaagcaattttcttttcccctctcatcagagcccttccagggctcctacaaggtggtggtacagaagaaatcaggtggaaggacagagcaccctttcaccgtggaggaatttgttcttcccaagtttgaagtacaagtaacagtgccaaagataatcaccatcttggaagaagagatgaatgtatcagtgtgtggcctatacacatatgggaagcctgtccctggacatgtgactgtgagcatttgcagaaagtatagtgacgcttccgactgccacggtgaagattcacaggctttctgtgagaaattcagtggacagctaaacagccatggctgcttctatcagcaagtaaaaaccaaggtcttccagctgaagaggaaggagtatgaaatgaaacttcacactgaggcccagatccaagaagaaggaacagtggtggaattgactggaaggcagtccagtgaaatcacaagaaccataaccaaactctcatttgtgaaagtggactcacactttcgacagggaattcccttctttgggcaggtgcgcctagtagatgggaaaggcgtccctataccaaataaagtcatattcatcagaggaaatgaagcaaactattactccaatgctaccacggatgagcatggccttgtacagttctctatcaacaccaccaatgttatgggtacctctcttactgttagggtcaattacaaggatcgtagtccctgttacggctaccagtgggtgtcagaagaacacgaagaggcacatcacactgcttatcttgtgttctccccaagcaagagctttgtccaccttgagcccatgtctcatgaactaccctgtggccatactcagacagtccaggcacattatattctgaatggaggcaccctgctggggctgaagaagctctccttctattatctgataatggcaaagggaggcattgtccgaactgggactcatggactgcttgtgaagcaggaagacatgaagggccatttttccatctcaatccctgtgaagtcagacattgctcctgtcgctcggttgctcatctatgctgttttacctaccggggacgtgattggggattctgcaaaatatgatgttgaaaattgtctggccaacaaggtggatttgagcttcagcccatcacaaagtctcccagcctcacacgcccacctgcgagtcacagcggctcctcagtccgtctgcgccctccgtgctgtggaccaaagcgtgctgctcatgaagcctgatgctgagctctcggcgtcctcggtttacaacctgctaccagaaaaggacctcactggcttccctgggcctttgaatgaccaggacaatgaagactgcatcaatcgtcataatgtctatattaatggaatcacatatactccagtatcaagtacaaatgaaaaggatatgtacagcttcctagaggacatgggcttaaaggcattcaccaactcaaagattcgtaaacccaaaatgtgtccacagcttcaacagtatgaaatgcatggacctgaaggtctacgtgtaggtttttatgagtcagatgtaatgggaagaggccatgcacgcctggtgcatgttgaagagcctcacacggagaccgtacgaaagtacttccctgagacatggatctgggatttggtggtggtaaactcagcaggtgtggctgaggtaggagtaacagtccctgacaccatcaccgagtggaaggcaggggccttctgcctgtctgaagatgctggacttggtatctcttccactgcctctctccgagccttccagcccttctttgtggagctcacaatgccttactctgtgattcgtggagaggccttcacactcaaggccacggtcctaaactaccttcccaaatgcatccgggtcagtgtgcagctggaagcctctcccgccttcctagctgtcccagtggagaaggaacaagcgcctcactgcatctgtgcaaacgggcggcaaactgtgtcctgggcagtaaccccaaagtcattaggaaatgtgaatttcactgtgagcgcagaggcactagagtctcaagagctgtgtgggactgaggtgccttcagttcctgaacacggaaggaaagacacagtcatcaagcctctgttggttgaacctgaaggactagagaaggaaacaacattcaactccctactttgtccatcaggtggtgaggtttctgaagaattatccctgaaactgccaccaaatgtggtagaagaatctgcccgagcttctgtctcagttttgggagacatattaggctctgccatgcaaaacacacaaaatcttctccagatgccctatggctgtggagagcagaatatggtcctctttgctcctaacatctatgtactggattatctaaatgaaacacagcagcttactccagagatcaagtccaaggccattggctatctcaacactggttaccagagacagttgaactacaaacactatgatggctcctacagcacctttggggagcgatatggcaggaaccagggcaacacctggctcacagcctttgttctgaagacttttgcccaagctcgagcctacatcttcatcgatgaagcacacattacccaagccctcatatggctctcccagaggcagaaggacaatggctgtttcaggagctctgggtcactgctcaacaatgccataaagggaggagtagaagatgaagtgaccctctccgcctatatcaccatcgcccttctggagattcctctcacagtcactcaccctgttgtccgcaatgccctgttttgcctggagtcagcctggaagacagcacaagaaggggaccatggcagccatgtatataccaaagcactgctggcctatgcttttgccctggcaggtaaccaggacaagaggaaggaagtactcaagtcacttaatgaggaagctgtgaagaaagacaactctgtccattgggagcgccctcagaaacccaaggcaccagtggggcatttttacgaaccccaggctccctctgctgaggtggagatgacatcctatgtgctcctcgcttatctcacggcccagccagccccaacctcggaggacctgacctctgcaaccaacatcgtgaagtggatcacgaagcagcagaatgcccagggcggtttctcctccacccaggacacagtggtggctctccatgctctgtccaaatatggagcagccacatttaccaggactgggaaggctgcacaggtgactatccagtcttcagggacattttccagcaaattccaagtggacaacaacaaccgcctgttactgcagcaggtctcattgccagagctgcctggggaatacagcatgaaagtgacaggagaaggatgtgtctacctccagacatccttgaaatacaatattctcccagaaaaggaagagttcccctttgctttaggagtgcagactctgcctcaaacttgtgatgaacccaaagcccacaccagcttccaaatctccctaagtgtcagttacacagggagccgctctgcctccaacatggcgatcgttgatgtgaagatggtctctggcttcattcccctgaagccaacagtgaaaatgcttgaaagatctaaccatgtgagccggacagaagtcagcagcaaccatgtcttgatttaccttgataaggtgtcaaatcagacactgagcttgttcttcacggttctgcaagatgtcccagtaagagatctgaaaccagccatagtgaaagtctatgattactacgagacggatgagtttgcaattgctgagtacaatgctccttgcagcaaagatcttggaaatgcttgaagaccacaaggctgaaaagtgctttgctggagtcctgttctcagagctccacagaagacacgtgtttttgtatctttaaagacttgatgaataaacactttttctggtcaa

SEQ ID NO: 106747 - DNA, 623 bp, Homo sapiens
  Payload ID: 958
  Gene Symbol: A2M
  Gene Name: alpha-2-macroglobulin
  ENST ID: ENST00000404455
  CDS Start-End: 120-623
atacaagagatgtgagaagcaccataaaaggcgttgtgaggagttgtgggggagtgagggagagaagaggttgaaaagcttattagctgctgtacggtaaaactccttctttctgcaacatggggaagaacaaactccttcatccaagtctggttcttctcctcttggtcctcctgcccacagacgcctcagtctctggaaaaccgcagtatatggttctggtcccctccctgctccacactgagaccactgagaagggctgtgtccttctgagctacctgaatgagacagtgactgtaagtgcttccttggagtctgtcaggggaaacaggagcctcttcactgacctggaggcggagaatgacgtactccactgtgtcgccttcgctgtcccaaagtcttcatccaatgaggaggtaatgttcctcactgtccaagtgaaaggaccaacccaagaatttaagaagcggaccacagtgatggttaagaacgaggacagtctggtctttgtccagacagacaaatcaatctacaaaccagggcagacagtgaaatttcgtgttgtctccatggatgaaaactttcaccccctgaatgagttgattccactagtatacattcag

SEQ ID NO: 106748 - DNA, 593 bp, Homo sapiens
  Payload ID: 958
  Gene Symbol: A2M
  Gene Name: alpha-2-macroglobulin
  ENST ID: ENST00000546069
  CDS Start-End: 1-222
aatggaggcaccctgctggggctgaagaagctctccttctattatctgataatggcaaagggaggcattgtccgaactgggactcatggactgcttgtgaagcaggaagacatgaagggccatttttccatctcaatccctgtgaagtcagacattgctcctgtcgctcggtttacaacctgctaccagaaaaggacctcactggcttccctgggcctttgaatgaccaggacaatgaagactgcatcaatcgtcataatgtctatattaatggaatcacatatactccagtatcaagtacaaatgaaaaggatatgtacagcttcctagaggacatgggcttaaaggcattcaccaactcaaagattcgtaaacccaaaatgtgtccacagcttcaacagtatgaaatgcatggacctgaaggtctacgtgtaggtttttatgagtcagatgtaatgggaagaggccatgcacgcctggtgcatgttgaagagcctcacacggagaccgtacgaaagtacttccctgagacatggatctgggatttggtggtggtaaactcagcaggtgtggctgaggtaggagtaacagtc

SEQ ID NO: 106749 - DNA, 590 bp, Homo sapiens
  Payload ID: 958
  Gene Symbol: A2M
  Gene Name: alpha-2-macroglobulin
  ENST ID: ENST00000539638
  CDS Start-End: 12-284
ctttctgcaacatggggaagaacaaactccttcatccaagtctggttcttctcctcttggtcctcctgcccacagacgcctcagtctctggaaaaccgcagtatatggttctggtcccctccctgctccacactgagaccactgagaagggctgtgtccttctgagctacctgaatgagacagtgactgtaagtgcttccttggagtctgtcaggggaaacaggagcctcttcactgacctggaggcggagaatgacgtactccactgtgtcgccttcgcttgaaatttcgtgttgtctccatggatgaaaactttcaccccctgaatgagttgattccactagtatacattcaggatcccaaaggaaatcgcatcgcacaatggcagagtttccagttagagggtggcctcaagcaattttcttttcccctctcatcagagcccttccagggctcctacaaggtggtggtacagaagaaatcaggtggaaggacagagcaccctttcaccgtggaggaatttgttcttcccaagtttgaagtacaagtaacagtgccaaagataatcaccatcttggaagaagagatga

SEQ ID NO: 106750 - DNA, 5274 bp, Homo sapiens
  Payload ID: 959
  Gene Symbol: A2ML1
  Gene Name: alpha-2-macroglobulin-like 1
  Uniprot ID: A8K2U0
  ENST ID: ENST00000299698
  CDS Start-End: 181-4545
gtccaccacctaacctggtggttacagaaggaggaacacagtcctcctgtgttccaggtgccaggaggtgactgactatagcatcagtcatcactgcacaccctacctggaattagtatataaagctacgcggagcgatctctgcccctgaccctggaaaaatctgtctcacccacaaagatgtgggctcagctccttctaggaatgttggccctatcaccagccattgcagaagaacttccaaactacctggtgacattaccagcccggctaaatttcccctccgttcagaaggtttgtttggacctgagccctgggtacagtgatgttaaattcacggttactctggagaccaaggacaagacccagaagttgctagaatactctggactgaagaagaggcacttacattgtatctcctttcttgtaccacctcctgctggtggcacagaagaagtggccacaatccgggtgtcgggagttggaaataacatcagctttgaggagaagaaaaaggttctaattcagaggcaggggaacggcacctttgtacagactgacaaacctctctacaccccagggcagcaagtgtatttccgcattgtcaccatggatagcaacttcgttccagtgaatgacaagtactccatggtggaactacaggatccaaatagcaacaggattgcacagtggctggaagtggtacctgagcaaggcattgtagacctgtccttccaactggcaccagaggcaatgctgggcacctacactgtggcagtggctgagggcaagacctttggtactttcagtgtggaggaatatgtgctgccgaagtttaaggtggaagtggtggaacccaaggagttatcaacggtgcaggaatctttcttagtaaaaatttgttgtaggtacacctatggaaagcccatgctaggggcagtgcaggtatctgtgtgtcagaaggcaaatacttactggtatcgagaggtggaacgggaacagcttcctgacaaatgcaggaacctctctggacagactgacaaaacaggatgtttctcagcacctgtggacatggccacctttgacctcattggatatgcgtacagccatcaaatcaatattgtggctactgttgtggaggaagggacaggtgtggaggccaatgccactcagaatatctacatttctccacaaatgggatcaatgacctttgaagacaccagcaatttttaccatccaaatttccccttcagtgggaagataagagttaggggccatgatgactccttcctcaagaaccatctagtgtttctggtgatttatggcacaaatggaaccttcaaccagaccctggttactgataacaatggcctagctccctttaccttggagacatccggttggaatgggacagacgtttctctggagggaaagtttcaaatggaagacttagtatataatccggaacaagtgccacgttactaccaaaatgcctacctgcacctgcgacccttctacagcacaacccgcagcttccttggcatccaccggctaaacggccccttgaaatgtggccagccccaggaagtgctggtggattattacatcgacccggccgatgcaagccctgaccaagagatcagcttctcctactatttaatagggaaaggaagtttggtgatggaggggcagaaacacctgaactctaagaagaaaggactgaaagcctccttctctctctcactgaccttcacttcgagactggcccctgatccttccctggtgatctatgccatttttcccagtggaggtgttgtagctgacaaaattcagttctcagtcgagatgtgctttgacaatcaggtttcccttggcttctccccctcccagcagcttccaggagcagaagtggagctgcagctgcaggcagctcccggatccctgtgtgcgctccgggcggtggatgagagtgtcttactgcttaggccagacagagagctgagcaaccgctctgtctatgggatgtttccattctggtatggtcactacccctatcaagtggctgagtatgatcagtgtccagtgtctggcccatgggactttcctcagcccctcattgacccaatgccccaagggcattcgagccagcgttccattatctggaggccctcgttctctgaaggcacggaccttttcagctttttccgggacgtgggcctgaaaatactgtccaatgccaaaatcaagaagccagtagattgcagtcacagatctccagaatacagcactgctatgggtgcaggcggtggtcatccagaggcttttgagtcatcaactcctttacatcaagcagaggattctcaggtccgccagtacttcccagagacctggctctgggatctgtttcctattggtaactcggggaaggaggcggtccacgtcacagttcctgacgccatcaccgagtggaaggcgatgagtttctgcacttcccagtcaagaggcttcgggctttcacccactgttggactaactgctttcaagccgttctttgttgacctgactctcccttactcagtagtccgtggggaatcctttcgtcttactgccaccatcttcaattacctaaaggattgcatcagggttcagactgacctggctaaatcgcatgagtaccagctagaatcatgggcagattctcagacctccagttgtctctgtgctgatgacgcaaaaacccaccactggaacatcacagctgtcaaattgggtcacattaactttactattagtacaaagattctggacagcaatgaaccatgtgggggccagaaggggtttgttccccaaaagggccgaagtgacacgctcatcaagccagttctcgtcaaacctgagggagtcctggtggagaagacacacagctcattgctgtgcccaaaaggaaaggtggcatctgaatctgtctccctggagctcccagtggacattgttcctgactcgaccaaggcttatgttacggttctgggagacattatgggcacagccctgcagaacctggatggtctggtgcagatgcccagtggctgtggcgagcagaacatggtcttgtttgctcccatcatctatgtcttgcagtacctggagaaggcagggctgctgacggaggagatcaggtctcgggcagtgggtttcctggaaatagggtaccagaaggagctgatgtacaaacacagcaatggctcatacagtgcctttggggagcgagatggaaatggaaacacatggctgacagcgtttgtcacaaaatgctttggccaagctcagaaattcatcttcattgatcccaagaacatccaggatgctctcaagtggatggcaggaaaccagctccccagtggctgctatgccaacgtgggaaatctccttcacacagctatgaagggtggtgttgatgatgaggtctccttgactgcgtatgtcacagctgcattgctggagatgggaaaggatgtagatgacccaatggtgagtcagggtctacggtgtctcaagaattcggccacctccacgaccaacctctacacacaggccctgttggcttacattttctccctggctggggaaatggacatcagaaacattctccttaaacagttagatcaacaggctatcatctcaggagaatccatttactggagccagaaacctactccatcatcgaacgccagcccttggtctgagcctgcggctgtagatgtggaactcacagcatatgcattgttggcccagcttaccaagcccagcctgactcaaaaggagatagcgaaggccactagcatagtggcttggttggccaagcaacacaatgcatatgggggcttctcttctactcaggatactgtagttgctctccaagctcttgccaaatatgccactaccgcctacatgccatctgaggagatcaacctggttgtaaaatccactgagaatttccagcgcacattcaacatacagtcagttaacagattggtatttcagcaggataccctgcccaatgtccctggaatgtacacgttggaggcctcaggccagggctgtgtctatgtgcagacggtgttgagatacaatattctccctcccacaaatatgaagacctttagtcttagtgtggaaataggaaaagctagatgtgagcaaccgacttcacctcgatccttgactctcactattcacaccagttatgtggggagccgtagctcttccaatatggctattgtggaagtgaagatgctatctgggttcagtcccatggagggcaccaatcagttacttctccagcaacccctggtgaagaaggttgaatttggaactgacacacttaacatttacttggatgagctcattaagaacactcagacttacaccttcaccatcagccaaagtgtgctggtcaccaacttgaaaccagcaaccatcaaggtctatgactactacctaccagatgaacaggcaacaattcagtattctgatccctgtgaatgaggataggagctggaaactcaattagtcctctgtgacatttactggagggtggaacattcttctgtcgcttgaagcagaactcattcaatcaaataatttaatttctctgactagtatatgggtaacaaatgaatatgtctgaacctcagctataatactttctactacctttgcaaggagatgggataggaacaatcactcagaggaggcgttgcatgggcagggtcatagggggaagaaaggtggtttagctgttttatttagccattcagggggctctccagagaggagacggtggtagagggtgaactagagaagataagaatgtcttcctaggccggatgcggtggctcacgcctgtaatcccagcactttgggattgcgaggtgggcggatcacttgaggtcaggagttcaagaccagcctggccaacatggtaaaacccgtctctactaacaatacaaagattagcctggtgtggtggcacgggcctgtaatcgcagccccttggaaggccaaggcaggagaatcgcctcaacactggaggtggaggttgcagtgagctgagattgtgccactgcactccagcctgggcaatgaggcaagaccctgtctcaaaaaataataaataataataataataatgtttttctagagtttcagtctaagggaaaatgtgatttagggctttggaaattggctaaaaaaataaaaatggaaaagaaaatc

SEQ ID NO: 106751 - DNA, 3460 bp, Homo sapiens
  Payload ID: 959
  Gene Symbol: A2ML1
  Gene Name: alpha-2-macroglobulin-like 1
  Uniprot ID: A8K2U0
  ENST ID: ENST00000539547
  CDS Start-End: 169-3060
aatgtcagaagggctcagggtggtttaggatgaaattatttccactgaattttaaattgagctgtaattaaaaaacacttatgaggatagattttcgctgactttctgttacaaagattataagaaaataaaatttggagatcttcaagaaatggcagacagttatctatgttaatagggaaaggaagtttggtgatggaggggcagaaacacctgaactctaagaagaaaggactgaaagcctccttctctctctcactgaccttcacttcgagactggcccctgatccttccctggtgatctatgccatttttcccagtggaggtgttgtagctgacaaaattcagttctcagtcgagatgtgctttgacaatcaggtttcccttggcttctccccctcccagcagcttccaggagcagaagtggagctgcagctgcaggcagctcccggatccctgtgtgcgctccgggcggtggatgagagtgtcttactgcttaggccagacagagagctgagcaaccgctctgtctatgggatgtttccattctggtatggtcactacccctatcaagtggctgagtatgatcagtgtccagtgtctggcccatgggactttcctcagcccctcattgacccaatgccccaagggcattcgagccagcgttccattatctggaggccctcgttctctgaaggcacggaccttttcagctttttccgggacgtgggcctgaaaatactgtccaatgccaaaatcaagaagccagtagattgcagtcacagatctccagaatacagcactgctatgggtgcaggcggtggtcatccagaggcttttgagtcatcaactcctttacatcaagcagaggattctcaggtccgccagtacttcccagagacctggctctgggatctgtttcctattggtaactcggggaaggaggcggtccacgtcacagttcctgacgccatcaccgagtggaaggcgatgagtttctgcacttcccagtcaagaggcttcgggctttcacccactgttggactaactgctttcaagccgttctttgttgacctgactctcccttactcagtagtccgtggggaatcctttcgtcttactgccaccatcttcaattacctaaaggattgcatcagggttcagactgacctggctaaatcgcatgagtaccagctagaatcatgggcagattctcagacctccagttgtctctgtgctgatgacgcaaaaacccaccactggaacatcacagctgtcaaattgggtcacattaactttactattagtacaaagattctggacagcaatgaaccatgtgggggccagaaggggtttgttccccaaaagggccgaagtgacacgctcatcaagccagttctcgtcaaacctgagggagtcctggtggagaagacacacagctcattgctgtgcccaaaaggaaaggtggcatctgaatctgtctccctggagctcccagtggacattgttcctgactcgaccaaggcttatgttacggttctgggagacattatgggcacagccctgcagaacctggatggtctggtgcagatgcccagtggctgtggcgagcagaacatggtcttgtttgctcccatcatctatgtcttgcagtacctggagaaggcagggctgctgacggaggagatcaggtctcgggcagtgggtttcctggaaatagggtaccagaaggagctgatgtacaaacacagcaatggctcatacagtgcctttggggagcgagatggaaatggaaacacatggctgacagcgtttgtcacaaaatgctttggccaagctcagaaattcatcttcattgatcccaagaacatccaggatgctctcaagtggatggcaggaaaccagctccccagtggctgctatgccaacgtgggaaatctccttcacacagctatgaagggtggtgttgatgatgaggtctccttgactgcgtatgtcacagctgcattgctggagatgggaaaggatgtagatgacccaatggtgagtcagggtctacggtgtctcaagaattcggccacctccacgaccaacctctacacacaggccctgttggcttacattttctccctggctggggaaatggacatcagaaacattctccttaaacagttagatcaacaggctatcatctcaggagaatccatttactggagccagaaacctactccatcatcgaacgccagcccttggtctgagcctgcggctgtagatgtggaactcacagcatatgcattgttggcccagcttaccaagcccagcctgactcaaaaggagatagcgaaggccactagcatagtggcttggttggccaagcaacacaatgcatatgggggcttctcttctactcaggatactgtagttgctctccaagctcttgccaaatatgccactaccgcctacatgccatctgaggagatcaacctggttgtaaaatccactgagaatttccagcgcacattcaacatacagtcagttaacagattggtatttcagcaggataccctgcccaatgtccctggaatgtacacgttggaggcctcaggccagggctgtgtctatgtgcagacggtgttgagatacaatattctccctcccacaaatatgaagacctttagtcttagtgtggaaataggaaaagctagatgtgagcaaccgacttcacctcgatccttgactctcactattcacaccagttatgtggggagccgtagctcttccaatatggctattgtggaagtgaagatgctatctgggttcagtcccatggagggcaccaatcagttacttctccagcaacccctggtgaagaaggttgaatttggaactgacacacttaacatttacttggatgagctcattaagaacactcagacttacaccttcaccatcagccaaagtgtgctggtcaccaacttgaaaccagcaaccatcaaggtctatgactactacctaccagatgaacaggcaacaattcagtattctgatccctgtgaatgaggataggagctggaaactcaattagtcctctgtgacatttactggagggtggaacattcttctgtcgcttgaagcagaactcattcaatcaaataatttaatttctctgactagtatatgggtaacaaatgaatatgtctgaacctcagctataatactttctactacctttgcaaggagatgggataggaacaatcactcagaggaggcgttgcatgggcagggtcatagggggaagaaaggtggtttagctgttttatttagccattcagggggctctccagagaggagacggtggtagagggtgaactagagaagataagaatgtcttcctaggccggatgcggtggctcacgcctgtaatcccagcactttgggattgcgaggtgggcggatcact

SEQ ID NO: 106752 - DNA, 570 bp, Homo sapiens
  Payload ID: 959
  Gene Symbol: A2ML1
  Gene Name: alpha-2-macroglobulin-like 1
  ENST ID: ENST00000545692
  CDS Start-End: 20-570
gcatttgtcaagctagtggatgctgggtgagttaatagggaaaggaagtttggtgatggaggggcagaaacacctgaactctaagaagaaaggactgaaagcctccttctctctctcactgaccttcacttcgagactggcccctgatccttccctggtgatctatgccatttttcccagtggaggtgttgtagctgacaaaattcagttctcagtcgagatgtgctttgacaatcaggtttcccttggcttctccccctcccagcagcttccaggagcagaagtggagctgcagctgcaggcagctcccggatccctgtgtgcgctccgggcggtggatgagagtgtcttactgcttaggccagacagagagctgagcaaccgctctgtctatgggatgtttccattctggtatggtcactacccctatcaagtggctgagtatgatcagtgtccagtgtctggcccatgggactttcctcagcccctcattgacccaatgccccaagggcattcgagccagcgttccattatctggaggccctcgttctctgaaggcacggacctttt

SEQ ID NO: 106753 - DNA, 462 bp, Homo sapiens
  Payload ID: 959
  Gene Symbol: A2ML1
  Gene Name: alpha-2-macroglobulin-like 1
  ENST ID: ENST00000536789
  CDS Start-End: 219-462
gtggacgggaagggggagttagaagaggagatttctcctctagagggttcaatgtcagaagggctcagggtggtttaggatgaaattatttccactgaattttaaattgagctgtaattaaaaaacacttatgaggatagattttcgctgactttctgttacaaagattataagaaaataaaatttggagatcttcaagaaatggcagacagttatctatggtgaggaacaatttctatgctgtcagactcctcccatccacctgcgtggttctcagccagacctccaactgcaggaggagccaccaggacccgttggcagcatcctgcatttgtcaagctagtggatgctggttaatagggaaaggaagtttggtgatggaggggcagaaacacctgaactctaagaagaaaggactgaaagcctccttctctctctcactgaccttcacttcgagactgg

SEQ ID NO: 106754 - DNA, 3370 bp, Homo sapiens
  Payload ID: 959
  Gene Symbol: A2ML1
  Gene Name: alpha-2-macroglobulin-like 1
  ENST ID: ENST00000541459
  CDS Start-End: 1-3015
agcttccttggcatccaccggctaaacggccccttgaaatgtggccagccccaggaagtgctggtggattattacatcgacccggccgatgcaagccctgaccaagagatcagcttctcctactatttaatagggaaaggaagtttggtgatggaggggcagaaacacctgaactctaagaagaaaggactgaaagcctccttctctctctcactgaccttcacttcgagactggcccctgatccttccctggtgatctatgccatttttcccagtggaggtgttgtagctgacaaaattcagttctcagtcgagatgtgctttgacaatcaggtttcccttggcttctccccctcccagcagcttccaggagcagaagtggagctgcagctgcaggcagctcccggatccctgtgtgcgctccgggcggtggatgagagtgtcttactgcttaggccagacagagagctgagcaaccgctctgtctatgggatgtttccattctggtatggtcactacccctatcaagtggctgagtatgatcagtgtccagtgtctggcccatgggactttcctcagcccctcattgacccaatgccccaagggcattcgagccagcgttccattatctggaggccctcgttctctgaaggcacggaccttttcagctttttccgggacgtgggcctgaaaatactgtccaatgccaaaatcaagaagccagtagattgcagtcacagatctccagaatacagcactgctatgggtgcaggcggtggtcatccagaggcttttgagtcatcaactcctttacatcaagcagaggattctcaggtccgccagtacttcccagagacctggctctgggatctgtttcctattggtaactcggggaaggaggcggtccacgtcacagttcctgacgccatcaccgagtggaaggcgatgagtttctgcacttcccagtcaagaggcttcgggctttcacccactgttggactaactgctttcaagccgttctttgttgacctgactctcccttactcagtagtccgtggggaatcctttcgtcttactgccaccatcttcaattacctaaaggattgcatcagggttcagactgacctggctaaatcgcatgagtaccagctagaatcatgggcagattctcagacctccagttgtctctgtgctgatgacgcaaaaacccaccactggaacatcacagctgtcaaattgggtcacattaactttactattagtacaaagattctggacagcaatgaaccatgtgggggccagaaggggtttgttccccaaaagggccgaagtgacacgctcatcaagccagttctcgtcaaacctgagggagtcctggtggagaagacacacagctcattgctgtgcccaaaaggaaaggtggcatctgaatctgtctccctggagctcccagtggacattgttcctgactcgaccaaggcttatgttacggttctgggagacattatgggcacagccctgcagaacctggatggtctggtgcagatgcccagtggctgtggcgagcagaacatggtcttgtttgctcccatcatctatgtcttgcagtacctggagaaggcagggctgctgacggaggagatcaggtctcgggcagtgggtttcctggaaatagggtaccagaaggagctgatgtacaaacacagcaatggctcatacagtgcctttggggagcgagatggaaatggaaacacatggctgacagcgtttgtcacaaaatgctttggccaagctcagaaattcatcttcattgatcccaagaacatccaggatgctctcaagtggatggcaggaaaccagctccccagtggctgctatgccaacgtgggaaatctccttcacacagctatgaagggtggtgttgatgatgaggtctccttgactgcgtatgtcacagctgcattgctggagatgggaaaggatgtagatgacccaatggtgagtcagggtctacggtgtctcaagaattcggccacctccacgaccaacctctacacacaggccctgttggcttacattttctccctggctggggaaatggacatcagaaacattctccttaaacagttagatcaacaggctatcatctcaggagaatccatttactggagccagaaacctactccatcatcgaacgccagcccttggtctgagcctgcggctgtagatgtggaactcacagcatatgcattgttggcccagcttaccaagcccagcctgactcaaaaggagatagcgaaggccactagcatagtggcttggttggccaagcaacacaatgcatatgggggcttctcttctactcaggatactgtagttgctctccaagctcttgccaaatatgccactaccgcctacatgccatctgaggagatcaacctggttgtaaaatccactgagaatttccagcgcacattcaacatacagtcagttaacagattggtatttcagcaggataccctgcccaatgtccctggaatgtacacgttggaggcctcaggccagggctgtgtctatgtgcagacggtgttgagatacaatattctccctcccacaaatatgaagacctttagtcttagtgtggaaataggaaaagctagatgtgagcaaccgacttcacctcgatccttgactctcactattcacaccagttatgtggggagccgtagctcttccaatatggctattgtggaagtgaagatgctatctgggttcagtcccatggagggcaccaatcagttacttctccagcaacccctggtgaagaaggttgaatttggaactgacacacttaacatttacttggatgagctcattaagaacactcagacttacaccttcaccatcagccaaagtgtgctggtcaccaacttgaaaccagcaaccatcaaggtctatgactactacctaccagatgaacaggcaacaattcagtattctgatccctgtgaatgaggatctggctctgttgcccaggctgcagtgcagtggcgtgatctcagctcactgcagcctctgcctcccaagttcaagcgattcttgtgcctcagcctcctgagtagctgggatgacaggcacgtgccatcacgcccagctaattttttttgtatttttaatagagatggggtttcgccatgttggtcaggctggtctcaaactcctggcctcaggtgatccgcctacttcagcctcccaaagtgctgggattacaggtgtaagccactgtgcccggcctgtcctaaactcttgaaaatagtttacagaagaaaaagctaatgcttggtattaaaacaatacttttttctatcag

SEQ ID NO: 106755 - DNA, 1136 bp, Homo sapiens
  Payload ID: 959
  Gene Symbol: A2ML1
  Gene Name: alpha-2-macroglobulin-like 1
  ENST ID: ENST00000537475
  CDS Start-End: 1-547
gcgcacattcaacatacagtcagttaacagattggtatttcagcaggataccctgcccaatgtccctggaatgtacacgttggaggcctcaggccagggctgtgtctatgtgcagacggtgttgagatacaatattctccctcccacaaatatgaagacctttagtcttagtgtggaaataggaaaagctagatgtgagcaaccgacttcacctcgatccttgactctcactattcacaccagttatgtggggagccgtagctcttccaatatggctattgtggaagtgaagatgctatctgggttcagtcccatggagggcaccaatcagttacttctccagcaacccctggtgaagaaggttgaatttggaactgacacacttaacatttacttggatgagctcattaagaacactcagacttacaccttcaccatcagccaaagtgtgctggtcaccaacttgaaaccagcaaccatcaaggtctatgactactacctaccagatgaacaggcaacaattcagtattctgatccctgtgaatgagaaagatcattctagcagtaatgtgaagaatggggtggagaagaagaaagccgaagtccttgaaaccatttaggagactgctacagttatccaggttcttttaaattatctcagtacacaattgtgtggtccatgaacaatgacagcatagtggactctgtggcacggcacccagaaccaccccctttcaagacagaagcatttattccttcacttcctgggagtgttaacaactgatagctaccagttgtgcccgctctggacttttgcccatagtggcctatcctctgtgattatgcatttgtaactgtgttcttcctcttctgaagacatcagtcacattggattagccacccttatggctgcatttcaccttgattaccactttaaaggccctgtctccaaatacagtcacattgggggttatggctccaacatactcatttggaagccaggtgtggtggctcatgcctgtaatcccagcactttcggaggccaaggcaggaggattgcttgagcccaggagctagagatcagcctgggcaacacagggagactcatctctacaaaaaaatataaataaataaac

SEQ ID NO: 106756 - DNA, 1116 bp, Homo sapiens
  Payload ID: 960
  Gene Symbol:
  Gene Name: alpha-crystallin A chain  [Source:RefSeq peptide
  Acc:NP_001300979]
  ENST ID: ENST00000619537
  CDS Start-End: 70-591
acactgcgctgcccagaggccccgctgactcctgccagcctccaggtccccgtggtaccaaagctgaacatggatgtgaccatccagcacccctggttcaagcgcaccctggggcccttctaccccagccggctgttcgaccagtttttcggcgagggcctttttgagtatgacctgctgcccttcctgtcgtccaccatcagcccctactaccgccagtccctcttccgcaccgtgctggactccggcatctctgaggttcgatccgaccgggacaagttcgtcatcttcctcgatgtgaagcacttctccccggaggacctcaccgtgaaggtgcaggacgactttgtggagatccacggaaagcacaacgagcgccaggacgaccacggctacatttcccgtgagttccaccgccgctaccgcctgccgtccaacgtggaccagtcggccctctcttgctccctgtctgccgatggcatgctgaccttctgtggccccaagatccagactggcctggatgccacccacgccgagcgagccatccccgtgtcgcgggaggagaagcccacctcggctccctcgtcctaagcaggcattgcctcggctggctcccctgcagccctggcccatcatggggggagcaccctgagggcggggtgtctgtcttcctttgcttcccttttttcctttccaccttctcacatggaatgagggtttgagagagcagccaggagagcttagggtctcagggtgtcccagaccccgacaccggccagtggcggaagtgaccgcacctcacactcctttagatagcagcctggctcccctggggtgcaggcgcctcaactctgctgagggtccagaaggagggggtgacctccggccaggtgcctcctgacacacctgcagcctccctccgcggcgggccctgcccacacctcctggggcgcgtgaggcccgtggggccggggcttctgtgcacctgggctctcgcggcctcttctctcagaccgtcttcctccaacccctctatgtagtgccgctcttggggacatgggtcgcccatgagagcgcagcccgcggcaatcaataaacagcaggtgatacaagcaa

SEQ ID NO: 106757 - DNA, 712 bp, Homo sapiens
  Payload ID: 960
  Gene Symbol:
  Gene Name: alpha-crystallin A chain  [Source:RefSeq peptide
  Acc:NP_001300979]
  ENST ID: ENST00000624932
  CDS Start-End: 63-473
ggcccaccagtagcattcagcccctcagctggccctgagggtttggagacaggtcgagggtcatgcctgtctgtccaggagacagtcacaggcccccgaaagctctgccccacttggtgtgtgggagaagaggccggcaggttcgatccgaccgggacaagttcgtcatcttcctcgatgtgaagcacttctccccggaggacctcaccgtgaaggtgcaggacgactttgtggagatccacggaaagcacaacgagcgccaggacgaccacggctacatttcccgtgagttccaccgccgctaccgcctgccgtccaacgtggaccagtcggccctctcttgctccctgtctgccgatggcatgctgaccttctgtggccccaagatccagactggcctggatgccacccacgccgagcgagccatccccgtgtcgcgggaggagaagcccacctcggctccctcgtcctaagcaggcattgcctcggctggctcccctgcagccctggcccatcatggggggagcaccctgagggcggggtgtctgtcttcctttgcttcccttttttcctttccaccttctcacatggaatgagggtttgagagagcagccaggagagcttagggtctcagggtgtcccagaccccgacaccggccagtggcggaagtgaccgcacctcacactcctttagatagcagcctggctcccc

SEQ ID NO: 106758 - DNA, 601 bp, Homo sapiens
  Payload ID: 960
  Gene Symbol:
  Gene Name: alpha-crystallin A chain  [Source:RefSeq peptide
  Acc:NP_001300979]
  ENST ID: ENST00000624019
  CDS Start-End: 204-587
gcatgcgtggtggcgaatgccagctcccgggttcctctggtctcctgagtcccggagacctgggagcaggtgggggtcatagtcctgaaagccagagagcagggcgttcctagcacctcctccaatgagctcggcctgcccacggctagcaaagctcttggcaagtttacttaggtgccctgccaaggctaaaaggacaggcaatggacgccccccccccccacccaaccacaggcctcctctctgagccacgggttcgatccgaccgggacaagttcgtcatcttcctcgatgtgaagcacttctccccggaggacctcaccgtgaaggtgcaggacgactttgtggagatccacggaaagcacaacgagcgccaggacgaccacggctacatttcccgtgagttccaccgccgctaccgcctgccgtccaacgtggaccagtcggccctctcttgctccctgtctgccgatggcatgctgaccttctgtggccccaagatccagactggcctggatgccacccacgccgagcgagccatccccgtgtcgcgggaggagaagcccacctcggctccctcgtcctaagcaggcattgcctc

SEQ ID NO: 106759 - DNA, 1914 bp, Homo sapiens
  Payload ID: 961
  Gene Symbol: AFP
  Gene Name: alpha-fetoprotein
  ENST ID: ENST00000226359
  CDS Start-End: 17-1885
aaaataactagcaaccatgaagtgggtggaatcaatttttttaattttcctactaaattttactgaatccagaacactgcatagaaatgaatatggaatagcttccatattggattcttaccaatgtactgcagagataagtttagctgacctggctaccatattttttgcccagtttgttcaagaagccacttacaaggaagtaagcaaaatggtgaaagatgcattgactgcaattgagaaacccactggagatgaacagtcttcagggtgtttagaaaaccagctacctgcctttctggaagaactttgccatgagaaagaaattttggagaagtacggacattcagactgctgcagccaaagtgaagagggaagacataactgttttcttgcacacaaaaagcccactccagcatcgatcccacttttccaagttccagaacctgtcacaagctgtgaagcatatgaagaagacagggagacattcatgaacaaattcatttatgagatagcaagaaggcatcccttcctgtatgcacctacaattcttctttgggctgctcgctatgacaaaataattccatcttgctgcaaagctgaaaatgcagttgaatgcttccaaacaaaggcagcaacagttacaaaagaattaagagaaagcagcttgttaaatcaacatgcatgtgcagtaatgaaaaattttgggacccgaactttccaagccataactgttactaaactgagtcagaagtttaccaaagttaattttactgaaatccagaaactagtcctggatgtggcccatgtacatgagcactgttgcagaggagatgtgctggattgtctgcaggatggggaaaaaatcatgtcctacatatgttctcaacaagacactctgtcaaacaaaataacagaatgctgcaaactgaccacgctggaacgtggtcaatgtataattcatgcagaaaatgatgaaaaacctgaaggtctatctccaaatctaaacaggtttttaggagatagagattttaaccaattttcttcaggggaaaaaaatatcttcttggcaagttttgttcatgaatattcaagaagacatcctcagcttgctgtctcagtaattctaagagttgctaaaggataccaggagttattggagaagtgtttccagactgaaaaccctcttgaatgccaagataaaggagaagaagaattacagaaatacatccaggagagccaagcattggcaaagcgaagctgcggcctcttccagaaactaggagaatattacttacaaaatgcgtttctcgttgcttacacaaagaaagccccccagctgacctcgtcggagctgatggccatcaccagaaaaatggcagccacagcagccacttgttgccaactcagtgaggacaaactattggcctgtggcgagggagcggctgacattattatcggacacttatgtatcagacatgaaatgactccagtaaaccctggtgttggccagtgctgcacttcttcatatgccaacaggaggccatgcttcagcagcttggtggtggatgaaacatatgtccctcctgcattctctgatgacaagttcattttccataaggatctgtgccaagctcagggtgtagcgctgcaaacaatgaagcaagagtttctcattaaccttgtgaagcaaaagccacaaataacagaggaacaacttgaggctgtcattgcagatttctcaggcctgttggagaaatgctgccaaggccaggaacaggaagtctgctttgctgaagaggggaagagaagacaaaacgagtctttcattcggtgtgaacttttctctttaattttaactgatttaacactttttgtgaattaatgaaatgataaagacttttatgtgagatt

SEQ ID NO: 106760 - DNA, 2484 bp, Homo sapiens
  Payload ID: 961
  Gene Symbol: AFP
  Gene Name: alpha-fetoprotein
  Uniprot ID: P02771
  ENST ID: ENST00000395792
  CDS Start-End: 101-1930
actagttaacaggcattgcctgaaaagagtataaaagaatttcagcatgattttccatattgtgcttccaccactgccaataacaaaataactagcaaccatgaagtgggtggaatcaatttttttaattttcctactaaattttactgaatccagaacactgcatagaaatgaatatggaatagcttccatattggattcttaccaatgtactgcagagataagtttagctgacctggctaccatattttttgcccagtttgttcaagaagccacttacaaggaagtaagcaaaatggtgaaagatgcattgactgcaattgagaaacccactggagatgaacagtcttcagggtgtttagaaaaccagctacctgcctttctggaagaactttgccatgagaaagaaattttggagaagtacggacattcagactgctgcagccaaagtgaagagggaagacataactgttttcttgcacacaaaaagcccactccagcatcgatcccacttttccaagttccagaacctgtcacaagctgtgaagcatatgaagaagacagggagacattcatgaacaaattcatttatgagatagcaagaaggcatcccttcctgtatgcacctacaattcttctttgggctgctcgctatgacaaaataattccatcttgctgcaaagctgaaaatgcagttgaatgcttccaaacaaaggcagcaacagttacaaaagaattaagagaaagcagcttgttaaatcaacatgcatgtgcagtaatgaaaaattttgggacccgaactttccaagccataactgttactaaactgagtcagaagtttaccaaagttaattttactgaaatccagaaactagtcctggatgtggcccatgtacatgagcactgttgcagaggagatgtgctggattgtctgcaggatggggaaaaaatcatgtcctacatatgttctcaacaagacactctgtcaaacaaaataacagaatgctgcaaactgaccacgctggaacgtggtcaatgtataattcatgcagaaaatgatgaaaaacctgaaggtctatctccaaatctaaacaggtttttaggagatagagattttaaccaattttcttcaggggaaaaaaatatcttcttggcaagttttgttcatgaatattcaagaagacatcctcagcttgctgtctcagtaattctaagagttgctaaaggataccaggagttattggagaagtgtttccagactgaaaaccctcttgaatgccaagataaaggagaagaagaattacagaaatacatccaggagagccaagcattggcaaagcgaagctgcggcctcttccagaaactaggagaatattacttacaaaatgcgtttctcgttgcttacacaaagaaagccccccagctgacctcgtcggagctgatggccatcaccagaaaaatggcagccacagcagccacttgttgccaactcagtgaggacaaactattggcctgtggcgagggagcggctgacattattatcggacacttatgtatcagacatgaaatgactccagtaaaccctggtgttggccagtgctgcacttcttcatatgccaacaggaggccatgcttcagcagcttggtggtggatgaaacatatgtccctcctgcattctctgatgacaagttcattttccataaggatctgtgccaagctcagggtgtagcgctgcaaacaatgaagcaagagtttctcattaaccttgtgaagcaaaagccacaaataacagaggaacaacttgaggctgtcattgcagatttctcaggcctgttggagaaatgctgccaaggccaggaacaggaagtctgctttgctgaagagggacaaaaactgatttcaaaaactcgtgctgctttgggagtttaaattacttcaggggaagagaagacaaaacgagtctttcattcggtgtgaacttttctctttaattttaactgatttaacactttttgtgaattaatgaaatgataaagacttttatgtgagatttccttatcacagaaataaaatatctccaaatgtttccttttccaagtttgcttatttatgaaaagttatcgataatttctttagttttgtataccattgtctgaagcagattctgttaaaatagcattaagtgttggttattataggagattaaagctatccaaggatggatttacagcactagatcacttggtgaactgaaaaatgttcccaagttaaacactatttgatgctaccagggcattttgtttattaaatgaccatcactgaagtattctaacagataatctggagatgagaaaagaaattattattcttctatgggatctaagaaaatttaacatctactttttttctcaatcttgttcagttctctattcacagacattttaaaacataagaatattacagttttgattgaatataattaa

SEQ ID NO: 106761 - DNA, 4537 bp, Homo sapiens
  Payload ID: 962
  Gene Symbol: ALPK1
  Gene Name: alpha-kinase 1
  Uniprot ID: Q96QP1
  ENST ID: ENST00000177648
  CDS Start-End: 201-3935
tttatgagaaacagtgtgtttcagagaggctgtaccagaattaactctgctcagagttagatttgctggtcttaaagtacttttcctctttaagataaaagaagttcttctaaatcaggaatggattgaaatctaatgaaccgaaactttgggtaattgatcaccctagacccagggacacccaattcatcgtaatcatcatgaataatcaaaaagtggtagctgtgctactgcaagagtgcaagcaagtgctggatcagctcttgttggaagcgccagatgtgtcggaagaggacaagagcgaggaccagcgctgcagagctttactccccagcgagttaaggaccctgatccaggaggcaaaggaaatgaagtggcccttcgtgcctgaaaagtggcagtacaaacaagccgtgggcccagaggacaaaacaaacctgaaggatgtgattggcgccgggttgcagcagttactggcgtccctgagggcctccatcctcgctcgggactgtgcggctgcggcggctattgtgttcttggtggaccggttcctgtatgggctcgacgtctctggaaaacttctgcaggtcgccaaaggtctccacaagttgcagccagccacgccaattgccccgcaggtggttattcgccaagcccgaatctccgtgaactcaggaaaacttttaaaagcagagtatattctgagcagtctaataagcaacaatggagcaacgggtacctggctgtacagaaatgaaagtgacaaggtcctggtgcagtcggtctgtatacagatcagagggcagattctgcaaaagctggggatgtggtacgaagcagcagagttaatatgggcctccattgtaggatatttggcacttcctcagccggataaaaagggcctctccacgtcgctaggtatactggcagacatctttgtttccatgagcaagaacgattatgaaaagtttaaaaacaatccacaaattaatttgagcctgctgaaggagtttgaccaccatttgctgtccgctgcagaagcctgcaagctggcagctgccttcagtgcctatacgccgctcttcgtgctcacagctgtgaatatccgtggcacgtgtttattgtcctacagtagttcaaatgactgtcctccagaattgaaaaacttacatctgtgtgaagccaaagaggcctttgagattggcctcctcaccaagagagatgatgagcctgttactggaaaacaggagcttcacagctttgtcaaagctgctttcggtctcaccacagtgcacagaaggctccatggggagacagggacggtccatgcagcaagtcagctctgtaaggaagcaatggggaagctgtacaatttcagcacttcctccagaagtcaggacagagaagctctgtctcaagaagttatgtctgtgattgcccaggtgaaggaacatttacaagttcaaagcttctcaaatgtagatgacagatcttatgttcccgagagtttcgagtgcaggttggataaacttatcttgcatgggcaaggggatttccaaaaaatccttgacacctattcacagcaccatacttcggtgtgtgaagtatttgaaagtgattgtggaaacaacaaaaatgaacagaaagatgcaaaaacaggagtctgcatcactgctctaaaaacagaaataaaaaacatagatactgtgagtactactcaagaaaagccacattgtcaaagagacacaggaatatcttcctccctaatgggtaagaatgttcagagggaactcagaaggggaggaaggagaaactggacccattctgatgcatttcgagtctccttggatcaagatgtggagactgagactgagccatcggactacagcaatggtgagggagctgttttcaacaagtctctgagtggcagccagacttccagtgcttggagcaacttatcagggtttagttcctctgcaagctgggaggaagtgaattatcacgttgacgacaggtcagccagaaaagagcctggcaaagaacatctggtggacactcagtgttccactgccttgtctgaggagctagagaatgacagggaaggcagagctatgcattcattgcattcacagcttcatgatctctctcttcaggaacccaacaatgacaatttggagccttctcaaaatcagccacagcaacagatgcccttgacacccttctcgcctcataataccccaggcattttcttggcccctggtgcagggcttctagaaggagctccagaaggtatccaggaagtcagaaatatgggacccagaaatacttctgctcactccagaccctcatatcgttctgcttcttggtcttctgattctggtaggcccaagaatatgggcacacatccttcagtccaaaaagaagaagcctttgaaataattgttgagtttccagaaaccaactgcgatgtcaaagacaggcaggggaaagagcagggagaagaaattagtgaaagaggcgcaggccctacatttaaagctagtccctcctgggttgacccagaaggagaaacagcagaaagcactgaagatgcacccttagactttcacagggtcctgcacaattctctgggaaacatttccatgctgccatgtagctccttcacccctaattggcctgttcaaaatcctgactccagaaaaagtggtggcccagtcgcagagcagggcatcgaccctgatgcctccacagtggatgaggaggggcaactgctcgacagcatggatgttccctgcacaaatgggcacggctctcatagactgtgcattctgagacagccgcctggtcagagggcggagacccccaattcctctgtaagcggtaacatcctcttccctgtcctcagcgaggactgcactaccacagaggaaggaaatcagcctggaaacatgctaaactgcagccagaactccagctcatcctcagtgtggtggctgaaatcacctgcattttccagtggttcttctgagggggacagcccttggtcctatctgaattccagtgggagttcttgggtttcattgccgggaaagatgaggaaagagatccttgaggctcgcaccttgcaacctgatgactttgaaaagctgttggcaggagtgaggcatgattggctgtttcagagactagagaatacgggggtttttaagcccagtcaactccaccgagcacatagtgctcttttgttaaaatattcaaaaaaatctgaactgtggacggcccaggaaactattgtctatttgggggactacttgactgtgaagaaaaaaggcagacaaagaaatgctttttgggttcatcatcttcatcaagaagaaattctggggaggtatgttgggaaagactataaggagcagaaggggctctggcaccacttcactgatgtggagcgacagatgaccgcacagcactatgtgacagaatttaacaagagactctatgaacaaaacattcccacccagatattctacatcccatccacaatactactgattttagaggacaagacaataaagggatgtatcagtgtggagccttacatactgggagaatttgtaaaattgtcaaataacacgaaagtggtgaaaacagaatacaaagccacagaatatggcttggcctatggccatttttcttatgagttttctaatcatagagatgttgtggtcgatttacaaggttgggtaaccggtaatggaaaaggactcatctacctcacagatccccagattcactccgttgatcagaaagttttcactaccaattttggaaagagaggaattttttacttctttaataaccagcatgtggaatgtaatgaaatctgccatcgtctttctttgactagaccttcaatggagaaaccatgcacatagaatacggcacagtctggtcctttggggcttgggcagggccgtgacacaggttctggccaatgatttgcaagaggaattgatcagtatcactttaagtcctgcatttaattggcagcacaagatcctgcagagcctctttccctctgccacagttatcaagaatgggtcaggagaccgctgcttctgggcataagtcctgcaaggaaagcaacatggaaaacagccccaactcacccatgagggatgaaaagcactcttgagaaaggcatgtgttgtttaagccattgagattttagagctttttgtcactatctgtcaagactgatactactggggcttttcctattgatttgggagttctttacatattaaaaaaatgtgagcctttgtgatacgaattcaatttgttttcctgtcttttgacatttgactttgcataaaagtttatctgtgcataattttatatgtagttgaattcatcaatcttttattttgtatggctttttggttatgtataatacttagatcctccttatactctgagtttctttctttttaattctcctgtatttccttctagtataattaaatctgtaaaaagt

SEQ ID NO: 106762 - DNA, 5410 bp, Homo sapiens
  Payload ID: 962
  Gene Symbol: ALPK1
  Gene Name: alpha-kinase 1
  Uniprot ID: Q96QP1
  ENST ID: ENST00000458497
  CDS Start-End: 280-4014
aattcctacttcctgaaactgaagccgtttatgagaaacagtgtgtttcagagaggctgtaccagaattaactctgctcagagttagatttgctggtcttaaagtacttttcctctttaagataaaagaagttcttctaaatcaggaatggattgaaatctaatgaaccgaaactttgggtacttcggccttcaaggggctcctttattgagaatcaatgtcttctcctaggtaattgatcaccctagacccagggacacccaattcatcgtaatcatcatgaataatcaaaaagtggtagctgtgctactgcaagagtgcaagcaagtgctggatcagctcttgttggaagcgccagatgtgtcggaagaggacaagagcgaggaccagcgctgcagagctttactccccagcgagttaaggaccctgatccaggaggcaaaggaaatgaagtggcccttcgtgcctgaaaagtggcagtacaaacaagccgtgggcccagaggacaaaacaaacctgaaggatgtgattggcgccgggttgcagcagttactggcgtccctgagggcctccatcctcgctcgggactgtgcggctgcggcggctattgtgttcttggtggaccggttcctgtatgggctcgacgtctctggaaaacttctgcaggtcgccaaaggtctccacaagttgcagccagccacgccaattgccccgcaggtggttattcgccaagcccgaatctccgtgaactcaggaaaacttttaaaagcagagtatattctgagcagtctaataagcaacaatggagcaacgggtacctggctgtacagaaatgaaagtgacaaggtcctggtgcagtcggtctgtatacagatcagagggcagattctgcaaaagctggggatgtggtacgaagcagcagagttaatatgggcctccattgtaggatatttggcacttcctcagccggataaaaagggcctctccacgtcgctaggtatactggcagacatctttgtttccatgagcaagaacgattatgaaaagtttaaaaacaatccacaaattaatttgagcctgctgaaggagtttgaccaccatttgctgtccgctgcagaagcctgcaagctggcagctgccttcagtgcctatacgccgctcttcgtgctcacagctgtgaatatccgtggcacgtgtttattgtcctacagtagttcaaatgactgtcctccagaattgaaaaacttacatctgtgtgaagccaaagaggcctttgagattggcctcctcaccaagagagatgatgagcctgttactggaaaacaggagcttcacagctttgtcaaagctgctttcggtctcaccacagtgcacagaaggctccatggggagacagggacggtccatgcagcaagtcagctctgtaaggaagcaatggggaagctgtacaatttcagcacttcctccagaagtcaggacagagaagctctgtctcaagaagttatgtctgtgattgcccaggtgaaggaacatttacaagttcaaagcttctcaaatgtagatgacagatcttatgttcccgagagtttcgagtgcaggttggataaacttatcttgcatgggcaaggggatttccaaaaaatccttgacacctattcacagcaccatacttcggtgtgtgaagtatttgaaagtgattgtggaaacaacaaaaatgaacagaaagatgcaaaaacaggagtctgcatcactgctctaaaaacagaaataaaaaacatagatactgtgagtactactcaagaaaagccacattgtcaaagagacacaggaatatcttcctccctaatgggtaagaatgttcagagggaactcagaaggggaggaaggagaaactggacccattctgatgcatttcgagtctccttggatcaagatgtggagactgagactgagccatcggactacagcaatggtgagggagctgttttcaacaagtctctgagtggcagccagacttccagtgcttggagcaacttatcagggtttagttcctctgcaagctgggaggaagtgaattatcacgttgacgacaggtcagccagaaaagagcctggcaaagaacatctggtggacactcagtgttccactgccttgtctgaggagctagagaatgacagggaaggcagagctatgcattcattgcattcacagcttcatgatctctctcttcaggaacccaacaatgacaatttggagccttctcaaaatcagccacagcaacagatgcccttgacacccttctcgcctcataataccccaggcattttcttggcccctggtgcagggcttctagaaggagctccagaaggtatccaggaagtcagaaatatgggacccagaaatacttctgctcactccagaccctcatatcgttctgcttcttggtcttctgattctggtaggcccaagaatatgggcacacatccttcagtccaaaaagaagaagcctttgaaataattgttgagtttccagaaaccaactgcgatgtcaaagacaggcaggggaaagagcagggagaagaaattagtgaaagaggcgcaggccctacatttaaagctagtccctcctgggttgacccagaaggagaaacagcagaaagcactgaagatgcacccttagactttcacagggtcctgcacaattctctgggaaacatttccatgctgccatgtagctccttcacccctaattggcctgttcaaaatcctgactccagaaaaagtggtggcccagtcgcagagcagggcatcgaccctgatgcctccacagtggatgaggaggggcaactgctcgacagcatggatgttccctgcacaaatgggcacggctctcatagactgtgcattctgagacagccgcctggtcagagggcggagacccccaattcctctgtaagcggtaacatcctcttccctgtcctcagcgaggactgcactaccacagaggaaggaaatcagcctggaaacatgctaaactgcagccagaactccagctcatcctcagtgtggtggctgaaatcacctgcattttccagtggttcttctgagggggacagcccttggtcctatctgaattccagtgggagttcttgggtttcattgccgggaaagatgaggaaagagatccttgaggctcgcaccttgcaacctgatgactttgaaaagctgttggcaggagtgaggcatgattggctgtttcagagactagagaatacgggggtttttaagcccagtcaactccaccgagcacatagtgctcttttgttaaaatattcaaaaaaatctgaactgtggacggcccaggaaactattgtctatttgggggactacttgactgtgaagaaaaaaggcagacaaagaaatgctttttgggttcatcatcttcatcaagaagaaattctggggaggtatgttgggaaagactataaggagcagaaggggctctggcaccacttcactgatgtggagcgacagatgaccgcacagcactatgtgacagaatttaacaagagactctatgaacaaaacattcccacccagatattctacatcccatccacaatactactgattttagaggacaagacaataaagggatgtatcagtgtggagccttacatactgggagaatttgtaaaattgtcaaataacacgaaagtggtgaaaacagaatacaaagccacagaatatggcttggcctatggccatttttcttatgagttttctaatcatagagatgttgtggtcgatttacaaggttgggtaaccggtaatggaaaaggactcatctacctcacagatccccagattcactccgttgatcagaaagttttcactaccaattttggaaagagaggaattttttacttctttaataaccagcatgtggaatgtaatgaaatctgccatcgtctttctttgactagaccttcaatggagaaaccatgcacatagaatacggcacagtctggtcctttggggcttgggcagggccgtgacacaggttctggccaatgatttgcaagaggaattgatcagtatcactttaagtcctgcatttaattggcagcacaagatcctgcagagcctctttccctctgccacagttatcaagaatgggtcaggagaccgctgcttctgggcataagtcctgcaaggaaagcaacatggaaaacagccccaactcacccatgagggatgaaaagcactcttgagaaaggcatgtgttgtttaagccattgagattttagagctttttgtcactatctgtcaagactgatactactggggcttttcctattgatttgggagttctttacatattaaaaaaatgtgagcctttgtgatacgaattcaatttgttttcctgtcttttgacatttgactttgcataaaagtttatctgtgcataattttatatgtagttgaattcatcaatcttttattttgtatggctttttggttatgtataatacttagatcctccttatactctgagtttctttctttttaattctcctgtatttccttctagtataattaaatctgtaaaaagtaagatggaagagtggtacagttttctttatccagtctgtccttgatgggcatttaggtagactggataaagaaaatgtggtacatatacaccatggaacactatgtgtattaatccactctcacactgctatgaagagatacctgagactgggtaatttagaaagaaaagaggtttaattaactcacagttccacatggctggggagacctcaggaaacttacaatcatggcagaaggcacctcttcatagggtagcaggagagagaatgagtgccagcaggggaaatgccagatgcttataaagccatcagatcttgtgagaattcattcactctcacgagaacagcatgggaaaaactgcctcaattacctcctaccaggtccttcccatgacacatgggaattatgggactacaattcgagatgagatttgggtggggacacaaagccaaaccatatcacaatgtaaccataaaaaagaatgagatcatgtcctttgcagggacatggatagagctggaggccattatttttagcaaactaatgcaagaacagaaaactaaataccacttgttctcacttataggtgagagctaagtgatgagagtaggtggacacatagagggaacaacacacaccagggcttatcagagggtggacagtgggaggagggagaggatcaggaaaaataactaatgggtactaggctgaatacctgggtgatgaagtaattcgcacaacaaacccccatgacacaaacctgcacatgtacccctgaacttaaaataaaagt

SEQ ID NO: 106763 - DNA, 1008 bp, Homo sapiens
  Payload ID: 962
  Gene Symbol: ALPK1
  Gene Name: alpha-kinase 1
  ENST ID: ENST00000515330
  CDS Start-End: 227-733
aggctgtaccagaattaactctgctcagagttagatttgctggtcttaaagtacttttcctctttaagataaaagaagttcttctaaatcaggaatggattgaaatctaatgaaccgaaactttgggtacttcggccttcaaggggctcctttattgagaatcaatgtcttctcctaggtaattgatcaccctagacccagggacacccaattcatcgtaatcatcatgaataatcaaaaagtggtagctgtgctactgcaagagtgcaagcaagtgctggatcagctcttgttggaagcgccagatgtgtcggaagaggacaagagcgaggaccagcgctgcagagctttactccccagcgagttaaggaccctgatccaggaggcaaaggaaatgaagtggcccttcgtgcctgaaaagtggcagtacaaacaagccgtgggcccagaggacaaaacaaacctgaaggatgtgattggcgccgggttgcagcagttactggcgtccctgagggcctccatcctcgctcgggactgtgcggctgcggcggctattgtgttcttggtggaccggttcctgtatgggctcgacgtctctggaaaacttctgcaggtcgccaaaggtctccacaagttgcagccagccacgccaattgccccgcaggtggttattcgccaagcccgaatctccgtgaactcagatactgtccaacttcccaccttaccaacttaggaaaacttcatctttcttttcagttttatagatgatgtcattgttgattttaaattataaaatggaatgcttccaaaggaggttacagttcctgctgcaatatatcagtcttagaacatgaacaacttgtaattgttaagtgcatgttcaaagctaattgtgtggcatttggttgctgcttttcaggaaaacttttaaaagcagagtatattctgagcagtctaataagcaacaatggagcaacgggtacctggctgtacagaaatgaaagtgac

SEQ ID NO: 106764 - DNA, 3931 bp, Homo sapiens
  Payload ID: 962
  Gene Symbol: ALPK1
  Gene Name: alpha-kinase 1
  ENST ID: ENST00000509722
  CDS Start-End: 191-592
acagtgtgtttcagagaggctgtaccagaattaactctgctcagagttagatttgctggtcttaaagtacttttcctctttaagataaaagaagttcttctaaatcaggaatggattgaaatctaatgaaccgaaactttgggtaattgatcaccctagacccagggacacccaattcatcgtaatcatcatgaataatcaaaaagtggtagctgtgctactgcaagagtgcaagcaagtgctggatcagctcttgttggaagcgccagatgtgtcggaagaggacaagagcgaggaccagcgctgcagaggcgtccctgagggcctccatcctcgctcgggactgtgcggctgcggcggctattgtgttcttggtggaccggttcctgtatgggctcgacgtctctggaaaacttctgcaggtcgccaaaggtctccacaagttgcagccagccacgccaattgccccgcaggtggttattcgccaagcccgaatctccgtgaactcaggaaaacttttaaaagcagagtatattctgagcagtctaataagcaacaatggagcaacgggtacctggctgtacagaaatgaaagtgacaaggtcctggtgcagtcggtctgtatacagatcagagggcagattctgcaaaagctggggatgtggtacgaagcagcagagttaatatgggcctccattgtaggatatttggcacttcctcagccggataaaaagggcctctccacgtcgctaggtatactggcagacatctttgtttccatgagcaagaacgattatgaaaagtttaaaaacaatccacaaattaatttgagcctgctgaaggagtttgaccaccatttgctgtccgctgcagaagcctgcaagctggcagctgccttcagtgcctatacgccgctcttcgtgctcacagctgtgaatatccgtggcacgtgtttattgtcctacagtagttcaaatgactgtcctccagaattgaaaaacttacatctgtgtgaagccaaagaggcctttgagattggcctcctcaccaagagagatgatgagcctgttactggaaaacaggagcttcacagctttgtcaaagctgctttcggtctcaccacagtgcacagaaggctccatggggagacagggacggtccatgcagcaagtcagctctgtaaggaagcaatggggaagctgtacaatttcagcacttcctccagaagtcaggacagagaagctctgtctcaagaagttatgtctgtgattgcccaggtgaaggaacatttacaagttcaaagcttctcaaatgtagatgacagatcttatgttcccgagagtttcgagtgcaggttggataaacttatcttgcatgggcaaggggatttccaaaaaatccttgacacctattcacagcaccatacttcggtgtgtgaagtatttgaaagtgattgtggaaacaacaaaaatgaacagaaagatgcaaaaacaggagtctgcatcactgctctaaaaacagaaataaaaaacatagatactgtgagtactactcaagaaaagccacattgtcaaagagacacaggaatatcttcctccctaatgggtaagaatgttcagagggaactcagaaggggaggaaggagaaactggacccattctgatgcatttcgagtctccttggatcaagatgtggagactgagactgagccatcggactacagcaatggtgagggagctgttttcaacaagtctctgagtggcagccagacttccagtgcttggagcaacttatcagggtttagttcctctgcaagctgggaggaagtgaattatcacgttgacgacaggtcagccagaaaagagcctggcaaagaacatctggtggacactcagtgttccactgccttgtctgaggagctagagaatgacagggaaggcagagctatgcattcattgcattcacagcttcatgatctctctcttcaggaacccaacaatgacaatttggagccttctcaaaatcagccacagcaacagatgcccttgacacccttctcgcctcataataccccaggcattttcttggcccctggtgcagggcttctagaaggagctccagaaggtatccaggaagtcagaaatatgggacccagaaatacttctgctcactccagaccctcatatcgttctgcttcttggtcttctgattctggtaggcccaagaatatgggcacacatccttcagtccaaaaagaagaagcctttgaaataattgttgagtttccagaaaccaactgcgatgtcaaagacaggcaggggaaagagcagggagaagaaattagtgaaagaggcgcaggccctacatttaaagctagtccctcctgggttgacccagaaggagaaacagcagaaagcactgaagatgcacccttagactttcacagggtcctgcacaattctctgggaaacatttccatgctgccatgtagctccttcacccctaattggcctgttcaaaatcctgactccagaaaaagtggtggcccagtcgcagagcagggcatcgaccctgatgcctccacagtggatgaggaggggcaactgctcgacagcatggatgttccctgcacaaatgggcacggctctcatagactgtgcattctgagacagccgcctggtcagagggcggagacccccaattcctctgtaagcggtaacatcctcttccctgtcctcagcgaggactgcactaccacagaggaaggaaatcagcctggaaacatgctaaactgcagccagaactccagctcatcctcagtgtggtggctgaaatcacctgcattttccagtggttcttctgagggggacagcccttggtcctatctgaattccagtgggagttcttgggtttcattgccgggaaagatgaggaaagagatccttgaggctcgcaccttgcaacctgatgactttgaaaagctgttggcaggagtgaggcatgattggctgtttcagagactagagaatacgggggtttttaagcccagtcaactccaccgagcacatagtgctcttttgttaaaatattcaaaaaaatctgaactgtggacggcccaggaaactattgtctatttgggggactacttgactgtgaagaaaaaaggcagacaaagaaatgctttttgggttcatcatcttcatcaagaagaaattctggggaggtatgttgggaaagactataaggagcagaaggggctctggcaccacttcactgatgtggagcgacagatgaccgcacagcactatgtgacagaatttaacaagagactctatgaacaaaacattcccacccagatattctacatcccatccacaatactactgattttagaggacaagacaataaagggatgtatcagtgtggagccttacatactgggagaatttgtaaaattgtcaaataacacgaaagtggtgaaaacagaatacaaagccacagaatatggcttggcctatggccatttttcttatgagttttctaatcatagagatgttgtggtcgatttacaaggttgggtaaccggtaatggaaaaggactcatctacctcacagatccccagattcactccgttgatcagaaagttttcactaccaattttggaaagagaggaattttttacttctttaataaccagcatgtggaatgtaatgaaatctgccatcgtctttctttgactagaccttcaatggagaaaccatgcacatagaatacggcacagtctggtcctttggggcttgggcagggccgtgacacaggttctggccaatgatttgcaagaggaattgatcagtatcactttaagtcctgcatttaattggcagcacaagatcctgcagagcctctttccctctgccacagttatcaaga

SEQ ID NO: 106765 - DNA, 569 bp, Homo sapiens
  Payload ID: 962
  Gene Symbol: ALPK1
  Gene Name: alpha-kinase 1
  ENST ID: ENST00000515106
  CDS Start-End: 222-551
gtaccagaattaactctgctcagagttagatttgctggtcttaaagtacttttcctctttaagataaaagaagttcttctaaatcaggaatggattgaaatctaatgaaccgaaactttgggtacttcggccttcaaggggctcctttattgagaatcaatgtcttctcctaggtaattgatcaccctagacccagggacacccaattcatcgtaatcatcatgaataatcaaaaagtggtagctgtgctactgcaagagtgcaagcaagtgctggatcagctcttgttggaagcgccagatgtgtcggaagaggacaagagcgaggaccagcgctgcagaggcgtccctgagggcctccatcctcgctcgggactgtgcggctgcggcggctattgtgttcttggtggaccggttcctgtatgggctcgacgtctctggaaaacttctgcaggtcgccaaaggtctccacaagttgcagccagccacgccaattgccccgcaggtggttattcgccaagcccgaatctccgtgaactcaggaccacttgactaagctgacaatagagc

SEQ ID NO: 106766 - DNA, 2295 bp, Homo sapiens
  Payload ID: 962
  Gene Symbol: ALPK1
  Gene Name: alpha-kinase 1
  ENST ID: ENST00000505127
  CDS Start-End: 241-1155
agtgtgtttcagagaggctgtaccagaattaactctgctcagagttagatttgctggtcttaaagtacttttcctctttaagataaaagaagttcttctaaatcaggaatggattgaaatctaatgaaccgaaactttgggtacttcggccttcaaggggctcctttattgagaatcaatgtcttctcctaggtaattgatcaccctagacccagggacacccaattcatcgtaatcatcatgaataatcaaaaagtggtagctgtgctactgcaagagtgcaagcaagtgctggatcagctcttgttggaagcgccagatgtgtcggaagaggacaagagcgaggaccagcgctgcagagctttactccccagcgagttaaggaccctgatccaggaggcaaaggaaatgaagtggcccttcgtgcctgaaaagtggcagtacaaacaagccgtgggcccagaggacaaaacaaacctgaaggatgtgattggcgccgggttgcagcagttactggcgtccctgagggcctccatcctcgctcgggactgtgcggctgcggcggctattgtgttcttggtggaccggttcctgtatgggctcgacgtctctggaaaacttctgcaggtcgccaaaggtctccacaagttgcagccagccacgccaattgccccgcaggtggttattcgccaagcccgaatctccgtgaactcaggaaaacttttaaaagcagagtatattctgagcagtctaataagcaacaatggagcaacgggtacctggctgtacagaaatgaaagtgacaaggtcctggtgcagtcggtctgtatacagatcagagggcagattctgcaaaagctggggatgtggtacgaagcagcagagttaatatgggcctccattgtaggatatttggcacttcctcagccggataaaaagggcctctccacgtcgctaggtatactggcagacatctttgtttccatgagcaagaacgattatgaaaagtttaaaaacaatccacaaattaatttgagcctgctgaaggagtttgaccaccatttgctgtccgctgcagaagcctgcaagctggcagctgccttcagtgcctatacgccgctcttcgtgctcacagctgtggtgctcttttgttaaaatattcaaaaaaatctgaactgtggacggcccaggaaactattgtctatttgggggactacttgactgtgaagaaaaaaggcagacaaagaaatgctttttgggttcatcatcttcatcaagaagaaattctggggaggtatgttgggaaagactataaggagcagaaggggctctggcaccacttcactgatgtggagcgacagatgaccgcacagcactatgtgacagaatttaacaagagactctatgaacaaaacattcccacccagatattctacatcccatccacaatactactgattttagaggacaagacaataaagggatgtatcagtgtggagccttacatactgggagaatttgtaaaattgtcaaataacacgaaagtggtgaaaacagaatacaaagccacagaatatggcttggcctatggccatttttcttatgagttttctaatcatagagatgttgtggtcgatttacaaggttgggtaaccggtaatggaaaaggactcatctacctcacagatccccagattcactccgttgatcagaaagttttcactaccaattttggaaagagaggaattttttacttctttaataaccagcatgtggaatgtaatgaaatctgccatcgtctttctttgactagaccttcaatggagaaaccatgcacatagaatacggcacagtctggtcctttggggcttgggcagggccgtgacacaggttctggccaatgatttgcaagaggaattgatcagtatcactttaagtcctgcatttaattggcagcacaagatcctgcagagcctctttccctctgccacagttatcaagaatgggtcaggagaccgctgcttctgggcataagtcctgcaaggaaagcaacatggaaaacagccccaactcacccatgagggatgaaaagcactcttgagaaaggcatgtgttgtttaagccattgagattttagagctttttgtcactatctgtcaagactgatactactggggcttttcctattgatttgggagttctttacatattaaaaaaatgtgagcctttgtgatacgaattcaatttgttttcctgtcttttgacatttgactttgcataaaagtttatctgtgc

SEQ ID NO: 106767 - DNA, 5203 bp, Homo sapiens
  Payload ID: 962
  Gene Symbol: ALPK1
  Gene Name: alpha-kinase 1
  Uniprot ID: Q96QP1
  ENST ID: ENST00000504176
  CDS Start-End: 307-3807
aattcctacttcctgaaactgaagccgtttatgagaaacagtgtgtttcagagaggctgtaccagaattaactctgctcagagttagatttgctggtcttaaagtacttttcctctttaagataaaagaagttcttctaaatcaggaatggattgaaatctaatgaaccgaaactttgggtaattgatcaccctagacccagggacacccaattcatcgtaatcatcatgaataatcaaaaagtggtagctgtgctactgcaagagtgcaagcaagtgctggatcagctcttgttggaagcgccagatgtgtcggaagaggacaagagcgaggaccagcgctgcagaggcgtccctgagggcctccatcctcgctcgggactgtgcggctgcggcggctattgtgttcttggtggaccggttcctgtatgggctcgacgtctctggaaaacttctgcaggtcgccaaaggtctccacaagttgcagccagccacgccaattgccccgcaggtggttattcgccaagcccgaatctccgtgaactcaggaaaacttttaaaagcagagtatattctgagcagtctaataagcaacaatggagcaacgggtacctggctgtacagaaatgaaagtgacaaggtcctggtgcagtcggtctgtatacagatcagagggcagattctgcaaaagctggggatgtggtacgaagcagcagagttaatatgggcctccattgtaggatatttggcacttcctcagccggataaaaagggcctctccacgtcgctaggtatactggcagacatctttgtttccatgagcaagaacgattatgaaaagtttaaaaacaatccacaaattaatttgagcctgctgaaggagtttgaccaccatttgctgtccgctgcagaagcctgcaagctggcagctgccttcagtgcctatacgccgctcttcgtgctcacagctgtgaatatccgtggcacgtgtttattgtcctacagtagttcaaatgactgtcctccagaattgaaaaacttacatctgtgtgaagccaaagaggcctttgagattggcctcctcaccaagagagatgatgagcctgttactggaaaacaggagcttcacagctttgtcaaagctgctttcggtctcaccacagtgcacagaaggctccatggggagacagggacggtccatgcagcaagtcagctctgtaaggaagcaatggggaagctgtacaatttcagcacttcctccagaagtcaggacagagaagctctgtctcaagaagttatgtctgtgattgcccaggtgaaggaacatttacaagttcaaagcttctcaaatgtagatgacagatcttatgttcccgagagtttcgagtgcaggttggataaacttatcttgcatgggcaaggggatttccaaaaaatccttgacacctattcacagcaccatacttcggtgtgtgaagtatttgaaagtgattgtggaaacaacaaaaatgaacagaaagatgcaaaaacaggagtctgcatcactgctctaaaaacagaaataaaaaacatagatactgtgagtactactcaagaaaagccacattgtcaaagagacacaggaatatcttcctccctaatgggtaagaatgttcagagggaactcagaaggggaggaaggagaaactggacccattctgatgcatttcgagtctccttggatcaagatgtggagactgagactgagccatcggactacagcaatggtgagggagctgttttcaacaagtctctgagtggcagccagacttccagtgcttggagcaacttatcagggtttagttcctctgcaagctgggaggaagtgaattatcacgttgacgacaggtcagccagaaaagagcctggcaaagaacatctggtggacactcagtgttccactgccttgtctgaggagctagagaatgacagggaaggcagagctatgcattcattgcattcacagcttcatgatctctctcttcaggaacccaacaatgacaatttggagccttctcaaaatcagccacagcaacagatgcccttgacacccttctcgcctcataataccccaggcattttcttggcccctggtgcagggcttctagaaggagctccagaaggtatccaggaagtcagaaatatgggacccagaaatacttctgctcactccagaccctcatatcgttctgcttcttggtcttctgattctggtaggcccaagaatatgggcacacatccttcagtccaaaaagaagaagcctttgaaataattgttgagtttccagaaaccaactgcgatgtcaaagacaggcaggggaaagagcagggagaagaaattagtgaaagaggcgcaggccctacatttaaagctagtccctcctgggttgacccagaaggagaaacagcagaaagcactgaagatgcacccttagactttcacagggtcctgcacaattctctgggaaacatttccatgctgccatgtagctccttcacccctaattggcctgttcaaaatcctgactccagaaaaagtggtggcccagtcgcagagcagggcatcgaccctgatgcctccacagtggatgaggaggggcaactgctcgacagcatggatgttccctgcacaaatgggcacggctctcatagactgtgcattctgagacagccgcctggtcagagggcggagacccccaattcctctgtaagcggtaacatcctcttccctgtcctcagcgaggactgcactaccacagaggaaggaaatcagcctggaaacatgctaaactgcagccagaactccagctcatcctcagtgtggtggctgaaatcacctgcattttccagtggttcttctgagggggacagcccttggtcctatctgaattccagtgggagttcttgggtttcattgccgggaaagatgaggaaagagatccttgaggctcgcaccttgcaacctgatgactttgaaaagctgttggcaggagtgaggcatgattggctgtttcagagactagagaatacgggggtttttaagcccagtcaactccaccgagcacatagtgctcttttgttaaaatattcaaaaaaatctgaactgtggacggcccaggaaactattgtctatttgggggactacttgactgtgaagaaaaaaggcagacaaagaaatgctttttgggttcatcatcttcatcaagaagaaattctggggaggtatgttgggaaagactataaggagcagaaggggctctggcaccacttcactgatgtggagcgacagatgaccgcacagcactatgtgacagaatttaacaagagactctatgaacaaaacattcccacccagatattctacatcccatccacaatactactgattttagaggacaagacaataaagggatgtatcagtgtggagccttacatactgggagaatttgtaaaattgtcaaataacacgaaagtggtgaaaacagaatacaaagccacagaatatggcttggcctatggccatttttcttatgagttttctaatcatagagatgttgtggtcgatttacaaggttgggtaaccggtaatggaaaaggactcatctacctcacagatccccagattcactccgttgatcagaaagttttcactaccaattttggaaagagaggaattttttacttctttaataaccagcatgtggaatgtaatgaaatctgccatcgtctttctttgactagaccttcaatggagaaaccatgcacatagaatacggcacagtctggtcctttggggcttgggcagggccgtgacacaggttctggccaatgatttgcaagaggaattgatcagtatcactttaagtcctgcatttaattggcagcacaagatcctgcagagcctctttccctctgccacagttatcaagaatgggtcaggagaccgctgcttctgggcataagtcctgcaaggaaagcaacatggaaaacagccccaactcacccatgagggatgaaaagcactcttgagaaaggcatgtgttgtttaagccattgagattttagagctttttgtcactatctgtcaagactgatactactggggcttttcctattgatttgggagttctttacatattaaaaaaatgtgagcctttgtgatacgaattcaatttgttttcctgtcttttgacatttgactttgcataaaagtttatctgtgcataattttatatgtagttgaattcatcaatcttttattttgtatggctttttggttatgtataatacttagatcctccttatactctgagtttctttctttttaattctcctgtatttccttctagtataattaaatctgtaaaaagtaagatggaagagtggtacagttttctttatccagtctgtccttgatgggcatttaggtagactggataaagaaaatgtggtacatatacaccatggaacactatgtgtattaatccactctcacactgctatgaagagatacctgagactgggtaatttagaaagaaaagaggtttaattaactcacagttccacatggctggggagacctcaggaaacttacaatcatggcagaaggcacctcttcatagggtagcaggagagagaatgagtgccagcaggggaaatgccagatgcttataaagccatcagatcttgtgagaattcattcactctcacgagaacagcatgggaaaaactgcctcaattacctcctaccaggtccttcccatgacacatgggaattatgggactacaattcgagatgagatttgggtggggacacaaagccaaaccatatcacaatgtaaccataaaaaagaatgagatcatgtcctttgcagggacatggatagagctggaggccattatttttagcaaactaatgcaagaacagaaaactaaataccacttgttctcacttataggtgagagctaagtgatgagagtaggtggacacatagagggaacaacacacaccagggcttatcagagggtggacagtgggaggagggagaggatcaggaaaaataactaatgggtactaggctgaatacctgggtgatgaagtaattcgcacaacaaacccccatgacacaaacctgcacatgtacccctgaacttaaaataaaagt

SEQ ID NO: 106768 - DNA, 7303 bp, Homo sapiens
  Payload ID: 963
  Gene Symbol: ALPK2
  Gene Name: alpha-kinase 2
  Uniprot ID: Q86TB3
  ENST ID: ENST00000361673
  CDS Start-End: 215-6727
aggaagagatgaactttctggaagcagacccatctatgctttgacctgatcatggaagaccctgagccctataaactcctttgaatccctgtcccgggaacagggacacccaatcaatgcctcacacacagcctggggaatccacagctgagccagccctcctacaacatttcttggacaaagagtactgaaaaatttggtgcggcatgaaaggatgaaagactccgaagggccccagaggcccccgctgtgttttttatctacattgctttcccagaaggttcctgagaagtcagacgctgtgcttcgctgcataatatctggtcagcccaagccagaggtaacttggtataagaatggtcaggccatcgatgggagtggcattatttccaactatgaattctttgagaatcagtatattcatgtgttacatctctcttgctgtaccaaaaatgatgctgctgtctatcaaatctcggctaaaaactcttttggaatgatctgttgttctgcttccgttgaggttgagtgctcatcagagaacccacaattgtctcctaacctggaagatgacagggacaggggttggaaacatgaaacagggacacatgaagaagaaagggcaaatcagattgatgagaaggaacatccttataaggaagaagaaagcatctccccgggcactcccaggtcagctgactcctccccctccaaatccaaccattcactctccctccagtcattgggcaatcttgacattagtgtgtccagttctgaaaatcctttgggtgttaaaggaacaaggcacactggagaggcttatgatccaagtaacacagaagaaattgcaaatgggttgctttttcttaattcaagtcatatttatgaaaaacaagacagatgttgccacaagacagtgcattccatggcatcaaagttcacggatggtgacctgaacaatgatggtcctcatgatgaaggcttacgctctagtcagcaaaatcccaaagtacagaaatacattagcttcagcctcccgctatctgaggcaactgcacacatttacccaggtgacagtgccgtggccaacaaacaacccagcccacagctttccagtgaagactctgacagtgactatgaactttgcccagagataaccctaacctacaccgaggagttttcagatgatgacctggagtatctggaatgttctgatgttatgacggattactctaatgcagtttggcaaaggaacctgctggggactgagcatgtttttttattagaaagcgatgacgaagagatggaattcggtgagcattgcctgggtgggtgtgagcatttcctcagtggaatgggttgtgggtctcgggtgtcgggtgacgctgggcctatggttgccactgctggcttctgtggtcatcactcacaaccccaagaagttggggtgaggagcagcagagtctccaagcacggtccctcatccccacaaacagggatgactctcattttgggacctcaccaggatggaacgtcttcagtgacagaacaggggagatataaactccccactgctcccgaggctgctgaaaatgattatccaggaattcaaggagaaaccagagacagccaccaagcaagagaggaatttgccagtgacaatctgctcaacatggatgaatcagtaagagagacagagatgaagctcttgtctggtgagtcagaaaactcagggatgagccagtgttgggagacggcagctgacaagagagtggggggaaaggacttatggagcaagaggggttcaaggaaatctgccagggtgaggcagccgggaatgaagggaaatcccaagaagccgaatgccaacctgagagaaagtacaacagaaggtacccttcatctctgctctgccaaagaatctgctgagcccccactaacccagagtgataaaagagagacttctcacaccacagcagcagcgactggtcggagttcccatgctgatgcaagagaatgtgctatttcaacccaggcagagcaagaagcaaaaacccttcaaacttcaacagactcagtctccaaagaaggcaacacaaattgcaagggagaaggcatgcaagttaatactctatttgaaacaagccaggttccagactggagtgatcctcctcaggtacaagttcaggaaacagtcagagagacaatctcttgcagccagatgccagctttctcagagcctgctggggaggagtccccattcactgggaccacaacaatttccttctcaaacttaggaggggtccacaaggaaaatgcatcattagctcaacactcggaggtcaaaccctgtacctgtggtccacagcatgaagaaaaacaagacagagatggcaacatacctgacaatttcagggaagacctaaaatatgagcagagcatctcagaagccaatgatgagactatgtccccaggtgtgttctcaaggcatctccccaaggatgctcgtgctgacttcagggagcctgtggctgtctctgttgcttcccctgaacccacagatactgccctcaccctggaaaatgtgtgtgatgagccaagggacagagaagcagtgtgtgcaatggagtgttttgaggctggtgaccaaggaacgtgttttgataccatagattctcttgttgggagaccagttgataaatattcgcctcaagaaatttgctctgtagatacggaactggcagaaggtcaaaacaaagtatctgatttatgttcttctaatgacaagacactggaagtcttttttcagacacaagtgtctgagacttcagtgtctacgtgcaaaagcagcaaggacggcaactcagtcatgtcccctctttttaccagtactttcaccttgaacatttcacacacagctagtgaaggtgccacaggagaaaatctagccaaggtggagaattccacctacccactggcctccacagtacatgctggccaggagcagccaagccccagcaactcaggagggcttgatgaaacacagctcctttcttctgagaacaatcctttagtgcaatttaaagaaggaggtgacaagagccccagtcctagtgccgcagacaccacagccacaccagccagttatagttcaattgtgagttttccttgggagaagccaacaacattaactgctaataatgagtgctttcaagcgaccagggagactgaggacacatcaactgttaccattgccaccgaagtccacccagccaaataccttgctgtgtcaattcctgaggacaagcatgcaggtggcactgaggagaggttccctcgtgcatcccatgaaaaggtttcccaatttccttcccaagtgcagttggatcatattttaagtggtgctaccatcaaatctacaaaagagctactttgcagggcacccagtgtgccaggagtcccacaccatgtcctgcagctcccagagggagagggtttctgcagtaattcccctcttcaggttgataacctgtctggagataagagccagactgtggacagagcagactttaggagctatgaagagaatttccaagaaagaggaagtgaaacaaagcagggggtccagcagcagagcctgtcccagcagggttctctttctgcacctgatttccaacaaagtttgcctacgacatctgctgcacaagaggaaagaaacttggtgcccacggcccactcacccgcaagctctagggaaggagcagggcagcgctcaggttgggggacgagggtctccgtggtggctgaaactgctggggaagaagacagtcaggctctgagcaacgttccatctctctctgatatccttttggaagagtctaaagaatatagacctggaaattgggaggcaggcaacaagctgaagattataactctagaggcttccgcttctgaaatctggccaccacgacaactgacaaattctgagagcaaggcatcagacggtggtctcataattcctgacaaggtctgggctgtacctgatagtctaaaggcagatgctgttgtgcctgaattggccccctctgaaatagcagcattggctcacagtccagaggatgctgagtcagcccttgctgatagcagagaaagccataaaggcgaagagcccaccatcagtgtacattggagaagtctttcttcccggggtttcagccaacccagactcctggagtcatccgtggaccctgtagatgaaaaggagttatctgtcacagattcactgtcagcggcttctgaaactggagggaaggaaaatgttaacaatgtgagtcaagaccaggaggaaaaacaactcaagatggatcacactgccttctttaaaaagtttctgacctgccctaaaatcctagagtcctctgtagatcccattgatgagataagtgtgatagagtacaccagggctggaaaaccagagccctctgaaaccacaccacagggcgccagagaagggggtcaatcaaatgacggaaacatgggccacgaagcggaaatccagccggccattttgcaagttccatgtctccagggaaccattctgagtgaaaatagaatcagcagaagccaagaaggcagtatgaagcaggaggctgaacaaattcaacctgaggaggcaaaaactgccatttggcaagtcctgcaacccagcgaaggcggtgaaagaattccaagtggatgtagcataggccaaatacaagaaagcagtgatgggagcttaggggaggctgagcaaagcaaaaaggacaaagcagaattgatttcccccacttcacctctttctagttgtcttccaataatgactcacgcttctcttggggttgacacgcacaactccacaggccaaattcatgacgtccctgaaaatgacatagttgagcccagaaagcgtcagtatgtgtttcctgtttcacagaaaaggggaactattgagaatgagcgtgggaaacctttgccctcttctcctgatcttaccaggttcccttgtacttcatctcctgaaggaaatgtcacagactttttgataagccacaaaatggaggaacctaaaatagaggtgcttcaaattggggaaaccaaacccccaagctcatctagctcctcagcgaagaccttggcatttatttcaggagaacgtgagttagagaaagcccctaaattactgcaggatccatgtcaaaagggcaccctgggctgtgcgaaaaagtccagggagagagagaagtccctggaagcccgagcaggcaaatcgccagggaccctcacagcagtgacggggtcagaggaggtcaagaggaagccagaagccccaggcagtggacatttagctgagggagtaaagaagaaaattttgtccagggtggcagcactgaggctgaaactggaagaaaaggaaaatatcagaaagaactcagcctttcttaaaaagatgcccaaactcgaaacatcattatcacacacagaagagaaacaagacccaaaaaagccatcttgcaaaagagaaggaagagctccagtattactgaaaaagatccaagctgagatgttccctgaacactctggaaatgtaaaattaagctgccaatttgcagaaattcatgaagattctactatctgctggacaaaagattcaaagtccatagcccaagtgcagagaagtgcaggggacaactccactgtttcctttgccatcgtgcaagccagtccgaaggaccagggactctattactgctgcatcaagaacagctacggaaaagtgactgctgaatttaacctcacagctgaagttctcaaacagctgtcaagtcgccaggatactaaaggatgtgaagagattgaattcagccaactcatcttcaaagaagacttcctccatgacagctactttgggggccgcctgcgtggtcagatcgccacggaggagctgcactttggagaaggggttcaccgcaaagccttccgcagcacagtgatgcacggcctcatgcctgtcttcaaacctggccatgcctgtgtgcttaaggtgcacaatgccattgcctatgggaccagaaataatgatgagctcatccaaaggaactacaaactcgctgcccaggaatgctatgttcaaaatactgccaggtattatgccaagatctacgctgctgaagcacagcctctggaaggctttggagaagtacctgagatcattcctatttttcttatccatcggcctgagaacaatatcccgtatgctacagtggaggaggagctgattggagaatttgtgaagtattccatcagggatgggaaagaaataaacttcttgagaagagaatcagaagctggtcagaaatgttgcaccttccagcactgggtgtaccagaaaacaagtggctgcctcctggtgacggacatgcaaggtgtaggaatgaagctaactgacgttggcatagcaacgctggctaaagggtacaagggatttaaaggcaactgttccatgaccttcattgatcagtttaaagcactacaccagtgtaacaagtattgcaaaatgctgggactgaaatcccttcaaaacaacaaccagaaacagaagcagccgagcattgggaaaagcaaagttcaaacaaactctatgacaataaagaaggcagggcctgagaccccaggcgaaaagaaaacctaacgtccctgggtaacctaatggccactggctagcagcacacaatctcgccagggaaaatctgaggccacacaggagagaatatacagcctgcagagagtgcgtggcaatccttactcccagccgactgtgcgccaagatgcttctaaacccatcacctgctgtcttcactcaaatgatttcagaacaggatttgcgaccaggtttatggggagattgaatcaacgattggtctcaaagacagtccattctttatatacatgtttagcatttttaccaacctcacatcatgtgtatatttgtgtatttgcacatggttgtgctgtcgaggacctggtgctgagaagagtctgttcacagccaaaattcttcccactgtcattcctaacctgggatttctagacacatcctgctgtgatgtaaacagaaatcacgaattcgctcactggatcaagttgttccactggtgtctaatacgctattgttgccggaggtgggttctgtgacgtgaagccatttcccatcattcaacagccagttacaattttctgtttaattaaattcatatttaaacaaaaa

SEQ ID NO: 106769 - DNA, 10917 bp, Homo sapiens
  Payload ID: 964
  Gene Symbol: ALPK3
  Gene Name: alpha-kinase 3
  Uniprot ID: Q96L96
  ENST ID: ENST00000258888
  CDS Start-End: 168-5891
gtatcaggactcagcccatttccccctctggtgctgagaaatggaggccgaaggagtgatctagaagtgttaattgagcccctaatctatgctagttactgggggtgttgggggagacaggagagagatcccacggggttccggcctcccagggactcaggtcactaatggaggtggcttggcttgtctatgtgctgggccaacagccactggcgaggcaaggcgagggtcagtcacggctggtgccaggaagagggctggttctttggctccctggtctcccgcggtctagcccaagctggccagcggttgacctggctcccctggccccggccaggcctcgtggacccctcatatgccacacgggacatgagcaggccggccgggagccgggtcccgggagctccacgaaggggcctgtcctccatgaccaggacacccgctgcgccttcctcccgaggcctcccgggcctctccagacgcggcgctactgcagacaccagggccgccaagggagcggactcggagccggccctggggcgggcacatgggccccggcgccccccggcgtctccaagccgcgctgcccgggtcgggccaggccaggggagggacagcagcaggtgacgacggcccggccaccggctataaataggggcgcgcgtcagccgcgggcgggagcggcggcggcgggcaggggcccgggggccggggcctggaggacaggcgaggcagcggcgagtgcggggccggcggtcggggagggcggtgccatggggtcgcggagggcccccagccggggctggggcgcgggtgggcggtcgggggcggggggcgacggtgaggacgacggccccgtgtggatccccagcccagccagccggagctacctgctcagcgtgcggcccgagaccagcttatcaagcaaccggttgtctcaccccagctctggaaggagcaccttctgctccatcattgctcagctcacagaggagacccagccgctatttgagaccacgctcaagtcccggtctgtgtccgaggacagcgacgtcaggttcacctgcatcgtcacaggatacccagagccagaggtgacctggtacaaggatgatacggagctggaccgctactgtggcttgccaaaatatgagatcactcatcagggcaaccgccacacactgcagctgtacaggtgtcgagaagaagatgccgccatctaccaggcctctgcccagaacagcaagggcattgtgtcctgctcaggggtcctggaggtgggcaccatgactgagtacaagatccaccagcgctggttcgccaagttgaagcgcaaggctgcggcaaagctgcgcgagatcgagcagagctggaagcacgagaaggcggtgcctggggaggtcgacactctgcgcaagctcagccccgaccgcttccagcgaaagcggcgattgagcggggctcaagcgccgggcccctcggtccctaccagggagcctgagggtgggaccctggcggcttggcaggagggagagactgagactgctcagcactcaggtttgggcctgatcaacagttttgcttctggagaagtgaccaccaacggggaggctgcccccgagaatggagaggacggagagcatggcttgctgacatacatctgtgacgccatggagctggggcctcagagagccctcaaagaggagagtggggccaagaagaaaaagaaagatgaggaatccaagcaaggcctgcggaagccagagttagagaaggcagcccaaagccgccgttcttcagaaaactgcatccccagctcagacgagcctgactcctgtgggactcaggggcccgtgggcgtggagcaggttcagacccagcccagaggcagggctgcacgggggcctgggtcctctggcacagatagtaccaggaagccagcctctgctgtgggcactccagacaaggcccagaaggcccctggcccaggcccaggccaggaagtgtatttctccttgaaggacatgtacctggagaacacccaggcagtcaggcctcttggggaagagggaccccagaccctgagtgtccgggcgcctggggagagtcccaaggggaaggcacccctcagggctagaagcgagggggtgcctggcgctcctggccagcccacacactccttgaccccccagccgactaggcctttcaacagaaagagatttgcccctccaaagcccaaaggagaggccaccactgacagcaagcccatttcttctctgagtcaagctccagaatgcggggcccagagcttaggaaaggccccacctcaggcctctgtgcaggtgccgacgccccctgcccggcggagacatggcacccgggacagcacgttgcaggggcaagcaggccacaggactccaggagaggtcctggaatgccagacaaccacggctcctaccatgtcggccagcagcagctctgatgtagcctccattggggttagcacttccggaagtcaaggtatcattgaacccatggatatggaaacccaggaggatgggagaacatctgctaaccagagaactggaagcaagaagaatgtgcaggcagatgggaagatacaagtggatggaaggaccaggggagatggaacacagacagcccagaggacacgtgcagataggaagacgcaggtggatgctgggacacaagaaagcaagaggccacagtcagacaggagtgcacagaagggcatgatgacacagggaagggcagagacacagctagaaacaacacaggcaggtgagaagatacaggaagacaggaaggcccaggcagataagggcacacaggaagacagaaggatgcagggagagaaggggatgcagggagagaaggggacgcagtcagaggggagcgcgcccacagccatggaaggtcagtctgagcaagaggtggcaaccagcctcggcccaccatccagaacccccaaactcccacctacagcgggtcctagagctcctctgaatattgaatgttttgtacagaccccagaagggtcttgtttcccaaaaaaacctggttgcctgcccagatctgaggaggcagtagtaacagcctccaggaaccatgagcaaactgtgctgggtcccctgtcagggaacctcatgctcccagcacagccgccccatgaggggagtgtggagcaggtgggaggagagagatgccgagggccacagtcatcaggcccagtcgaggccaagcaggaggacagcccgttccagtgccccaaggaggagcggccagggggagtgccgtgtatggatcagggtggctgtcctctagctggcctgagccaggaggtacccacgatgccttctcttcctggaactgggctgacagctagcccaaaggcggggccgtgtagcaccccgacttctcagcacgggagcacagccaccttcctgccctctgaggatcaggtcctgatgagttctgccccaacactgcacctggggctggggacccccactcagagtcacccaccagaaaccatggccaccagcagtgagggggcctgcgcccaggtaccagatgtggaggggcggaccccaggtccccggagctgtgaccctggcctcatagattccctgaagaactacctgcttctgctgctgaagctgtccagcacagagacaagtggagcagggggagagtcccaggtgggggcagccaccggaggtctggtgccctcagccactctgacacccactgtggaagtggctgggcttagtccccggacatcgaggcgcatcctggagcgtgtggagaacaaccacctggtgcagagtgcacagaccctgctgctgagcccctgtacctcccgccgcctcaccggcctcctggaccgtgaggtgcaggctggccgccaggcccttgctgctgcccgaggctcctggggtcctggtcccagctccctcactgtccctgccattgtggtagacgaggaggaccctgggctggcctcagaaggagccagtgagggtgaaggagaggtttcccctgaggggcctggcctcctgggggcctctcaggagagcagcatggctggtcgactgggggaggcgggtgggcaggcagcccctggacaggggccctcagcagagagcatagcccaggagccctcccaagaggagaagttcccaggggaggctctgacaggtctcccggcagctacacctgaggaactggctctaggggcccggaggaagagatttctccctaaggtcagagcagcaggagacggggaggcaaccacacctgaagaaagggagagccccacggtttccccccgggggcccaggaaaagcctggtgcctgggtccccagggactccagggcgggagagacgctcccctacgcagggcagaaaggcgagcatgctggaggtgcctcgggcagaggaggagctggcggcaggagacctgggccccagccccaaggccggcggtctggacacagaggtggccctggatgaaggcaagcaggagacactggccaagcccaggaaagccaaagacctgctgaaagccccacaggtgatccggaagattcgggtggagcagtttcctgatgcctccggtagcctgaagctgtggtgccagtttttcaacattcttagtgactcagtcttgacatgggccaaggatcagcgcccagtgggcgaggtgggcaggagcgcaggggatgaggggccggcggccttggccatcgtgcaggcctcccccgtagactgcggtgtgtatcggtgcaccatccacaatgagcacggctcggcctccaccgacttctgcctcagccctgaggtgttgtcaggattcatctccagagaagaaggtgaagttggagaagagattgagatgacccctatggtgtttgctaagggtctggctgactctggctgctggggggacaagctctttgggcgactggtaagcgaggagctccgagggggtggatatgggtgtggccttcggaaggcctcccaggccaaggtcatctacgggctggaacccatcttcgagtcgggccgcacgtgcatcatcaaggtgtccagcctgcttgtgtttgggcccagcagtgagacttctcttgtgggcagaaactacgacgtcaccatccaggggtgcaagatccagaacatgagtcgggagtactgcaaaatcttcgcagcagaagcccgggccgcgcctggctttggggaggtgcctgagatcatcccactgtatctgatctaccggcctgcaaacaatatcccatatgctaccctggaggaagacctgggcaagcccctggagtcttactgttctcgggaatggggctgtgctgaggctccgacagcatctggcagctctgaggccatgcagaaatgccagaccttccaacactggctgtatcagtggacaaatggcagcttccttgtcacagacttggcaggggttgactggaagatgactgatgtgcagattgctaccaaactccgaggataccagggcctcaaggaaagctgcttccctgccctgctggaccggttcgcctcctcccaccagtgcaatgcctactgtgagctgctggggctgacacctctcaagggcccggaggcggcccacccccaagccaaagccaaaggctctaagagtccatctgctggcaggaaaggctcccagctgagtcctcagccccagaagaaaggcctccctagtcctcagggcacccggaagagtgctccaagttccaaggccacccctcaggcctcagagccagtcaccactcagttgttgggacagcctcccacccaagaggagggctccaaggcccagggcatgcggtagcctccgcagaggctgggggcctccacccagcagcagaccaaccaggaagcagcttgaactggatggagactttccaaatatggaactaactggagaaggtgcacgaaggagacaccacttggggacctctctgagcaggctctcgtgaatcagctcgtcatcagatggctttggtgcatggcacatagcccactggcctcttctggtgccactgtcacccagggctcccgggcctcaagcagtccccacctccaagtgcctggcaacctaggccctccttgaagtttacactttgccactgctggaggctcccctgagtcctctgcatgagttctgcaccccaagcccttgccccagcccagtccagcagcagatgttacaatctgagtgaggacatgcaggccaacttttaccctcctgcatttgcctggccctgatctcgcctgtcctcagggatccagacttcctctgctggtctggcctggtgactctcagggtatcttctccttccagctactttcgctcactgatctcagcttatcctgcaactaaccatccttgagcccagatggggctcagggcccttccagagcctgtcatgtccttgtgcagtggcctttgatgtgtgttcacgctcttcccccttcactcactcgcctgcttcccatgctcccttgtaccccctcgccacatccctgtcttggggcccagctgcagcctgctgcctgcccttcatggctctgcacatggccctttgcttgagggctccccactccctgcccaccaatacccaggtgaggaacagaccctctggcctctcaccccacttcagtgctctcttccccaacttctctcgggctctttgctcatgaggtgagagctggtgtgagggttgtgtcagcagctgtagccagagagaggtgttgactctgagagaccttgcactccatactgaaaggaggtggggtcacagtgaatttcacatcccctctcaaccaggagtggagggctaggtcccttccccatggggagtacacttgggtgttctaggagggatgcagtctatccatgcacttgggtggaggggagtctctgtgcctgggaattaggacccctgctccaaccatcgctcttgatcctggggccccagctctgggtcctcatgtatgggctcccaaggacccagcagcctggatccttccagagcatccctcctggaggcctgggatggggtaggtctgcagctagcctactccctttggaatgcaataaaggcagcattgtgtgccctgcttgccctcatctggtgtggttggaggtctgtggagtcaaggtccccctctcccaggcaggctctctgagggcattctgtagtcccaggcccactggaaaaatgaatctatattttggttcctggaccgaagttcagtcgcagccttctgtggccacagaaagacagcttgtgctgcttgcacaactgagctgctggtgtgtaccccttagcagggtgtctggggacttacgcctttggaattgctcttcattcagaagaggaacacaaaggaagccacccaggaaggaagcacagagctgggggctctggaaacgccctgtgtctctggctacagcaagaccagcccaggagcccaccagcacctgcctctcagctacttgctgaccatttcctgcttctcaagctgcagagaagcttttcattcccacccccacccggaacctccccttgcctaacatttcccctctatggtaacatctctgacttctctacctcctctgtgctcaggtgactccacatcttctgccccagtgtgtccccacctctcccagcctgtatacccagattactttggtgaactgagagctggagtactgttcattcatttattcattcacccactcattcagcagacatatactgagtgctactttatgccagaccctgggctggcagctgtttggaggcaaagatgtatgaggccatctcaggagagactacttgttaggattcttgagttttgaccaacagaaatgaacttggaccaacttaagcaaggaaaaagcgttcatgggaaggatgctgggatagctcacaaaaccaaaagaatagctgaacaattaattggccctgggaagggtgggagctggggcaactacgaggcttgcctcccaggagctgctgcggttggcagatcaacaccaacttgccattggttctagtgggtccccttccactcaagattcaaattccaagtgaaagaacctggcctggagctcagggcttcatagagtgggaggggggcagtcttccaaaagatgcggactcttgccacatggaatggtggagtacggaagggtggaaagggtttggtaggtaaaccctgaagatgcttctaacacacgtgctgttctcccatctcacgtatgacgactctcccacaggtaaccaaaaccacatttctctctgcttagggaattcaagatcatatctaacttcgaattccaggggtaatgacacggcttctattctccaaagtccagtgtcattagggataatctccctctttcagttttatcacaattccattttgaaattctacaacctgtagattaactggtaaaattaaccatattcaaccaaaattgtataacccagcaagaatggaagaatgggtaaagtctacagtccatttctagaactggtcatgagaactcatgtttatgatgatggacttttgatctggtggagggacccaaaccttcagttctgaagctcattagtggtcctacctgtgtgacaggcatttactattggactggcagtcccaggacaaactccaggaatccccccatgtccatctctactcctgccctcttttacgtagcagcaatcatattttcccttgatagggttcatcattctagatactccgatgacttctttataatgagcctgaagtggcctggtggctgcctcagcttccagttcagttgaatagctactacgtctttgaggatgtgctccttgctgggggactaaactctccacgccagcccagtcccaaacctaaacctcgggtatgagaaaagcattgagatctagcaatagcagggccatgtccacactgcgtcctatccctgaaggagaaacagcgccaggtatggttgccggctccaagcgcatgctgcctcctgcaggcctgacccagcctctcggggtgttgtttctggtgccatagttgaattttcaacaaaccatttcaccaccctctcaagacagctgctgctggtttgtgggttcctgacaagatgagtgaatgcctgcccatcaacccgttactattcttttagctgtaaagtgaattctctggttgggtgcagtatgtgaggaggtcacatgatgtttatggcatttgagaattccatggatattgatggcaggagaggcatgatgggttagaaaagcaaatccaaatccagaacaagggcccaaaagggccaagacaaattactgcccctctcagagccacaggtgtagacaggtgaaaacactggacagtgagtgagctacccacacacgacccactggtgccttcagagccttagcctggagcgacagtgtaccgttgataatggaacgcactggccatgccagactttatggctaggcggtcagataacactacgaggggcagcatggccaccaagtgtgccagggccaagtgttcaggctctcccagagcccagtggtgagccagaagggcattttgtacaaggataatggttactttttggccagagcatcacttggctccaaatcctgggttcccgtatcatattttcttgtcaggacttaccgcaagctatgtatggctccgcggtatgccacccatggaaagacacctcatgcaccattgacctgccaggtcacgtggcctgatggcagcgtcggctgcacaaaagactttcccagctgcaatgccttcgcctgctctaggcccaccccaaagctggcagtcttctaggtcagttggtaaatgggttagaacaagatgccccaaagtggcataaattgcatggaattaggccttagtggcgagggattcgacatacagtcatttgtcctacattgtgaaggaaacattctgacctcaaacagatccctcaaccccagaactttatagaaggggcagaccttggcattttcacatgatttatctcccactctgattcacatatgtttgaccaaggcactgggcagctgccaatttcccgtcccttctgtagtcccagatgaatggatacagacctctttggggaaggctgcaaggaaggttcacaacatgcatctaagtgttaaaataagtttttccttcaaaaatacatttgacttcctctccatttaaggtctggaaatcaagtgggagatcttgactttaccttggcacttgagacagaactgttggcccagaagtctttagttaaggtcattactaggccatatcttaggggcgtctggcctttttcattcctgggacccacagctcgaggtctggtttccatgccctatcccttacgatgagcgccctattttgttccttctgtctatctctgttgctgagatcagggagcccacgttcacagcagctctttcaagcagcctcccaggcctagagaggaaaatcagcagagcctcgtgaatgtatttctcgtggcaagaagggagctcatcttctgggtcctgccagagggcagtgagggggttgatgggctgggtgcatgccagggacccaatcaagcatttttatcttctgaaatctttgaattcctgcctttcttggatgtttggtcttttgatataatttagcatgggccaacatttggtccagatttgtattagccaagccctcctaaaatagtaataacagtatctggcgatttgagcttttacgtagaatgtagaatctctggtgagtgaacatatcaataaagacaacctgaaccaaaatta

SEQ ID NO: 106770 - DNA, 4153 bp, Homo sapiens
  Payload ID: 965
  Gene Symbol: AMACR
  Gene Name: alpha-methylacyl-CoA racemase
  Uniprot ID: Q9UHK6
  ENST ID: ENST00000335606
  CDS Start-End: 90-1238
ggcgccggggattgggagggcttcttgcaggctgctgggctggggctaagggctgctcagtttccttcagcggggcactgggaagcgccatggcactgcagggcatctcggtcgtggagctgtccggcctggccccgggcccgttctgtgctatggtcctggctgacttcggggcgcgtgtggtacgcgtggaccggcccggctcccgctacgacgtgagccgcttgggccggggcaagcgctcgctagtgctggacctgaagcagccgcggggagccgccgtgctgcggcgtctgtgcaagcggtcggatgtgctgctggagcccttccgccgcggtgtcatggagaaactccagctgggcccagagattctgcagcgggaaaatccaaggcttatttatgccaggctgagtggatttggccagtcaggaagcttctgccggttagctggccacgatatcaactatttggctttgtcaggtgttctctcaaaaattggcagaagtggtgagaatccgtatgccccgctgaatctcctggctgactttgctggtggtggccttatgtgtgcactgggcattataatggctctttttgaccgcacacgcactggcaagggtcaggtcattgatgcaaatatggtggaaggaacagcatatttaagttcttttctgtggaaaactcagaaattgagtctgtgggaagcacctcgaggacagaacatgttggatggtggagcacctttctatacgacttacaggacagcagatggggaattcatggctgttggagcaatagaaccccagttctacgagctgctgatcaaaggacttggactaaagtctgatgaacttcccaatcagatgagcatggatgattggccagaaatgaagaagaagtttgcagatgtatttgcagagaagacgaaggcagagtggtgtcaaatctttgacggcacagatgcctgtgtgactccggttctgacttttgaggaggttgttcatcatgatcacaacaaggaacggggctcgtttatcaccagtgaggagcaggacgtgagcccccgccctgcacctctgctgttaaacaccccagccatcccttctttcaaaagggatcctttcataggagaacacactgaggagatacttgaagaatttggattcagccgcgaagagatttatcagcttaactcagataaaatcattgaaagtaataaggtaaaagctagtctctaacttccaggcccacggctcaagtgaatttgaatactgcatttacagtgtagagtaacacataacattgtatgcatggaaacatggaggaacagtattacagtgtcctaccactctaatcaagaaaagaattacagactctgattctacagtgatgattgaattctaaaaatggttatcattagggcttttgatttataaaactttgggtacttatactaaattatggtagttattctgccttccagtttgcttgatatatttgttgatattaagattcttgacttatattttgaatgggttctagtgaaaaaggaatgatatattcttgaagacatcgatatacatttatttacactcttgattctacaatgtagaaaatgaggaaatgccacaaattgtatggtgataaaagtcacgtgaaacagagtgattggttgcatccaggccttttgtcttggtgttcatgatctccctctaagcacattccaaactttagcaacagttatcacactttgtaatttgcaaagaaaagtttcacctgtattgaatcagaatgccttcaactgaaaaaaacatatccaaaataatgaggaaatgtgttggctcactacgtagagtccagagggacagtcagttttagggttgcctgtatccagtaactcggggcctgtttccccgtgggtctctgggctgtcagctttcctttctccatgtgtttgatttctcctcaggctggtagcaagttctggatcttatacccaacacacagcaacatccagaaataaagatctcaggaccccccagcaagtcgttttgtgtctccttggactgagttaagttacaagcctttcttatacctgtctttgacaaagaagacgggattgtctttacataaaaccagcctgctcctggagcttccctggactcaacttcctaaaggcatgtgaggaaggggtagattccacaatctaatccgggtgccatcagagtagagggagtagagaatggatgttgggtaggccatcaataaggtccattctgcgcagtatctcaactgccgttcaacaatcgcaagaggaaggtggagcaggtttcttcatcttacagttgagaaaacagagactcagaagggcttcttagttcatgtttcccttagcgcctcagtgattttttcatggtggcttaggccaaaagaaatatctaaccattcaatttataaataattaggtccccaacgaattaaatattatgtcctaccaacttattagctgcttgaaaaatataatacacataaataaaaaaatatatttttcatttctatttcattgttaatcacaactacttactaaggagatgtatgcacctattggacactgtgcaacttctcacctggaatgagattggacactgctgccctcattttctgctccatgttggtgtccatatagtacttgattttttatcagatggcctggaaaacccagtctcacaaaaatatgaaattatcagaaggattatagtgcaatcttatgttgaaagaatgaactacctcactagtagttcacgtgatgtctgacagatgttgagtttcattgtgtttgtgtgttcaaatttttaaatattctgagatactcttgtgaggtcactctaatgccctgggtgccttggcacagttttagaaataccagttgaaaatatttgctcaggaatatgcaactaggaaggggcagaatcagaatttaagctttcatattctagccttcagtcttgttcttcaaccatttttaggaactttcccataaggttatgttttccagcccaggcatggaggatcacttgaggccaagagttcgagaccagcctggggaacttggctggacctccgtttctacgaaataaaaataaaaaaattatccaggtatggtggtgtgtgcctgtagtcctatctactcaagggtggggcaggaggatcacttgagcccaggaatttgaggccacagtgaattaggattgcaccactgcactctagcccaggcaacagaacaagaacctgtctctaaataaataaataaaaataataataataaaaaagatgttttccctacaactcagacttttcatttgaactcggtccagcaaggaaaatataacccactcgaagtctttaaaacagaggaaatttaatataaagaattccactggtgacgaaagagcagagaagcccagaagatagtgaggcaaccctgataggaacataactaggaagccaagaccactcctatggttgcaggggtgatgggaaagctggtgtacttggacccagaagccaaagttgctgcacccaccttggagacatagacactggcagtaatacctcagggagaagaaagaaatctagggaaatatcctggcttctttccttctctctctcccctagtcttcctaccagtgtctcccattagccaaatctacctagaagccagaaaacaagggaaccctggaaatgtagccccataagataaagagcaccaaaggaaatagatctgagcagacaggcagcacaaaatgcagtgtgtatggtttattcactcagtaattcctttagcaaatgtttattgaggatctactaggtgccaggtatcatgatacttgctggggataccataatgaacaaaacagacctgttctccgctcttgaggaaatcaaagacaaacacaggatatggaataaacccagaattatctcattgtaaaatgtgttaagtaccacgaggagaaatatcagggcgatctgacacagctaatgatttgaagaagggtgtgacctgccaccattttaaatctagttatttcactcctgagctgtgtgtgtggaaaacttgtagtaaaaaatagaatgtctatatttataaaaa

SEQ ID NO: 106771 - DNA, 2919 bp, Homo sapiens
  Payload ID: 965
  Gene Symbol: AMACR
  Gene Name: alpha-methylacyl-CoA racemase
  Uniprot ID: Q9UHK6
  ENST ID: ENST00000382072
  CDS Start-End: 13-609
ctgggaagcgccatggcactgcagggcatctcggtcgtggagctgtccggcctggccccgggcccgttctgtgctatggtcctggctgacttcggggcgcgtgtggtacgcgtggaccggcccggctcccgctacgacgtgagccgcttgggccggggcaagcgctcgctagtgctggacctgaagcagccgcggggagccgccgtgctgcggcgtctgtgcaagcggtcggatgtgctgctggagcccttccgccgcggtgtcatggagaaactccagctgggcccagagattctgcagcgggaaaatccaaggcttatttatgccaggctgagtggatttggccagtcaggaagcttctgccggttagctggccacgatatcaactatttggctttgtcaggtggaaggaacagcatatttaagttcttttctgtggaaaactcagaaattgagtctgtgggaagcacctcgaggacagaacatgttggatggtggagcacctttctatacgacttacaggacagcagatggggaattcatggctgttggagcaatagaaccccagttctacgagctgctgatcaaaggacttggactaaagtctgatgaacttcccaatcagatgagcatggatgattggccagaaatgaagaagaagtttgcagatgtatttgcagagaagacgaaggcagagtggtgtcaaatctttgacggcacagatgcctgtgtgactccggttctgacttttgaggaggttgttcatcatgatcacaacaaggaacggggctcgtttatcaccagtgaggagcaggacgtgagcccccgccctgcacctctgctgttaaacaccccagccatcccttctttcaaaagggatcctttcataggagaacacactgaggagatacttgaagaatttggattcagccgcgaagagatttatcagcttaactcagataaaatcattgaaagtaataaggtaaaagctagtctctaacttccaggcccacggctcaagtgaatttgaatactgcatttacagtgtagagtaacacataacattgtatgcatggaaacatggaggaacagtattacagtgtcctaccactctaatcaagaaaagaattacagactctgattctacagtgatgattgaattctaaaaatggttatcattagggcttttgatttataaaactttgggtacttatactaaattatggtagttattctgccttccagtttgcttgatatatttgttgatattaagattcttgacttatattttgaatgggttctagtgaaaaaggaatgatatattcttgaagacatcgatatacatttatttacactcttgattctacaatgtagaaaatgaggaaatgccacaaattgtatggtgataaaagtcacgtgaaacagagtgattggttgcatccaggccttttgtcttggtgttcatgatctccctctaagcacattccaaactttagcaacagttatcacactttgtaatttgcaaagaaaagtttcacctgtattgaatcagaatgccttcaactgaaaaaaacatatccaaaataatgaggaaatgtgttggctcactacgtagagtccagagggacagtcagttttagggttgcctgtatccagtaactcggggcctgtttccccgtgggtctctgggctgtcagctttcctttctccatgtgtttgatttctcctcaggctggtagcaagttctggatcttatacccaacacacagcaacatccagaaataaagatctcaggaccccccagcaagtcgttttgtgtctccttggactgagttaagttacaagcctttcttatacctgtctttgacaaagaagacgggattgtctttacataaaaccagcctgctcctggagcttccctggactcaacttcctaaaggcatgtgaggaaggggtagattccacaatctaatccgggtgccatcagagtagagggagtagagaatggatgttgggtaggccatcaataaggtccattctgcgcagtatctcaactgccgttcaacaatcgcaagaggaaggtggagcaggtttcttcatcttacagttgagaaaacagagactcagaagggcttcttagttcatgtttcccttagcgcctcagtgattttttcatggtggcttaggccaaaagaaatatctaaccattcaatttataaataattaggtccccaacgaattaaatattatgtcctaccaacttattagctgcttgaaaaatataatacacataaataaaaaaatatatttttcatttctatttcattgttaatcacaactacttactaaggagatgtatgcacctattggacactgtgcaacttctcacctggaatgagattggacactgctgccctcattttctgctccatgttggtgtccatatagtacttgattttttatcagatggcctggaaaacccagtctcacaaaaatatgaaattatcagaaggattatagtgcaatcttatgttgaaagaatgaactacctcactagtagttcacgtgatgtctgacagatgttgagtttcattgtgtttgtgtgttcaaatttttaaatattctgagatactcttgtgaggtcactctaatgccctgggtgccttggcacagttttagaaataccagttgaaaatatttgctcaggaatatgcaactaggaaggggcagaatcagaatttaagctttcatattctagccttcagtcttgttcttcaaccatttttaggaactttcccataaggttatgttttccagcccaggcatggaggatcacttgaggccaagagttcgagaccagcctggggaacttggctggacctccgtttctacgaaataaaaataaaaaaattatccagg

SEQ ID NO: 106772 - DNA, 1195 bp, Homo sapiens
  Payload ID: 965
  Gene Symbol: AMACR
  Gene Name: alpha-methylacyl-CoA racemase
  Uniprot ID: Q9UHK6
  ENST ID: ENST00000382085
  CDS Start-End: 10-1194
ggaagcgccatggcactgcagggcatctcggtcgtggagctgtccggcctggccccgggcccgttctgtgctatggtcctggctgacttcggggcgcgtgtggtacgcgtggaccggcccggctcccgctacgacgtgagccgcttgggccggggcaagcgctcgctagtgctggacctgaagcagccgcggggagccgccgtgctgcggcgtctgtgcaagcggtcggatgtgctgctggagcccttccgccgcggtgtcatggagaaactccagctgggcccagagattctgcagcgggaaaatccaaggcttatttatgccaggctgagtggatttggccagtcaggaagcttctgccggttagctggccacgatatcaactatttggctttgtcaggtgttctctcaaaaattggcagaagtggtgagaatccgtatgccccgctgaatctcctggctgactttgctggtggtggccttatgtgtgcactgggcattataatggctctttttgaccgcacacgcactggcaagggtcaggtcattgatgcaaatatggtggaaggaacagcatatttaagttcttttctgtggaaaactcagaaattgagtctgtgggaagcacctcgaggacagaacatgttggatggtggagcacctttctatacgacttacaggacagcagatggggaattcatggctgttggagcaatagaaccccagttctacgagctgctgatcaaaggacttggactaaagtctgatgaacttcccaatcagatgagcatggatgattggccagaaatgaagaagaagtttgcagatgtatttgcagagaagacgaaggcagagtggtgtcaaatctttgacggcacagatgcctgtgtgactccggttctgacttttgaggaggttgttcatcatgatcacaacaaggaacggggctcgtttatcaccagtgaggagcaggacgtgagcccccgccctgcacctctgctgttaaacaccccagccatcccttctttcaaaagggatcctttcataggagaacacactgaggagatacttgaagaatttggattcagccgcgaagagatttatcagcttaactcagataaaatcattgaaagtaataaggctggtagcaagttctggatcttatacccaacacacagcaacatccagaaataaa

SEQ ID NO: 106773 - DNA, 1598 bp, Homo sapiens
  Payload ID: 965
  Gene Symbol: AMACR
  Gene Name: alpha-methylacyl-CoA racemase
  ENST ID: ENST00000502637
  CDS Start-End: 86-1189
ccggggattgggagggcttcttgcaggctgctgggctggggctaagggctgctcagtttccttcagcggggcactgggaagcgccatggcactgcagggcatctcggtcgtggagctgtccggcctggccccgggcccgttctgtgctatggtcctggctgacttcggggcgcgtgtggtacgcgtggaccggcccggctcccgctacgacgtgagccgcttgggccggggcaagcgctcgctagtgctggacctgaagcagccgcggggagccgccgtgctgcggcgtctgtgcaagcggtcggatgtgctgctggagcccttccgccgcggtgtcatggagaaactccagctgggcccagagattctgcagcgggaaaatccaaggcttatttatgccaggctgagtggatttggccagtcaggaagcttctgccggttagctggccacgatatcaactatttggctttgtcaggtgttctctcaaaaattggcagaagtggtgagaatccgtatgccccgctgaatctcctggctgactttgctggtggtggccttatgtgtgcactgggcattataatggctctttttgaccgcacacgcactggcaagggtcaggtcattgatgcaaatatgaaattgagtctgtgggaagcacctcgaggacagaacatgttggatggtggagcacctttctatacgacttacaggacagcagatggggaattcatggctgttggagcaatagaaccccagttctacgagctgctgatcaaaggacttggactaaagtctgatgaacttcccaatcagatgagcatggatgattggccagaaatgaagaagaagtttgcagatgtatttgcagagaagacgaaggcagagtggtgtcaaatctttgacggcacagatgcctgtgtgactccggttctgacttttgaggaggttgttcatcatgatcacaacaaggaacggggctcgtttatcaccagtgaggagcaggacgtgagcccccgccctgcacctctgctgttaaacaccccagccatcccttctttcaaaagggatcctttcataggagaacacactgaggagatacttgaagaatttggattcagccgcgaagagatttatcagcttaactcagataaaatcattgaaagtaataaggtaaaagctagtctctaacttccaggcccacggctcaagtgaatttgaatactgcatttacagtgtagagtaacacataacattgtatgcatggaaacatggaggaacagtattacagtgtcctaccactctaatcaagaaaagaattacagactctgattctacagtgatgattgaattctaaaaatggttatcattagggcttttgatttataaaactttgggtacttatactaaattatggtagttattctgccttccagtttgcttgatatatttgttgatattaagattcttgacttatattttgaatgggttctagtgaaaaaggaatgatatattcttgaagacatcgatatacatttatttacactcttgattctacaatgtagaaaatgaggaaatgccacaaattgtatggtgataa

SEQ ID NO: 106774 - DNA, 2182 bp, Homo sapiens
  Payload ID: 965
  Gene Symbol: AMACR
  Gene Name: alpha-methylacyl-CoA racemase
  Uniprot ID: Q9UHK6
  ENST ID: ENST00000506639
  CDS Start-End: 13-702
ctgggaagcgccatggcactgcagggcatctcggtcgtggagctgtccggcctggccccgggcccgttctgtgctatggtcctggctgacttcggggcgcgtgtggtacgcgtggaccggcccggctcccgctacgacgtgagccgcttgggccggggcaagcgctcgctagtgctggacctgaagcagccgcggggagccgccgtgctgcggcgtctgtgcaagcggtcggatgtgctgctggagcccttccgccgcggtgtcatggagaaactccagctgggcccagagattctgcagcgggaaaatccaaggcttatttatgccaggctgagtggatttggccagtcaggaagcttctgccggttagctggccacgatatcaactatttggctttgtcaggtggaaggaacagcatatttaagttcttttctgtggaaaactcagaaattgagtctgtgggaagcacctcgaggacagaacatgttggatggtggagcacctttctatacgacttacaggacagcagatggggaattcatggctgttggagcaatagaaccccagttctacgagctgctgatcaaagatctttgataccatactttaatctgtatcttcagtttctgaacataagtatgcaaaatctttttaaggtgcatactctgctgcgtccctgctattttctaggacaaaaataatctgaaaacactgagaattttatgacattttgagatagcaagtctcttatagtacaatcaggacttggactaaagtctgatgaacttcccaatcagatgagcatggatgattggccagaaatgaagaagaagtttgcagatgtatttgcagagaagacgaaggcagagtggtgtcaaatctttgacggcacagatgcctgtgtgactccggttctgacttttgaggaggttgttcatcatgatcacaacaaggaacggggctcgtttatcaccagtgaggagcaggacgtgagcccccgccctgcacctctgctgttaaacaccccagccatcccttctttcaaaagggatcctttcataggagaacacactgaggagatacttgaagaatttggattcagccgcgaagagatttatcagcttaactcagataaaatcattgaaagtaataaggtaaaagctagtctctaacttccaggcccacggctcaagtgaatttgaatactgcatttacagtgtagagtaacacataacattgtatgcatggaaacatggaggaacagtattacagtgtcctaccactctaatcaagaaaagaattacagactctgattctacagtgatgattgaattctaaaaatggttatcattagggcttttgatttataaaactttgggtacttatactaaattatggtagttattctgccttccagtttgcttgatatatttgttgatattaagattcttgacttatattttgaatgggttctagtgaaaaaggaatgatatattcttgaagacatcgatatacatttatttacactcttgattctacaatgtagaaaatgaggaaatgccacaaattgtatggtgataaaagtcacgtgaaacagagtgattggttgcatccaggccttttgtcttggtgttcatgatctccctctaagcacattccaaactttagcaacagttatcacactttgtaatttgcaaagaaaagtttcacctgtattgaatcagaatgccttcaactgaaaaaaacatatccaaaataatgaggaaatgtgttggctcactacgtagagtccagagggacagtcagttttagggttgcctgtatccagtaactcggggcctgtttccccgtgggtctctgggctgtcagctttcctttctccatgtgtttgatttctcctcaggctggtagcaagttctggatcttatacccaacacacagcaacatccagaaataaagatctcaggaccccccagcaagtcgttttgtgtctccttggactgagttaagttacaagcctttcttatacctgtctttgacaaagaagacgggattgtctttacataaaaccagcctgctcctggagcttccctggactcaacttcctaaaggcatgtgaggaaggggtagattccacaatctaatccgggtgccatcagagtagagggagtagagaatgga

SEQ ID NO: 106775 - DNA, 1316 bp, Homo sapiens
  Payload ID: 965
  Gene Symbol: AMACR
  Gene Name: alpha-methylacyl-CoA racemase
  ENST ID: ENST00000426255
  CDS Start-End: 66-932
ttgcaggctgctgggctggggctaagggctgctcagtttccttcagcggggcactgggaagcgccatggcactgcagggcatctcggtcgtggagctgtccggcctggccccgggcccgttctgtgctatggtcctggctgacttcggggcgcgtgtggtacgcgtggaccggcccggctcccgctacgacgtgagccgcttgggccggggcaagcgctcgctagtgctggacctgaagcagccgcggggagccgccgtgctgcggcgtctgtgcaagcggtcggatgtgctgctggagcccttccgccgcggtgtcatggagaaactccagctgggcccagagattctgcagcgggaaaatccaaggcttatttatgccaggctgagtggatttggccagtcaggaagcttctgccggttagctggccacgatatcaactatttggctttgtcaggtgttctctcaaaaattggcagaagtggtgagaatccgtatgccccgctgaatctcctggctgactttgctggtggtggccttatgtgtgcactgggcattataatggctctttttgaccgcacacgcactggcaagggtcaggtcattgatgcaaatatggtggaaggaacagcatatttaagttcttttctgtggaaaactcagaaattgagtctgtgggaagcacctcgaggacagaacatgttggatggtggagcacctttctatacgacttacaggacagcagatggggaattcatggctgttggagcaatagaaccccagttctacgagctgctgatcaaaggtctgggagaactgatcttgctgaaaatacaacaggaagcagtatcgtgccaggcaaggcaaaccctcgtcagtgtgaagcaatggccatcgttgcagcccaagtcatggggttttgtgtggcagtaaccgttggaggcggcaatggccattttgagttggatgttttcaagccaatgatgattaaaaatttatgttacactcaggctgctgggggatgcttcagtttccttcacagaaaactaaatagtgggaatccggaccaataaagaaaggatcaagaagctaatgaattagtcgctaatgctggtgacagctctcaaccctcatatagggtatgacaaaacagcagaattgctaagacaacaccccaaaatggatcaaccttaaaggaaactgccgttgaacttggctctctcacagcagagcagtttgatgaatgggtaaaacctaaggacatgctgggtccaaagtgacttaaataagttttaatgaaaataaacgtgtaaaatt

SEQ ID NO: 106776 - DNA, 862 bp, Homo sapiens
  Payload ID: 965
  Gene Symbol: AMACR
  Gene Name: alpha-methylacyl-CoA racemase
  ENST ID: ENST00000382068
  CDS Start-End: 10-855
ggaagcgccatggcactgcagggcatctcggtcgtggagctgtccggcctggccccgggcccgttctgtgctatggtcctggctgacttcggggcgcgtgtggtacgcgtggaccggcccggctcccgctacgacgtgagccgcttgggccggggcaagcgctcgctagtgctggacctgaagcagccgcggggagccgccgtgctgcggcgtctgtgcaagcggtcggatgtgctgctggagcccttccgccgcggtgtcatggagaaactccagctgggcccagagattctgcagcgggaaaatccaaggcttatttatgccaggctgagtggatttggccagtcaggaagcttctgccggttagctggccacgatatcaactatttggctttgtcaggtggaaggaacagcatatttaagttcttttctgtggaaaactcagaaattgagtctgtgggaagcacctcgaggacagaacatgttggatggtggagcacctttctatacgacttacaggacagcagatggggaattcatggctgttggagcaatagaaccccagttctacgagctgctgatcaaaggtctgggagaactgatcttgctgaaaatacaacaggaagcagtatcgtgccaggcaaggcaaaccctcgtcagtgtgaagcaatggccatcgttgcagcccaagtcatggggttttgtgtggcagtaaccgttggaggcggcaatggccattttgagttggatgttttcaagccaatgatgattaaaaatttatgttacactcaggctgctgggggatgcttcagtttccttcacagaaaactaaatagtgggaatccggaccaataaagaaagg

SEQ ID NO: 106777 - DNA, 858 bp, Homo sapiens
  Payload ID: 965
  Gene Symbol: AMACR
  Gene Name: alpha-methylacyl-CoA racemase
  ENST ID: ENST00000512079
  CDS Start-End: 10-792
ggaagcgccatggcactgcagggcatctcggtcgtggagctgtccggcctggccccgggcccgttctgtgctatggtcctggctgacttcggggcgcgtgtggtacgcgtggaccggcccggctcccgctacgacgtgagccgcttgggccggggcaagcgctcgctagtgctggacctgaagcagccgcggggagccgccgtgctgcggcgtctgtgcaagcggtcggatgtgctgctggagcccttccgccgcggtgtcatggagaaactccagctgggcccagagattctgcagcgggaaaatccaaggcttatttatgccaggctgagtggatttggccagtcaggaagcttctgccggttagctggccacgatatcaactatttggctttgtcaggtgttctctcaaaaattggcagaagtggtgagaatccgtatgccccgctgaatctcctggctgactttgctggtggtggccttatgtgtgcactgggcattataatggctctttttgaccgcacacgcactggcaagggtcaggtcattgatgcaaatatggtggaaggaacagcatatttaagttcttttctgtggaaaactcagaaattgagtctgtgggaagcacctcgaggacagaacatgttggatggtggagcacctttctatacgacttacaggacagcagatggggaattcatggctgttggagcaatagaaccccagttctacgagctgctgatcaaaggctgctgggggatgcttcagtttccttcacagaaaactaaatagtgggaatccggaccaataaagaaaggatcaagaagctaatgaattagtcgctaatgctggtgacag

SEQ ID NO: 106778 - DNA, 5504 bp, Homo sapiens
  Payload ID: 966
  Gene Symbol: AMMECR1
  Gene Name: Alport syndrome, mental retardation, midface hypoplasia and elliptocytosis chromosomal region gene 1
  Uniprot ID: Q9Y4X0
  ENST ID: ENST00000262844
  CDS Start-End: 169-1170
gcgcgcggggcagccgcgtggctaggcagacggggccgggagcggcgcgcgcgcgccccgccagcctctggcgcgcccccggcggcctgagccgcagcgtgctcgcccccgccgccagctcgcctcacttatgggtcggaaacgctgcgtgggggagactgttccaagatggcggcgggttgctgcggggtgaagaagcagaaactgtccagttcgcccccctctggctcgggtggcggtggtggcgcctcctcctcctcccactgcagcggagagagccagtgccgagctggggagctgggactaggaggcgccggtacgcggctcaacgggctgggaggtctaaccggaggaggtagcggcagcggctgtaccctctctcccccccagggctgcggcggcggcggcggggggatcgccctgtcgccacctccgagctgcggagtggggaccctactttctaccccggccgccgccacctcttcctcaccctcctcatcgtccgccgcctcgtcctcatcgccgggctcccggaagatggtggtgtcagcagagatgtgctgcttttgcttcgatgtgctctactgtcacctgtatggataccagcagccccggaccccccgattcaccaacgagccctacccactgtttgtaacatggaagattggtcgagacaaaagattacgtggatgcataggtactttttctgccatgaatttgcattcaggactcagggagtacacacttaccagtgcccttaaagatagccgttttcccccaatgacaagggatgagctgccacggcttttctgctcagtgtctctgctcactaactttgaagatgtctgtgattatttggactgggaggtgggtgtacatggcattagaatagaattcatcaatgaaaaaggatcaaaacgcaccgccacctacctaccggaggttgcaaaggagcaaggatgggaccatatacagaccatagactccttattgaggaaaggaggatacaaagctccgattactaatgaattcaggaaaaccataaaactgaccaggtatcgtagtgaaaagatgaccctgagctatgctgaataccttgctcatcgccagcatcatcatttccaaaatggcattgggcatccccttccgccatacaaccattattcctgacactgagccgcacaaccagtcactgggcctctctgcagacctcttcccaggagaccctacaccttcttggtctagctatctcttttactgtaccattttatgatgatagtttccgttgccatggtgaagcttcgacatcgtcaactaagatcatcatggtaacgggtagaaaaatggcatttgttaagatcctgttttattattttagatcgttgattttttttttgcagcatatataattttgggtttttttttccttataatattatgtagaattttgctttgctgtctcagtcaggtttctgtttttctgtcctccttgcctttcttcccgttttgcttcctgttttccttcttccttcccgttttccttcttccttccctgcctcccttcctttgactgtggatggaagaaagtgtgcagtttttagggattttacttaggttcgtctttagttttcctcagtaagatagttgttttttgatacctgagtttgggattaattcatatcaaattcaggtatttgtatattactcttgatttttgtctgaaattcactttgctatgacagcctagtagttgggtcttcactccttaagtatatgtttttcccatggtgaaaatacatgaactttagttctagtagtgagcattcaaaggtccgtgatagggcttgtcacagagagagagaaatcatttatccctattgtgctggttatcatagaagagactgcctcaccactttatagaaccaatttgcaaactaaaacactgtttggagaaggtacaaactacctttcaaaaaggctacaggaaacattttatgagcagcaaatattaggaagagagcagatacagaatttagtgcctttgagaagaatataattaagtggaattaagaggggttagaaaaaaggcaatttagaaaaatattcttgtaaaactttattgtttctatatgtgaaacagaagattagacaaattccttactcttaagtatttttttaagctgaaaaaaaattattttgagcaaataaccaataagagacatttgtctattttatattaatttaaatttgttagctctaggtttcaataagtcatgattggctagaatccattttagctaccatctaaagatatggtaaagataatttagtaaaacaaaagttcatatttgccatgatttcagatatgtttgtcatggggacaatattagagttttagagatactataaaatagcttgaatttctttctgcactacatacttttgatagaaacacatttactacattgataagatgttatgtcacacctgtgaaaatggagttggcattcagatatgctatagttagagcccagctcatctgcaagtatagtcttcccatgatgcatacaaagataacttactgatgtcgataggaggtccatacatatatccccaggaaaaatgacagattattctggaggaagatgaccttcattttatggttatgtgtgtgtgtctgtgtgtctttggaaaaatatatataattttttcaaataggaagccaacatatcaagtgatgaattaaagtatgctgcagaatatatattctaaaactacaaaaaagtcactgaatatcaaaatgatacagcttatacatatagttactgtgacaagtgacagactgctagttcagaattcaaaaatcctttcctagtttgtgagataatgggctaaattccttctgcctgccactggggcaaagcaaattgctttagtttttgatgagagttcttagaagtttgttggtattccttcatccacagcatccattgttgaaataaccattttcagttgtgatgccttaactaagaagccaattgttagcctgaaatgcaatcttggtagccagtttcaatgaagctagagattagtcagaaaaagttagctgttgggctttagaaagggattttgagtcctgtcatttctacttgggagcattttggagcagattagtctttcagtataaaaacaagtggctacctgatggaaacttttcttacccttatagggaaactgagcacaagctgaatgatattgtctgctgcaaaaaaaaacaaacaaaaaaaaaacaaaacaaaaaacaaaaaaaaggaaaaaaaggtaaataaaacaagcaaactgaagagagacaaaatagaccaatattatcgtgaaatccatcttatccatcatctcatcggttcaacaggctcctcgtcctgggtgagcttatggttagaagtttttttagcaaagatttattacatacatagatgtgtgtgtgtacatatacttacacatacatacatacatatatgtgtgtttatttaacggtgctaatcaatcttgagcaggtcacgtgactggtcatgcggactctaaaatcatatcagattttttaaaatccttgatatatgcagatgttatacagattttcttagcagtgtaataacgttaaactgaagaaataaccatcctgcaggcttcaaaggacgaggtcagcaatatttcccaacatggcttgggggaaaaggatagttttgtctccttttgtattcaagtaatgcaaagtgcatttttgtctctaagtagcttttgactaaaagactttgtagtgtaaagggtgttatacaaactgtaatggtgtgcttcaaacaaatgctagaccctttcacctttgtcgtatatacaaagctgttaattatgtggtatgaattaactttgaacatgttgaaatatgtagcatgtctttaactcagacgaagattctgattgcacaggttgtgttctagccagttgtgatttatttgttcagaaacacaaatgtgaattgcactcttatcatcagaatattgtatgagttcagtgatctttaaacagctcagaagtaatacttgaacttcatttgagtagcacaaagtttacatagccccttttaaatgttaattcgttccatttaagttttccattttcagatgcaactgggtatttttcctcttggaaatagtacgtactttgctttggtatgtagcaaaaggcttccatttctggaagggttttcttgttcttaaacaaggtcagccaggtaccagattctaaaagaacaaattgtcccccacccctcaagtggccttctgactgcacgagaatgtgctactaccctctgtagtctcccctaacacgagaggtcagtgaaattgatggaggaagtgcaaggcttgcttcccctcacccttaaagcttaaagcagttgtaagattttcagtccagcacatacagtcccagtgcccagcacaccggaagtttgtatactggcctcttatcttgtcttcaaatgtgcaggaaatttgaaactgtcatctggaataggttccatctcttatgtgtgttagatcaaaccaaagaagcccccagccatgcccaaatgctgcttcaaaagcctgccttccagtccttacaaaaaccttgcaggattaaatgtgttaacttttttatttttgtacagtttctaagtgatttttgctagtgatgttaaaatgaattaagtttatttgaggggtgtgagcacctcctccatttaaataaactggtgactttccttttattttttaaaagtggaaacccgttgtgtgcctctcgatttaagggtttctgatgacattattcttaagaccagcattgatcctttatatacaaatatatgttttccttgttttttattgctatttcagaagaaaatgaaccttttattttgctctacccagtaactgcgctggtacatagacgcactgagcaaacaaacttttgtaaccacctctgactacttttgtatatcaaagttgattacttttgaaatatttggatctagtttctaagttattttagtgttttatatgttccccaaaattactttgaatctgtcaccagcataatgagttcttggtgatacaatggtgagacttgtaatgagcaaaaagctacctggagtagctcctcttttccttctttcttagtaacctgttttttgattaccgtaagacatcacagattacctgaaaccccttccagtataactaggccctccttccttccacatttaattgcttaatagtttgaagaaactattggaaatgggcattttatatgacatgtatggctttacaatattaaatatgagcaaaaagaaaaaatatgagaaggtttatgtgggtctgtaaggtatggctgtggaaagatattgtagtagttttgacactattgttattacctttaaaatcatttacccaataaaatgttaaaaccga

SEQ ID NO: 106779 - DNA, 3380 bp, Homo sapiens
  Payload ID: 966
  Gene Symbol: AMMECR1
  Gene Name: Alport syndrome, mental retardation, midface hypoplasia and elliptocytosis chromosomal region gene 1
  Uniprot ID: Q9Y4X0
  ENST ID: ENST00000372057
  CDS Start-End: 638-1270
ctctttctctgggctaatcgtttagaggacagtcgctcctgccaacctaatcccatgagcctgactaccttgccgggccacaggctcaaagaagcagtgtggctgccagcaccctcacggtaaggggcacggaggcaccaggcagtctggcaggatgagagacatcctgggggtggtctgagtttggatgtgggctgagaagacaaagcagggggctttcgggggacaagattttccaaacatcttattcttaggatcatcacttcctaatctgatgcaactgactcggcaggcattcgggagcctgtaagctccattttcctgttccaaattcttctgcacctcaccatgagtcctcaccttgaccctaatcaacttgggattctcctcaaagtacttagaaaggaaaaggaagacggtgactaccctgacatgatggccacccacccgagctccaggtatgaagcctgctcctctggaattactctagggctgcggcggcggcggcggggggatcgccctgtcgccacctccgagctgcggagtggggaccctactttctaccccggccgccgccacctcttcctcaccctcctcatcgtccgccgcctcgtcctcatcgccgggctcccggaagatggtggtgtcagcagagatgtgctgcttttgcttcgatgtgctctactgtcacctgtatggataccagcagccccggaccccccgattcaccaacgagccctacccactgtttgtaacatggaagattggtcgagacaaaagattacgtggatgcataggtactttttctgccatgaatttgcattcaggactcagggagtacacacttaccagtgcccttaaagatagccgttttcccccaatgacaagggatgagctgccacggcttttctgctcagtgtctctgctcactaactttgaagatgtctgtgattatttggactgggaggtgggtgtacatggcattagaatagaattcatcaatgaaaaaggatcaaaacgcaccgccacctacctaccggaggttgcaaaggagcaaggatgggaccatatacagaccatagactccttattgaggaaaggaggatacaaagctccgattactaatgaattcaggaaaaccataaaactgaccaggtatcgtagtgaaaagatgaccctgagctatgctgaataccttgctcatcgccagcatcatcatttccaaaatggcattgggcatccccttccgccatacaaccattattcctgacactgagccgcacaaccagtcactgggcctctctgcagacctcttcccaggagaccctacaccttcttggtctagctatctcttttactgtaccattttatgatgatagtttccgttgccatggtgaagcttcgacatcgtcaactaagatcatcatggtaacgggtagaaaaatggcatttgttaagatcctgttttattattttagatcgttgattttttttttgcagcatatataattttgggtttttttttccttataatattatgtagaattttgctttgctgtctcagtcaggtttctgtttttctgtcctccttgcctttcttcccgttttgcttcctgttttccttcttccttcccgttttccttcttccttccctgcctcccttcctttgactgtggatggaagaaagtgtgcagtttttagggattttacttaggttcgtctttagttttcctcagtaagatagttgttttttgatacctgagtttgggattaattcatatcaaattcaggtatttgtatattactcttgatttttgtctgaaattcactttgctatgacagcctagtagttgggtcttcactccttaagtatatgtttttcccatggtgaaaatacatgaactttagttctagtagtgagcattcaaaggtccgtgatagggcttgtcacagagagagagaaatcatttatccctattgtgctggttatcatagaagagactgcctcaccactttatagaaccaatttgcaaactaaaacactgtttggagaaggtacaaactacctttcaaaaaggctacaggaaacattttatgagcagcaaatattaggaagagagcagatacagaatttagtgcctttgagaagaatataattaagtggaattaagaggggttagaaaaaaggcaatttagaaaaatattcttgtaaaactttattgtttctatatgtgaaacagaagattagacaaattccttactcttaagtatttttttaagctgaaaaaaaattattttgagcaaataaccaataagagacatttgtctattttatattaatttaaatttgttagctctaggtttcaataagtcatgattggctagaatccattttagctaccatctaaagatatggtaaagataatttagtaaaacaaaagttcatatttgccatgatttcagatatgtttgtcatggggacaatattagagttttagagatactataaaatagcttgaatttctttctgcactacatacttttgatagaaacacatttactacattgataagatgttatgtcacacctgtgaaaatggagttggcattcagatatgctatagttagagcccagctcatctgcaagtatagtcttcccatgatgcatacaaagataacttactgatgtcgataggaggtccatacatatatccccaggaaaaatgacagattattctggaggaagatgaccttcattttatggttatgtgtgtgtgtctgtgtgtctttggaaaaatatatataattttttcaaataggaagccaacatatcaagtgatgaattaaagtatgctgcagaatatatattctaaaactacaaaaaagtcactgaatatcaaaatgatacagcttatacatatagttactgtgacaagtgacagactgctagttcagaattcaaaaatcctttcctagtttgtgagataatgggctaaattccttctgcctgccactggggcaaagcaaattgctttagtttttgatgagagttcttagaagtttgttggtattccttcatccacagcatccattgttgaaataaccattttcagttgtgatgccttaactaagaagccaattgttagcctgaaatgcaatcttggtagccagtttcaatgaagctagagattagtcagaaaaagttagctgttgggctttagaaagggattttgagtcctgtcatttctacttgggagcattttggagcagattagtctttcagtataaaaacaagtggctacctgatggaaacttttcttacccttatagggaaactgagcacaagctgaatgatattgtctgctgcaaaaaaaaacaaac

SEQ ID NO: 106780 - DNA, 3052 bp, Homo sapiens
  Payload ID: 966
  Gene Symbol: AMMECR1
  Gene Name: Alport syndrome, mental retardation, midface hypoplasia and elliptocytosis chromosomal region gene 1
  Uniprot ID: Q9Y4X0
  ENST ID: ENST00000372059
  CDS Start-End: 14-904
agactgttccaagatggcggcgggttgctgcggggtgaagaagcagaaactgtccagttcgcccccctctggctcgggtggcggtggtggcgcctcctcctcctcccactgcagcggagagagccagtgccgagctggggagctgggactaggaggcgccggtacgcggctcaacgggctgggaggtctaaccggaggaggtagcggcagcggctgtaccctctctcccccccagggctgcggcggcggcggcggggggatcgccctgtcgccacctccgagctgcggagtggggaccctactttctaccccggccgccgccacctcttcctcaccctcctcatcgtccgccgcctcgtcctcatcgccgggctcccggaagatggtggtgtcagcagagatgtgctgcttttgcttcgatgtgctctactgtcacctgtatggataccagcagccccggaccccccgattcaccaacgagccctatgcccttaaagatagccgttttcccccaatgacaagggatgagctgccacggcttttctgctcagtgtctctgctcactaactttgaagatgtctgtgattatttggactgggaggtgggtgtacatggcattagaatagaattcatcaatgaaaaaggatcaaaacgcaccgccacctacctaccggaggttgcaaaggagcaaggatgggaccatatacagaccatagactccttattgaggaaaggaggatacaaagctccgattactaatgaattcaggaaaaccataaaactgaccaggtatcgtagtgaaaagatgaccctgagctatgctgaataccttgctcatcgccagcatcatcatttccaaaatggcattgggcatccccttccgccatacaaccattattcctgacactgagccgcacaaccagtcactgggcctctctgcagacctcttcccaggagaccctacaccttcttggtctagctatctcttttactgtaccattttatgatgatagtttccgttgccatggtgaagcttcgacatcgtcaactaagatcatcatggtaacgggtagaaaaatggcatttgttaagatcctgttttattattttagatcgttgattttttttttgcagcatatataattttgggtttttttttccttataatattatgtagaattttgctttgctgtctcagtcaggtttctgtttttctgtcctccttgcctttcttcccgttttgcttcctgttttccttcttccttcccgttttccttcttccttccctgcctcccttcctttgactgtggatggaagaaagtgtgcagtttttagggattttacttaggttcgtctttagttttcctcagtaagatagttgttttttgatacctgagtttgggattaattcatatcaaattcaggtatttgtatattactcttgatttttgtctgaaattcactttgctatgacagcctagtagttgggtcttcactccttaagtatatgtttttcccatggtgaaaatacatgaactttagttctagtagtgagcattcaaaggtccgtgatagggcttgtcacagagagagagaaatcatttatccctattgtgctggttatcatagaagagactgcctcaccactttatagaaccaatttgcaaactaaaacactgtttggagaaggtacaaactacctttcaaaaaggctacaggaaacattttatgagcagcaaatattaggaagagagcagatacagaatttagtgcctttgagaagaatataattaagtggaattaagaggggttagaaaaaaggcaatttagaaaaatattcttgtaaaactttattgtttctatatgtgaaacagaagattagacaaattccttactcttaagtatttttttaagctgaaaaaaaattattttgagcaaataaccaataagagacatttgtctattttatattaatttaaatttgttagctctaggtttcaataagtcatgattggctagaatccattttagctaccatctaaagatatggtaaagataatttagtaaaacaaaagttcatatttgccatgatttcagatatgtttgtcatggggacaatattagagttttagagatactataaaatagcttgaatttctttctgcactacatacttttgatagaaacacatttactacattgataagatgttatgtcacacctgtgaaaatggagttggcattcagatatgctatagttagagcccagctcatctgcaagtatagtcttcccatgatgcatacaaagataacttactgatgtcgataggaggtccatacatatatccccaggaaaaatgacagattattctggaggaagatgaccttcattttatggttatgtgtgtgtgtctgtgtgtctttggaaaaatatatataattttttcaaataggaagccaacatatcaagtgatgaattaaagtatgctgcagaatatatattctaaaactacaaaaaagtcactgaatatcaaaatgatacagcttatacatatagttactgtgacaagtgacagactgctagttcagaattcaaaaatcctttcctagtttgtgagataatgggctaaattccttctgcctgccactggggcaaagcaaattgctttagtttttgatgagagttcttagaagtttgttggtattccttcatccacagcatccattgttgaaataaccattttcagttgtgatgccttaactaagaagccaattgttagcctgaaatgcaatcttggtagccagtttcaatgaagctagagattagtcagaaaaagttagctgttgggctttagaaagggattttgagtcctgtcatttctacttgggagcattttggagcagattagtctttcagtataaaaacaagtggctacctgatggaaacttttcttacccttatagggaaactgagcacaagctgaatgatattgtctgctgcaaaaaaaaacaaacaaaaaaaaaacaaaacaaaaaacaaaaaaaaggaaaaa

SEQ ID NO: 106781 - DNA, 4741 bp, Homo sapiens
  Payload ID: 967
  Gene Symbol: ALS2CL
  Gene Name: ALS2 C-terminal like
  Uniprot ID: Q60I27
  ENST ID: ENST00000318962
  CDS Start-End: 85-2946
gggggtgcgagcgaggagccgcacaggcagtcccggcgcggggcaaccacagcgctcaggaggccctgagtccggcacctggccatgtgcaaccctgaggaggcagctctgctgcggctggaggaggtcttctcagccaccctcgcccatgtcaacagccttgtcctccagcccctgctcccagccgccccagatccctcggatccctggggcagagagtgcctgcggctcttgcaacagctgcacaagagctcccagcaactctgggaggtgacggaggaaagcctgcactcactgcaggagaggctgcgttacccggactccaccggtctggagtccctgctgctgctgcgaggtgctgaccgtgtactgcaggcccacatagagtacattgagtcctacacaagctgcatggtggtgcaggccttccagaaggcagcaaagaggagaagcgagtactggcggggccagcggaaggcgctgcggcagctgctttcaggtgtgagctcagagggctcggtgggcgcatcgctgggccaggccctccaccagccactcgcccatcacgtgcaacagtacgtgctcctcctgctgagcctcggggacaccattggggagcatcacccaacccgggagctggtggtgaacgcagtcaccctctttgggaacctgcagtccttcatgaagcaggagttggaccaggctgtggccacacaggctctctggcacaccctgagaggccggctgagggatgtgctctgcacccctgctcacagactccttcaggacagccaggacgtacccgtgacggtcgcaccgttgcgggctgagcgtgtgctgctctttgatgatgccctcgtcctgctgcagggccacaatgtccacacctttgatctgaagctggtgtgggtggatcctgggcaggacgggtgcacgtttcacctcctcacgcccgaagaagagttctccttttgtgccaaggactcccagggccaggcagtctggcagtggaaggtgacctgggctgttcaccaggccctgcatgggaagaaggacttccccgtgctgggggctggcctggagccctcccagcctcccgactgccgctgcgcagaatataccttccaggcagagggccggctctgccaggccacctacgagggcgagtggtgcaggggccggccccacggcaagggaaccctgaaatggccggatgggcggaatcacgtggggaatttctgccagggcctggagcatggcttcggcatccgcctgctgccccaggcctctgaggacaagttcgactgttacaagtgtcactggcgagaaggcagcatgtgtggctacggcatctgtgagtacagcaccgacgaggtgtacaagggctacttccaggagggcctgcggcacggatttggggtccttgagagtggtccgcaggccccccagcccttcaggtacacgggccactgggagaggggccagaggagcggctatggcattgaggaggatggtgacagaggtgagcgctacattggcatgtggcaggctggtcagcgccacggcccaggggtcatggtcacccaggcaggtgtctgctaccagggcaccttccaggcggacaagacggtgggcccgggcatcctcctctctgaagacgactccctgtatgagggcaccttcaccagggacctgaccctcatggggaagggcaaggtcaccttccccaatggcttcaccctggagggctcgttcggcagtggggcagggagaggactgcacacacagggtgtgctggacacggctgccctcccaccagacccgagcagtacctgcaagaggcagctgggcgtgggtgccttccccgtggaaagccgctggcagggagtctacagccccttccgggactttgtgtgtgctggctgccccagggacctgcaggaggccctgctgggcttcgacgtgcagagctccagggagctgcgtaggtctcaggattacctgtcctgcgagaggacccaccctgaggacagtgtgggcagtatggaagacatcctggaggagctgctgcagcaccgggagcccaaggccctgcagctgtacctcaggaaggctctgagcaactcactgcaccccctgggaaagctgctccggacactgatgctgaccttccaggctacctacgcaggtgtcggggccaacaagcacctgcaggagctggcccaggaggaggtgaagcagcatgcccaggaactctgggctgcctacaggggtctgctgcgagttgccttagagcgcaagggccaggccctggaggaggatgaagacacagagacaagggacctccaggtgcatggattggtgctgcccctcatgctgcccagcttctactcagagctcttcacgctctacctgctgcttcatgagcgggaggacagcttctacagccagggcattgccaacttgagcctctttcctgatacccaactgctcgagttcctggatgtgcagaagcacttgtggcccctcaaggacctcacgctgacgagcaatcagaggtactccctggtcagggacaagtgtttcctgtcagccaccgagtgcctgcagaagatcatgaccacggtggacccacgggagaagctggaggtgctggagaggacatacggggaaattgagggcacggtgtcgagggtattgggccgggagtacaagctgcccatggacgacctgctgccacttctcatctacgtggtgtcgcgcgcccgaattcagcacctgggagccgagatccacctgatccgtgacatgatggaccccaaccacacaggaggcctgtatgacttcctgctcacagccctggagtcctgttacgagcacatccagaaagaagacatgaggctgcaccgcttacctggccactggcactccagggagctctggtagcctggcctttcctggacagactgaagagctgagcagggcactgccagcctgtccctcattacccaaggcaaggggcaggacaggccctcagaagcagctcttggaggagatgagcattttgttttgcacaggaagatgctgctgctgccctgactgggatgagggtgaggggtgacgggtgtggccctggatgtggtggttttcccttggccactagcccatcttcaatgaccccttaatctgcagcagctcacaggctgggggtgaggagtccctggcttctcttagcctgagcctttctcccaagttccagagcctctccgggcctcagtgctgccatctgtacaatggtggagtgagtacgctgtaaaggaccttccattcattttgctgaattccagagtccttttggaaaactgactttagtctgctgggctgtattgacctctggcaggctcgaagcctcactgggtatgcagtcaacaggatgggcctggagatccgtgaactgcaggccacgtacccatgacgtaaacggcggcactggagcaagctggggcggggggtgggtaaaccctcactgccagcaggccccaagtggcttgtaaatcattctcctgtgatgtctgtgggcctgcgtggggacaacaggggcacatgacatctgcctgggccctgaccaataaaccctcagacccaggacccaggaccctgctgtagttggggagcaggagtacctttgggaggggaggactttatttaaacagtggttctagtgtgggaccaagagaggcaggagctgggtcttggggcagctttattcctgttgggcctcagtttctcttccccacacagtttatcttccgtcacattgtgccgggtgacgtgcacggtctccctctgccctagccggagatgcatgatgacaggcagtgtgatgtgttctgaaagtgtccagggcaaagcgtagggagagggtggatttgtgcagggtgcagctctggagaagaagctggatcactcttggtcccattccctaggccctgagcaagtcaggctcctggctctgggtgtggctcccccaaacgaagtactgacttcagcctgtgaggggagggttgagggaggctctggaaagcccagccacacctgagtccctggcagtagccttggggcagagggcacccgcagagtcccagagatgatgtgggcagtgggcagagagagccttggcgcctctgtttgccaccacttccccaggaaggagggacagcatttctctggctggttccactaaatgtgccagcccaaatgcagggcatgggctctggttctgccaggagcctgtgacacccccaggaagggggtggaactgaggaagagcgaggatatgcaggcactcatgcttaccgggactggggcagctcactaggattctatcctttccaatcggcatcagccagctcttgtcccctgataagtgaggacagcctgaccctggcctcaaatgcagccatccctgagttcatgcgatgctgacgggaccccagcacacttccctgcctcctttgagatctgcgagcccttgctgcagttcagattcaacaaggccctctgcccaccctctcactaggcctcacccaacaccagtggaactggagcctctggctgggcacagtggctcactttgggaggctgaggcaggaaggctgctggaaactgagagttcaagaccagcctgggcaacatagtgagaccctgtctctacaaatacaaaataaaataattagctggg

SEQ ID NO: 106782 - DNA, 1747 bp, Homo sapiens
  Payload ID: 967
  Gene Symbol: ALS2CL
  Gene Name: ALS2 C-terminal like
  Uniprot ID: Q60I27
  ENST ID: ENST00000383742
  CDS Start-End: 433-1335
aggaaggaaccagctgtaagggagggcagagggggatgtcttggaggggaatcccagactttggacactggtctctcttggaccaagaccccctctctggcttggcctccagatctgcccacctttctgtctccgtctttccaggattccatatgcttctgtctgtcttctcgtcgcagggtagattctctgtccctttctctgctgctcttcctcctggagccgtggaggcagctgggcgtgggtgccttccccgtggaaagccgctggcagggagtctacagccccttccgggactttgtgtgtgctggctgccccagggacctgcaggaggccctgctgggcttcgacgtgcagagctccagggagctgcgtaggtctcaggattacctgtcctgcgagaggacccaccctgaggacagtgtgggcagtatggaagacatcctggaggagctgctgcagcaccgggagcccaaggccctgcagctgtacctcaggaaggctctgagcaactcactgcaccccctgggaaagctgctccggacactgatgctgaccttccaggctacctacgcaggtgtcggggccaacaagcacctgcaggagctggcccaggaggaggtgaagcagcatgcccaggaactctgggctgcctacaggggtctgctgcgagttgccttagagcgcaagggccaggccctggaggaggatgaagacacagagacaagggacctccaggtgcatggattggtgctgcccctcatgctgcccagcttctactcagagctcttcacgctctacctgctgcttcatgagcgggaggacagcttctacagccagggcattgccaacttgagcctctttcctgatacccaactgctcgagttcctggatgtgcagaagcacttgtggcccctcaaggacctcacgctgacgagcaatcagaggtactccctggtcagggacaagtgtttcctgtcagccaccgagtgcctgcagaagatcatgaccacggtggacccacgggagaagctggaggtgctggagaggacatacggggaaattgagggcacggtgtcgagggtattgggccgggagtacaagctgcccatggacgacctgctgccacttctcatctacgtggtgtcgcgcgcccgaattcagcacctgggagccgagatccacctgatccgtgacatgatggaccccaaccacacaggaggcctgtatgacttcctgctcacagccctggagtcctgttacgagcacatccagaaagaagacatgaggctgcaccgcttacctggccactggcactccagggagctctggtagcctggcctttcctggacagactgaagagctgagcagggcactgccagcctgtccctcattacccaaggcaaggggcaggacaggccctcagaagcagctcttggaggagatgagcattttgttttgcacaggaagatgctgctgctgccctgactgggatgagggtgaggggtgacgggtgtggccctggatgtggtggttttcccttggccactagcccatcttcaatgaccccttaatctgcagcagctcacaggctgggggtgaggagtccctggcttctcttagcctgagcctttctcccaagttccagagcctctccgggcctcagtgctgccatctgtacaatggtggagtgagtacgctgtaaaggaccttccattcattttgctgaattccagagtccttttgg

SEQ ID NO: 106783 - DNA, 4470 bp, Homo sapiens
  Payload ID: 967
  Gene Symbol: ALS2CL
  Gene Name: ALS2 C-terminal like
  ENST ID: ENST00000423707
  CDS Start-End: 1-908
cactgcaggagaggctgcgttacccggactccaccggtctggagtccctgctgctgctgcgaggtgctgaccgtgtactgcaggcccacatagagtacattgagtcctacacaagctgcatggtggtgcaggccttccagaaggcagcaaagaggagaagcgagtactggcggggccagcggaaggcgctgcggcagctgctttcaggtgtgagctcagagggctcggtgggcgcatcgctgggccaggccctccaccagccactcgcccatcacgtgcaacagtacgtgctcctcctgctgagcctcggggacaccattggggagcatcacccaacccgggagctggtggtgaacgcagtcaccctctttgggaacctgcagtccttcatgaagcaggagttggaccaggctgtggccacacaggctctctggcacaccctgagaggccggctgagggatgtgctctgcacccctgctcacagactccttcaggacagccaggacgtacccgtgacggtcgcaccgttgcgggctgagcgtgtgctgctctttgatgatgccctcgtcctgctgcagggccacaatgtccacacctttgatctgaagctggtgtgggtggatcctgggcaggacgggtgcacgtttcacctcctcacgcccgaagaagagttctccttttgtgccaaggactcccagggccaggcagtctggcagtggaaggtgacctgggctgttcaccaggccctgcatgggaagaaggacttccccgtgctgggggctggcctggagccctcccagcctcccgactgccgctgcgcagaatataccttccaggcagagggccggctctgccaggccacctacgagggcgagtggtgcaggggccggccccacggggaaccctgaaatggccggatgggcggaatcacgtggggaatttctgccagggcctggagcatggcttcggcatccgcctgctgccccaggcctctgaggacaagttcgactgttacaagtgtcactggcgagaaggcagcatgtgtggctacggcatctgtgagtacagcaccgacgaggtgtacaagggctacttccaggagggcctgcggcacggatttggggtccttgagagtggtccgcaggccccccagcccttcaggtacacgggccactgggagaggggccagaggagcggctatggcattgaggaggatggtgacagaggtgagcgctacattggcatgtggcaggctggtcagcgccacggcccaggggtcatggtcacccaggcaggtgtctgctaccagggcaccttccaggcggacaagacggtgggcccgggcatcctcctctctgaagacgactccctgtatgagggcaccttcaccagggacctgaccctcatggggaagggcaaggtcaccttccccaatggcttcaccctggagggctcgttcggcagtggggcagggagaggactgcacacacagggtgtgctggacacggctgccctcccaccagacccgagcagtacctgcaagaggcagctgggcgtgggtgccttccccgtggaaagccgctggcagggagtctacagccccttccgggactttgtgtgtgctggctgccccagggacctgcaggaggccctgctgggcttcgacgtgcagagctccagggagctgcgtaggtctcaggattacctgtcctgcgagaggacccaccctgaggacagtgtgggcagtatggaagacatcctggaggagctgctgcagcaccgggagcccaaggccctgcagctgtacctcaggaaggctctgagcaactcactgcaccccctgggaaagctgctccggacactgatgctgaccttccaggctacctacgcaggtgtcggggccaacaagcacctgcaggagctggcccaggaggaggtgaagcagcatgcccaggaactctgggctgcctacaggtgggctcggtggcaaacgggacagctactgccctgtgacactagtgtgccctttccaggcatcagttctgccttgcatttgggaggaatgccaagtgtctgattcaacaatgaaccagaggcttggtcagtgtgcagctgctgagcaaaagggttagagggtggggaggtgagagcaaaggcccagctgcagccctcagctagagtccaagacccaaccaggcgctgggctgactctgaccgcaggtgcactctcaccccactgtaggctgagcttggccctggactcggaacacacctgcagtcccaggctgggctgtgaccccatgaaacactgcaaatagaagccttagatgctatagttccttctgctgctggattctcaggctaacatcctggagctccaaccttctaacttctgtggtttgagaggatgaaccctgcaggccatgtccacagttctgagaggccacctgcttttgcctttgttgactggtggtagaactccagttctgtggcaaggggcagccacaccatttctctctcattgactcacaggggtctgctgcgagttgccttagagcgcaagggccaggccctggaggaggatgaagacacagagacaaggtgactggcgcaggtctccttggggcctgccgtgtccagggaggcctcatgcgtctgctcctaggacctcccttggggaaagaggtgcttctggggaagtgctgggcattcactctattgaccaaacattgtgcattgatcgtttgtggattagaatgacccatgacctctgttctgtgaggaaccagggagggggcactgctacaatgcattgaatgcatctttgttctaaatgtatgatcccaatctcatctttcgcatgcagaaggtgagtagctccccgaggcaccctcctctccctgcacacagatggggaaaccgagggctggtagggatgagcctgaggttatacaggagttaggtgggcatgaaatttgtttcccccagtccctggagcaaaccttacaatttgcctttagattctagacctgaaagtgttcctgatcagagaggccttcctgtcactgccttgcaggaggcaagggaaatggggttagacattagggaggattccccgcccggagtcctagcacagcaaaccaggaggtggaactgaatcagcctggaatggctgctgagagctcagctgcaagttgctggtccatctggggccctggttttgctttcagtcaaatggggatccaactcctgccccacctgccatcttggttgtcaaagtcaaaggagggaatgaagttatgaattgaattgggcaaatgatgactgagaacaggcttggaaaaggttttctggggaggaggaggctggaggccaggacactgtttgttgtggaactaggagctctttgagacgagactccaagtagtaatcccagaccccaccttgctcatcccaacctgttccggtctccccatcagggacctccaggtgcatggattggtgctgcccctcatgctgcccagcttctactcagagctcttcacgctctacctgctgcttcatgagcgggaggacagcttctacagccagggcattgccaacttgagcctctttcctgatacccaactgctcgagttcctggatgtgcagaagcacttgtggcccctcaaggacctcacgctgacgagcaatcagaggtactccctggtcagggacaagtgtttcctgtcagccaccgagtgcctgcagaagatcatgaccacggtggacccacgggagaagctggaggtgctggagaggacatacggggaaattgagggcacggtgtcgagggtattgggccgggagtacaagctgcccatggacgacctgctgccacttctcatctacgtggtgtcgcgcgcccgaattcagcacctgggagccgagatccacctgatccgtgacatgatggaccccaaccacacaggaggcctgtatgacttcctgctcacagccctggagtcctgttacgagcacatccagaaagaagacatgaggctgcaccgcttacctggccactggcactccagggagctctggtagcctggcctttcctggacagactgaagagctgagcagggcactgccagcctgtccctcattacccaaggcaaggggcaggacaggccctcagaagcagctcttggaggagatgagcattttgttttgcacaggaagatgctgctgctgccctgactgggatgagggtgaggggtgacgggtgtggccctggatgtggtggttttcccttggccactagcccatcttcaatgaccccttaatctgcagcagctcacaggctgggggtgaggagtccctggcttctcttagcctgagcctttctcccaagttccagagcctctccgggcctcagtgctgccatctgtacaatggtggagtgagtacgctgtaaaggaccttccattc

SEQ ID NO: 106784 - DNA, 3937 bp, Homo sapiens
  Payload ID: 967
  Gene Symbol: ALS2CL
  Gene Name: ALS2 C-terminal like
  ENST ID: ENST00000434140
  CDS Start-End: 88-1695
ggtgggggtgcgagcgaggagccgcacaggcagtcccggcgcggggcaaccacagcgctcaggaggccctgagtccggcacctggccatgtgcaaccctgaggaggcagctctgctgcggctggaggaggtcttctcagccaccctcgcccatgtcaacagccttgtcctccagcccctgctcccagccgccccagatccctcggatccctggggcagagagtgcctgcggctcttgcaacagctgcacaagagctcccagcaactctgggaggtgacggaggaaagcctgcactcactgcaggagaggctgcgttacccggactccaccggtctggagtccctgctgctgctgcgaggtgctgaccgtgtactgcaggcccacatagagtacattgagtcctacacaagctgcatggtggtgcaggccttccagaaggcagcaaagaggagaagcgagtactggcggggccagcggaaggcgctgcggcagctgctttcaggtgtgagctcagagggctcggtgggcgcatcgctgggccaggccctccaccagccactcgcccatcacgtgcaacagtacgtgctcctcctgctgagcctcggggacaccattggggagcatcacccaacccgggagctggtggtgaacgcagtcaccctctttgggaacctgcagtccttcatgaagcaggagttggaccaggctgtggccacacaggctctctggcacaccctgagaggccggctgagggatgtgctctgcacccctgctcacagactccttcaggacagccaggacgtacccgtgacggtcgcaccgttgcgggctgagcgtgtgctgctctttgatgatgccctcgtcctgctgcagggccacaatgtccacacctttgatctgaagctggtgtgggtggatcctgggcaggacgggtgcacgtttcacctcctcacgcccgaagaagagttctccttttgtgccaaggactcccagggccaggcagtctggcagtggaaggtgacctgggctgttcaccaggccctgcatgggaagaaggacttccccgtgctgggggctggcctggagccctcccagcctcccgactgccgctgcgcagaatataccttccaggcagagggccggctctgccaggccacctacgagggcgagtggtgcaggggccggccccacggcaagggaaccctgaaatggccggatgggcggaatcacgtggggaatttctgccagggcctggagcatggcttcggcatccgcctgctgccccaggcctctgaggacaagttcgactgttacaagtgtcactggcgagaaggcagcatgtgtggctacggcatctgtacagcaccgacgaggtgtacaagggctacttccaggagggcctgcggcacggatttggggtccttgagagtggtccgcaggccccccagcccttcaggtacacgggccactgggagaggggccagaggagcggctatggcattgaggaggatggtgacagaggtgagcgctacattggcatgtggcaggctggtcagcgccacggcccaggggtcatggtcacccaggcaggtgtctgctaccagggcaccttccaggcggacaagacggtgggcccgggcatcctcctctctgaagacgactccctgtatgagggcaccttcaccagggacctgaccctcatggggaagggcaaggtcaccttccccaatggcttcaccctggagggctcgttcggcagtggggcagggagaggactgcacacacagggtgtgctggacacggctgccctcccaccagacccgagcagtacctgcaagaggcagctgggcgtgggtgccttccccgtggaaagccgctggcagggagtctacagccccttccgggactttgtgtgtgctggctgccccagggacctgcaggaggccctgctgggcttcgacgtgcagagctccagggagctgcgtaggtctcaggattacctgtcctgcgagaggacccaccctgaggacagtgtgggcagtatggaagacatcctggaggagctgctgcagcaccgggagcccaaggccctgcagctgtacctcaggaaggctctgagcaactcactgcaccccctgggaaagctgctccggacactgatgctgaccttccaggctacctacgcaggtgtcggggccaacaagcacctgcaggagctggcccaggaggaggtgaagcagcatgcccaggaactctgggctgcctacaggctgagcttggccctggactcggaacacacctgcagtcccaggctgggctgtgaccccatgaaacactgcaaatagaagccttagatgctatagttccttctgctgctggattctcaggctaacatcctggagctccaaccttctaacttctgtggtttgagaggatgaaccctgcaggccatgtccacagttctgagaggccacctgcttttgcctttgttgactggtggtagaactccagttctgtggcaaggggcagccacaccatttctctctcattgactcacaggggtctgctgcgagttgccttagagcgcaagggccaggccctggaggaggatgaagacacagagacaagggacctccaggtgcatggattggtgctgcccctcatgctgcccagcttctactcagagctcttcacgctctacctgctgcttcatgagcgggaggacagcttctacagccagggcattgccaacttgagcctctttcctgatacccaactgctcgagttcctggatgtgcagaagcacttgtggcccctcaaggacctcacgctgacgagcaatcagaggtactccctggtcagggacaagtgtttcctgtcagccaccgagtgcctgcagaagatcatgaccacggtggacccacgggagaagctggaggtgctggagaggacatacggggaaattgagggcacggtgtcgagggtattgggccgggagtacaagctgcccatggacgacctgctgccacttctcatctacgtggtgtcgcgcgcccgaattcagcacctgggagccgagatccacctgatccgtgacatgatggaccccaaccacacaggaggcctgtatgacttcctgctcacagccctggagtcctgttacgagcacatccagaaagaagacatgaggctgcaccgcttacctggccactggcactccagggagctctggtagcctggcctttcctggacagactgaagagctgagcagggcactgccagcctgtccctcattacccaaggcaaggggcaggacaggccctcagaagcagctcttggaggagatgagcattttgttttgcacaggaagatgctgctgctgccctgactgggatgagggtgaggggtgacgggtgtggccctggatgtggtggttttcccttggccactagcccatcttcaatgaccccttaatctgcagcagctcacaggctgggggtgaggagtccctggcttctcttagcctgagcctttctcccaagttccagagcctctccgggcctcagtgctgccatctgtacaatggtggagtgagtacgctgtaaaggaccttccattcattttgctgaattccagagtccttttggaaaactgactttagtctgctgggctgtattgacctctggcaggctcgaagcctcactgggtatgcagtcaacaggatgggcctggagatccgtgaactgcaggccacgtacccatgacgtaaacggcggcactggagcaagctggggcggggggtgggtaaaccctcactgccagcaggccccaagtggcttgtaaatcattctcctgtgatgtctgtgggcctgcgtggggacaacaggggcacatgacatctgcctgggccctgaccaataaaccctcagacccagga

SEQ ID NO: 106785 - DNA, 3471 bp, Homo sapiens
  Payload ID: 967
  Gene Symbol: ALS2CL
  Gene Name: ALS2 C-terminal like
  Uniprot ID: Q60I27
  ENST ID: ENST00000415953
  CDS Start-End: 191-3052
acagcgctcaggtaagggcgcgacgaagggcgcgcgtctgcggacgggtgtctgcgctccacgcttagctcgtccaggtgggggctcccgcctcctcggctgctgcggtccccgcccagctccttggtcccggcggcagtcatcccccggccgtccgagtccctcgaggccctgagtccggcacctggccatgtgcaaccctgaggaggcagctctgctgcggctggaggaggtcttctcagccaccctcgcccatgtcaacagccttgtcctccagcccctgctcccagccgccccagatccctcggatccctggggcagagagtgcctgcggctcttgcaacagctgcacaagagctcccagcaactctgggaggtgacggaggaaagcctgcactcactgcaggagaggctgcgttacccggactccaccggtctggagtccctgctgctgctgcgaggtgctgaccgtgtactgcaggcccacatagagtacattgagtcctacacaagctgcatggtggtgcaggccttccagaaggcagcaaagaggagaagcgagtactggcggggccagcggaaggcgctgcggcagctgctttcaggtgtgagctcagagggctcggtgggcgcatcgctgggccaggccctccaccagccactcgcccatcacgtgcaacagtacgtgctcctcctgctgagcctcggggacaccattggggagcatcacccaacccgggagctggtggtgaacgcagtcaccctctttgggaacctgcagtccttcatgaagcaggagttggaccaggctgtggccacacaggctctctggcacaccctgagaggccggctgagggatgtgctctgcacccctgctcacagactccttcaggacagccaggacgtacccgtgacggtcgcaccgttgcgggctgagcgtgtgctgctctttgatgatgccctcgtcctgctgcagggccacaatgtccacacctttgatctgaagctggtgtgggtggatcctgggcaggacgggtgcacgtttcacctcctcacgcccgaagaagagttctccttttgtgccaaggactcccagggccaggcagtctggcagtggaaggtgacctgggctgttcaccaggccctgcatgggaagaaggacttccccgtgctgggggctggcctggagccctcccagcctcccgactgccgctgcgcagaatataccttccaggcagagggccggctctgccaggccacctacgagggcgagtggtgcaggggccggccccacggcaagggaaccctgaaatggccggatgggcggaatcacgtggggaatttctgccagggcctggagcatggcttcggcatccgcctgctgccccaggcctctgaggacaagttcgactgttacaagtgtcactggcgagaaggcagcatgtgtggctacggcatctgtgagtacagcaccgacgaggtgtacaagggctacttccaggagggcctgcggcacggatttggggtccttgagagtggtccgcaggccccccagcccttcaggtacacgggccactgggagaggggccagaggagcggctatggcattgaggaggatggtgacagaggtgagcgctacattggcatgtggcaggctggtcagcgccacggcccaggggtcatggtcacccaggcaggtgtctgctaccagggcaccttccaggcggacaagacggtgggcccgggcatcctcctctctgaagacgactccctgtatgagggcaccttcaccagggacctgaccctcatggggaagggcaaggtcaccttccccaatggcttcaccctggagggctcgttcggcagtggggcagggagaggactgcacacacagggtgtgctggacacggctgccctcccaccagacccgagcagtacctgcaagaggcagctgggcgtgggtgccttccccgtggaaagccgctggcagggagtctacagccccttccgggactttgtgtgtgctggctgccccagggacctgcaggaggccctgctgggcttcgacgtgcagagctccagggagctgcgtaggtctcaggattacctgtcctgcgagaggacccaccctgaggacagtgtgggcagtatggaagacatcctggaggagctgctgcagcaccgggagcccaaggccctgcagctgtacctcaggaaggctctgagcaactcactgcaccccctgggaaagctgctccggacactgatgctgaccttccaggctacctacgcaggtgtcggggccaacaagcacctgcaggagctggcccaggaggaggtgaagcagcatgcccaggaactctgggctgcctacaggggtctgctgcgagttgccttagagcgcaagggccaggccctggaggaggatgaagacacagagacaagggacctccaggtgcatggattggtgctgcccctcatgctgcccagcttctactcagagctcttcacgctctacctgctgcttcatgagcgggaggacagcttctacagccagggcattgccaacttgagcctctttcctgatacccaactgctcgagttcctggatgtgcagaagcacttgtggcccctcaaggacctcacgctgacgagcaatcagaggtactccctggtcagggacaagtgtttcctgtcagccaccgagtgcctgcagaagatcatgaccacggtggacccacgggagaagctggaggtgctggagaggacatacggggaaattgagggcacggtgtcgagggtattgggccgggagtacaagctgcccatggacgacctgctgccacttctcatctacgtggtgtcgcgcgcccgaattcagcacctgggagccgagatccacctgatccgtgacatgatggaccccaaccacacaggaggcctgtatgacttcctgctcacagccctggagtcctgttacgagcacatccagaaagaagacatgaggctgcaccgcttacctggccactggcactccagggagctctggtagcctggcctttcctggacagactgaagagctgagcagggcactgccagcctgtccctcattacccaaggcaaggggcaggacaggccctcagaagcagctcttggaggagatgagcattttgttttgcacaggaagatgctgctgctgccctgactgggatgagggtgaggggtgacgggtgtggccctggatgtggtggttttcccttggccactagcccatcttcaatgaccccttaatctgcagcagctcacaggctgggggtgaggagtccctggcttctcttagcctgagcctttctcccaagttccagagcctctccgggcctcagtgctgccatctgtacaatggtggagtgagtacgctgtaaaggaccttccattcattttgctgaattccagagtccttttggaaaactg

SEQ ID NO: 106786 - DNA, 5194 bp, Homo sapiens
  Payload ID: 968
  Gene Symbol: ALMS1
  Gene Name: Alstrom syndrome protein 1
  ENST ID: ENST00000423048
  CDS Start-End: 1-3072
caggccctgccagacagtgagctaactcaagaagctctgaaagtttcagctgttcctcaaccagctgaccagaagactgggttatctactgtaacttcctctttctattcacatacagagaagcctaatatttcttaccagcaagagttgccagatagtcatctaactgaagaggctctgaaagtttcaaatgttcctggaccagctgaccagaagactggggtatcaacagtaacctctacttcctactcacacagagagaagcccattgtttcctaccagcgagagttgccgcattttactgaagcaggtttgaaaattttaagagttcctggaccagctgaccagaagactggaataaacatcctgccctctaattcctacccacagagagagcactctgtcatttcttatgagcaggagttgccagatcttactgaagtaactttgaaagcaataggggttcctgggcctgctgaccagaagactgggatacaaatagcatcctctagttcctactcaaatagagagaaggccagtatttttcatcagcaggagttgccagatgttactgaagaagctttaaatgtttttgttgttcctggacaaggtgaccggaagactgagataccaacagtacctttaagttactactcacgtagagagaagcccagtgttatctctcaacaggagttgccagacagtcatctcacagaagaggctctgaaagtttcacctgtttctataccagcagagcagaagactgggataccaataggactgtctagttcctactcacattcacataaagagaaactcaagatttcaactgtgcatataccagatgaccagaaaactgagtttccagcagctacccttagttcctactcacaaatagagaagcccaagatttcaactgtgattggaccaaatgaccagaagactccatcccagacagcttttcatagttcctattctcaaacagtaaagcccaatattttatttcaacagcagttgccagatagagatcaaagtaaaggtattctaaagatttcagctgtccctgaactaactgatgtgaatactggaaaaccagtatctctctctagttcttattttcacagagagaaatcgaatattttcagtccacaggaattgccaggtagtcatgtaactgaagatgtgctgaaggtttcaacaattcctggaccagctggccagaaaacagtattaccaacagctcttcctagttccttttcacatcgagagaaaccagatattttctatcaaaaggatttgccagatagacatctaactgaagatgctctaaagatctcaagtgctcttgggcaagctgatcaaattaccggattacaaacagttccctctggtacttactcacatggtgagaatcacaagcttgtttcagaacatgtccaaaggctaatagataatttgaattcttctgactccagtgttagctcaaataatgtgcttttaaattctcaggctgatgacagagttgtaataaataaaccagaatctgcaggttttagagatgttggctctgaagaaatccaggatgcagaaaatagtgctaaaactcttaaggaaattcggacacttttgatggaggcagaaaatatggcactgaaacgatgcaattttcctgctccccttgcccgtttcagagatattagtgatatttcatttatacaatctaagaaggtggtttgcttcaaagaaccctcttccacgggtgtatctaatggtgatttgcttcacagacagccattcacagaggaaagcccaagcagcaggtgcatacagaaggatattggcacacagacgaatttgaaatgccggagaggcattgaaaattgggagtttattagttcaactacagttagaagtcctctacaggaagcagagagcaaagtcagtatggcattagaagaaactcttaggcaatatcaagcagccaaatctgtaatgaggtctgaacctgaagggtgtagtggaaccattgggaataaaattattatccctatgatgactgtcataaaaagtgattcaagtagtgatgccagtgatggaaatggttcctgctcgtgggacagtaatttaccagagtctttggaatcagtttctgatgttcttctaaacttctttccatatgtttcacccaagacaagtataacagatagcagggaggaagagggtgtgtcagagagtgaggatggtggtggtagcagtgtagattcactggctgcacatgtgaaaaaccttctgcaatgtgaatcctcactgaatcatgctaaagaaatactcagaaatgcagaggaagaggaaagccgggtacgagcacatgcctggaatatgaagttcaatttagcacatgattgtggatactccatttcagaattaaatgaagatgacaggaggaaagtagaagagatcaaggcagagttatttggtcatggaagaacaactgacttgtccaagggtttacagagtccacggggaatgggatgcaagccagaagctgtatgtagtcacattattattgagagccatgaaaagggatgtttccggactctaacttctgaacatccacaactagatagacacccttgtgctttcagatctgctggaccctcagaaatgaccagaggacggcagaacccatcatcatgcagagccaagcatgtcaacctttctgcatccttagaccagaacaactcccatttcaaagtttggaattccttgcagttaaaaagtcattccccatttcagaactttatacctgatgaattcaaaatcagcaaaggtcttcgaatgccattcgatgaaaagatggacccttggctgtcagaattagtagaacctgcttttgtgccacctaaagaagtggattttcattcttcatcacaaatgccgtccccagaacccatgaaaaagtttactacctccatcactttttcatctcaccgacattctaaatgcatttccaattcctctgttgttaagattaccagagaagatgaagaccccactttctgctttctctgaaaaattgtcatctgatgcagtcactcagataacaacagaaagtccagaaaagaccctattttcatctgagatttttattaatgctgaagatcgtggacatgaaattatagagcctggtaaccagaagctacgcaaagctcctgtcaagtttgcctcatcatcttcagtccaacaggttactttttctcgcggcacagatggccagcctttattattgccatataagccttctggtagtaccaagatgtattatgttccacaattaagacaaattcctccatctccggattccaaatcagataccaccgttgaaagctcccattcaggatccaatgatgccattgctccagacttcccagctcaggtgctaggcacaagagatgatgacctctcagccactgttaacattaaacataaagaaggaatctacagtaagagggtagtgactaaggcatccttgccagtgggagaaaaacccttgcagaatgaaaatgcagatgcctcagttcaagtgctaatcactggggatgagaacctctcagacaaaaaacagcaagagattcacagtacaagggcagtgactgaggctgcccaggctaaagaaaaagaatctttgcagaaagatactgcagattccagtgctgctgctgctgcagagcactcagctcaagtaggagacccagaaatgaagaacttgccagacactaaagccattacacagaaagaggagatccataggaagaagacagttcccgaggaagcctggccaaacaataaagaatccctacagatcaatattgaagagtccgaatgtcattcagaatttgaaaatactacccgttctgtcttcaggtcagcaaagttttacattcatcatcccgtacacctaccaagtgatcaagatatttgccatgaatctttgggaaagagtgttttcatgagacattcttggaaagatttctttcagcatcatccagacaaacatagagaacacatgtgtcttcctcttccttatcaaaacatggacaagactaagacagattataccagaataaagagcctcagcatcaatgtgaatttgggaaacaaagaagtgatggatactactaaaagtcaagttagagattatccaaaacataatggacaaattagtgatccacaaagggatcagaaggtcaccccagagcaaacaactcagcacactgtgagtttgaatgaactgtggaacaagtatcgggagcgacagaggcaacagagacagcctgagttgggtgacaggaaagaactgtccttggtggaccgacttgatcgtttggctaaaattcttcagaatccaatcacacattctctccaggtctcagaaagtacacatgatgatagcagaggggaacgaagtgtgaaggaatggagtggtagacaacagcagagaaataagcttcagaaaaagaagcggtttaaaagcctagagaaaagccataaaaatacaggcgagcttaaaaaaagcaaggtgctttctcatcatcgagctgggaggtctaatcaaattaaaattgaacagattaaatttgataaatatattctgagtaaacagccaggttttaattatataagcaacacttcttcggattgtcggccctcagaggagagtgagctgctcacagatactaccaccaacatcctttccggcaccacttctactgtcgaatcagatatattgacccaaacagatagagaggtggctctgcacgaaaggagtagctctgtttccactattgacactgcccggctgattcaagcttttggccatgaaagagtatgcttgtcacccagacgaattaaattatatagcagcatcaccaaccaacagaggagataccttgagaagcggagcaaacacagcaagaaagtgctgaatacaggtcatcccctagtgacttctgagcacaccagaaggagacacatccaggtacatggctacagattccatctggcaatgtgactgccctcttcatggactttttagttaagctttgcacacaggtgaaaaaaacaagccatttgccctttcctctctataccatttcttaccaactggaaaagagtgagaaagtgtagtacagtg

SEQ ID NO: 106787 - DNA, 12595 bp, Homo sapiens
  Payload ID: 968
  Gene Symbol: ALMS1
  Gene Name: Alstrom syndrome protein 1
  ENST ID: ENST00000484298
  CDS Start-End: 112-12492
aggcgggcggcactgcgcctaagctgggccacaaccgccagtcagggctctccccttcccctccctccccccctcctcctcctcctctgccgcccagagcgagacaccaacatggagcccgaggatctgccatggccgggcgagctggaggaggaggaggaggaggaggaggaggaggaggaggaagaggaggaggctgcagcggcggcggcggcgaacgtggacgacgtagtggtcgtggaggaggtggaggaagaggcggggcgggagttggactccgactctcactacgggccccagcatctggaaagtatagacgacgaggaggacgaggaggccaaggcctggctgcaggcgcaccccggcaggattttgcctccgctgtcgcccccgcagcaccgctactcggagggcgagcggacctccctggagaagaaaacagaatcttggcattgtcttcctcaagaaatggactcttcccaaaccttggatacatcccagactaggtttaatgtgagaacggaagatactgaagtgacagacttcccctctctggaggagggcatattgacgcaatcagaaaatcaagtaaaggaacccaacagagatctcttctgttctccactgctagtcatacaagatagctttgcttctcctgatttgcctttgctgacctgtttgacacaagaccaagaatttgcgcctgattctttatttcatcaaagtgaactaagttttgcacctctgaggggaattcctgataagtctgaagatactgaatggtcttctcgaccatcggaagttagtgaagctttattccaggctactgcagaagtagcttcagacttagcaagcagtcgctttagtgtatctcagcacccgcttataggcagcacagctgttgggtctcagtgcccttttttaccttctgaacaagggaataatgaagagactatttcgtctgttgatgaactgaaaattcccaaagactgtgatcgttatgatgatctttgttcatatatgtcatggaagacacgaaaagatacacagtggcctgaaaacaatttagctgataaagatcaagtttcagttgcaacttcatttgacataactgatgaaaacatagctactaaaagaagtgaccattttgatgctgctcgttcatatgggcagtattggacacaggaagattcatctaagcaggcagaaacatatttaaccaagggcctgcaggggaaggttgagtctgacgtcattactctggatggcctaaatgaaaatgctgttgtatgcagtgaaagagttgctgaactacaaagaaagccaacaagagagtcggaatatcactcttcagatctcagaatgttgaggatgtctcctgacactgtgccaaaggctcctaaacatttaaaagcaggagacacttctaaaggaggcatagctaaagttactcaatccaacttgaagtcaggcatcactaccactcctgttgattcagacattggatctcatttatccttgtcccttgaggacctgtctcagttggctgtaagttctcctctagaaactactactggtcaacacactgatactctcaaccaaaagacattagcagatactcatctaactgaagagactctgaaagtcacagctattcctgaaccagctgaccagaagactgcaacaccaacagtactctctagttcccactcacatagggggaagcccagcattttctaccagcagggcttgccagacagtcatctaactgaagaggctttgaaagtttcagctgctcctggactagctgaccagacaactggcatgtcaactctaacctctacttcctactcacatagagagaagcctggtactttttaccaacaagagttaccagagagtaacttaaccgaagagcctttggaagtttcagctgctcctggcccagtggagcagaagacgggaatacctacagtatcctctacatcccactcacatgtagaggacctcctctttttctatcgacagaccttgccagatggtcatctaactgatcaggctctgaaagtctcagctgtgtctggaccagctgaccagaagactgggacagcaacagtactctctactccccactcacatagagagaagcctggtattttttaccaacaagagttcgcagacagtcatcaaactgaagagactcttactaaagtttcagccactcctggaccagctgaccagaagactgagataccagcagtacagtctagttcttactcacaaagagaaaagcctagtattttgtacccacaggacttagcagacagtcatctacctgaagagggtctgaaagtttcagctgttgctggaccagctgaccagaagactggcctaccaacagtaccctctagtgcatactcacacagagagaagctccttgttttctaccaacaggccttgctggacagccatctacccgaagaggctctgaaagtttcagctgtttctggaccagctgacggaaagactgggacaccagctgtaacctctacttcctctgcgtcctcttcacttggagaaaagcccagtgctttctatcagcagaccttacccaatagtcatctaactgaagaggctctgaaagtatcaattgttcctggaccaggtgatcagaagactgggataccctcagcaccatctagtttctactcacacagagagaagcccattattttttcccagcagaccctgccagactttcttttccctgaagaagctctgaaggtttcagctgtttctgtattggctgcccagaagactgggacaccaacagtgtcctctaattctcactcacatagcgagaaatctagtgttttctaccagcaagagttgccagacagtgatctacctagagaatctctgaaaatgtctgctattcctggactgactgaccagaagactgtcccaacaccaacagtaccttcaggttccttctcacatagagagaagcccagtattttctatcaacaggagtggccagatagttatgcaactgaaaaggctctgaaagtttcaactggccctggaccagctgaccagaagactgagataccagcagtacagtctagttcttacccacagagggagaagcctagtgttttgtacccacaggtgttatcagacagtcatctacctgaagagagtctgaaagtttcagccttccctggaccagctgaccagatgactgacacaccagcagtaccgtctactttctactcacaaagagagaagcctggtattttctaccaacagaccttgccagagagtcatctgcctaaagaggctctgaaaatttcagtagctcctggactagcagaccagaagactggcacaccaactgtaacctcaacttcctactcacaacatagagaaaagcccagcattttccaccagcaggccttgccaggtactcatatacctgaagaggctcagaaagtttcagctgttactggaccaggtaaccagaagacttggataccaagagtactttctaccttctactcacaaagagagaaacctggtattttctatcaacagaccttgccaggtagtcacatacctgaagaggcacagaaagtttcacctgttcttggaccagctgaccagaagactgggacaccaactccaacctctgcttcttactcacacacagagaagcctggtattttctaccaacaggtcttgccagataatcatccaactgaagaggctctgaaaatttcagttgcctctgaaccagttgaccagacaactggcacaccagctgtaacctctacttcctactcacaatatagagagaagcccagcattttctaccaacagtcgttgccaagtagtcatctaactgaagaggctaagaatgtttcagcggttcctggaccagctgaccagaagactgtgataccaattttaccctctactttctactcacacacagagaagcctggtgttttctaccaacaggtcttgccacatagtcatccaactgaagaggctctgaaaatttcagttgcctctgaaccagttgaccagacaactggcacaccaactgtaacctctacttcttactcacaacatacagagaagccgagtattttctaccaacagtcgttgccaggtagtcatctaactgaagaggctaagaacgtttcagcggttcctggaccaggtgaccggaagactgggataccaactttaccctctactttctactcacacacagagaagcctggtagtttctaccaacaggtcttgccacatagtcatctacctgaagaggctttggaagtttcagttgctcctggaccagttgaccagacgattggcacaccaactgtaacctccccttccagctcatttggagagaagcccattgttatctacaaacaggcctttccagagggtcatctacctgaagagtctctgaaagtttcagttgctcctggaccagttggccagacaactggcgcaccaactataacctctccttcctactcacaacatagagcaaagtctggcagtttctaccaactggcattgctaggtagtcaaatacctgaagaggctctcagagtttcttctgctcctggaccagctgaccagacaactggcataccaaccataacctctacttcctactcatttggagagaagccgattgttaactacaaacaggcctttccagatggtcatctacctgaagaggctctgaaagtttccattgtttctggacctactgaaaaaaagactgacataccagcaggacctttaggttccagtgcacttggagagaagcccattactttctaccggcaggctctgctagacagtcctctaaataaagaggttgtgaaagtttcagctgctcctggaccagctgaccagaagactgagacattaccagtacattctactagctactcaaatagggggaagcctgtcattttctaccagcagaccctatcagacagtcatttacctgaagaagctctgaaagttccacctgttcctggaccagatgcccagaagactgagacaccatcagtatcctctagtttatactcatatagagagaagcccattgtcttctaccaacaggccctgccagacagtgagctaactcaagaagctctgaaagtttcagctgttcctcaaccagctgaccagaagactgggttatctactgtaacttcctctttctattcacatacagagaagcctaatatttcttaccagcaagagttgccagatagtcatctaactgaagaggctctgaaagtttcaaatgttcctggaccagctgaccagaagactggggtatcaacagtaacctctacttcctactcacacagagagaagcccattgtttcctaccagcgagagttgccgcattttactgaagcaggtttgaaaattttaagagttcctggaccagctgaccagaagactggaataaacatcctgccctctaattcctacccacagagagagcactctgtcatttcttatgagcaggagttgccagatcttactgaagtaactttgaaagcaataggggttcctgggcctgctgaccagaagactgggatacaaatagcatcctctagttcctactcaaatagagagaaggccagtatttttcatcagcaggagttgccagatgttactgaagaagctttaaatgtttttgttgttcctggacaaggtgaccggaagactgagataccaacagtacctttaagttactactcacgtagagagaagcccagtgttatctctcaacaggagttgccagacagtcatctcacagaagaggctctgaaagtttcacctgtttctataccagcagagcagaagactgggataccaataggactgtctagttcctactcacattcacataaagagaaactcaagatttcaactgtgcatataccagatgaccagaaaactgagtttccagcagctacccttagttcctactcacaaatagagaagcccaagatttcaactgtgattggaccaaatgaccagaagactccatcccagacagcttttcatagttcctattctcaaacagtaaagcccaatattttatttcaacagcagttgccagatagagatcaaagtaaaggtattctaaagatttcagctgtccctgaactaactgatgtgaatactggaaaaccagtatctctctctagttcttattttcacagagagaaatcgaatattttcagtccacaggaattgccaggtagtcatgtaactgaagatgtgctgaaggtttcaacaattcctggaccagctggccagaaaacagtattaccaacagctcttcctagttccttttcacatcgagagaaaccagatattttctatcaaaaggatttgccagatagacatctaactgaagatgctctaaagatctcaagtgctcttgggcaagctgatcaaattaccggattacaaacagttccctctggtacttactcacatggtgagaatcacaagcttgtttcagaacatgtccaaaggctaatagataatttgaattcttctgactccagtgttagctcaaataatgtgcttttaaattctcaggctgatgacagagttgtaataaataaaccagaatctgcaggttttagagatgttggctctgaagaaatccaggatgcagaaaatagtgctaaaactcttaaggaaattcggacacttttgatggaggcagaaaatatggcactgaaacgatgcaattttcctgctccccttgcccgtttcagagatattagtgatatttcatttatacaatctaagaaggtggtttgcttcaaagaaccctcttccacgggtgtatctaatggtgatttgcttcacagacagccattcacagaggaaagcccaagcagcaggtgcatacagaaggatattggcacacagacgaatttgaaatgccggagaggcattgaaaattgggagtttattagttcaactacagttagaagtcctctacaggaagcagagagcaaagtcagtatggcattagaagaaactcttaggcaatatcaagcagccaaatctgtaatgaggtctgaacctgaagggtgtagtggaaccattgggaataaaattattatccctatgatgactgtcataaaaagtgattcaagtagtgatgccagtgatggaaatggttcctgctcgtgggacagtaatttaccagagtctttggaatcagtttctgatgttcttctaaacttctttccatatgtttcacccaagacaagtataacagatagcagggaggaagagggtgtgtcagagagtgaggatggtggtggtagcagtgtagattcactggctgcacatgtgaaaaaccttctgcaatgtgaatcctcactgaatcatgctaaagaaatactcagaaatgcagaggaagaggaaagccgggtacgagcacatgcctggaatatgaagttcaatttagcacatgattgtggatactccatttcagaattaaatgaagatgacaggaggaaagtagaagagatcaaggcagagttatttggtcatggaagaacaactgacttgtccaagggtttacagagtccacggggaatgggatgcaagccagaagctgtatgtagtcacattattattgagagccatgaaaagggatgtttccggactctaacttctgaacatccacaactagatagacacccttgtgctttcagatctgctggaccctcagaaatgaccagaggacggcagaacccatcatcatgcagagccaagcatgtcaacctttctgcatccttagaccagaacaactcccatttcaaagtttggaattccttgcagttaaaaagtcattccccatttcagaactttatacctgatgaattcaaaatcagcaaaggtcttcgaatgccattcgatgaaaagatggacccttggctgtcagaattagtagaacctgcttttgtgccacctaaagaagtggattttcattcttcatcacaaatgccgtccccagaacccatgaaaaagtttactacctccatcactttttcatctcaccgacattctaaatgcatttccaattcctctgttgttaaggttggtgttactgaaggtagccagtgtactggagcatctgtgggggtatttaattctcatttcactgaagaacaaaatcctcccagagatcttaaacagaaaacctcttccccttcatcatttaaaatgcatagtaattcacaagataaagaagtgactattttagcagaaggtagaaggcaaagccaaaaattacctgttgattttgagcgttcttttcaagaagaaaaacccttagaaagatcagattttacaggcagtcattctgagcccagtaccagggcaaattgtagcaatttcaaggaaattcagatttctgataaccatacccttattagcatgggcagaccaagttccaccctaggagtaaacagatcgagttccagactaggagtaaaagagaagaatgtaactataactccagatcttccttcttgcatttttcttgaacaacgagagctctttgaacaaagcaaagccccacgtgcagatgaccatgtgaggaaacaccattctccctctcctcaacatcaggattatgtagctccagaccttccttcttgcatttttcttgaacaacgagaactctttgaacagtgcaaagccccatatgtagatcatcaaatgagagaaaaccattctccccttcctcaaggtcaggattctatagcttcagaccttccgtctcccatttctcttgaacaatgccaaagcaaagcgccaggtgtagatgaccaaatgaataaacaccattttccccttcctcaaggtcaggattgtgtagtggaaaagaataatcaacataagcctaaatcacacatttctaatataaatgttgaagccaagttcaatactgtggtctcccagtcagccccaaatcactgtacattagcagcatctgcatctactcctccttcaaatagaaaagcactttcttgtgttcatataactctttgtcccaagacttcttccaagttggatagtggaactttagatgaaagattccattcattggatgctgcttctaaagcgaggatgaatagtgagtttaactttgacttacatactgtatcttcgagatcactggaaccaacctccaaattattgaccagtaaacctgtagcacaggatcaagaatctttaggttttctaggacctaaatcttcactggatttccaagtcgtacagccttctcttccagacagtaacactattactcaggacttgaaaaccataccttctcagaatagccagatagtaacctccaggcaaatacaagtgaacatttcagatttcgaaggacattccaatccagaggggaccccagtatttgcagatcgattaccagagaagatgaagaccccactttctgctttctctgaaaaattgtcatctgatgcagtcactcagataacaacagaaagtccagaaaagaccctattttcatctgagatttttattaatgctgaagatcgtggacatgaaattatagagcctggtaaccagaagctacgcaaagctcctgtcaagtttgcctcatcatcttcagtccaacaggttactttttctcgcggcacagatggccagcctttattattgccatataagccttctggtagtaccaagatgtattatgttccacaattaagacaaattcctccatctccggattccaaatcagataccaccgttgaaagctcccattcaggatccaatgatgccattgctccagacttcccagctcaggtgctaggcacaagagatgatgacctctcagccactgttaacattaaacataaagaaggaatctacagtaagagggtagtgactaaggcatccttgccagtgggagaaaaacccttgcagaatgaaaatgcagatgcctcagttcaagtgctaatcactggggatgagaacctctcagacaaaaaacagcaagagattcacagtacaagggcagtgactgaggctgcccaggctaaagaaaaagaatctttgcagaaagatactgcagattccagtgctgctgctgctgcagagcactcagctcaagtaggagacccagaaatgaagaacttgccagacactaaagccattacacagaaagaggagatccataggaagaagacagttcccgaggaagcctggccaaacaataaagaatccctacagatcaatattgaagagtccgaatgtcattcagaatttgaaaatactacccgttctgtcttcaggtcagcaaagttttacattcatcatcccgtacacctaccaagtgatcaagatatttgccatgaatctttgggaaagagtgttttcatgagacattcttggaaagatttctttcagcatcatccagacaaacatagagaacacatgtgtcttcctcttccttatcaaaacatggacaagactaagacagattataccagaataaagagcctcagcatcaatgtgaatttgggaaacaaagaagtgatggatactactaaaagtcaagttagagattatccaaaacataatggacaaattagtgatccacaaagggatcagaaggtcaccccagagcaaacaactcagcacactgtgagtttgaatgaactgtggaacaagtatcgggagcgacagaggcaacagagacagcctgagttgggtgacaggaaagaactgtccttggtggaccgacttgatcgtttggctaaaattcttcagaatccaatcacacattctctccaggtctcagaaagtacacatgatgatagcagaggggaacgaagtgtgaaggaatggagtggtagacaacagcagagaaataagcttcagaaaaagaagcggtttaaaagcctagagaaaagccataaaaatacaggcgagcttaaaaaaagcaaggtgctttctcatcatcgagctgggaggtctaatcaaattaaaattgaacagattaaatttgataaatatattctgagtaaacagccaggttttaattatataagcaacacttcttcggattgtcggccctcagaggagagtgagctgctcacagatactaccaccaacatcctttccggcaccacttctactgtcgaatcagatatattgacccaaacagatagagaggtggctctgcacgaaaggagtagctctgtttccactattgacactgcccggctgattcaagcttttggccatgaaagagtatgcttgtcacccagacgaattaaattatatagcagcatcaccaaccaacagaggagataccttgagaagcggagcaaacacagcaagaaagtgctgaatacaggtcatcccctagtgacttctgagcacaccagaaggagacacatccaggtagcaaaccatgtgatttcttctgactctatttcctcttctgccagtagtttcctgagctcaaactctactttttgcaacaagcagaatgtacacatgttaaacaagggcatacaagcaggtaacttggagattgtgaacggtgccaaaaaacacactcgagatgttgggataactttcccaactccaagttccagcgaggctaaattggaagagaacagtgatgtgacttcttggtcagaagaaaaacgtgaagagaaaatgctctttaccggttatcctgaggacagaaagttaaaaaagaacaagaagaattcccatgaaggagtttcctggtttgttcctgtggaaaatgtggagtctagatcaaagaaggaaaacgtgcctaacacttgtggccctggcatctcctggtttgaaccaataaccaagaccagaccctggagggagccactgcgggagcagaactgtcaggggcagcacctggacggtcggggctacctggcaggcccaggcagagaggctggcagagacctactgaggccatttgtgagagcaacccttcaggaatcgcttcagtttcacagacctgacttcatctcccgctctggggagcggataaagcgcctgaagttaatagtccaggagaggaagctgcagagcatgttacagaccgagcgggatgcactattcaacattgacagggaacggcagggccaccagaatcgcatgtgcccgctgcccaagagagtcttcctggctatccagaagaacaagcctatcagcaagaaggaaatgattcagaggtccaaacggatttatgagcagcttccagaagtacagaaaaagagagaagaagagaagagaaaatcagaatataagtcataccggctgcgagcccagctatataaaaagagagtgaccaatcaacttctggggagaaaagttccctgggactgacacaagtttattttcctcagagccttggaattctattttatgaacctagagaagcagaatccttacttttgtgagtctggttgaataaagcttattctttgtc

SEQ ID NO: 106788 - DNA, 11700 bp, Homo sapiens
  Payload ID: 968
  Gene Symbol: ALMS1
  Gene Name: Alstrom syndrome protein 1
  ENST ID: ENST00000614410
  CDS Start-End: 1-11580
atggagcccgaggatctgccatggccgggcgagctggaggaggaggaggaggaggaggaggaggaggaggaggaagaggaggaggctgcagcggcggcggcggcgaacgtggacgacgtagtggtcgtggaggaggtggaggaagaggcggggcgggagttggactccgactctcactacgggccccagcatctggaaagtatagacgacgaggaggacgaggaggccaaggcctggctgcaggcgcaccccggcaggattttgcctccgctgtcgcccccgcagcaccgctactcggagggcgagcggacctccctggagaagattgttccattgacctgtcatgtatggcaacagatagtatatcaaggcaatagtagaacacaaatttctgatactaatgtggtctgtttggaaacaacagctcagcggggttctggggatgatcagaaaacagaatcttggcattgtcttcctcaagaaatggactcttcccaaaccttggatacatcccagactaggtttaatgtgagaacggaagatactgaagtgacagacttcccctctctggaggagggcatattgacgcaatcagaaaatcaagtaaaggaacccaacagagatctcttctgttctccactgctagtcatacaagatagctttgcttctcctgatttgcctttgctgacctgtttgacacaagaccaagaatttgcgcctgattctttatttcatcaaagtgaactaagttttgcacctctgaggggaattcctgataagtctgaagatactgaatggtcttctcgaccatcggaagttagtgaagctttattccaggctactgcagaagtagcttcagacttagcaagcagtcgctttagtgtatctcagcacccgcttataggcagcacagctgttgggtctcagtgcccttttttaccttctgaacaagggaataatgaagagactatttcgtctgttgatgaactgaaaattcccaaagactgtgatcgttatgatgatctttgttcatatatgtcatggaagacacgaaaagatacacagtggcctgaaaacaatttagctgataaagatcaagtttcagttgcaacttcatttgacataactgatgaaaacatagctactaaaagaagtgaccattttgatgctgctcgttcatatgggcagtattggacacaggaagattcatctaagcaggcagaaacatatttaaccaagggcctgcaggggaaggttgagtctgacgtcattactctggatggcctaaatgaaaatgctgttgtatgcagtgaaagagttgctgaactacaaagaaagccaacaagagagtcggaatatcactcttcagatctcagaatgttgaggatgtctcctgacactgtgccaaaggctcctaaacatttaaaagcaggagacacttctaaaggaggcatagctaaagttactcaatccaacttgaagtcaggcatcactaccactcctgttgattcagacattggatctcatttatccttgtcccttgaggacctgtctcagttggctgtaagttctcctctagaaactactactggtcaacacactgatactctcaaccaaaagacattagcagatactcatctaactgaagagactctgaaagtcacagctattcctgaaccagctgaccagaagactgcaacaccaacagtactctctagttcccactcacatagggggaagcccagcattttctaccagcagggcttgccagacagtcatctaactgaagaggctttgaaagtttcagctgctcctggactagctgaccagacaactggcatgtcaactctaacctctacttcctactcacatagagagaagcctggtactttttaccaacaagagttaccagagagtaacttaaccgaagagcctttggaagtttcagctgctcctggcccagtggagcagaagacgggaatacctacagtatcctctacatcccactcacatgtagaggacctcctctttttctatcgacagaccttgccagatggtcatctaactgatcaggctctgaaagtctcagctgtgtctggaccagctgaccagaagactgggacagcaacagtactctctactccccactcacatagagagaagcctggtattttttaccaacaagagttcgcagacagtcatcaaactgaagagactcttactaaagtttcagccactcctggaccagctgaccagaagactgagataccagcagtacagtctagttcttactcacaaagagaaaagcctagtattttgtacccacaggacttagcagacagtcatctacctgaagagggtctgaaagtttcagctgttgctggaccagctgaccagaagactggcctaccaacagtaccctctagtgcatactcacacagagagaagctccttgttttctaccaacaggccttgctggacagccatctacccgaagaggctctgaaagtttcagctgtttctggaccagctgacggaaagactgggacaccagctgtaacctctacttcctctgcgtcctcttcacttggagaaaagcccagtgctttctatcagcagaccttacccaatagtcatctaactgaagaggctctgaaagtatcaattgttcctggaccaggtgatcagaagactgggataccctcagcaccatctagtttctactcacacagagagaagcccattattttttcccagcagaccctgccagactttcttttccctgaagaagctctgaaggtttcagctgtttctgtattggctgcccagaagactgggacaccaacagtgtcctctaattctcactcacatagcgagaaatctagtgttttctaccagcaagagttgccagacagtgatctacctagagaatctctgaaaatgtctgctattcctggactgactgaccagaagactgtcccaacaccaacagtaccttcaggttccttctcacatagagagaagcccagtattttctatcaacaggagtggccagatagttatgcaactgaaaaggctctgaaagtttcaactggccctggaccagctgaccagaagactgagataccagcagtacagtctagttcttacccacagagggagaagcctagtgttttgtacccacaggtgttatcagacagtcatctacctgaagagagtctgaaagtttcagccttccctggaccagctgaccagatgactgacacaccagcagtaccgtctactttctactcacaaagagagaagcctggtattttctaccaacagaccttgccagagagtcatctgcctaaagaggctctgaaaatttcagtagctcctggactagcagaccagaagactggcacaccaactgtaacctcaacttcctactcacaacatagagaaaagcccagcattttccaccagcaggccttgccaggtactcatatacctgaagaggctcagaaagtttcagctgttactggaccaggtaaccagaagacttggataccaagagtactttctaccttctactcacaaagagagaaacctggtattttctatcaacagaccttgccaggtagtcacatacctgaagaggcacagaaagtttcacctgttcttggaccagctgaccagaagactgggacaccaactccaacctctgcttcttactcacacacagagaagcctggtattttctaccaacaggtcttgccagataatcatccaactgaagaggctctgaaaatttcagttgcctctgaaccagttgaccagacaactggcacaccagctgtaacctctacttcctactcacaatatagagagaagcccagcattttctaccaacagtcgttgccaagtagtcatctaactgaagaggctaagaatgtttcagcggttcctggaccagctgaccagaagactgtgataccaattttaccctctactttctactcacacacagagaagcctggtgttttctaccaacaggtcttgccacatagtcatccaactgaagaggctctgaaaatttcagttgcctctgaaccagttgaccagacaactggcacaccaactgtaacctctacttcttactcacaacatacagagaagccgagtattttctaccaacagtcgttgccaggtagtcatctaactgaagaggctaagaacgtttcagcggttcctggaccaggtgaccggaagactgggataccaactttaccctctactttctactcacacacagagaagcctggtagtttctaccaacaggtcttgccacatagtcatctacctgaagaggctttggaagtttcagttgctcctggaccagttgaccagacgattggcacaccaactgtaacctccccttccagctcatttggagagaagcccattgttatctacaaacaggcctttccagagggtcatctacctgaagagtctctgaaagtttcagttgctcctggaccagttggccagacaactggcgcaccaactataacctctccttcctactcacaacatagagcaaagtctggcagtttctaccaactggcattgctaggtagtcaaatacctgaagaggctctcagagtttcttctgctcctggaccagctgaccagacaactggcataccaaccataacctctacttcctactcatttggagagaagccgattgttaactacaaacaggcctttccagatggtcatctacctgaagaggctctgaaagtttccattgtttctggacctactgaaaaaaagactgacataccagcaggacctttaggttccagtgcacttggagagaagcccattactttctaccggcaggctctgctagacagtcctctaaataaagaggttgtgaaagtttcagctgctcctggaccagctgaccagaagactgagacattaccagtacattctactagctactcaaatagggggaagcctgtcattttctaccagcagaccctatcagacagtcatttacctgaagaagctctgaaagttccacctgttcctggaccagatgcccagaagactgagacaccatcagtatcctctagtttatactcatatagagagaagcccattgtcttctaccaacaggccctgccagacagtgagctaactcaagaagctctgaaagtttcagctgttcctcaaccagctgaccagaagactgggttatctactgtaacttcctctttctattcacatacagagaagcctaatatttcttaccagcaagagttgccagatagtcatctaactgaagaggctctgaaagtttcaaatgttcctggaccagctgaccagaagactggggtatcaacagtaacctctacttcctactcacacagagagaagcccattgtttcctaccagcgagagttgccgcattttactgaagcaggtttgaaaattttaagagttcctggaccagctgaccagaagactggaataaacatcctgccctctaattcctacccacagagagagcactctgtcatttcttatgagcaggagttgccagatcttactgaagtaactttgaaagcaataggggttcctgggcctgctgaccagaagactgggatacaaatagcatcctctagttcctactcaaatagagagaaggccagtatttttcatcagcaggagttgccagatgttactgaagaagctttaaatgtttttgttgttcctggacaaggtgaccggaagactgagataccaacagtacctttaagttactactcacgtagagagaagcccagtgttatctctcaacaggagttgccagacagtcatctcacagaagaggctctgaaagtttcacctgtttctataccagcagagcagaagactgggataccaataggactgtctagttcctactcacattcacataaagagaaactcaagatttcaactgtgcatataccagatgaccagaaaactgagtttccagcagctacccttagttcctactcacaaatagagaagcccaagatttcaactgtgattggaccaaatgaccagaagactccatcccagacagcttttcatagttcctattctcaaacagtaaagcccaatattttatttcaacagcagttgccagatagagatcaaagtaaaggtattctaaagatttcagctgtccctgaactaactgatgtgaatactggaaaaccagtatctctctctagttcttattttcacagagagaaatcgaatattttcagtccacaggaattgccaggtagtcatgtaactgaagatgtgctgaaggtttcaacaattcctggaccagctggccagaaaacagtattaccaacagctcttcctagttccttttcacatcgagagaaaccagatattttctatcaaaaggatttgccagatagacatctaactgaagatgctctaaagatctcaagtgctcttgggcaagctgatcaaattaccggattacaaacagttccctctggtacttactcacatggtgagaatcacaagcttgtttcagaacatgtccaaaggctaatagataatttgaattcttctgactccagtgttagctcaaataatgtgcttttaaattctcaggctgatgacagagttgtaataaataaaccagaatctgcaggttttagagatgttggctctgaagaaatccaggatgcagaaaatagtgctaaaactcttaaggaaattcggacacttttgatggaggcagaaaatatggcactgaaacgatgcaattttcctgctccccttgcccgtttcagagatattagtgatatttcatttatacaatctaagaaggtggtttgcttcaaagaaccctcttccacgggtgtatctaatggtgatttgcttcacagacagccattcacagaggaaagcccaagcagcaggtgcatacagaaggatattggcacacagacgaatttgaaatgccggagaggcattgaaaattgggagtttattagttcaactacagttagaagtcctctacaggaagcagagagcaaagtcagtatggcattagaagaaactcttaggcaatatcaagcagccaaatctgtaatgaggtctgaacctgaagggtgtagtggaaccattgggaataaaattattatccctatgatgactgtcataaaaagtgattcaagtagtgatgccagtgatggaaatggttcctgctcgtgggacagtaatttaccagagtctttggaatcagtttctgatgttcttctaaacttctttccatatgtttcacccaagacaagtataacagatagcagggaggaagagggtgtgtcagagagtgaggatggtggtggtagcagtgtagattcactggctgcacatgtgaaaaaccttctgcaatgtgaatcctcactgaatcatgctaaagaaatactcagaaatgcagaggaagaggaaagccgggtacgagcacatgcctggaatatgaagttcaatttagcacatgattgtggatactccatttcagaattaaatgaagatgacaggaggaaagtagaagagatcaaggcagagttatttggtcatggaagaacaactgacttgtccaagggtttacagagtccacggggaatgggatgcaagccagaagctgtatgtagtcacattattattgagagccatgaaaagggatgtttccggactctaacttctgaacatccacaactagatagacacccttgtgctttcagatctgctggaccctcagaaatgaccagaggacggcagaacccatcatcatgcagagccaagcatgtcaacctttctgcatccttagaccagaacaactcccatttcaaagtttggaattccttgcagttaaaaagtcattccccatttcagaactttatacctgatgaattcaaaatcagcaaaggtcttcgaatgccattcgatgaaaagatggacccttggctgtcagaattagtagaacctgcttttgtgccacctaaagaagtggattttcattcttcatcacaaatgccgtccccagaacccatgaaaaagtttactacctccatcactttttcatctcaccgacattctaaatgcatttccaattcctctgttgttaaggttggtgttactgaaggtagccagtgtactggagcatctgtgggggtatttaattctcatttcactgaagaacaaaatcctcccagagatcttaaacagaaaacctcttccccttcatcatttaaaatgcatagtaattcacaagataaagaagtgactattttagcagaaggtagaaggcaaagccaaaaattacctgttgattttgagcgttcttttcaagaagaaaaacccttagaaagatcagattttacaggcagtcattctgagcccagtaccagggcaaattgtagcaatttcaaggaaattcagatttctgataaccatacccttattagcatgggcagaccaagttccaccctaggagtaaacagatcgagttccagactaggagtaaaagagaagaatgtaactataactccagatcttccttcttgcatttttcttgaacaacgagagctctttgaacaaagcaaagccccacgtgcagatgaccatgtgaggaaacaccattctccctctcctcaacatcaggattatgtagctccagaccttccttcttgcatttttcttgaacaacgagaactctttgaacagtgcaaagccccatatgtagatcatcaaatgagagaaaaccattctccccttcctcaaggtcaggattctatagcttcagaccttccgtctcccatttctcttgaacaatgccaaagcaaagcgccaggtgtagatgaccaaatgaataaacaccattttccccttcctcaaggtcaggattgtgtagtggaaaagaataatcaacataagcctaaatcacacatttctaatataaatgttgaagccaagttcaatactgtggtctcccagtcagccccaaatcactgtacattagcagcatctgcatctactcctccttcaaatagaaaagcactttcttgtgttcatataactctttgtcccaagacttcttccaagttggatagtggaactttagatgaaagattccattcattggatgctgcttctaaagcgaggatgaatagtgagtttaactttgacttacatactgtatcttcgagatcactggaaccaacctccaaattattgaccagtaaacctgtagcacaggatcaagaatctttaggttttctaggacctaaatcttcactggatttccaagtcgtacagccttctcttccagacagtaacactattactcaggacttgaaaaccataccttctcagaatagccagatagtaacctccaggcaaatacaagtgaacatttcagatttcgaaggacattccaatccagaggggaccccagtatttgcagatcgattaccagagaagatgaagaccccactttctgctttctctgaaaaattgtcatctgatgcagtcactcagataacaacagaaagtccagaaaagaccctattttcatctgagatttttattaatgctgaagatcgtggacatgaaattatagagcctggtaaccagaagctacgcaaagctcctgtcaagtttgcctcatcatcttcagtccaacaggttactttttctcgcggcacagatggccagcctttattattgccatataagccttctggtagtaccaagatgtattatgttccacaattaagacaaattcctccatctccggattccaaatcagataccaccgttgaaagctcccattcaggatccaatgatgccattgctccagacttcccagctcaggtgctaggcacaagagatgatgacctctcagccactgttaacattaaacataaagaaggaatctacagtaagagggtagtgactaaggcatccttgccagtgggagaaaaacccttgcagaatgaaaatgcagatgcctcagttcaagtgctaatcactggggatgagaacctctcagacaaaaaacagcaagagattcacagtacaagggcagtgactgaggctgcccaggctaaagaaaaagaatctttgcagaaagatactgcagattccagtgctgctgctgctgcagagcactcagctcaagtaggagacccagaaatgaagaacttgccagacactaaagccattacacagaaagaggagatccataggaagaagacagttcccgaggaagcctggccaaacaataaagaatccctacagatcaatattgaagagtccgaatgtcattcagaatttgaaaatactacccgttctgtcttcaggtcagcaaagttttacattcatcatcccgtacacctaccaagtgatcaagatatttgccatgaatctttgggaaagagtgttttcatgagacattcttggaaagatttctttcagcatcatccagacaaacatagagaacacatgtgtcttcctcttccttatcaaaacatggacaagactaagacagattataccagaataaagagcctcagcatcaatgtgaatttgggaaacaaagaagtgatggatactactaaaagtcaagttagagattatccaaaacataatggacaaattagtgatccacaaagggatcagaaggtcaccccagagcaaacaactcagcacactgtgagtttgaatgaactgtggaacaagtatcgggagcgacagaggcaacagagacagcctgagttgggtgacaggaaagaactgtccttggtggaccgacttgatcgtttggctaaaattcttcagaatccaatcacacattctctccaggtctcagaaagtacacatgatgatagcagaggggaacgaagtgtgaaggaatggagtggtagacaacagcagagaaataagcttcagaaaaagaagcggtttaaaagcctagagaaaagccataaaaatacaggcgagcttaaaaaaagcaaggtgctttctcatcatcgagctgggaggtctaatcaaattaaaattgaacagattaaatttgataaatatattctgagtaaacagccaggttttaattatataagcaacacttcttcggattgtcggccctcagaggagagtgagctgctcacagatactaccaccaacatcctttccggcaccacttctactgtcgaatcagatatattgacccaaacagatagagaggtggctctgcacgaaaggagtagctctgtttccactattgacactgcccggctgattcaagcttttggccatgaaagagtatgcttgtcacccagacgaattaaattatatagcagcatcaccaaccaacagaggagataccttgagaagcggagcaaacacagcaagaaagtgctgaatacaggtcatcccctagtgacttctgagcacaccagaaggagacacatccaggtacatggctacagattccatctggcaatgtgactgccctcttcatggactttttagttaagctttgcacacaggtgaaaaaaacaagccatttgccctttcctctctataccatttcttaccaactggaaaagagtgagaaagtgtagtaca

SEQ ID NO: 106789 - DNA, 12925 bp, Homo sapiens
  Payload ID: 968
  Gene Symbol: ALMS1
  Gene Name: Alstrom syndrome protein 1
  ENST ID: ENST00000613296
  CDS Start-End: 112-12618
aggcgggcggcactgcgcctaagctgggccacaaccgccagtcagggctctccccttcccctccctccccccctcctcctcctcctctgccgcccagagcgagacaccaacatggagcccgaggatctgccatggccgggcgagctggaggaggaggaggaggaggaggaggaggaggaggaggaagaggaggaggctgcagcggcggcggcggcgaacgtggacgacgtagtggtcgtggaggaggtggaggaagaggcggggcgggagttggactccgactctcactacgggccccagcatctggaaagtatagacgacgaggaggacgaggaggccaaggcctggctgcaggcgcaccccggcaggattttgcctccgctgtcgcccccgcagcaccgctactcggagggcgagcggacctccctggagaagattgttccattgacctgtcatgtatggcaacagatagtatatcaaggcaatagtagaacacaaatttctgatactaatgtggtctgtttggaaacaacagctcagcggggttctggggatgatcagaaaacagaatcttggcattgtcttcctcaagaaatggactcttcccaaaccttggatacatcccagactaggtttaatgtgagaacggaagatactgaagtgacagacttcccctctctggaggagggcatattgacgcaatcagaaaatcaagtaaaggaacccaacagagatctcttctgttctccactgctagtcatacaagatagctttgcttctcctgatttgcctttgctgacctgtttgacacaagaccaagaatttgcgcctgattctttatttcatcaaagtgaactaagttttgcacctctgaggggaattcctgataagtctgaagatactgaatggtcttctcgaccatcggaagttagtgaagctttattccaggctactgcagaagtagcttcagacttagcaagcagtcgctttagtgtatctcagcacccgcttataggcagcacagctgttgggtctcagtgcccttttttaccttctgaacaagggaataatgaagagactatttcgtctgttgatgaactgaaaattcccaaagactgtgatcgttatgatgatctttgttcatatatgtcatggaagacacgaaaagatacacagtggcctgaaaacaatttagctgataaagatcaagtttcagttgcaacttcatttgacataactgatgaaaacatagctactaaaagaagtgaccattttgatgctgctcgttcatatgggcagtattggacacaggaagattcatctaagcaggcagaaacatatttaaccaagggcctgcaggggaaggttgagtctgacgtcattactctggatggcctaaatgaaaatgctgttgtatgcagtgaaagagttgctgaactacaaagaaagccaacaagagagtcggaatatcactcttcagatctcagaatgttgaggatgtctcctgacactgtgccaaaggctcctaaacatttaaaagcaggagacacttctaaaggaggcatagctaaagttactcaatccaacttgaagtcaggcatcactaccactcctgttgattcagacattggatctcatttatccttgtcccttgaggacctgtctcagttggctgtaagttctcctctagaaactactactggtcaacacactgatactctcaaccaaaagacattagcagatactcatctaactgaagagactctgaaagtcacagctattcctgaaccagctgaccagaagactgcaacaccaacagtactctctagttcccactcacatagggggaagcccagcattttctaccagcagggcttgccagacagtcatctaactgaagaggctttgaaagtttcagctgctcctggactagctgaccagacaactggcatgtcaactctaacctctacttcctactcacatagagagaagcctggtactttttaccaacaagagttaccagagagtaacttaaccgaagagcctttggaagtttcagctgctcctggcccagtggagcagaagacgggaatacctacagtatcctctacatcccactcacatgtagaggacctcctctttttctatcgacagaccttgccagatggtcatctaactgatcaggctctgaaagtctcagctgtgtctggaccagctgaccagaagactgggacagcaacagtactctctactccccactcacatagagagaagcctggtattttttaccaacaagagttcgcagacagtcatcaaactgaagagactcttactaaagtttcagccactcctggaccagctgaccagaagactgagataccagcagtacagtctagttcttactcacaaagagaaaagcctagtattttgtacccacaggacttagcagacagtcatctacctgaagagggtctgaaagtttcagctgttgctggaccagctgaccagaagactggcctaccaacagtaccctctagtgcatactcacacagagagaagctccttgttttctaccaacaggccttgctggacagccatctacccgaagaggctctgaaagtttcagctgtttctggaccagctgacggaaagactgggacaccagctgtaacctctacttcctctgcgtcctcttcacttggagaaaagcccagtgctttctatcagcagaccttacccaatagtcatctaactgaagaggctctgaaagtatcaattgttcctggaccaggtgatcagaagactgggataccctcagcaccatctagtttctactcacacagagagaagcccattattttttcccagcagaccctgccagactttcttttccctgaagaagctctgaaggtttcagctgtttctgtattggctgcccagaagactgggacaccaacagtgtcctctaattctcactcacatagcgagaaatctagtgttttctaccagcaagagttgccagacagtgatctacctagagaatctctgaaaatgtctgctattcctggactgactgaccagaagactgtcccaacaccaacagtaccttcaggttccttctcacatagagagaagcccagtattttctatcaacaggagtggccagatagttatgcaactgaaaaggctctgaaagtttcaactggccctggaccagctgaccagaagactgagataccagcagtacagtctagttcttacccacagagggagaagcctagtgttttgtacccacaggtgttatcagacagtcatctacctgaagagagtctgaaagtttcagccttccctggaccagctgaccagatgactgacacaccagcagtaccgtctactttctactcacaaagagagaagcctggtattttctaccaacagaccttgccagagagtcatctgcctaaagaggctctgaaaatttcagtagctcctggactagcagaccagaagactggcacaccaactgtaacctcaacttcctactcacaacatagagaaaagcccagcattttccaccagcaggccttgccaggtactcatatacctgaagaggctcagaaagtttcagctgttactggaccaggtaaccagaagacttggataccaagagtactttctaccttctactcacaaagagagaaacctggtattttctatcaacagaccttgccaggtagtcacatacctgaagaggcacagaaagtttcacctgttcttggaccagctgaccagaagactgggacaccaactccaacctctgcttcttactcacacacagagaagcctggtattttctaccaacaggtcttgccagataatcatccaactgaagaggctctgaaaatttcagttgcctctgaaccagttgaccagacaactggcacaccagctgtaacctctacttcctactcacaatatagagagaagcccagcattttctaccaacagtcgttgccaagtagtcatctaactgaagaggctaagaatgtttcagcggttcctggaccagctgaccagaagactgtgataccaattttaccctctactttctactcacacacagagaagcctggtgttttctaccaacaggtcttgccacatagtcatccaactgaagaggctctgaaaatttcagttgcctctgaaccagttgaccagacaactggcacaccaactgtaacctctacttcttactcacaacatacagagaagccgagtattttctaccaacagtcgttgccaggtagtcatctaactgaagaggctaagaacgtttcagcggttcctggaccaggtgaccggaagactgggataccaactttaccctctactttctactcacacacagagaagcctggtagtttctaccaacaggtcttgccacatagtcatctacctgaagaggctttggaagtttcagttgctcctggaccagttgaccagacgattggcacaccaactgtaacctccccttccagctcatttggagagaagcccattgttatctacaaacaggcctttccagagggtcatctacctgaagagtctctgaaagtttcagttgctcctggaccagttggccagacaactggcgcaccaactataacctctccttcctactcacaacatagagcaaagtctggcagtttctaccaactggcattgctaggtagtcaaatacctgaagaggctctcagagtttcttctgctcctggaccagctgaccagacaactggcataccaaccataacctctacttcctactcatttggagagaagccgattgttaactacaaacaggcctttccagatggtcatctacctgaagaggctctgaaagtttccattgtttctggacctactgaaaaaaagactgacataccagcaggacctttaggttccagtgcacttggagagaagcccattactttctaccggcaggctctgctagacagtcctctaaataaagaggttgtgaaagtttcagctgctcctggaccagctgaccagaagactgagacattaccagtacattctactagctactcaaatagggggaagcctgtcattttctaccagcagaccctatcagacagtcatttacctgaagaagctctgaaagttccacctgttcctggaccagatgcccagaagactgagacaccatcagtatcctctagtttatactcatatagagagaagcccattgtcttctaccaacaggccctgccagacagtgagctaactcaagaagctctgaaagtttcagctgttcctcaaccagctgaccagaagactgggttatctactgtaacttcctctttctattcacatacagagaagcctaatatttcttaccagcaagagttgccagatagtcatctaactgaagaggctctgaaagtttcaaatgttcctggaccagctgaccagaagactggggtatcaacagtaacctctacttcctactcacacagagagaagcccattgtttcctaccagcgagagttgccgcattttactgaagcaggtttgaaaattttaagagttcctggaccagctgaccagaagactggaataaacatcctgccctctaattcctacccacagagagagcactctgtcatttcttatgagcaggagttgccagatcttactgaagtaactttgaaagcaataggggttcctgggcctgctgaccagaagactgggatacaaatagcatcctctagttcctactcaaatagagagaaggccagtatttttcatcagcaggagttgccagatgttactgaagaagctttaaatgtttttgttgttcctggacaaggtgaccggaagactgagataccaacagtacctttaagttactactcacgtagagagaagcccagtgttatctctcaacaggagttgccagacagtcatctcacagaagaggctctgaaagtttcacctgtttctataccagcagagcagaagactgggataccaataggactgtctagttcctactcacattcacataaagagaaactcaagatttcaactgtgcatataccagatgaccagaaaactgagtttccagcagctacccttagttcctactcacaaatagagaagcccaagatttcaactgtgattggaccaaatgaccagaagactccatcccagacagcttttcatagttcctattctcaaacagtaaagcccaatattttatttcaacagcagttgccagatagagatcaaagtaaaggtattctaaagatttcagctgtccctgaactaactgatgtgaatactggaaaaccagtatctctctctagttcttattttcacagagagaaatcgaatattttcagtccacaggaattgccaggtagtcatgtaactgaagatgtgctgaaggtttcaacaattcctggaccagctggccagaaaacagtattaccaacagctcttcctagttccttttcacatcgagagaaaccagatattttctatcaaaaggatttgccagatagacatctaactgaagatgctctaaagatctcaagtgctcttgggcaagctgatcaaattaccggattacaaacagttccctctggtacttactcacatggtgagaatcacaagcttgtttcagaacatgtccaaaggctaatagataatttgaattcttctgactccagtgttagctcaaataatgtgcttttaaattctcaggctgatgacagagttgtaataaataaaccagaatctgcaggttttagagatgttggctctgaagaaatccaggatgcagaaaatagtgctaaaactcttaaggaaattcggacacttttgatggaggcagaaaatatggcactgaaacgatgcaattttcctgctccccttgcccgtttcagagatattagtgatatttcatttatacaatctaagaaggtggtttgcttcaaagaaccctcttccacgggtgtatctaatggtgatttgcttcacagacagccattcacagaggaaagcccaagcagcaggtgcatacagaaggatattggcacacagacgaatttgaaatgccggagaggcattgaaaattgggagtttattagttcaactacagttagaagtcctctacaggaagcagagagcaaagtcagtatggcattagaagaaactcttaggcaatatcaagcagccaaatctgtaatgaggtctgaacctgaagggtgtagtggaaccattgggaataaaattattatccctatgatgactgtcataaaaagtgattcaagtagtgatgccagtgatggaaatggttcctgctcgtgggacagtaatttaccagagtctttggaatcagtttctgatgttcttctaaacttctttccatatgtttcacccaagacaagtataacagatagcagggaggaagagggtgtgtcagagagtgaggatggtggtggtagcagtgtagattcactggctgcacatgtgaaaaaccttctgcaatgtgaatcctcactgaatcatgctaaagaaatactcagaaatgcagaggaagaggaaagccgggtacgagcacatgcctggaatatgaagttcaatttagcacatgattgtggatactccatttcagaattaaatgaagatgacaggaggaaagtagaagagatcaaggcagagttatttggtcatggaagaacaactgacttgtccaagggtttacagagtccacggggaatgggatgcaagccagaagctgtatgtagtcacattattattgagagccatgaaaagggatgtttccggactctaacttctgaacatccacaactagatagacacccttgtgctttcagatctgctggaccctcagaaatgaccagaggacggcagaacccatcatcatgcagagccaagcatgtcaacctttctgcatccttagaccagaacaactcccatttcaaagtttggaattccttgcagttaaaaagtcattccccatttcagaactttatacctgatgaattcaaaatcagcaaaggtcttcgaatgccattcgatgaaaagatggacccttggctgtcagaattagtagaacctgcttttgtgccacctaaagaagtggattttcattcttcatcacaaatgccgtccccagaacccatgaaaaagtttactacctccatcactttttcatctcaccgacattctaaatgcatttccaattcctctgttgttaaggttggtgttactgaaggtagccagtgtactggagcatctgtgggggtatttaattctcatttcactgaagaacaaaatcctcccagagatcttaaacagaaaacctcttccccttcatcatttaaaatgcatagtaattcacaagataaagaagtgactattttagcagaaggtagaaggcaaagccaaaaattacctgttgattttgagcgttcttttcaagaagaaaaacccttagaaagatcagattttacaggcagtcattctgagcccagtaccagggcaaattgtagcaatttcaaggaaattcagatttctgataaccatacccttattagcatgggcagaccaagttccaccctaggagtaaacagatcgagttccagactaggagtaaaagagaagaatgtaactataactccagatcttccttcttgcatttttcttgaacaacgagagctctttgaacaaagcaaagccccacgtgcagatgaccatgtgaggaaacaccattctccctctcctcaacatcaggattatgtagctccagaccttccttcttgcatttttcttgaacaacgagaactctttgaacagtgcaaagccccatatgtagatcatcaaatgagagaaaaccattctccccttcctcaaggtcaggattctatagcttcagaccttccgtctcccatttctcttgaacaatgccaaagcaaagcgccaggtgtagatgaccaaatgaataaacaccattttccccttcctcaaggtcaggattgtgtagtggaaaagaataatcaacataagcctaaatcacacatttctaatataaatgttgaagccaagttcaatactgtggtctcccagtcagccccaaatcactgtacattagcagcatctgcatctactcctccttcaaatagaaaagcactttcttgtgttcatataactctttgtcccaagacttcttccaagttggatagtggaactttagatgaaagattccattcattggatgctgcttctaaagcgaggatgaatagtgagtttaactttgacttacatactgtatcttcgagatcactggaaccaacctccaaattattgaccagtaaacctgtagcacaggatcaagaatctttaggttttctaggacctaaatcttcactggatttccaagtcgtacagccttctcttccagacagtaacactattactcaggacttgaaaaccataccttctcagaatagccagatagtaacctccaggcaaatacaagtgaacatttcagatttcgaaggacattccaatccagaggggaccccagtatttgcagatcgattaccagagaagatgaagaccccactttctgctttctctgaaaaattgtcatctgatgcagtcactcagataacaacagaaagtccagaaaagaccctattttcatctgagatttttattaatgctgaagatcgtggacatgaaattatagagcctggtaaccagaagctacgcaaagctcctgtcaagtttgcctcatcatcttcagtccaacaggttactttttctcgcggcacagatggccagcctttattattgccatataagccttctggtagtaccaagatgtattatgttccacaattaagacaaattcctccatctccggattccaaatcagataccaccgttgaaagctcccattcaggatccaatgatgccattgctccagacttcccagctcaggtgctaggcacaagagatgatgacctctcagccactgttaacattaaacataaagaaggaatctacagtaagagggtagtgactaaggcatccttgccagtgggagaaaaacccttgcagaatgaaaatgcagatgcctcagttcaagtgctaatcactggggatgagaacctctcagacaaaaaacagcaagagattcacagtacaagggcagtgactgaggctgcccaggctaaagaaaaagaatctttgcagaaagatactgcagattccagtgctgctgctgctgcagagcactcagctcaagtaggagacccagaaatgaagaacttgccagacactaaagccattacacagaaagaggagatccataggaagaagacagttcccgaggaagcctggccaaacaataaagaatccctacagatcaatattgaagagtccgaatgtcattcagaatttgaaaatactacccgttctgtcttcaggtcagcaaagttttacattcatcatcccgtacacctaccaagtgatcaagatatttgccatgaatctttgggaaagagtgttttcatgagacattcttggaaagatttctttcagcatcatccagacaaacatagagaacacatgtgtcttcctcttccttatcaaaacatggacaagactaagacagattataccagaataaagagcctcagcatcaatgtgaatttgggaaacaaagaagtgatggatactactaaaagtcaagttagagattatccaaaacataatggacaaattagtgatccacaaagggatcagaaggtcaccccagagcaaacaactcagcacactgtgagtttgaatgaactgtggaacaagtatcgggagcgacagaggcaacagagacagcctgagttgggtgacaggaaagaactgtccttggtggaccgacttgatcgtttggctaaaattcttcagaatccaatcacacattctctccaggtctcagaaagtacacatgatgatagcagaggggaacgaagtgtgaaggaatggagtggtagacaacagcagagaaataagcttcagaaaaagaagcggtttaaaagcctagagaaaagccataaaaatacaggcgagcttaaaaaaagcaaggtgctttctcatcatcgagctgggaggtctaatcaaattaaaattgaacagattaaatttgataaatatattctgagtaaacagccaggttttaattatataagcaacacttcttcggattgtcggccctcagaggagagtgagctgctcacagatactaccaccaacatcctttccggcaccacttctactgtcgaatcagatatattgacccaaacagatagagaggtggctctgcacgaaaggagtagctctgtttccactattgacactgcccggctgattcaagcttttggccatgaaagagtatgcttgtcacccagacgaattaaattatatagcagcatcaccaaccaacagaggagataccttgagaagcggagcaaacacagcaagaaagtgctgaatacaggtcatcccctagtgacttctgagcacaccagaaggagacacatccaggtagcaaaccatgtgatttcttctgactctatttcctcttctgccagtagtttcctgagctcaaactctactttttgcaacaagcagaatgtacacatgttaaacaagggcatacaagcaggtaacttggagattgtgaacggtgccaaaaaacacactcgagatgttgggataactttcccaactccaagttccagcgaggctaaattggaagagaacagtgatgtgacttcttggtcagaagaaaaacgtgaagagaaaatgctctttaccggttatcctgaggacagaaagttaaaaaagaacaagaagaattcccatgaaggagtttcctggtttgttcctgtggaaaatgtggagtctagatcaaagaaggaaaacgtgcctaacacttgtggccctggcatctcctggtttgaaccaataaccaagaccagaccctggagggagccactgcgggagcagaactgtcaggggcagcacctggacggtcggggctacctggcaggcccaggcagagaggctggcagagacctactgaggccatttgtgagagcaacccttcaggaatcgcttcagtttcacagacctgacttcatctcccgctctggggagcggataaagcgcctgaagttaatagtccaggagaggaagctgcagagcatgttacagaccgagcgggatgcactattcaacattgacagggaacggcagggccaccagaatcgcatgtgcccgctgcccaagagagtcttcctggctatccagaagaacaagcctatcagcaagaaggaaatgattcagaggtccaaacggatttatgagcagcttccagaagtacagaaaaagagagaagaagagaagagaaaatcagaatataagtcataccggctgcgagcccagctatataaaaagagagtgaccaatcaacttctggggagaaaagttccctgggactgacacaagtttattttcctcagagccttggaattctattttatgaacctagagaagcagaatccttacttttgtgagtctggttgaataaagcttattctttgtccatgtgtattttagaaatagtaacttctaaagagtctggaacaaagtggtgattaaaattcctaatggtttgggagcaatactttctgcatagtggccttgtccaatggcctgtgtgttacaatgatatgatcatttctcaagaataagtccctttttgtatgtgtttttatacttttagaaaataaaaactttagattaactc

SEQ ID NO: 106790 - DNA, 1843 bp, Homo sapiens
  Payload ID: 969
  Gene Symbol: ASPSCR1
  Gene Name: alveolar soft part sarcoma chromosome region, candidate 1
  Uniprot ID: Q9BZE9
  ENST ID: ENST00000306739
  CDS Start-End: 98-1759
gctgcggccccgccccctggccgcgtggctgcgcgtcctggctgttgccgataaagttgtttgacgccggcccggcggcgggtcacgtgagcggaaaatggcggccccggcaggcggcggaggctccgcggtgtcggtgctggccccgaacggccggcgccacacggtgaaggtgacgccgagcaccgtgctgcttcaggttctggaggacacgtgccggcggcaggacttcaacccctgtgaatatgatctgaagtttcagaggagcgtgctcgacctttctctccagtggagatttgccaacctgcccaacaatgccaagctggagatggtgcccgcttcccggagccgtgaggggcctgagaacatggttcgcatcgctttgcagctggacgatggctcgaggttgcaggactctttctgttcaggccagaccctctgggagcttctcagccattttccacagatcagggagtgcctgcagcaccccggcggggccaccccagtctgcgtgtacacgagggatgaggtgacgggtgaagctgccctgcggggcacgacgctgcagtcgctgggcctgaccgggggcagcgccaccatcaggtttgtcatgaagtgctacgaccccgtgggcaagaccccaggaagcctgggctcgtcagcgtcggctggccaggcagccgccagcgctccacttcccttggaatctggggagctcagccgcggcgacttgagccgtccggaggacgcggacacctcagggccctgctgcgagcacactcaggagaagcagagcacaagggcacccgcagctgccccctttgttcctttctcgggtgggggacagagactggggggccctcctgggcccacgaggcctctgacatcatcttcagctaagttgccgaagtccctctccagccctggaggcccctccaagccaaagaagtccaagtcgggccaggatccccagcaggagcaggagcaggagcgggagcgggatccccagcaggagcaggagcgggagcggcccgtggaccgggagcccgtggaccgggagccggtggtgtgccaccccgacctggaggagcggctgcaggcctggccagcggagctgcctgatgagttctttgagctgacggtggacgacgtgagaagacgcttggcccagctcaagagtgagcggaagcgcctggaagaagcccccttggtgaccaaggccttcagggaggcgcagataaaggagaagctggagcgctacccaaaggtggctctgagggtcctgttccccgaccgctacgtcctacagggcttcttccgccccagcgagacagtgggggacttgcgagacttcgtgaggagccacctggggaaccccgagctgtcattttacctgttcatcacccctccaaaaacagtcctggacgaccacacgcagaccctctttcaggcgaacctcttcccggccgctctggtgcacttgggagccgaggagccggcaggtgtctacctggagcctggcctgctggagcatgccatctccccatctgcggccgatgtgctggtggccaggtacatgtccagggccgccgggtccccttccccattgccagcccctgaccctgcacctaagtctgagccagctgctgaggagggggcgctggtcccccctgagcccatcccagggacggcccagcccgtgaagaggagcctgggcaaggtgcccaagtggctgaagctgccggccagcaagaggtgagagctgccagcctgaggtgcccactccgccagccacaggaccacctcctctgccagcaggaataaagacttgtgcatccctcaa

SEQ ID NO: 106791 - DNA, 2123 bp, Homo sapiens
  Payload ID: 969
  Gene Symbol: ASPSCR1
  Gene Name: alveolar soft part sarcoma chromosome region, candidate 1
  Uniprot ID: Q9BZE9
  ENST ID: ENST00000306729
  CDS Start-End: 98-2041
gctgcggccccgccccctggccgcgtggctgcgcgtcctggctgttgccgataaagttgtttgacgccggcccggcggcgggtcacgtgagcggaaaatggcggccccggcaggcggcggaggctccgcggtgtcggtgctggccccgaacggccggcgccacacggtgaaggtgacgccgagcaccgtgctgcttcaggttctggaggacacgtgccggcggcaggacttcaacccctgtgaatatgatctgaagtttcagaggagcgtgctcgacctttctctccagtggagatttgccaacctgcccaacaatgccaagctggagatggtgcccgcttcccggagccgtgaggggcctgagaacatggttcgcatcgctttgcagctggacgatggctcgaggttgcaggactctttctgttcaggccagaccctctgggagcttctcagccattttccacagatcagggagtgcctgcagcaccccggcggggccaccccagtctgcgtgtacacgagggatgaggtgacgggtgaagctgccctgcggggcacgacgctgcagtcgctgggcctgaccgggggcagcgccaccatcaggtttgtcatgaagtgctacgaccccgtgggcaagaccccaggaagcctgggctcgtcagcgtcggctggccaggcagccgccagcgctccacttcccttggaatctggggagctcagccgcggcgacttgagccgtccggaggacgcggacacctcagggccctgctgcgagcacactcaggagaagcagagcacaagggcacccgcagctgccccctttgttcctttctcgggtgggggacagagactggggggccctcctgggcccacgaggcctctgacatcatcttcagctaagttgccgaagtccctctccagccctggaggcccctccaagccaaagaagtccaagtcgggccaggatccccagcaggagcaggagcaggagcgggagcgggatccccagcaggagcaggagcgggagcggcccgtggaccgggagcccgtggaccgggagccggtggtgtgccaccccgacctggaggagcggctgcaggcctggccagcggagctgcctgatgagttctttgagctgacggtggacgacgtgagaagacgcttggcccagctcaagagtgagcggaagcgcctggaagaagcccccttggtgaccaaggccttcagggaggcgcagataaaggagaagctggagcgctacccaaaggtggctctgagggtcctgttccccgaccgctacgtcctacagggcttcttccgccccagcgagacagtgggggacttgcgagacttcgtgaggagccacctggggaaccccgagctgtcattttacctgttcatcacccctccaaaaacagtcctggacgaccacacgcagaccctctttcagccccagcttggtgaccgggtggctccattcaccctgggtccctcgctgaaacggtgcctgggaccagagcagagaacacgcttgccagtggtaggagatggaggcgacgtggactctgggaggcttcttttttggggtccatccagaggccgagcctctccaagcactggtcagcctccatgccacccagtctgccgaccctcctctccaccatcccctcgtccgagcagtggcgatccctcccgagtcaaggctgggcacaagcacgtggggacaggccgggcgaacctcttcccggccgctctggtgcacttgggagccgaggagccggcaggtgtctacctggagcctggcctgctggagcatgccatctccccatctgcggccgatgtgctggtggccaggtacatgtccagggccgccgggtccccttccccattgccagcccctgaccctgcacctaagtctgagccagctgctgaggagggggcgctggtcccccctgagcccatcccagggacggcccagcccgtgaagaggagcctgggcaaggtgcccaagtggctgaagctgccggccagcaagaggtgagagctgccagcctgaggtgcccactccgccagccacaggaccacctcctctgccagcaggaataaagacttgtgcatccctc

SEQ ID NO: 106792 - DNA, 1041 bp, Homo sapiens
  Payload ID: 969
  Gene Symbol: ASPSCR1
  Gene Name: alveolar soft part sarcoma chromosome region, candidate 1
  ENST ID: ENST00000344865
  CDS Start-End: 46-222
aaagttgtttgacgccggcccggcggcgggtcacgtgagcggaaaatggcggccccggcaggcggcggaggctccgcggtgtcggtgctggccccgaacggccggcgccacacggtgaaggtgacgccgagcaccgtgctgcttcaggttctggaggacacgtgccggcggcaggacttcaacccctgtgaatatgatctgaaatgcccctgggctgtctgaactctcttcactagttgtctccgacagcagcttgcatttccaaagtttcagaggagcgtgctcgacctttctctccagtggagatttgccaacctgcccaacaatgccaagctggagatggtgcccgcttcccggagccgtgaggggcctgagaacatggttcgcatcgctttgcagctggacgatggctcgaggttgcaggactctttctgttcaggccagaccctctgggagcttctcagccattttccacagatcagggagtgcctgcagcaccccggcggggccaccccagtctgcgtgtacacgagggatgaggtgacgggtgaagctgccctgcggggcacgacgctgcagtcgctgggcctgaccgggggcagcgccaccatcaggtttgtcatgaagtgctacgaccccgtgggcaagaccccaggaagcctgggctcgtcagcgtcggctggccaggcagccgccagcgctccacttcccttggaatctggggagctcagccgcggcgacttgagccgtccggaggacgcggacacctcagggccctgctgcgagcacactcaggagaagcagagcacaagggcacccgcagctgccccctttgttcctttctcgggtgggggacagagactggggggccctcctgggcccacgaggcctctgacatcatcttcagctaagttgccgaagtccctctccagccctggaggcccctccaagccaaagaagtccaagtcgggccaggatccccagcaggagcaggagcaggagcgggagcgggatccccagcaggagcaggagcgggagcgg

SEQ ID NO: 106793 - DNA, 539 bp, Homo sapiens
  Payload ID: 969
  Gene Symbol: ASPSCR1
  Gene Name: alveolar soft part sarcoma chromosome region, candidate 1
  ENST ID: ENST00000583744
  CDS Start-End: 1-539
agggtcctgttccccgaccgctacgtcctacagggcttcttccgccccagcgagacagtgggggacttgcgagacttcgtgaggagccacctggggaaccccgagctgtcattttacctgttcatcacccctccaaaaacagtcctggacgaccacacgcagaccctctttcaggcgaacctcttcccggccgctctggtgcacttgggagccgaggagccggcaggtgtctacctggagcctggcctgctggagcatgccatctccccatctgcggccgatgtgctggtggccaggtacatgtccagggccgccgggtccccttccccattgccagcccctgaccctgcacctaagtctgagccagctgctgaggagggggcgctggtcccccctgagcccatcccagggacggcccagcccgtgaagaggagcctgggcaagccagcaagaggtgagagctgccagcctgaggtgcccactccgccagccacaggaccacctcctctgccagcaggaataaagacttgtgcatccct

SEQ ID NO: 106794 - DNA, 564 bp, Homo sapiens
  Payload ID: 969
  Gene Symbol: ASPSCR1
  Gene Name: alveolar soft part sarcoma chromosome region, candidate 1
  ENST ID: ENST00000579684
  CDS Start-End: 1-564
ggcgccacacggtgaaggtgacgccgagcaccgtgctgcttcaggttctggaggacacgtgccggcggcaggacttcaacccctgtgaatatgatctgaagtttcagaggagcgtgctcgacctttctctccagtggagatttgccaacctgcccaacaatgccaagctggagatggtgcccgcttcccggagccgtgaggggcctgagaacatggttcgcatcgctttgcagctggacgatggctcgaggttgcaggactctttctgttcaggccagaccctctgggagcttctcagccattttccacagatcagggagtgcctgcagcaccccggcggggccaccccagtctgcgtgtacacgagggatgagccgtctccagggcagtggcgggagactcgggctcttgaaagcacgacgtgtttcatggaaaaagagggagtggccggccctcggagcccgggctgccccgaaacctccctcggcgccctgtttgttttttcagcttctctcaaagcccaagagtcacaaaagtggtttcatttaataaatatttgctttg

SEQ ID NO: 106795 - DNA, 1246 bp, Homo sapiens
  Payload ID: 969
  Gene Symbol: ASPSCR1
  Gene Name: alveolar soft part sarcoma chromosome region, candidate 1
  ENST ID: ENST00000582355
  CDS Start-End: 188-1246
ctgtcctgaggctgtggccctcagggacccttacaccctttggcttttgtgctgggccattgactgtgccctcgctagaggcagcttctccaccccttcctcacaggtgacgggtgaagctgccctgcggggcacgacgctgcagtcgctgggcctgaccgggggcagcgccaccatcaggtttgtcatgaagtgctacgaccccgtgggcaagaccccaggaagcctgggctcgtcagcgtcggctggccaggcagccgccagcgctccacttcccttggaatctggggagctcagccgcggcgacttgagccgtccggaggacgcggacacctcagggccctgctgcgagcacactcaggagaagcagagcacaagggcacccgcagctgccccctttgttcctttctcgggtgggggacagagactggggggccctcctgggcccacgaggcctctgacatcatcttcagctaagttgccgaagtccctctccagccctggaggcccctccaagccaaagaagtccaagtcgggccaggatccccagcaggagcaggagcaggagcgggagcgggatccccagcaggagcaggagcgggagcggcccgtggaccgggagcccgtggaccgggagccggtggtgtgccaccccgacctggaggagcggctgcaggcctggccagcggagctgcctgatgagttctttgagctgacggtggacgacgtgagaagacgcttggcccagctcaagagtgagcggaagcgcctggaagaagcccccttggtgaccaaggccttcagggaggcgcagataaaggagaagctggagcgctacccaaaggtggctctgagggtcctgttccccgaccgctacgtcctacagggcttcttccgccccagcgagacagtgggggacttgcgagacttcgtgaggagccacctggggaaccccgagctgtcattttacctgttcatcacccctccaaaaacagtcctggacgaccacacgcagaccctctttcaggcgaacctcttcccggccgctctggtgcacttgggagccgaggagccggcaggtgtctacctggagcctggcctgctggagcatgccatctccccatctgcggccgatgtgctggtggccaggtacatgtccagggccgccgggtccccttccccattgccagcccctgaccctgcacctaagtctgagccagctgctgaggagggggcgctggtcccc

SEQ ID NO: 106796 - DNA, 1776 bp, Homo sapiens
  Payload ID: 969
  Gene Symbol: ASPSCR1
  Gene Name: alveolar soft part sarcoma chromosome region, candidate 1
  Uniprot ID: Q9BZE9
  ENST ID: ENST00000580534
  CDS Start-End: 189-1694
acgtgagcggaaaatggcggccccggcaggcggcggaggctccgcggtgtcggtgctggccccgaacggccggcgccacacggtgaaggtgacgccgagcaccgtgctgcttcaggtttcagaggagcgtgctcgacctttctctccagtggagatttgccaacctgcccaacaatgccaagctggagatggtgcccgcttcccggagccgtgaggggcctgagaacatggttcgcatcgctttgcagctggacgatggctcgaggttgcaggactctttctgttcaggccagaccctctgggagcttctcagccattttccacagatcagggagtgcctgcagcaccccggcggggccaccccagtctgcgtgtacacgagggatgaggtgacgggtgaagctgccctgcggggcacgacgctgcagtcgctgggcctgaccgggggcagcgccaccatcaggtttgtcatgaagtgctacgaccccgtgggcaagaccccaggaagcctgggctcgtcagcgtcggctggccaggcagccgccagcgctccacttcccttggaatctggggagctcagccgcggcgacttgagccgtccggaggacgcggacacctcagggccctgctgcgagcacactcaggagaagcagagcacaagggcacccgcagctgccccctttgttcctttctcgggtgggggacagagactggggggccctcctgggcccacgaggcctctgacatcatcttcagctaagttgccgaagtccctctccagccctggaggcccctccaagccaaagaagtccaagtcgggccaggatccccagcaggagcaggagcaggagcgggagcgggatccccagcaggagcaggagcgggagcggcccgtggaccgggagcccgtggaccgggagccggtggtgtgccaccccgacctggaggagcggctgcaggcctggccagcggagctgcctgatgagttctttgagctgacggtggacgacgtgagaagacgcttggcccagctcaagagtgagcggaagcgcctggaagaagcccccttggtgaccaaggccttcagggaggcgcagataaaggagaagctggagcgctacccaaaggtggctctgagggtcctgttccccgaccgctacgtcctacagggcttcttccgccccagcgagacagtgggggacttgcgagacttcgtgaggagccacctggggaaccccgagctgtcattttacctgtgcctgtcttccttcgggcgcatggatgggcgaggtccacggtgcttcctaacacgtaggtgccttctctcctcagtcatcacccctccaaaaacagtcctggacgaccacacgcagaccctctttcaggcgaacctcttcccggccgctctggtgcacttgggagccgaggagccggcaggtgtctacctggagcctggcctgctggagcatgccatctccccatctgcggccgatgtgctggtggccaggtacatgtccagggccgccgggtccccttccccattgccagcccctgaccctgcacctaagtctgagccagctgctgaggagggggcgctggtcccccctgagcccatcccagggacggcccagcccgtgaagaggagcctgggcaaggtgcccaagtggctgaagctgccggccagcaagaggtgagagctgccagcctgaggtgcccactccgccagccacaggaccacctcctctgccagcaggaataaagacttgtgcatccctc

SEQ ID NO: 106797 - DNA, 1001 bp, Homo sapiens
  Payload ID: 969
  Gene Symbol: ASPSCR1
  Gene Name: alveolar soft part sarcoma chromosome region, candidate 1
  ENST ID: ENST00000581484
  CDS Start-End: 81-1001
gctgcgagtcaggagggcagctccttctggaagcctggagctggtgaggccaggtgctttccctgctgcggtggctggcgatgggagtgtttcctgaggctgccaccaagcccctcctcagcatgggttggtgcgggaagtccttgagtgcctgtgggtcggcaggagctccggttctggaggacacgtgccggcggcaggacttcaacccctgtgaatatgatctgaagtttcagaggagcgtgctcgacctttctctccagtggagatttgccaacctgcccaacaatgccaagctggagatggtgcccgcttcccggagccgtgaggggcctgagaacatggttcgcatcgctttgcagctggacgatggctcgaggttgcaggactctttctgttcaggccagaccctctgggagcttctcagccattttccacagatcagggagtgcctgcagcaccccggcggggccaccccagtctgcgtgtacacgagggatgaggtgacgggtgaagctgccctgcggggcacgacgctgcagtcgctgggcctgaccgggggcagcgccaccatcaggtttgtcatgaagtgctacgaccccgtgggcaagaccccaggaagcctgggctcgtcagcgtcggctggccaggcagccgccagcgctccacttcccttggaatctggggagctcagccgcggcgacttgagccgtccggaggacgcggacacctcagggccctgctgcgagcacactcaggagaagcagagcacaagggcacccgcagctgccccctttgttcctttctcgggtgggggacagagactggggggccctcctgggcccacgaggcctctgacatcatcttcagctaagttgccgaagtccctctccagccctggaggcccctccaagccaaagaagtccaagtcgggccaggatccccagcaggagcaggagcaggagcgggagcgggatccccagcaggagcaggagcgggag

SEQ ID NO: 106798 - DNA, 1035 bp, Homo sapiens
  Payload ID: 969
  Gene Symbol: ASPSCR1
  Gene Name: alveolar soft part sarcoma chromosome region, candidate 1
  ENST ID: ENST00000582019
  CDS Start-End: 1022-1035
cgtcacctgcgcttccgctggggtcccgggggtcccgggggtcccgagtgggggcggggcggtggcgagccttcccaggggtgaggtagaacggcgccgcgtgtcacccgcatcgagtactcggcgcccggccgagcccagctcgcgagggcgccgggaagagggaggagtggagccctagacccgcgttcccattccggggcgtcccccggagcgggagcccgggttgcgcggtggcagatgtcccggccgtggggcctggaagcgatttttgccgagtcactcactgcacttttacttgggcaccttgtgaccgcgaatcaattaaatgtaaaagtattggctgggcgcggtggctcacgcctgtaaatcccagcactgtgggatgccgaggcgggtggatcacgaggtcaagagatcaagaccatcctggctaaaacggtgaaaccccgtctgtactaaaaaaatacaaaaaaatttagccgggcgtggtggcgggcgcctgtagtcccagctactcgggaggctgaggcaggagaatggcgtgaacctgggaggcagagcttgcagtgagccgagatcgcgctactgcactccagcctgggagacagagcgagactccatatcaaaaaaaaaaaaaaaaagtatttattgagcctctgctgcgtgggggaccgtgaggatccgaaggtgcacacgactcggagtttgcgggagcagcccacggcgtggggtccccaggcctgggcaggtggagggcgcagccaggaggctgttggtgccaggcgtgcagagtgcggaagtggggcgctcccgcagaggctgcgcgggaccccttggtgcaaggccacggctttggctttttatggagaagaggggcggaggcggtgcaggcagtggcagcaggttctggaggacacgtgccggcggcaggacttcaacccctgtgaatatgatctgaagtttcagaggagcgtgctcgacctttctctccagtggagatttgccaacctgcccaacaatgccaagctggag

SEQ ID NO: 106799 - DNA, 1919 bp, Homo sapiens
  Payload ID: 969
  Gene Symbol: ASPSCR1
  Gene Name: alveolar soft part sarcoma chromosome region, candidate 1
  ENST ID: ENST00000584454
  CDS Start-End: 284-1696
tgcacttttacttgggcaccttgtgaccgcgaatcaattaaatgtaaaagtattggctgggcgcggtggctcacgcctgtaaatcccagcactgtgggatgccgaggcgggtggatcacgaggtcaagagatcaagaccatcctggctaaaacggttctggaggacacgtgccggcggcaggacttcaacccctgtgaatatgatctgaagtttcagaggagcgtgctcgacctttctctccagtggagatttgccaacctgcccaacaatgccaagctggagatggtgcccgcttcccggagccgtgaggggcctgagaacatggttcgcatcgctttgcagctggacgatggctcgaggttgcaggactctttctgttcaggccagaccctctgggagcttctcagccattttccacagatcagggagtgcctgcagcaccccggcggggccaccccagtctgcgtgtacacgagggatgaggtgacgggtgaagctgccctgcggggcacgacgctgcagtcgctgggcctgaccgggggcagcgccaccatcaggtttgtcatgaagtgctacgaccccgtgggcaagaccccaggaagcctgggctcgtcagcgtcggctggccaggcagccgccagcgctccacttcccttggaatctggggagctcagccgcggcgacttgagccgtccggaggacgcggacacctcagggccctgctgcgagcacactcaggagaagcagagcacaagggcacccgcagctgccccctttgttcctttctcgggtgggggacagagactggggggccctcctgggcccacgaggcctctgacatcatcttcagctaagttgccgaagtccctctccagccctggaggcccctccaagccaaagaagtccaagtcgggccaggatccccagcaggagcaggagcaggagcgggagcgggatccccagcaggagcaggagcgggagcggcccgtggaccgggagcccgtggaccgggagccggtggtgtgccaccccgacctggaggagcggctgcaggcctggccagcggagctgcctgatgagttctttgagctgacggtggacgacgtgagaagacgcttggcccagctcaagagtgagcggaagcgcctggaagaagcccccttggtgaccaaggccttcagggaggcgcagataaaggagaagctggagcgctacccaaagacggagtctctctctgtcgcccaggctggagtcagtggtgccatctcagctcactgcaagctccgcctcccgggttcaagtggttctcctgcctcagcctcccaagtagctgggatttcaggtggctctgagggtcctgttccccgaccgctacgtcctacagggcttcttccgccccagcgagacagtgggggacttgcgagacttcgtgaggagccacctggggaaccccgagctgtcattttacctgttcatcacccctccaaaaacagtcctggacgaccacacgcagaccctctttcaggcgaacctcttcccggccgctctggtgcacttgggagccgaggagccggcaggtgtctacctggagcctggcctgctggagcatgccatctccccatctgcggccgatgtgctggtggccaggtacatgtccagggccgccgggtccccttccccattgccagcccctgaccctgcacctaagtctgagccagctgctgaggagggggcgctggtcccccctgagcccatcccagggacggcccagcccgtgaagaggagcctgggcaaggtgcccaagtggctgaagctgccggccagcaagaggtgagagctgccagcctgaggtgcccactccgccagccacaggaccacctcctctgccagcaggaataaagacttgtgcatccctcaa

SEQ ID NO: 106800 - DNA, 641 bp, Homo sapiens
  Payload ID: 969
  Gene Symbol: ASPSCR1
  Gene Name: alveolar soft part sarcoma chromosome region, candidate 1
  ENST ID: ENST00000583503
  CDS Start-End: 7-489
cggaaaatggcggccccggcaggcggcggaggctccgcggtgtcggtgctggccccgaacggccggcgccacacggtgaaggtgacgccgagcaccgtgctgcttcaggttctggaggacacgtgccggcggcaggacttcaacccctgtgaatatgatctgaagtttcagaggagcgtgctcgacctttctctccagtggagatttgccaacctgcccaacaatgccaagctggagatggtgcccgcttcccggagccgtgaggggcctgagaacatggttcgcatcgctttgcagctggacgatggctcgaggttgcaggactctttctgttcaggccagaccctctgggagcttctcagccattttccacagatcagcccgtggaccgggagcccgtggaccgggagccggtggtgtgccaccccgacctggaggagcggctgcaggcctggccagcggagctgcctgatgagttctttgagctgacggtggacgacgtgagaagacgcttggcccagctcaagagtgagcggaagcgcctggaagaagcccccttggtgaccaaggccttcagggaggcgcagataaaggagaagctggagcgctacccaaaggtggctctgagggtcctgttcccc

SEQ ID NO: 106801 - DNA, 720 bp, Homo sapiens
  Payload ID: 969
  Gene Symbol: ASPSCR1
  Gene Name: alveolar soft part sarcoma chromosome region, candidate 1
  ENST ID: ENST00000581647
  CDS Start-End: 17-565
gtcacgtgagcggaaaatggcggccccggcaggcggcggaggctccgcggtgtcggtgctggccccgaacggccggcgccacacggtgaaggtgacgccgagcaccgtgctgcttcaggttctggaggacacgtgccggcggcaggacttcaacccctgtgaatatgatctgaagtttcagaggagcgtgctcgacctttctctccagtggagatttgccaacctgcccaacaatgccaagctggagatggtgcccgcttcccggagccgtgaggggcctgagaacatggttcgcatcgctttgcagctggacgatggctcgaggttgcaggactctttctgttcaggccagaccctctgggagcttctcagccattttccacagatcagggagtgcctgcagcaccccggcggggccaccccagtctgcgtgtacacgagggatgaggtaggcggcctgctcttgctcacccagtccccgctcactttcagcccactttccaactggaaaatctgctgtcccgcagccgtctccagggcagtggcgggagactcgggctcttgaaagcacgacgtgtttcatggaaaaagagggagtggccggccctcggagcccgggctgccccgaaacctccctcggcgccctgtttgttttttcagcttctctcaaagcccaagagtcacaaaagtggtttcatttaataaatatttgctttgctc

SEQ ID NO: 106802 - DNA, 1445 bp, Homo sapiens
  Payload ID: 970
  Gene Symbol: ALX1
  Gene Name: ALX homeobox 1
  Uniprot ID: Q15699
  ENST ID: ENST00000316824
  CDS Start-End: 156-1136
gtattaaagggaccggagcggggcagttcccgacgccgcagcgctcgctttcccttccctcctctctggccctccctcctcccacccactggctccctcccccagcgctctccagtttctgtgccccaggagctacgcgacagtcttccaggattatggagtttctgagcgagaagtttgccctcaagagccctccgagtaaaaacagtgacttttacatgggcgcaggaggtcctctggagcacgttatggagacgctggacaatgagtccttttacagcaaagcgtctgcaggcaaatgcgtgcaggccttcggacccctgccccgcgccgagcatcacgtgcgcttggagaggacctcgccctgtcaggacagcagcgtgaactatgggatcactaaagtagaaggacagccccttcacaccgaactgaatagagctatggacaactgtaacagtctccgaatgtctcccgtgaaagggatgcaagagaagggagagctggatgaacttggggataaatgtgatagcaatgtatccagcagtaagaaacggaggcaccgaaccaccttcaccagtttgcagctagaggagctggagaaagtctttcagaaaactcattacccggatgtgtatgtcagagaacagcttgctctgaggacagagctcactgaggccagggtccaggtttggtttcaaaatcgaagggccaaatggagaaaaagggaacgttatggccaaatacaacaagcgaaaagccattttgctgccacctatgatatatcagttttgccaaggactgacagctacccacagattcagaacaatttgtgggcaggaaatgcaagtggtggttctgtggttacttcatgcatgttaccacgtgacacttcctcctgtatgacaccttattctcactcgcctcggacagattccagttacacggggttttcaaaccaccagaaccagttcagccacgtgcccctcaacaattttttcactgactctcttcttactggggcaaccaatggacatgcatttgaaacaaagccagagtttgaaaggaggtcttccagtatcgcagttcttcgaatgaaagccaaggagcacaccgccaatatttcatgggccatgtaacatacagtactcttttatttttcttttaatagcaaagttaaacattcttatttctcatatttaaaggataccacaataagctgctgtgtgtggaattgctaaaggtcaagatattcagtgagaccagcttaaatgaatagttgttatttaacattaaaatctaagaatgaacctctgaaaagactaaataggtttaccatgtgccagtctccacaaaccctgttttagtagtaaggttttctttttctattgtacaagtcaatgaaatatgatcacgcaacttattaaagaataaatgtgttaaacaaa

SEQ ID NO: 106803 - DNA, 1859 bp, Homo sapiens
  Payload ID: 971
  Gene Symbol: ALX3
  Gene Name: ALX homeobox 3
  Uniprot ID: O95076
  ENST ID: ENST00000369792
  CDS Start-End: 89-1120
ccaggtccctcccccttggcgggcgctcacaggcggcgcgggcagcgcgagccccggagccccggaggcctgtgcgccctgagccggcatggaccccgagcactgcgcgcctttccgcgtggggcctgcacccggcccctatgtggcctcgggggacgagcctccgggcccgcagggaacccccgccgctgcgcctcacctgcaccccgcgccgccccgcggcccgcggctgacccgctttccggcctgcgggcccctggagccctacctcccagagccggccaagccgcccgccaagtacctgcaggacctcgggcccggcccggccctcaacggcggccacttctacgagggccccgcggaagctgaggagaagacctccaaagctgccagcttcccccagctgcccttggactgccgagggggccccagagacgggccctctaacttgcaaggctccccaggcccctgcctggccagcctgcatcttcctctttccccgggactccctgactccatggagttggccaagaacaagagcaagaagcgtcgtaaccgcacgaccttcagcacattccagctggaggagctggagaaggtcttccagaaaacccactatcctgatgtgtatgcccgggagcagctggccctgcgcacagacctgactgaggcccgggtacaggtctggttccagaaccgcagagccaagtggcggaagcgcgagcgttatgggaagatccaggaggggcggaaccccttcacggctgcctatgacatctctgtgctgccccgtactgacagccaccctcagctgcagaactccctgtgggccagtccaggatctgggagccctggaggcccctgccttgtgtctccagagggcatcccctccccatgcatgtctccatattcccacccccatgggagtgtggctggcttcatgggggtgccagccccttctgcggctcaccctggcatctactccatccatggctttccccccaccctggggggccacagctttgagccttcctcagatggtgactataagtctccaagcctcgtctcgctcagggtaaagcccaaggagccacccggccttctgaactggaccacgtgatcggttgcatggacctgcagaatgagctgcccacctctttttccattcccagtcgctcccagcccacctctgcctccaagccccagatggttctggaggctgcgagagcagctggcactgtcagcccccagcagggaacacgttacagggtcttttctcttagaacaaggtggggctgcctaggagaaggggcttcgaagcagccaggactcttcctaccacaaactgagtcccctcacctgaactctgggctggaggcagggagacactgccctgcttcctccagactttgtccaagtccattgtcatctctccagctaagacagcttacttggctcatcgttcagggaacccaggaaaatgggaggagaacgccgcgtggactgaagctcttcatgatgagatggaaaccaaaagggagtctcccatgatggggtggagtcagccctgcttcccctccccaccagcagggggcgcactggtgtctgacactaaggagggtgtaaaggccaaggtcagcatagactgaggcacactggctcctcagctccagccaccctcactcctgccatgtgcctgcactcccagcatgccatgcagtcatcttcccctccaagggggcagaaattccaccagaaatcaccacatatttggaatctcttccacgggaccagcccagagctatgccatggaaatgatattggatgttggtaagaataaaacagatttctacagactg

SEQ ID NO: 106804 - DNA, 5750 bp, Homo sapiens
  Payload ID: 972
  Gene Symbol: ALX4
  Gene Name: ALX homeobox 4
  Uniprot ID: Q9H161
  ENST ID: ENST00000329255
  CDS Start-End: 105-1340
gcacagccacagcctcctcgcctccccaaactcccagccaaggcgcgcggtggcgtcctcgcgccctcgctcgcgtccccgcccgccgcctgcgcaagccaggcatgaatgctgagacttgcgtctcttactgcgagtcgccggccgctgccatggacgcctactacagcccggtgtcgcagagtcgggagggctcgtcgccttttagggcatttcccggaggcgacaagttcggcacaactttcctgtcggccgccgccaaagcacagggattcggggacgccaagagccgggcccgttacggcgctgggcagcaggacctggcgacacccctggagagtggagctggggcgcggggctcctttaacaagttccagccccagccgtcgaccccgcagccccagccgccgccgcagccgcagccgcagcagcagcagccgcagccccagccgcccgcgcaaccgcatctttacttgcagcgaggcgcctgcaagacgcccccggacggcagcctcaaactccaggaaggcagcagcggccacagcgcggccttgcaggttccctgctacgctaaagagagctccctgggtgagccagagttaccccctgactctgacactgtggggatggacagcagctacctgagtgtcaaggaggctggggtgaaggggccccaggaccgggccagctcagacctccccagcccattggagaaggccgactcagagagcaacaagggcaagaagcggcggaaccggaccaccttcaccagctaccagctggaggagctggagaaggtcttccagaagacccactacccagacgtgtatgcgcgggaacagctggccatgaggacagacctcactgaggcccgcgtgcaggtctggttccagaaccgaagggccaagtggaggaagcgggagcgttttgggcagatgcagcaggttcgaacccacttctccactgcatatgagctgcccctcctcacccgagctgagaactacgcccagattcagaacccgtcctggctcggcaacaacggggctgcctcaccagtgccagcctgcgtggtcccctgcgacccggtgcctgcctgcatgtcccctcatgcccacccccctggctctggggccagcagcgtcaccgacttcctgagtgtgtctggggctggcagtcacgtgggccagacgcacatgggcagcctgtttggagcagccagcctcagcccaggcctcaatggctacgagctcaacggcgagccggaccgcaagacctcgagcatcgcggccctccgcatgaaggccaaggagcacagtgcggccatttcctgggccacatgacagggcacccctgccccgtccccacctcgggacaccatgggccacgcccatgttttccaggcccccagcctcccactcgactttcctcttaggaacctggcctgggccaggggcctgaccctcagcactttcagccgccccaagtctgaggccccgtggactgctgggagggagggggcagcaggcccctggcccctccctggcactgaggccctgacccctgctcccggccacaggcagtggagaaagccaggtggccacgtttttcagcttcgcatccatgataagctgaaagcgctttcttgctcccgcccactcctctgctctgcctagttgaccatgagtcaatgctagatttccatgcagacccagcagcctcaccagcccagtcttgtccatccttcccgctcctagtggggtcccctggtcaccaggccggtggctgtgtgtctgaagcacaggctgccctgcagagccagcctcctgccctcccatctttctctccctgaaagcacacggaatccgacctgctggggccaaggcgccagcctccacctccccccgaacagtgacgagtctgacagagcctggctgactgcatcctggctgtcccctaggctggatacacctggagagagtgggcagaggatgacaggagctggagccgaggacccctgctgccatctagcaatgccagtccccaggggagacacgggccagcccctcactggacactataggggaggagccagacctgagggaggctgagaacacagatgccacaagggctcccatggtgctagaagaaggaaaggtcctgggagagggggaggcatccgggtggggcgtgggcccgggcagtcctcccgctctccggcctgcctggcatctggtacagcggggaggtctgggcagctttgttctccatccagagcccagtcaggttccctccaggaggatgcggaggggctcgtctcttccctgccctaccctggcccctccctggggctgctcagcagtgtcccggcatggaaggactcacaacttcggaacacataagctagagcttgggggccgggtggcagagggtcaaaagctgcgtgcaggctttgctagaggacgtgtggccatgctcggcctccaggccctgctatggcctcaaactgactgtcctccctgccatatctgtcagtgtcatcgctgcccagagccttccacggcagatgggggctctgtgtccctccaggcactaggaggtgttgctcttctccacacagctttccacactccgtccttacacttcttccacagggaccaggactctctgccctctctccagcctgcggaagggctcctggcctgggctcctcggtgtggctttgctattgcaaatggggctgtcaggatgccctcctgaaaccaggcttcctgcctccaggaagcggggctctgtgcctgcctgcccgacccctgtagcttgggtctggccctgagccccagccctcacctcagctgggagtacacagtaaccgtccagaggcaggcctgtcagaccccaggtggggggtccctccagcaggcagcgccccgcattgaagcgctcgccttttctaccttctcccttgattcctgtcatggagtagggccaggcccactatgctcagggtcgtggacacagaaaggcctcctgggttgggcggagggtaaacttggtgttgttgaatgagggtctctggggttgggggtgacagtctcccgcctgcctggtgttctcatctgctctagaaaccaggctgaggaagggtctggctgtggcctcccttaatgagtcagacctctttgtgaaccgtagctctaaaatggatcttatagaggtgaaagggtcttggacattgaattaaatgttcttggaggcttggctttaagtgtttcaaatatttgaggatttggagtgacttttgggaagttttttctagttctgaggttcgctgaaatgacccagactcccccaaaatctagccagggaaaggaagaacttaaggctgggaacagtttccccatttctcccccctttccttctgaaatgctcatggctgaggaaggatggggaaggaaggaactttcaccttgggtctttctcacccatgagagaatcaggacaaagaggaggagagccaggtagctccagagtgggccaggagggagagcaagggaatcaggacaaagaggaggacagacaggtagctccagagcaggcagggagggagagtgagagctttaagggggctcttccgcagtggcccccggcactcagttcctccatgcgtctgctctctggctgggctagacccaagtcaggcaaatttcaacccaaaagcttgagaagaaaaggcgtctattagaagactctgtggctatggctgcctgtcccaacacacccaggaagtgtctaggattaaacatgccaatgtgaaacattcctgttcatctcgtcaaaggcagccacgtaccccaggcctgtcctctgtggcttggcccagcccttgggggccacctaaccacactaagtatgataggaccaccgagttgggaggaagcttagaaaccctctagttagtccagtcccttcacaacagagaagaccctggcccagagtggagacatgactgccctgacctgtacttgccctgagactaggctgagagaggagcctgggacgtgccacccagggtgtgagggcctgggcttcgttggcaccaggggcggccggtgctgcatggagctcccctctccaatgcctcatgggcattcactcagcagctcagttctccagaagagaaccttggggcccagtcccttccaagacaggtggctaggcccaaccttctgcactgcagagcagggggccactgccgtgtcagctcctaggatgactgagcaagtcagggcagctgcccaaggccatctggagctaaagctcatgaaggcaggtggagagaagcatctacctgccacgtggttcattgctatgcgaataagctaagagaggtgaggatttcctttggatacctgcctaagatctcaacagagatggcaacttaaaaataaagtcgtgggtagccggcagatggatgggcagcctccccacactgacagcctccagtccctgctgggcacaggtctcagcatggcaaggcttgacactaaggtgctgctactgccctccagatgccagcactactcctggggcatgggagcgagggctctggggggcacacagagaggcttgtctccaaggctgaaatagcacttggaggacatgggcttttagaactttccttgaattcttttaactatacttgattctcagcgctcactaccgtgcctccagcttcgggaagcacggtggccaggttagctcaaagacactgcgatggggtaggtgcagcaagtgtggggtgggtccccagcacacacagctgtgatcacactggacccagctccgtgccccatctcctgtcatttcggctgggcagacgagggacgcttccatgaaaactacgtaccctgcttatgcagtcattccctccctgggctagacagtggggggccatcttcgagaacctgaaagacacgcgggggttcctggtctgtttcatggcccttactgtccagtgcaaaggcaaacaggcctagctgggggaggatggttggtaaactggcccccaggataatactctgtgactatccagttaaaaaataagaaggtgacaatgacccatcaaccccacttcacttctttcaggatgctgtagggaggaaaggtgcttccatgacctaacctcggcctctcctttcttccctcttcactcacacacatagagctaggcctttatactactgattttgaaggacagttttcaatgtctaatcatctgtttaggtgtgcagtggttgaaaaaagaaagctgagtgctagaaggaacatgaacctcaaccgttacttattgttctcattgtaagatattttaaccctgtataaatgcaacttttcctttagcttaatggcctggggtggaatattaaaaatatatattaaaaatacagtaaaaatccagaaaaatgtaaaaaaaaaaatgaggtcggttccataaagttttactgcctataccaccatgtaactacattatagcaaaatattaaaagaaacgttcttgccttttaaagtaagttattgcacttacatcttttttgggagaggaggaacacggatgggaaggagatgtaggggcccaggcatggggcaaaatggagtgcagaggtagccgggcactcccagaacaccctttgctggcccagcccaaactgtttggttgttgttatttgcaataaactccttctccttcctcc

SEQ ID NO: 106805 - DNA, 1088 bp, Homo sapiens
  Payload ID: 973
  Gene Symbol: ALYREF
  Gene Name: Aly/REF export factor
  ENST ID: ENST00000505490
  CDS Start-End: 7-801
gagccgatgcccgattccgcgcccgccatggccgacaaaatggacatgtctctggacgacatcattaaactgaaccggagccagcgaggcggccggggcgggggccggggccgcggccgggccggctcccagggcggccgcggcggtggggcgcaggccgccgcgcgagtgaatcgaggcggcgggcccatccggaaccggccggccatcgcccgcggcgcggccggcggaggcggcaggaaccgaccggcgccctacagcaggccaaaacaacttcccgacaagtggcagcacgatcttttcgacagtggcttcggcggtggtgccggcgtggagacaggtgggaaactgctggtgtccaatctggattttggagtctcagacgccgatattcaggaactctttgctgaatttggaacgctgaagaaggcggctgtgcactatgatcgctctggtcgcagcttaggaacagcagacgtgcactttgagcggaaggcagatgccctgaaggccatgaagcagtacaacggcgtccctctggatggccgccccatgaacattcagcttgtcacgtcacagattgacgcacagcggaggcctgcacagagcgtaaacagaggtggcatgactagaaaccgtggcgctggaggttttggtggtggtggaggcacccggagaggcacccgcggaggcgcccgtggaagaggcagaggtgccggcaggaattcaaagcagcagctttcggcagaggagctggatgcccagctggacgcctataatgcgagaatggacaccagttaaacagaccagcaaatccgcgtgcggaacaggacccaggcgtctcctcttgctccctggttggggggcggtggctggggctgtgcggccaatgatggatttgtttcttttatgttttaaaataggatttaaaaactcatgtaaaggttttttttttttctttttttttttttttaattctgaaacagacctgttttgtaccgagttatttttgggataaattttactggttgctgttgtggagaaggtggcgtttccaccttttccataataaaatagaaatgtgtgta

SEQ ID NO: 106806 - DNA, 2005 bp, Homo sapiens
  Payload ID: 974
  Gene Symbol: AMBN
  Gene Name: ameloblastin (enamel matrix protein)
  Uniprot ID: Q9NP70
  ENST ID: ENST00000322937
  CDS Start-End: 104-1447
gagaagtacagagcaagtcccacgcacagtcctgaaaaaaattttaatcttcttttcttagaactatcttggttggcatcatcaggccctgagagcacagtgcatgtcagcatctaagattccacttttcaaaatgaaggacctgatactgatcctatgcctcctggaaatgagttttgcagtgccgttctttcctcagcaatctggaacaccgggtatggctagtttgagccttgagacaatgagacagttgggaagtctgcagagattaaacacactttctcagtattctagatacggctttggaaaatcatttaattctttgtggatgcacggtctcctcccaccacattcctctcttccatggatgaggccaagagaacatgaaactcaacagtatgaatattctttgcctgtgcatcccccacctctcccatcacagccatccttgaagcctcaacagccaggactgaaaccttttctccagtctgctgctgcaaccaccaaccaggccacagcactgaaagaagcacttcagcctccaattcacctgggacatctgcccttgcaggaaggagaactgcctctggttcagcagcaggtggcaccatcagataagccaccaaagcctgagctcccaggagtagattttgctgatccacaaggtccatcactcccaggaatggattttcctgatccacaaggtccatcactcccaggattggattttgctgatccacaaggttcaacaattttccaaatagcccgtttgatttctcacggaccaatgccacaaaataaacaatctccactttatccaggaatgttgtacgtgccttttggagcaaatcaattgaatgcccctgccagacttggcatcatgagttcagaagaagtggcaggcgggagagaagacccaatggcctatggagccatgtttccaggatttggaggcatgaggcccggctttgagggaatgccccacaacccagctatgggcggtgacttcactctggaatttgactccccagtggctgccaccaaaggccctgagaacgaagaaggaggtgcacaaggctcccctatgccggaggccaacccagacaatctagaaaacccagctttccttacagagctagaacctgctccccacgcagggctccttgctctccctaaggatgacattcccggcctgccaaggagcccttcagggaagatgaagggactccccagcgtcaccccagcagctgctgacccactgatgacccctgaattagctgatgtttataggacctacgatgctgacatgaccacatccgtggatttccaggaagaagcaaccatggataccacgatggccccaaactctctgcaaacatccatgccaggaaacaaagcccaggagcccgagatgatgcatgacgcatggcatttccaagagccctgacagctctaagatattagctactttctgtatgcacaagcttcccagctttgtccccacagtgtacctttttgctaaaacacttattacccttctgcagcaaaggcattaaaagcgctaagcatatattaataaatgcaagtggctagaaatagtgtaggtccccttcttgctttcaatatcttgttgaaataaaatgtgtcaattgtctctgtgatttagaaacactattaataacatcagagcaaggttctaagggtctcagcatttgatcatcactttttcttagctgtcttaagcattatagaatttctcttaccagcatgacactattatattcaggaaacatggcactgcttttttctctaagcaaaggcaaatatcctcataattctaagctaattcatttaaactttattaaatggggattggtggaaaactcctgactggtattactgggtttggtataatttaatttaaaattctcatttatagagtattttatttaatctagtataaaaaatctagcctattttaaataaagaatttttctcactgaaa

SEQ ID NO: 106807 - DNA, 1512 bp, Homo sapiens
  Payload ID: 974
  Gene Symbol: AMBN
  Gene Name: ameloblastin (enamel matrix protein)
  Uniprot ID: Q9NP70
  ENST ID: ENST00000449493
  CDS Start-End: 65-1363
aattttaatcttcttttcttagaactatcttggttggcatcatcaggccctgagagcacagtgcatgtcagcatctaagattccacttttcaaaatgaaggacctgatactgatcctatgcctcctggaaatgagttttgcagtgccgttctttcctcagcaatctggaacaccgggtatggctagtttgagccttgagacaatgagacagttgggaagtctgcagagattaaacacactttctcagtattctagatacggctttggaaaatcatttaattctttgtggatgcacggtctcctcccaccacattcctctcttccatggatgaggccaagagaacatgaaactcaacagccatccttgaagcctcaacagccaggactgaaaccttttctccagtctgctgctgcaaccaccaaccaggccacagcactgaaagaagcacttcagcctccaattcacctgggacatctgcccttgcaggaaggagaactgcctctggttcagcagcaggtggcaccatcagataagccaccaaagcctgagctcccaggagtagattttgctgatccacaaggtccatcactcccaggaatggattttcctgatccacaaggtccatcactcccaggattggattttgctgatccacaaggttcaacaattttccaaatagcccgtttgatttctcacggaccaatgccacaaaataaacaatctccactttatccaggaatgttgtacgtgccttttggagcaaatcaattgaatgcccctgccagacttggcatcatgagttcagaagaagtggcaggcgggagagaagacccaatggcctatggagccatgtttccaggatttggaggcatgaggcccggctttgagggaatgccccacaacccagctatgggcggtgacttcactctggaatttgactccccagtggctgccaccaaaggccctgagaacgaagaaggaggtgcacaaggctcccctatgccggaggccaacccagacaatctagaaaacccagctttccttacagagctagaacctgctccccacgcagggctccttgctctccctaaggatgacattcccggcctgccaaggagcccttcagggaagatgaagggactccccagcgtcaccccagcagctgctgacccactgatgacccctgaattagctgatgtttataggacctacgatgctgacatgaccacatccgtggatttccaggaagaagcaaccatggataccacgatggccccaaactctctgcaaacatccatgccaggaaacaaagcccaggagcccgagatgatgcatgacgcatggcatttccaagagccctgacagctctaagatattagctactttctgtatgcacaagcttcccagctttgtccccacagtgtacctttttgctaaaacacttattacccttctgcagcaaaggcattaaaagcgctaagcatatattaataaatgcaagtggctagaaa

SEQ ID NO: 106808 - DNA, 1997 bp, Homo sapiens
  Payload ID: 974
  Gene Symbol: AMBN
  Gene Name: ameloblastin (enamel matrix protein)
  ENST ID: ENST00000613447
  CDS Start-End: 102-1442
gaagtacagagcaagtcccacgcacagtcctgaaaaaaattttaatcttcttttcttagaactatcttggttggcatcatcaggccctgagagcacagtgcatgtcagcatctaagattccacttttcaaaatgaaggacctgatactgatcctatgcctcctggaaatgagttttgcagtgccgttctttcctcagcaatctggaacaccgggtatggctagtttgagccttgagacaatgagacagttgggaagtctgcagagattaaacacactttctcagtattctagatacggctttggaaaatcatttaattctttgtggatgcacggtctcctcccaccacattcctctcttccatggatgaggccaagagaacatgaaactcaacagtatgaatattctttgcctgtgcatcccccacctctcccatcacagccatccttgaagcctcaacagccaggactgaaaccttttctccagtctgctgctgcaaccaccaaccaggccacagcactgaaagaagcacttcagcctccaattcacctgggacatctgcccttgcaggaaggagaactgcctctggttcagcagcaggtggcaccatcagataagccaccaaagcctgagttgcgagtagattttgctgatccacaaggtccatcactcccaggaatggattttcctgatccacaaggtccatcactcccaggattggattttgctgatccacaaggttcaacaattttccaaatagcccgtttgatttctcacggaccaatgccacaaaataaacaatctccactttatccaggaatgttgtacgtgccttttggagcaaatcaattgaatgcccctgccagacttggcatcatgagttcagaagaagtggcaggcgggagagaagacccaatggcctatggagccatgtttccaggatttggaggcatgaggcccggctttgagggaatgccccacaacccagctatgggcggtgacttcactctggaatttgactccccagtggctgccaccaaaggccctgagaacgaagaaggaggtgcacaaggctcccctatgccggaggccaacccagacaatctagaaaacccagctttccttacagagctagaacctgctccccacgcagggctccttgctctccctaaggatgacattcccggcctgccaaggagcccttcagggaagatgaagggactccccagcgtcaccccagcagctgctgacccactgatgacccctgaattagctgatgtttataggacctacgatgctgacatgaccacatccgtggatttccaggaagaagcaaccatggataccacgatggccccaaactctctgcaaacatccatgccaggaaacaaagcccaggagcccgagatgatgcatgacgcatggcatttccaagagccctgacagctctaagatattagctactttctgtatgcacaagcttcccagctttgtccccacagtgtacctttttgctaaaacacttattacccttctgcagcaaaggcattaaaagcgctaagcatatattaataaatgcaagtggctagaaatagtgtaggtccccttcttgctttcaatatcttgttgaaataaaatgtgtcaattgtctctgtgatttagaaacactattaataacatcagagcaaggttctaagggtctcagcatttgatcatcactttttcttagctgtcttaagcattatagaatttctcttaccagcatgacactattatattcaggaaacatggcactgcttttttctctaagcaaaggcaaatatcctcataattctaagctaattcatttaaactttattaaatggggattggtggaaaactcctgactggtattactgggtttggtataatttaatttaaaattctcatttatagagtattttatttaatctagtataaaaaatctagcctattttaaataaagaatttttctcactg

SEQ ID NO: 106809 - DNA, 737 bp, Homo sapiens
  Payload ID: 975
  Gene Symbol: AMELX
  Gene Name: amelogenin, X-linked
  Uniprot ID: Q99217
  ENST ID: ENST00000348912
  CDS Start-End: 69-596
aaaggatcaagcatccctgagtttcaaacagaaacttgcactgaatacattcaaagaaccatcaagaaatggggacctggattttatttgcctgcctcctgggagcagcttttgccatgcctgtgcttacccctttgaagtggtaccagagcataaggccaccgtacccttcctatggttacgagcccatgggtggatggctgcaccaccaaatcatccccgtgctgtcccaacagcaccccccgactcacaccctgcagcctcatcaccacatcccagtggtgccagctcagcagcccgtgatcccccagcaaccaatgatgcccgttcctggccaacactccatgactccaatccaacaccaccagccaaacctccctccgcccgcccagcagccctaccagccccagcctgttcagccacagcctcaccagcccatgcagccccagccacctgtgcaccccatgcagcccctgccgccacagccacctctgcctccgatgttccccatgcagcccctgcctcccatgcttcctgatctgactctggaagcttggccatcaacagacaagaccaagcgggaggaagtggattaaaagatcagaagatgagaggggaatgaatacttcagatgctttcaggagtgacacaagaacacaatgatttttgcttataatcactttacttagcaaattctgtaactaaaaaagtaccattagcagacaataaaatgcatt

SEQ ID NO: 106810 - DNA, 835 bp, Homo sapiens
  Payload ID: 975
  Gene Symbol: AMELX
  Gene Name: amelogenin, X-linked
  Uniprot ID: Q99217
  ENST ID: ENST00000380712
  CDS Start-End: 69-686
aaaggatcaagcatccctgagtttcaaacagaaacttgcactgaatacattcaaagaaccatcaagaaatggggacctggattttatttgcctgcctcctgggagcagcttttgccatgcctctaccacctcatcctgggcaccctggttatatcaacttcagctatgagaactcacattctcaggctatcaatgttgacaggactgcattagtgcttacccctttgaagtggtaccagagcataaggccaccgtacccttcctatggttacgagcccatgggtggatggctgcaccaccaaatcatccccgtgctgtcccaacagcaccccccgactcacaccctgcagcctcatcaccacatcccagtggtgccagctcagcagcccgtgatcccccagcaaccaatgatgcccgttcctggccaacactccatgactccaatccaacaccaccagccaaacctccctccgcccgcccagcagccctaccagccccagcctgttcagccacagcctcaccagcccatgcagccccagccacctgtgcaccccatgcagcccctgccgccacagccacctctgcctccgatgttccccatgcagcccctgcctcccatgcttcctgatctgactctggaagcttggccatcaacagacaagaccaagcgggaggaagtggattaaaagatcagaagatgagaggggaatgaatacttcagatgctttcaggagtgacacaagaacacaatgatttttgcttataatcactttacttagcaaattctgtaactaaaaaagtaccattagcagacaataaaatgcattaaaaatca

SEQ ID NO: 106811 - DNA, 793 bp, Homo sapiens
  Payload ID: 975
  Gene Symbol: AMELX
  Gene Name: amelogenin, X-linked
  Uniprot ID: Q99217
  ENST ID: ENST00000380714
  CDS Start-End: 69-644
aaaggatcaagcatccctgagtttcaaacagaaacttgcactgaatacattcaaagaaccatcaagaaatggggacctggattttatttgcctgcctcctgggagcagcttttgccatgcctctaccacctcatcctgggcaccctggttatatcaacttcagctatgaggtgcttacccctttgaagtggtaccagagcataaggccaccgtacccttcctatggttacgagcccatgggtggatggctgcaccaccaaatcatccccgtgctgtcccaacagcaccccccgactcacaccctgcagcctcatcaccacatcccagtggtgccagctcagcagcccgtgatcccccagcaaccaatgatgcccgttcctggccaacactccatgactccaatccaacaccaccagccaaacctccctccgcccgcccagcagccctaccagccccagcctgttcagccacagcctcaccagcccatgcagccccagccacctgtgcaccccatgcagcccctgccgccacagccacctctgcctccgatgttccccatgcagcccctgcctcccatgcttcctgatctgactctggaagcttggccatcaacagacaagaccaagcgggaggaagtggattaaaagatcagaagatgagaggggaatgaatacttcagatgctttcaggagtgacacaagaacacaatgatttttgcttataatcactttacttagcaaattctgtaactaaaaaagtaccattagcagacaataaaatgcattaaaaatca

SEQ ID NO: 106812 - DNA, 802 bp, Homo sapiens
  Payload ID: 976
  Gene Symbol: AMELY
  Gene Name: amelogenin, Y-linked
  Uniprot ID: Q99218
  ENST ID: ENST00000215479
  CDS Start-End: 69-647
agaggaccaagcctccctgtgtagcacaaagaaagtttctctgaatatatttaaagaaccatcaagaaatggggacctggattttgtttgcctgccttgtgggagcagcttttgccatgcctctaccacctcatcctgggcaccctggttatatcaacttcagctatgaggtgctcacccctttgaagtggtaccagagcatgataagaccaccatactcttcctatggttacgagcccatgggtggatggctgcaccaccaaatcatccccgtggtgtcccaacagcaccccctgactcacaccctgcagtctcatcaccacatcccagtggtgccagctcagcagcccagggtccgccagcaagcactgatgcctgttcctggccagcaatccatgactccaacccaacaccatcagccaaacctccctctgcctgcccagcagcccttccagccccagcctgttcagccacagcctcaccagcccatgcagccccagccacctgtgcaacccatgcagcccctgctgccacagccacctctgcctccaatgttccccctgcggcccctgccccccatacttcctgatctgcatctggaagcttggccagcaacagacaagaccaagcaggaggaagtggattaaaagaccagaatatgagacaggaactgaagtaaacactttagttgctttcagggatgacacaagcacacaatgatttttgcttacaatcacttaacttagcaaattctgtaactaaaaatgtaccaatagtagacaataaaatgttttaaaaatca

SEQ ID NO: 106813 - DNA, 621 bp, Homo sapiens
  Payload ID: 976
  Gene Symbol: AMELY
  Gene Name: amelogenin, Y-linked
  Uniprot ID: Q99218
  ENST ID: ENST00000383036
  CDS Start-End: 1-621
atggggacctggattttgtttgcctgccttgtgggagcagcttttgccatgcctctaccacctcatcctgggcaccctggttatatcaacttcagctatgagaactcacattctcaggctatcaatgttgacaggattgctttagtgctcacccctttgaagtggtaccagagcatgataagaccaccatactcttcctatggttacgagcccatgggtggatggctgcaccaccaaatcatccccgtggtgtcccaacagcaccccctgactcacaccctgcagtctcatcaccacatcccagtggtgccagctcagcagcccagggtccgccagcaagcactgatgcctgttcctggccagcaatccatgactccaacccaacaccatcagccaaacctccctctgcctgcccagcagcccttccagccccagcctgttcagccacagcctcaccagcccatgcagccccagccacctgtgcaacccatgcagcccctgctgccacagccacctctgcctccaatgttccccctgcggcccctgccccccatacttcctgatctgcatctggaagcttggccagcaacagacaagaccaagcaggaggaagtggattaa

SEQ ID NO: 106814 - DNA, 1037 bp, Homo sapiens
  Payload ID: 977
  Gene Symbol: AMTN
  Gene Name: amelotin
  Uniprot ID: Q6UX39
  ENST ID: ENST00000339336
  CDS Start-End: 131-760
tttaaatttcttctacaaacacatacatcattgaagggtaaaatttttcaccagagtaaacttgagaaaccaactggaccttgagtattgtacattttgcctcgtggacccaaaggtagcaatctgaaacatgaggagtacgattctactgttttgtcttctaggatcaactcggtcattaccacagctcaaacctgctttgggactccctcccacaaaactggctccggatcagggaacactaccaaaccaacagcagtcaaatcaggtctttccttctttaagtctgataccattaacacagatgctcacactggggccagatctgcatctgttaaatcctgctgcaggaatgacacctggtacccagacccacccattgaccctgggagggttgaatgtacaacagcaactgcacccacatgtgttaccaatttttgtcacacaacttggagcccagggcactatcctaagctcagaggaattgccacaaatcttcacgagcctcatcatccattccttgttcccgggaggcatcctgcccaccagtcaggcaggggctaatccagatgtccaggatggaagccttccagcaggaggagcaggtgtaaatcctgccacccagggaaccccagcaggccgcctcccaactcccagtggcacagatgacgactttgcagtgaccacccctgcaggcatccaaaggagcacacatgccatcgaggaagccaccacagaatcagcaaatggaattcagtaagctgtttcaaattttttcaactaagctgcctcgaatttggtgatacatgtgaatctttatcattgattatattatggaatagattgagacacattggatagtcttagaagaaattaattcttaatttacctgaaaatattcttgaaatttcagaaaatatgttctatgtagagaatcccaacttttaaaaacaataattcaatggataaatctgtctttgaaatataacattatgctgcctggatgatatgcatattaaaacatatttggaaaactg

SEQ ID NO: 106815 - DNA, 761 bp, Homo sapiens
  Payload ID: 977
  Gene Symbol: AMTN
  Gene Name: amelotin
  Uniprot ID: Q6UX39
  ENST ID: ENST00000504451
  CDS Start-End: 86-712
tttcaccagagtaaacttgagaaaccaactggaccttgagtattgtacattttgcctcgtggacccaaaggtagcaatctgaaacatgaggagtacgattctactgttttgtcttctaggatcaactcggtcattaccactcaaacctgctttgggactccctcccacaaaactggctccggatcagggaacactaccaaaccaacagcagtcaaatcaggtctttccttctttaagtctgataccattaacacagatgctcacactggggccagatctgcatctgttaaatcctgctgcaggaatgacacctggtacccagacccacccattgaccctgggagggttgaatgtacaacagcaactgcacccacatgtgttaccaatttttgtcacacaacttggagcccagggcactatcctaagctcagaggaattgccacaaatcttcacgagcctcatcatccattccttgttcccgggaggcatcctgcccaccagtcaggcaggggctaatccagatgtccaggatggaagccttccagcaggaggagcaggtgtaaatcctgccacccagggaaccccagcaggccgcctcccaactcccagtggcacagatgacgactttgcagtgaccacccctgcaggcatccaaaggagcacacatgccatcgaggaagccaccacagaatcagcaaatggaattcagtaagctgtttcaaattttttcaactaagctgcctcgaatttggtgatacatg

SEQ ID NO: 106816 - DNA, 2260 bp, Homo sapiens
  Payload ID: 978
  Gene Symbol: AMDHD1
  Gene Name: amidohydrolase domain containing 1
  Uniprot ID: Q96NU7
  ENST ID: ENST00000266736
  CDS Start-End: 107-1387
accctcccagccccggacagcgcaggctgcggcttttcgtcctccactgagtcctgccggtggcccgagcccggtggcctcccggcgaccctcggcgcgaggcgacatggcaagcggccacagcctcctgctggagaacgcgcagcaagtggtgctggtgtgcgcccgcggcgagcgcttcctggcgcgggatgcgctgcgcagcctggcggtgctggaaggcgccagcctggtggtgggcaaagatggatttataaaagctattggtcctgctgatgttattcaaagacagttttctggagaaacttttgaagaaataattgactgctctgggaaatgtattctaccaggtttggtggatgcacacacacatccagtatgggctggtgaaagagttcacgaatttgcaatgaagttggcaggagccacctacatggaaattcaccaggccggaggagggatccactttaccgtggagcgcacgcgccaagccacagaggaggagctgttccgctccttgcagcaacggctccagtgcatgatgagggctggcaccacgctggtggagtgcaagagtggatatggcctcgacctggagaccgagctcaagatgctgcgcgtgattgagcgcgcccggcgggagctggacatcggcatctcggctacctactgcggggctcattcagtgcctaaaggaaaaactgctactgaagctgctgatgacatcatcaataaccacctcccaaagctgaaggaacttggcagaaatggggaaatacacgtggacaatatagacgtattttgtgagaaaggtgtctttgatctcgattccaccagaaggattcttcaacgtggaaaagatatagggttacagattaacttccatggggatgaactccacccgatgaaggctgctgagcttggggctgaactgggagcgcaggcaatcagccacctggaagaagtgagtgatgaaggcatcgttgccatggcaacggccaggtgctctgccatccttctgcccaccacagcctacatgctgagactgaaacaacctcgagccaggaagatgttagatgaaggagtaatagttgctctgggaagtgatttcaaccccaatgcatattgcttttcaatgccaatggtcatgcatctggcctgtgtaaacatgagaatgtccatgcctgaggccttggccgctgccaccatcaatgcagcttatgcactgggaaagtctcacacacacggatcgttggaagttggcaaacagggagatctcattatcatcaattcatcccgatgggagcatttgatttaccagttcggaggccatcatgaattaattgaatatgttatagctaaaggaaaactcatctataaaacatgatagatttgaaaagagaagactttttgactatatgaaataagtcaatatagttatattaaaagttaaaacaccttaatatttacaagaattatatcacttaaacctaaatgtacttcaatgtctttttaagtcactcaaaaaacccaagggatagatttattttcatttaacacatgcatttgacatataaacaggtaaacctattgtgattaaaatcacaaaacatccaattagttcacaaatattggttacaaatattctgtagattaatatggtggggtatcacaaaaatgcctttgtggggaaaagtaggcttggcttaaaatttccattttgtgtctgtatttcacatctcagtttttaaactatatttagtgaacattgagggatcgaaagaaatctaagtgatacgccccaatgaagctaaaatatagccttctgttaagcaaatagtatttcctttccccaagtagttcattttctagatgcttgtcaaatgaattaatgtcctctgatgaagagtgtccttccgtttctaaggtcttctcaatctcagcaatagagcttcccagcagcgttcaagacacatcatttatacacaggcacaggggccttcctgaaatgggtgcatttttaccaactacaatcatgtaatttttttggaaattttttaaaattttcgattctttacattacaattgggtgaaacacattttacagctctcaataaatgtttgctgtcgctcttattgttgttgtttcctttcagcctggaagtagatcagcagcgttgtctattagagtttttaggaaattacaaaattatttgtaaagagtcgataattatttacatataaatgggtgtttttaaaa

SEQ ID NO: 106817 - DNA, 1841 bp, Homo sapiens
  Payload ID: 978
  Gene Symbol: AMDHD1
  Gene Name: amidohydrolase domain containing 1
  ENST ID: ENST00000548310
  CDS Start-End: 1-335
gcctggtggtgggcaaagatggatttataaaagctattggtcctgctgatgttattcaaagacagttttctggagaaacttttgaagaaataattgactgctctgggaaatgtattctaccagttggcaggagccacctacatggaaattcaccaggccggaggagggatccactttaccgtggagcgcacgcgccaagccacagaggaggagctgttccgctccttgcagcaacggctccagtgcatgatgagggctggcaccacgctggtggagtgcaagagtggatatggcctcgacctggagaccgagctcaagatgctgcgcgtgattgagcgcgcccggcgggagctggacatcggcatctcggctacctactgcggggctcattcagtgcctaaaggaaaaactgctactgaagctgctgatgacatcatcaataaccacctcccaaagctgaaggaacttggcagaaatggggaaatacacgtggacaatatagacgtattttgtgagaaaggtgtctttgatctcgattccaccagaaggattcttcaacgtggaaaagatatagggttacagattaacttccatggggatgaactccacccgatgaaggctgctgagcttggggctgaactgggagcgcaggcaatcagccacctggaagaagtgagtgatgaaggcatcgttgccatggcaacggccaggtgctctgccatccttctgcccaccacagcctacatgctgagactgaaacaacctcgagccaggaagatgttagatgaaggagtaatagttgctctgggaagtgatttcaaccccaatgcatattgcttttcaatgccaatggtcatgcatctggcctgtgtaaacatgagaatgtccatgcctgaggccttggccgctgccaccatcaatgcagcttatgcactgggaaagtctcacacacacggatcgttggaagttggcaaacagggagatctcattatcatcaattcatcccgatgggagcatttgatttaccagttcggaggccatcatgaattaattgaatatgttatagctaaaggaaaactcatctataaaacatgatagatttgaaaagagaagactttttgactatatgaaataagtcaatatagttatattaaaagttaaaacaccttaatatttacaagaattatatcacttaaacctaaatgtacttcaatgtctttttaagtcactcaaaaaacccaagggatagatttattttcatttaacacatgcatttgacatataaacaggtaaacctattgtgattaaaatcacaaaacatccaattagttcacaaatattggttacaaatattctgtagattaatatggtggggtatcacaaaaatgcctttgtggggaaaagtaggcttggcttaaaatttccattttgtgtctgtatttcacatctcagtttttaaactatatttagtgaacattgagggatcgaaagaaatctaagtgatacgccccaatgaagctaaaatatagccttctgttaagcaaatagtatttcctttccccaagtagttcattttctagatgcttgtcaaatgaattaatgtcctctgatgaagagtgtccttccgtttctaaggtcttctcaatctcagcaatagagcttcccagcagcgttcaagacacatcatttatacacaggcacaggggccttcctgaaatgggtgcatttttaccaactacaatcatgtaatttttttggaaattttttaaaattttcgattctttacattacaattgggtgaaacacattttacagctctcaataaatgtttgctgtcgctc

SEQ ID NO: 106818 - DNA, 566 bp, Homo sapiens
  Payload ID: 978
  Gene Symbol: AMDHD1
  Gene Name: amidohydrolase domain containing 1
  ENST ID: ENST00000553023
  CDS Start-End: 549-566
gtgtctctgcctggccgcccatcgtctgggatgtgaggagcccctctgcctggctgcccagtctggaaagtgaggagcgtctctgcccggccgccatcccatctaggaagtgaggagcgcctcttcccagccgccatcacatctaggaagtgaagagcctctctgcccggccgcccatcgtctgagatgtggggagcgcctctgccccgccgccccatctgggatgtgaggagcgcctctgcccggccgagaccccgtctgggaggtgaggagcgtctctgcccggccgccccgtctgagaagtgaggagaccctctgcctggcaaccaccccgtctgagaagtgaggagcccctccgcccggcagctgccccgtctgagaaagatggatttataaaagctattggtcctgctgatgttattcaaagacagttttctggagaaacttttgaagaaataattgactgctctgggaaatgtattctaccaggtttggtggatgcacacacacatccagtatgggctggtgaaagagttcacgaatttgcaatgaagttggcaggagcc

SEQ ID NO: 106819 - DNA, 1459 bp, Homo sapiens
  Payload ID: 979
  Gene Symbol: AMDHD2
  Gene Name: amidohydrolase domain containing 2
  Uniprot ID: Q9Y303
  ENST ID: ENST00000293971
  CDS Start-End: 95-1324
ggcgcggtctcagctctcggctggggttcgtcactgggcgcgggatttggccgccgcggggctccggagccgctcgctcccgacacggctcacgatgcgcggcgagcagggcgcggcgggggcccgcgtgctccagttcactaactgccggatcctgcgcggagggaaactgctcagggaggatctgtgggtgcgcggaggccgcatcttggacccagagaagctgttctttgaggagcggcgcgtggccgacgagcggcgggactgcgggggccgcatcttggctcccggattcatcgacgtgcagatcaacggtggatttggtgttgacttctctcaagccacggaggacgtgggttcgggggttgccctcgtggcccggaggatcctgtcgcacggcgtcacctccttctgccccaccctggtcacttccccaccggaggtttatcacaaggttgttcctcagatccctgtgaagagtggtggtccccatggggcaggggtcctcgggctgcacctggagggccccttcatcagccgggagaagcggggcgcgcaccccgaggcccacctccgctccttcgaggccgatgccttccaggacttgctggccacctacgggcccctggacaatgtccgcatcgtgacgctggccccagagttgggccgtagccacgaagtgatccgggcgctgacggcccgtggcatctgcgtgtccctagggcactcagtggctgacctgcgggcggcagaggatgctgtgtggagcggagccaccttcatcacccacctcttcaacgccatgctgcctttccaccaccgcgacccaggcatcgtggggctcctgaccagcgaccggctgcccgcaggccgctgcatcttctatgggatgattgcagatggcacgcacaccaaccccgccgccctgcggatcgcccaccgtgcccatccccaggggctggtgctggtcaccgatgccatccctgccttgggcctgggcaacggccggcacacgctgggacagcaggaagtggaagtggacggtctgacggcctacgtggcaggcaccaagacgctgagtggcagcatagccccaatggacgtctgtgtccggcacttcctgcaggccacaggctgcagcatggagtcggccctggaggctgcatccctgcaccccgcccagttgctggggctggagaagagtaaggggaccctggactttggtgctgacgcagacttcgtggtgctcgacgactcccttcacgtccaggccacctacatctcgggtgagctggtgtggcaggcggacgcagctaggcagtgacaaggacctcggctgagaggacacctggccgcagcgggatgccatcagggccgggtggttggggagctggtctccagggagtgagtcgggagccctgctggattgatgcccagggcctgtgcggccgccctggag

SEQ ID NO: 106820 - DNA, 3273 bp, Homo sapiens
  Payload ID: 979
  Gene Symbol: AMDHD2
  Gene Name: amidohydrolase domain containing 2
  Uniprot ID: Q9Y303
  ENST ID: ENST00000302956
  CDS Start-End: 95-1414
ggcgcggtctcagctctcggctggggttcgtcactgggcgcgggatttggccgccgcggggctccggagccgctcgctcccgacacggctcacgatgcgcggcgagcagggcgcggcgggggcccgcgtgctccagttcactaactgccggatcctgcgcggagggaaactgctcagggaggatctgtgggtgcgcggaggccgcatcttggacccagagaagctgttctttgaggagcggcgcgtggccgacgagcggcgggactgcgggggccgcatcttggctcccggattcatcgacgtgcagatcaacggtggatttggtgttgacttctctcaagccacggaggacgtgggttcgggggttgccctcgtggcccggaggatcctgtcgcacggcgtcacctccttctgccccaccctggtcacttccccaccggaggtttatcacaaggttgttcctcagatccctgtgaagagtggtggtccccatggggcaggggtcctcgggctgcacctggagggccccttcatcagccgggagaagcggggcgcgcaccccgaggcccacctccgctccttcgaggccgatgccttccaggacttgctggccacctacgggcccctggacaatgtccgcatcgtgacgctggccccagagttgggccgtagccacgaagtgatccgggcgctgacggcccgtggcatctgcgtgtccctagggcactcagtggctgacctgcgggcggcagaggatgctgtgtggagcggagccaccttcatcacccacctcttcaacgccatgctgcctttccaccaccgcgacccaggcatcgtggggctcctgaccagcgaccggctgcccgcaggccgctgcatcttctatgggatgattgcagatggcacgcacaccaaccccgccgccctgcggatcgcccaccgtgcccatccccaggggctggtgctggtcaccgatgccatccctgccttgggcctgggcaacggccggcacacgctgggacagcaggaagtggaagtggacggtctgacggcctacgtggcaggtgagcgccctgacccactgggtcccaggtcccagcccgcatgccaggtggcccacgacccccccagagcctgccctctctgctctcaaggcaccaagacgctgagtggcagcatagccccaatggacgtctgtgtccggcacttcctgcaggccacaggctgcagcatggagtcggccctggaggctgcatccctgcaccccgcccagttgctggggctggagaagagtaaggggaccctggactttggtgctgacgcagacttcgtggtgctcgacgactcccttcacgtccaggccacctacatctcgggtgagctggtgtggcaggcggacgcagctaggcagtgacaaggacctcggctgagaggacacctggccgcagcgggatgccatcagggccgggtggttggggagctggtctccagggagtgagtcgggagccctgctggattgatgcccagggcctgtgcggccgccctggaggcggtggctgggataaacgtgcacccagcaggactcgccttggctccgggttttgcttgtgctcacatgtggcaccatccttggttgccctcctggagaaggcattcacggcctggggtgggatggctgggctgtagtttagcctgggccttgggccccagtgggggacagggcctgtctgcatgaagtggaccggagacctgcagaccccaggaaagtgtcactatgggagggaggggcaggcagtcagtggctggtgccatggggtgaagccaccatgggctgggggtgaagagccggcaggaaggggaccagtcacagggagtgtggacagtcaggggtttgctttctgctcctgagttggggtgtgcagcgtggagcccacagcctggttctgggccagggcacagtgccaggggctccgctctgacctccaggagggagactgggcccgggacccctgttttctgctccctggactgcctagccctgagtgccacggatgaccagcgttctgttttctcttctcaataaccctatctcttcacacatccccaggcccagtgcttgccggctgtggtgaccctgcctggtgctggagggcagtatgggaggcaccagtgtgccctgctcaccccattagtgtcatcctgccatcttctgtgtccccttggccctggcacacacccatgtggcaaacacgggccgtgaggctccctgaacagcttcgaggcgggtgggcttctggagccctcttggctctgaggacagccacagtggggtcagacgtcagggattggtgcagccccacgtcaggggtgattgtcttgactttctctccatttgagttctggggtgggtggctcccttcccccttgcttacaggtgctgtcctgggcacaggaggtacgcgcctggctctgccactgttctcttccctctgctgcaaagcccagttaaggaaatgtctccaggtccaaagagataggatggtctgggccccacctgttggaagggaacagccagggaagaaccacctgcctgggcagggcctcgcctgagggagggcctggggcagggcacaaggggttgatctcagcccacaagccccaggggcagcccaggaaagcaggcgacggatgtggatcctgacctcctgagaggtgtgaggtgcagggatacccacctctgccttgacggccgcgcaccccttaggaagtggctgtccagcgcctgcctgtgctgggcctgggagaggagctgtcttgccagggctcccaggcagggagaggcaggtgaggttctcagccgatgtgttagaggttgagcatcgcctgtgcccagcttgctggctgtcagtgcttgatgtgcccatcctcagctaaaacccagagctggcatgttggtcatccccacctcagacgggacgcccagtccagagctggtgagccctgggccagcctttgggcctggcctgccccattcaccggccagcgccccacctccctggctggagggtcggggaggggctggcagagatggttggtccacagggctagccctgggtggtgggagaggggcccagggtcagggtgagagagagctgggccagggagctgctgcaggatgattttgaggtgtgggggaagcactcttggttggttttggtttgctttttaaaaattgtggtaaaatacataacaaaagtaactatcgtaacctga

SEQ ID NO: 106821 - DNA, 2049 bp, Homo sapiens
  Payload ID: 979
  Gene Symbol: AMDHD2
  Gene Name: amidohydrolase domain containing 2
  Uniprot ID: Q9Y303
  ENST ID: ENST00000413459
  CDS Start-End: 70-1854
gttcgtcactgggcgcgggatttggccgccgcggggctccggagccgctcgctcccgacacggctcacgatgcgcggcgagcagggcgcggcgggggcccgcgtgctccagttcactaactgccggatcctgcgcggagggaaactgctcagggaggatctgtgggtgcgcggaggccgcatcttggacccagagaagctgttctttgaggagcggcgcgtggccgacgagcggcgggactgcgggggccgcatcttggctcccggattcatcgacgtgcagatcaacggtggatttggtgttgacttctctcaagccacggaggacgtgggttcgggggttgccctcgtggcccggaggatcctgtcgcacggcgtcacctccttctgccccaccctggtcacttccccaccggaggtttatcacaaggttgttcctcagatccctgtgaagagtggtggtccccatggggcaggggtcctcgggctgcacctggagggccccttcatcagccgggagaagcggggcgcgcaccccgaggcccacctccgctccttcgaggccgatgccttccaggacttgctggccacctacgggcccctggacaatgtccgcatcgtgacgctggccccagagttgggccgtagccacgaagtgatccgggcgctgacggcccgtggcatctgcgtgtccctagggcactcagtggctgacctgcgggcggcagaggatgctgtgtggagcggagccaccttcatcacccacctcttcaacgccatgctgcctttccaccaccgcgacccaggcatcgtggggctcctgaccagcgaccggctgcccgcaggccgctgcatcttctatgggatgattgcagatggcacgcacaccaaccccgccgccctgcggatcgcccaccgtgcccatccccaggggctggtgctggtcaccgatgccatccctgccttgggcctgggcaacggccggcacacgctgggacagcaggaagtggaagtggacggtctgacggcctacgtggcaggtgagcgccctgacccactgggtcccaggtcccagcccgcatgccaggtggcccacgacccccccagagcctgccctctctgctctcaaggcaccaagacgctgagtggcagcatagccccaatggacgtctgtgtccggcacttcctgcaggccacaggctgcagcatggagtcggccctggaggctgcatccctgcaccccgcccagttgctggggctggagaagagtaaggggaccctggactttggtgctgacgcagacttcgtggtgctcgacgactcccttcacgtccaggccacctacatctcgggcccagtgcttgccggctgtggtgaccctgcctggtgctggagggcagtatgggaggcaccagtgtgccctgctcaccccattagtgtcatcctgccatcttctgtgtccccttggccctggcacacacccatgtggcaaacacgggccgtgaggctccctgaacagcttcgaggcgggtgggcttctggagccctcttggctctgaggacagccacagtggggtcagacgtcagggattggtgcagccccacgtcaggggtgattgtcttgactttctctccatttgagttctggggtgggtggctcccttcccccttgcttacaggtgctgtcctgggcacaggaggtacgcgcctggctctgccactgttctcttccctctgctgcaaagcccagttaaggaaatgtctccaggtccaaagagataggatggtctgggccccacctgttggaagggaacagccagggaagaaccacctgcctgggcagggcctcgcctgagggagggcctggggcagggcacaaggggttgatctcagcccacaagccccaggggcagcccaggaaagcaggcgacggatgtggatcctgacctcctgagaggtgtgaggtgcagggatacccacctctgccttgacggccgcgcaccccttaggaagtggctgtccagcgcctgcctgtgctgggcctgggaga

SEQ ID NO: 106822 - DNA, 490 bp, Homo sapiens
  Payload ID: 979
  Gene Symbol: AMDHD2
  Gene Name: amidohydrolase domain containing 2
  ENST ID: ENST00000563556
  CDS Start-End: 24-490
gctcgctcccgacacggctcacgatgcgcggcgagcagggcgcggcgggggcccgcgtgctccagttcactaactgccggatcctgcgcggagggaaactgctcagggaggatctgtgggtgcgcggaggccgcatcttggacccagagaagctgttctttgaggagcggcgcgtggccgacgagcggcgggactgcgggggccgcatcttggctcccggattcatcgacgtgcagatcaacggtggatttggtgttgacttctctcaagccacggaggacgtgggttcgggggttgccctcgtggcccggaggatcctgtcgcacggcgtcacctccttctgccccaccctggtcacttccccaccggaggtttatcacaagatccctgtgaagagtggtggtccccatggggcaggggtcctcgggctgcacctggagggccccttcatcagccgggagaagcggggcgcgcaccccgaggcccacct

SEQ ID NO: 106823 - DNA, 940 bp, Homo sapiens
  Payload ID: 979
  Gene Symbol: AMDHD2
  Gene Name: amidohydrolase domain containing 2
  ENST ID: ENST00000566706
  CDS Start-End: 39-940
cggggctccggagccgctcgctcccgacacggctcacgatgcgcggcgagcagggcgcggcgggggcccgcgtgctccagttcactaactgccggatcctgcgcggagggaaactgctcagggaggatctgtgggtgcgcggaggccgcatcttggacccagagaagctgttctttgaggagcggcgcgtggccgacgagcggcgggactgcgggggccgcatcttggctcccggattcatcgacgtgcagatcaacggtggatttggtgttgacttctctcaagccacggaggacgtgggttcgggggttgccctcgtggcccggaggatcctgtcgcacggcgtcacctccttctgccccaccctggtcacttccccaccggaggtttatcacaaggttgttcctcagatccctgtgaagagtggtggtccccatggggcaggggtcctcgggcactcagtggctgacctgcgggcggcagaggatgctgtgtggagcggagccaccttcatcacccacctcttcaacgccatgctgcctttccaccaccgcgacccaggcatcgtggggctcctgaccagcgaccggctgcccgcaggccgctgcatcttctatgggatgattgcagatggcacgcacaccaaccccgccgccctgcggatcgcccaccgtgcccatccccaggggctggtgctggtcaccgatgccatccctgccttgggcctgggcaacggccggcacacgctgggacagcaggaagtggaagtggacggtctgacggcctacgtggcaggctgcagcatggagtcggccctggaggctgcatccctgcaccccgcccagttgctggggctggagaagagtaaggggaccctggactttggtgctgacgcagacttcgtggtgctcgacgactcccttcacgtccaggccaccta

SEQ ID NO: 106824 - DNA, 1117 bp, Homo sapiens
  Payload ID: 979
  Gene Symbol: AMDHD2
  Gene Name: amidohydrolase domain containing 2
  ENST ID: ENST00000563633
  CDS Start-End: 67-564
cgtcactgggcgcgggatttggccgccgcggggctccggagccgctcgctcccgacacggctcacgatgcgcggcgagcagggcgcggcgggggcccgcgtgctccagttcactaactgccggatcctgcgcggagggaaactgctcagggaggatctgtgggtgcgcggaggccgcatcttggacccagagaagctgttctttgaggagcggcgcgtggccgacgagcggcgggactgcgggggccgcatcttggctcccggattcatcgacgtgcagatcaacggtggatttggtgttgacttctctcaagccacggaggacgtgggttcgggggttgccctcgtggcccggaggatcctgtcgcacggcgtcacctccttctgccccaccctggtcacttccccaccggaggtttatcacaagggctgcacctggagggccccttcatcagccgggagaagcggggcgcgcaccccgaggcccacctccgctccttcgaggccgatgccttccaggacttgctggccacctacgggcccctggacaatgtccgcatcgtgacgctggccccagagttgggccgtagccacgaagtgatccgggcgctgacggcccgtggcatctgcgtgtccctagggcactcagtggctgacctgcgggcggcagaggatgctgtgtggagcggagccaccttcatcacccacctcttcaacgccatgctgcctttccaccaccgcgacccaggcatcgtggggctcctgaccagcgaccggctgcccgcaggccgctgcatcttctatgggatgattgcagatggcacgcacaccaaccccgccgccctgcggatcgcccaccgtgcccatccccaggggctggtgctggtcaccgatgccatccctgccttgggcctgggcaacggccggcacacgctgggacagcaggaagtggaagtggacggtctgacggcctacgtggcaggcaccaagacgctgagtggcagcatagccccaatggacgtctgtgtccggcacttcctgcaggccacaggctgcagcatggagtcggccctggaggctgcatccctgcaccccgcccagttgctggggctggagaa

SEQ ID NO: 106825 - DNA, 1482 bp, Homo sapiens
  Payload ID: 979
  Gene Symbol: AMDHD2
  Gene Name: amidohydrolase domain containing 2
  ENST ID: ENST00000568263
  CDS Start-End: 674-1482
gtcacgtgggcgcggtctcagctctcggctggggttcgtcactgggcgcgggatttggccgccgcggggctccggagccgctcgctcccgacacggctcacgatgcgcggcgagcagggcgcggcgggggcccgcgtgctccagttcactaactgccggatcctgcgcggagggaaactgctcaggtggatttggtgttgacttctctcaagccacggaggacgtgggttcgggggttgccctcgtggcccggaggatcctgtcgcacggcgtcacctccttctgccccaccctggtcacttccccaccggaggtttatcacaaggttgttcctcagatccctgtgaagagtggtggtccccatggggcaggggtcctcgggctgcacctggagggccccttcatcagccgggagaagcggggcgcgcaccccgaggcccacctccgctccttcgaggccgatgccttccaggacttgctggccacctacgggcccctggacaatgtccgcatcgtgacgctggccccagagttgggccgtagccacgaagtgatccgggcgctgacggcccgtggcatctgcgtgtccctagggcactcagtggctgacctgcgggcggcagaggatgctgtgtggagcggagccaccttcatcacccacctcttcaacgccatgctgcctttccaccaccgcgacccaggcatcgtggggctcctgaccagcgaccggctgcccgcaggccgctgcatcttctatgggatgattgcagatggcacgcacaccaaccccgccgccctgcggatcgcccaccgtgcccatccccaggggctggtgctggtcaccgatgccatccctgccttgggcctgggcaacggccggcacacgctgggacagcaggaagtggaagtggacggtctgacggcctacgtggcaggtgagcgccctgacccactgggtcccaggtcccagcccgcatgccaggtggcccacgacccccccagagcctgccctctctgctctcaaggcaccaagacgctgagtggcagcatagccccaatggacgtctgtgtccggcacttcctgcaggccacaggctgcagcatggagtcggccctggaggctgcatccctgcaccccgcccagttgctggggctggagaagagtaaggggaccctggactttggtgctgacgcagacttcgtggtgctcgacgactcccttcacgtccaggccacctacatctcgggcccagtgcttgccggctgtggtgaccctgcctggtgctggagggcagtatgggaggcaccagtgtgccctgctcaccccattagtgtcatcctgccatcttctgtgtccccttggccctggcacacacccatgtggcaaacacgggccgtgaggctccctgaacagcttcgaggcgggtgggcttctggagccctcttggctctgaggacagccacagtggggtcagacgtcag

SEQ ID NO: 106826 - DNA, 924 bp, Homo sapiens
  Payload ID: 979
  Gene Symbol: AMDHD2
  Gene Name: amidohydrolase domain containing 2
  ENST ID: ENST00000569879
  CDS Start-End: 35-924
gctccggagccgctcgctcccgacacggctcacgatgcgcggcgagcagggcgcggcgggggcccgcgtgctccagttcactaactgccggatcctgcgcggagggaaactgctcagggaggatctgtgggtgcgcggaggccgcatcttggacccagagaagctgttctttgaggagcggcgcgtggccgacgagcggcgggactgcgggggccgcatcttggctcccggattcatcgacgtgcagatcaacggtggatttggtgttgacttctctcaagccacggaggacgtgggttcgggggttgccctcgtggcccggaggatcctgtcgcacggcgtcacctccttctgccccaccctggtcacttccccaccggaggtttatcacaaggttgttcctcagatccctgtgaagagtggtggtccccatggggcaggggtcctcgggcactcagtggctgacctgcgggcggcagaggatgctgtgtggagcggagccaccttcatcacccacctcttcaacgccatgctgcctttccaccaccgcgacccaggcatcgtggggctcctgaccagcgaccggctgcccgcaggccgctgcatcttctatgggatgattgcagatggcacgcacaccaaccccgccgccctgcggatcgcccaccgtgcccatccccaggggctggtgctggtcaccgatgccatccctgccttgggcctgggcaacggccggcacacgctgggacagcaggaagtggaagtggacggtctgacggcctacgtggcaggtgagcgccctgacccactgggtcccaggtcccagcccgcatgccaggtggcccacgacccccccagagcctgccctctctgctctcaaggcaccaagacgctgagtggcagcatagccccaatggacgtctg

SEQ ID NO: 106827 - DNA, 2649 bp, Homo sapiens
  Payload ID: 980
  Gene Symbol: AOC1
  Gene Name: amine oxidase, copper containing 1
  Uniprot ID: P19801
  ENST ID: ENST00000360937
  CDS Start-End: 99-2354
tctgattgacttcaagaaggagtcagagatcagcttaagggcaaaggctggaagcagagcgaactgggagcagagcacacagagccgtggagcgagagatgccggccctgggctgggccgtggctgccatcctgatgctgcagacggccatggcggagccctccccggggactctgcccaggaaggcaggggtgttttcagacctaagcaaccaagagctgaaggcagtgcacagcttcctctggtccaagaaggagctgaggctgcagccctccagtaccaccaccatggccaagaacaccgtgtttctcatcgagatgctgctgcccaagaagtaccatgtgctgaggtttctggataaaggtgaaaggcatcctgtgcgggaagcccgtgccgtcatcttctttggtgaccaggagcatcccaatgtcaccgagtttgctgtggggcccctgccagggccctgctacatgcgagcactgtcccccaggcctgggtaccagtcctcctgggcatcgaggcccatctccacagcagagtatgccctcctctaccacaccctgcaggaagccaccaagcccctgcatcagttcttcctcaataccacaggcttctcattccaagactgccatgacagatgcctggccttcaccgatgtggccccccggggtgtggcttctggccagcgccgcagttggcttatcatacagcgctatgtagaaggctactttctgcaccccactgggctggagctcctcgtggatcatgggagcacagatgctgggcactgggccgtggagcaggtgtggtacaacgggaagttctatgggagcccagaggaactggctcggaagtatgcagatggagaggtggacgtggtggtcctggaggacccgctgcctgggggcaaggggcatgacagcacagaggagccgcccctcttctcctcccacaagccccgcggggacttccccagccccatccatgtgagcggcccccgcttggtccagccccacggccctcgcttcaggctggagggcaacgctgtgctctacggcggctggagctttgccttccggctgcgctcctcctccgggctgcaggtcctgaacgtgcacttcggcggagagcgcattgcctatgaggtcagcgtgcaagaggcagtggcgctgtatggaggacacacacctgcaggcatgcagaccaagtacctcgatgtcggctggggcctgggcagcgtcactcatgagttagcccccggcatcgactgcccggagaccgccaccttcctggacactttccactactatgatgccgatgacccggtccattatccccgagccctctgcctctttgaaatgcccacaggggtgccccttcggcggcactttaattccaactttaaaggtggcttcaacttctatgcggggctgaagggccaggtgctggtgctgcggacaacttcaactgtctacaattatgattacatttgggactttatcttctaccccaacggggtgatggaggccaagatgcatgccactggctacgtccacgccaccttctacacccccgaggggctgcgccacggcactcgcctgcacacccacctgattggcaacatacacactcacttggtgcactaccgcgtagacctggatgtggcaggcaccaagaacagcttccagacactgcagatgaagctagaaaacatcaccaacccctggagcccaagacaccgcgtggtccagccaactctggagcagacgcagtactcctgggagcgccaggcggccttccgcttcaaaaggaagctgcctaagtacctgctctttaccagcccccaggagaacccctggggccacaagcgcacgtaccgcctgcagatccactccatggccgaccaggtgctgcccccaggctggcaggaggagcaggccatcacctgggcaaggtaccccctggcagtgaccaagtaccgggagtcggagctgtgcagcagcagcatctaccaccagaacgacccctggcacccgcccgtggtctttgagcagtttcttcacaacaacgagaacattgaaaatgaggacctggtggcctgggtgacggtgggcttcctgcacatcccccactcagaggacattcccaacacagccacacctgggaactccgtgggcttcctgctccggccattcaacttcttcccagaggacccctccctggcatccagagacactgtgatcgtgtggcctcgggacaacggccccaactacgtccagcgctggatccctgaggacagggactgctcgatgcctcccccttttagctacaatgggacctatagacctgtgtgaccagcccccagttcctcccccagttcctcccaggaagcccaggagcctcactggggcagacaataaaccctcagagcctcgctctgtgtgctgcttcttgcggggaggcacagggccatgtgtgtaggaaacacacgaacagacgtgcacacacacagacgtgcacacacacacagacatgcacacacacacagacgtgcacacacacagacgtgcacgcactcacacggacatgcacacacatggcatgtactttattcacactggtctactgcagtccagaaaagccaccatt

SEQ ID NO: 106828 - DNA, 2453 bp, Homo sapiens
  Payload ID: 980
  Gene Symbol: AOC1
  Gene Name: amine oxidase, copper containing 1
  Uniprot ID: P19801
  ENST ID: ENST00000416793
  CDS Start-End: 61-2373
gggcaaaggctggaagcagagcgaactgggagcagagcacacagagccgtggagcgagagatgccggccctgggctgggccgtggctgccatcctgatgctgcagacggccatggcggagccctccccggggactctgcccaggaaggcaggggtgttttcagacctaagcaaccaagagctgaaggcagtgcacagcttcctctggtccaagaaggagctgaggctgcagccctccagtaccaccaccatggccaagaacaccgtgtttctcatcgagatgctgctgcccaagaagtaccatgtgctgaggtttctggataaaggtgaaaggcatcctgtgcgggaagcccgtgccgtcatcttctttggtgaccaggagcatcccaatgtcaccgagtttgctgtggggcccctgccagggccctgctacatgcgagcactgtcccccaggcctgggtaccagtcctcctgggcatcgaggcccatctccacagcagagtatgccctcctctaccacaccctgcaggaagccaccaagcccctgcatcagttcttcctcaataccacaggcttctcattccaagactgccatgacagatgcctggccttcaccgatgtggccccccggggtgtggcttctggccagcgccgcagttggcttatcatacagcgctatgtagaaggctactttctgcaccccactgggctggagctcctcgtggatcatgggagcacagatgctgggcactgggccgtggagcaggtgtggtacaacgggaagttctatgggagcccagaggaactggctcggaagtatgcagatggagaggtggacgtggtggtcctggaggacccgctgcctgggggcaaggggcatgacagcacagaggagccgcccctcttctcctcccacaagccccgcggggacttccccagccccatccatgtgagcggcccccgcttggtccagccccacggccctcgcttcaggctggagggcaacgctgtgctctacggcggctggagctttgccttccggctgcgctcctcctccgggctgcaggtcctgaacgtgcacttcggcggagagcgcattgcctatgaggtcagcgtgcaagaggcagtggcgctgtatggaggacacacacctgcaggcatgcagaccaagtacctcgatgtcggctggggcctgggcagcgtcactcatgagttagcccccggcatcgactgcccggagaccgccaccttcctggacactttccactactatgatgccgatgacccggtccattatccccgagccctctgcctctttgaaatgcccacaggggtgccccttcggcggcactttaattccaactttaaaggtggcttcaacttctatgcggggctgaagggccaggtgctggtgctgcggacaacttcaactgtctacaattatgattacatttgggactttatcttctaccccaacggggtgatggaggccaagatgcatgccactggctacgtccacgccaccttctacacccccgaggggctgcgccacggcactcgcctgcacacccacctgattggcaacatacacactcacttggtgcactaccgcgtagacctggatgtggcaggcaccaagaacagcttccagacactgcagatgaagctagaaaacatcaccaacccctggagcccaagacaccgcgtggtccagccaactctggagcagacgcagtactcctgggagcgccaggcggccttccgcttcaaaaggaagctgcctaagtacctgctctttaccagcccccaggagaacccctggggccacaagcgcacgtaccgcctgcagatccactccatggccgaccaggtgctgcccccaggctggcaggaggagcaggccatcacctgggcaaggactgaggggggccagcccagggccctgagccaagctgcttcgcctgtgcctggcaggtaccccctggcagtgaccaagtaccgggagtcggagctgtgcagcagcagcatctaccaccagaacgacccctggcacccgcccgtggtctttgagcagtttcttcacaacaacgagaacattgaaaatgaggacctggtggcctgggtgacggtgggcttcctgcacatcccccactcagaggacattcccaacacagccacacctgggaactccgtgggcttcctgctccggccattcaacttcttcccagaggacccctccctggcatccagagacactgtgatcgtgtggcctcgggacaacggccccaactacgtccagcgctggatccctgaggacagggactgctcgatgcctcccccttttagctacaatgggacctatagacctgtgtgaccagcccccagttcctcccccagttcctcccaggaagcccaggagcctcactggggcagacaataaaccctcagagcctc

SEQ ID NO: 106829 - DNA, 1314 bp, Homo sapiens
  Payload ID: 980
  Gene Symbol: AOC1
  Gene Name: amine oxidase, copper containing 1
  ENST ID: ENST00000483043
  CDS Start-End: 303-1314
aaaggctggaagcagagcgaactgggagcagagcacacagaggctgaggcaggagaattgcttgaacctgggaggcagaggtagcagtgagccaagatcgcatcactgcactccagcctgggctacagagcaagactgtctcaggaaaaagaaaaaatagtctatttaaagaagaaaaaaaagaggcctggccaatatttaataggagaacacaagaactcacctcatatccttcctgctggctctgggttccgcctgcagcccctgcctcacctgctccctccagagccgtggagcgagagatgccggccctgggctgggccgtggctgccatcctgatgctgcagacggccatggcggagccctccccggggactctgcccaggaaggcaggggtgttttcagacctaagcaaccaagagctgaaggcagtgcacagcttcctctggtccaagaaggagctgaggctgcagccctccagtaccaccaccatggccaagaacaccgtgtttctcatcgagatgctgctgcccaagaagtaccatgtgctgaggtttctggataaaggtgaaaggcatcctgtgcgggaagcccgtgccgtcatcttctttggtgaccaggagcatcccaatgtcaccgagtttgctgtggggcccctgccagggccctgctacatgcgagcactgtcccccaggcctgggtaccagtcctcctgggcatcgaggcccatctccacagcagagtatgccctcctctaccacaccctgcaggaagccaccaagcccctgcatcagttcttcctcaataccacaggcttctcattccaagactgccatgacagatgcctggccttcaccgatgtggccccccggggtgtggcttctggccagcgccgcagttggcttatcatacagcgctatgtagaaggctactttctgcaccccactgggctggagctcctcgtggatcatgggagcacagatgctgggcactgggccgtggagcaggtgtggtacaacgggaagttctatgggagcccagaggaactggctcggaagtatgcagatggagaggtggacgtggtggtcctggaggacccgctgcctgggggcaaggggcatgacagcacagaggagccgcccctcttctcctcccacaagccccgcggggacttccccagccccatccatgtgagcggcccccgcttggtccagccccacggccctcgcttcaggctggagggcaacgctgtgctctacggcggctggagctttgccttccggctgcgctcctcctccgggctgcaggtcctga

SEQ ID NO: 106830 - DNA, 2857 bp, Homo sapiens
  Payload ID: 980
  Gene Symbol: AOC1
  Gene Name: amine oxidase, copper containing 1
  Uniprot ID: P19801
  ENST ID: ENST00000467291
  CDS Start-End: 307-2562
tttggaggagacaagtttgggagcaggaaagccagtaggagtctactgcaggaatttagctttcaaatctgtacctgttgatgagagaacctccaggtttgtcccctactaccaatgatgaggcaaacacagagagaggaacccctttgactaaagctgaattgtaaaggactaaagccctaacttctcttcgaatgacctgcattcaaatcaagagcggttgaattctctgttttgctgtgggtgccagcctctatcagcccctgccctggtccatctgtcagcttcagagccgtggagcgagagatgccggccctgggctgggccgtggctgccatcctgatgctgcagacggccatggcggagccctccccggggactctgcccaggaaggcaggggtgttttcagacctaagcaaccaagagctgaaggcagtgcacagcttcctctggtccaagaaggagctgaggctgcagccctccagtaccaccaccatggccaagaacaccgtgtttctcatcgagatgctgctgcccaagaagtaccatgtgctgaggtttctggataaaggtgaaaggcatcctgtgcgggaagcccgtgccgtcatcttctttggtgaccaggagcatcccaatgtcaccgagtttgctgtggggcccctgccagggccctgctacatgcgagcactgtcccccaggcctgggtaccagtcctcctgggcatcgaggcccatctccacagcagagtatgccctcctctaccacaccctgcaggaagccaccaagcccctgcatcagttcttcctcaataccacaggcttctcattccaagactgccatgacagatgcctggccttcaccgatgtggccccccggggtgtggcttctggccagcgccgcagttggcttatcatacagcgctatgtagaaggctactttctgcaccccactgggctggagctcctcgtggatcatgggagcacagatgctgggcactgggccgtggagcaggtgtggtacaacgggaagttctatgggagcccagaggaactggctcggaagtatgcagatggagaggtggacgtggtggtcctggaggacccgctgcctgggggcaaggggcatgacagcacagaggagccgcccctcttctcctcccacaagccccgcggggacttccccagccccatccatgtgagcggcccccgcttggtccagccccacggccctcgcttcaggctggagggcaacgctgtgctctacggcggctggagctttgccttccggctgcgctcctcctccgggctgcaggtcctgaacgtgcacttcggcggagagcgcattgcctatgaggtcagcgtgcaagaggcagtggcgctgtatggaggacacacacctgcaggcatgcagaccaagtacctcgatgtcggctggggcctgggcagcgtcactcatgagttagcccccggcatcgactgcccggagaccgccaccttcctggacactttccactactatgatgccgatgacccggtccattatccccgagccctctgcctctttgaaatgcccacaggggtgccccttcggcggcactttaattccaactttaaaggtggcttcaacttctatgcggggctgaagggccaggtgctggtgctgcggacaacttcaactgtctacaattatgattacatttgggactttatcttctaccccaacggggtgatggaggccaagatgcatgccactggctacgtccacgccaccttctacacccccgaggggctgcgccacggcactcgcctgcacacccacctgattggcaacatacacactcacttggtgcactaccgcgtagacctggatgtggcaggcaccaagaacagcttccagacactgcagatgaagctagaaaacatcaccaacccctggagcccaagacaccgcgtggtccagccaactctggagcagacgcagtactcctgggagcgccaggcggccttccgcttcaaaaggaagctgcctaagtacctgctctttaccagcccccaggagaacccctggggccacaagcgcacgtaccgcctgcagatccactccatggccgaccaggtgctgcccccaggctggcaggaggagcaggccatcacctgggcaaggtaccccctggcagtgaccaagtaccgggagtcggagctgtgcagcagcagcatctaccaccagaacgacccctggcacccgcccgtggtctttgagcagtttcttcacaacaacgagaacattgaaaatgaggacctggtggcctgggtgacggtgggcttcctgcacatcccccactcagaggacattcccaacacagccacacctgggaactccgtgggcttcctgctccggccattcaacttcttcccagaggacccctccctggcatccagagacactgtgatcgtgtggcctcgggacaacggccccaactacgtccagcgctggatccctgaggacagggactgctcgatgcctcccccttttagctacaatgggacctatagacctgtgtgaccagcccccagttcctcccccagttcctcccaggaagcccaggagcctcactggggcagacaataaaccctcagagcctcgctctgtgtgctgcttcttgcggggaggcacagggccatgtgtgtaggaaacacacgaacagacgtgcacacacacagacgtgcacacacacacagacatgcacacacacacagacgtgcacacacacagacgtgcacgcactcacacggacatgcacacacatggcatgtactttattcacactggtctactgcagtccagaaaagccaccatt

SEQ ID NO: 106831 - DNA, 945 bp, Homo sapiens
  Payload ID: 980
  Gene Symbol: AOC1
  Gene Name: amine oxidase, copper containing 1
  ENST ID: ENST00000460213
  CDS Start-End: 199-945
gaatctggtcagggtctcaaagatcgttaaaaagccgccaaagtttgcaactcgtcttgagtggctgctcctcccaaacggttctgcctctggtgtcttgttctaggagcggttgaattctctgttttgctgtgggtgccagcctctatcagcccctgccctggtccatctgtcagcttcagagccgtggagcgagagatgccggccctgggctgggccgtggctgccatcctgatgctgcagacggccatggcggagccctccccggggactctgcccaggaaggcaggggtgttttcagacctaagcaaccaagagctgaaggcagtgcacagcttcctctggtccaagaaggagctgaggctgcagccctccagtaccaccaccatggccaagaacaccgtgtttctcatcgagatgctgctgcccaagaagtaccatgtgctgaggtttctggataaaggtgaaaggcatcctgtgcgggaagcccgtgccgtcatcttctttggtgaccaggagcatcccaatgtcaccgagtttgctgtggggcccctgccagggccctgctacatgcgagcactgtcccccaggcctgggtaccagtcctcctgggcatcgaggcccatctccacagcagagtatgccctcctctaccacaccctgcaggaagccaccaagcccctgcatcagttcttcctcaataccacaggcttctcattccaagactgccatgacagatgcctggccttcaccgatgtggccccccggggtgtggcttctggccagcgccgcagttggcttatcatacagcgctatgtagaaggctactttctgcaccccactgggctggagctcctcgtggatcatgggagcacagatgctgggcactgggccgtggagcaggtgtggtacaacgggaagttctatgggagcccagaggaactg

SEQ ID NO: 106832 - DNA, 3135 bp, Homo sapiens
  Payload ID: 980
  Gene Symbol: AOC1
  Gene Name: amine oxidase, copper containing 1
  Uniprot ID: P19801
  ENST ID: ENST00000493429
  CDS Start-End: 585-2840
gactgggaagacatgaccttacacaccttggttctttaacttgaccttgggaagacagggccagccagcaaggtggctggggagaaggccgaggtccccgggccgcagacgggaattgagggtcaggagccgaagtgaaactggagccggcgccacgagatgcagccctgaagggcacctccacccagtggccctcccccaccccactcccggggccctcctggcccagcgtcaccctgctgcgctaggacctacaagggcggcctctgggagccctctgctttacctcctctcctgggtcaggctgcagaaagaacaagctcctccaccctgcctgctttcaaatctgtacctgttgatgagagaacctccaggtttgtcccctactaccaatgatgaggcaaacacagagagaggaacccctttgactaaagctgaattgtaaaggactaaagccctaacttctcttcgaatgacctgcattcaaatcaagagcggttgaattctctgttttgctgtgggtgccagcctctatcagcccctgccctggtccatctgtcagcttcagagccgtggagcgagagatgccggccctgggctgggccgtggctgccatcctgatgctgcagacggccatggcggagccctccccggggactctgcccaggaaggcaggggtgttttcagacctaagcaaccaagagctgaaggcagtgcacagcttcctctggtccaagaaggagctgaggctgcagccctccagtaccaccaccatggccaagaacaccgtgtttctcatcgagatgctgctgcccaagaagtaccatgtgctgaggtttctggataaaggtgaaaggcatcctgtgcgggaagcccgtgccgtcatcttctttggtgaccaggagcatcccaatgtcaccgagtttgctgtggggcccctgccagggccctgctacatgcgagcactgtcccccaggcctgggtaccagtcctcctgggcatcgaggcccatctccacagcagagtatgccctcctctaccacaccctgcaggaagccaccaagcccctgcatcagttcttcctcaataccacaggcttctcattccaagactgccatgacagatgcctggccttcaccgatgtggccccccggggtgtggcttctggccagcgccgcagttggcttatcatacagcgctatgtagaaggctactttctgcaccccactgggctggagctcctcgtggatcatgggagcacagatgctgggcactgggccgtggagcaggtgtggtacaacgggaagttctatgggagcccagaggaactggctcggaagtatgcagatggagaggtggacgtggtggtcctggaggacccgctgcctgggggcaaggggcatgacagcacagaggagccgcccctcttctcctcccacaagccccgcggggacttccccagccccatccatgtgagcggcccccgcttggtccagccccacggccctcgcttcaggctggagggcaacgctgtgctctacggcggctggagctttgccttccggctgcgctcctcctccgggctgcaggtcctgaacgtgcacttcggcggagagcgcattgcctatgaggtcagcgtgcaagaggcagtggcgctgtatggaggacacacacctgcaggcatgcagaccaagtacctcgatgtcggctggggcctgggcagcgtcactcatgagttagcccccggcatcgactgcccggagaccgccaccttcctggacactttccactactatgatgccgatgacccggtccattatccccgagccctctgcctctttgaaatgcccacaggggtgccccttcggcggcactttaattccaactttaaaggtggcttcaacttctatgcggggctgaagggccaggtgctggtgctgcggacaacttcaactgtctacaattatgattacatttgggactttatcttctaccccaacggggtgatggaggccaagatgcatgccactggctacgtccacgccaccttctacacccccgaggggctgcgccacggcactcgcctgcacacccacctgattggcaacatacacactcacttggtgcactaccgcgtagacctggatgtggcaggcaccaagaacagcttccagacactgcagatgaagctagaaaacatcaccaacccctggagcccaagacaccgcgtggtccagccaactctggagcagacgcagtactcctgggagcgccaggcggccttccgcttcaaaaggaagctgcctaagtacctgctctttaccagcccccaggagaacccctggggccacaagcgcacgtaccgcctgcagatccactccatggccgaccaggtgctgcccccaggctggcaggaggagcaggccatcacctgggcaaggtaccccctggcagtgaccaagtaccgggagtcggagctgtgcagcagcagcatctaccaccagaacgacccctggcacccgcccgtggtctttgagcagtttcttcacaacaacgagaacattgaaaatgaggacctggtggcctgggtgacggtgggcttcctgcacatcccccactcagaggacattcccaacacagccacacctgggaactccgtgggcttcctgctccggccattcaacttcttcccagaggacccctccctggcatccagagacactgtgatcgtgtggcctcgggacaacggccccaactacgtccagcgctggatccctgaggacagggactgctcgatgcctcccccttttagctacaatgggacctatagacctgtgtgaccagcccccagttcctcccccagttcctcccaggaagcccaggagcctcactggggcagacaataaaccctcagagcctcgctctgtgtgctgcttcttgcggggaggcacagggccatgtgtgtaggaaacacacgaacagacgtgcacacacacagacgtgcacacacacacagacatgcacacacacacagacgtgcacacacacagacgtgcacgcactcacacggacatgcacacacatggcatgtactttattcacactggtctactgcagtccagaaaagccaccatt

SEQ ID NO: 106833 - DNA, 2435 bp, Homo sapiens
  Payload ID: 980
  Gene Symbol: AOC1
  Gene Name: amine oxidase, copper containing 1
  ENST ID: ENST00000622116
  CDS Start-End: 1521-2105
tctgattgacttcaagaaggagtcagagatcagcttaagggcaaaggctggaagcagagcgaactgggagcagagcacacagagccgtggagcgagagatgccggccctgggctgggccgtggctgccatcctgatgctgcagacggccatggcggagccctccccggggactctgcccaggaaggcaggggtgttttcagacctaagcaaccaagagctgaaggcagtgcacagcttcctctggtccaagaaggagctgaggctgcagccctccagtaccaccaccatggccaagaacaccgtgtttctcatcgagatgctgctgcccaagaagtaccatgtgctgaggtttctggataaaggtgaaaggcatcctgtgcgggaagcccgtgccgtcatcttctttggtgaccaggagcatcccaatgtcaccgagtttgctgtggggcccctgccagggccctgctacatgcgagcactgtcccccaggcctgggtaccagtcctcctgggcatcgaggcccatctccacagcagagtatgccctcctctaccacaccctgcaggaagccaccaagcccctgcatcagttcttcctcaataccacaggcttctcattccaagactgccatgacagatgcctggccttcaccgatgtggccccccggggtgtggcttctggccagcgccgcagttggcttatcatacagcgctatgtagaaggctactttctgcaccccactgggctggagctcctcgtggatcatgggagcacagatgctgggcactgggccgtggagcaggtgtggtacaacgggaagttctatgggagcccagaggaactggctcggaagtatgcagatggagaggtggacgtggtggtcctggaggacccgctgcctgggggcaaggggcatgacagcacagaggagccgcccctcttctcctcccacaagccccgcggggacttccccagccccatccatgtgagcggcccccgcttggtccagccccacggccctcgcttcaggctggagggcaacgctgtgctctacggcggctggagctttgccttccggctgcgctcctcctccgggctgcaggtcctgaacgtgcacttcggcggagagcgcattgcctatgaggtcagcgtgcaagaggcagtggcgctgtatggaggacacacacctgcaggcatgcagaccaagtacctcgatgtcggctggggcctgggcagcgtcactcatgagttagcccccggcatcgactgcccggagaccgccaccttcctggacactttccactactatgatgccgatgacccggtccattatccccgagccctctgcctctttgaaatgcccacaggggtgccccttcggcggcactttaattccaactttaaaggtggcttcaacttctatgcggggctgaagggccaggtgctggtgctgcggacaacttcaactgtctacaattatgattacatttgggactttatcttctaccccaacggggtgatggaggccaagatgcatgccactggctacgtccacgccaccttctacacccccgaggggctgcgccacggcactcgcctgcacacccacctgattggcaacatacacactcacttggtgcactaccgcgtagacctggatgtggcaggcaccaagaacagcttccagacactgcagatgaagctagaaaacatcaccaacccctggagcccaagacaccgcgtggtccagccaactctggagcagacgcagtactcctgggagcgccaggcggccttccgcttcaaaaggaagctgcctaagtacctgctctttaccagcccccaggagaacccctggggccacaagcgcacgtaccgcctgcagatccactccatggccgaccaggtgctgcccccaggctggcaggaggagcaggccatcacctgggcaaggtaccccctggcagtgaccaagtaccgggagtcggagctgtgcagcagcagcatctaccaccagaacgacccctggcacccgccgtggtctttgagcagtttcttcacaacaacgagaacattgaaaatgaggacctggtggcctgggtgacggtgggcttcctgcacatcccccactcagaggacattcccaacacagccacacctgggaactccgtgggcttcctgctccggccattcaacttcttcccagaggacccctccctggcatccagagacactgtgatcgtgtggcctcgggacaacggccccaactacgtccagcgctggatccctgaggacagggactgctcgatgcctcccccttttagctacaatgggacctatagacctgtgtgaccagcccccagttcctcccccagttcctcccaggaagcccaggagcctcactggggcagacaataaaccctcagagcctcgc

SEQ ID NO: 106834 - DNA, 2366 bp, Homo sapiens
  Payload ID: 980
  Gene Symbol: AOC1
  Gene Name: amine oxidase, copper containing 1
  ENST ID: ENST00000619575
  CDS Start-End: 41-2173
gcgaactgggagcagagcacacagagccgtggagcgagagatgccggccctgggctgggccgtggctgccatcctgatgctgcagacggccatggcggagccctccccggggactctgcccaggaaggcaggggtgttttcagacctaagcaaccaagagctgaaggcagtgcacagcttcctctggtccaagaaggagctgaggctgcagccctccagtaccaccaccatggccaagaacaccgtgtttctcatcgagatgctgctgcccaagaagtaccatgtgctgaggtttctggataaaggtgaaaggcatcctgtgcgggaagcccgtgccgtcatcttctttggtgaccaggagcatcccaatgtcaccgagtttgctgtggggcccctgccagggccctgctacatgcgagcactgtcccccaggcctgggtaccagtcctcctgggcatcgaggcccatctccacagcagagtatgccctcctctaccacaccctgcaggaagccaccaagcccctgcatcagttcttcctcaataccacaggcttctcattccaagactgccatgacagatgcctggccttcaccgatgtggccccccggggtgtggcttctggccagcgccgcagttggcttatcatacagcgctatgtagaaggctactttctgcaccccactgggctggagctcctcgtggatcatgggagcacagatgctgggcactgggccgtggagcaggtgtggtacaacgggaagttctatgggagcccagaggaactggctcggaagtatgcagatggagaggtggacgtggtggtcctggaggaccgctgcctgggggcaaggggcatgacagcacagaggagccgcccctcttctcctccacaagccccgcggggacttccccagccccatccatgtgagcggcccccgcttggtccagccccacggccctcgcttcaggctggagggcaacgctgtgctctacggcggctggagctttgccttccgctgcgctcctcctccgggctgcaggtcctgaacgtgcacttcggcggagagcgcattgcctatgaggtcagcgtgcaagaggcagtggcgctgtatggaggacacacacctgcaggcatgcagaccaagtacctcgatgtcggctggggcctgggcagcgtcactcatgagttagcccccggcatcgactgcccggagaccgccaccttcctggacactttccactactatgatgccgatgacccggtccattatccccgagccctctgcctctttgaaatgcccacaggggtgccccttcggcggcactttaattccaactttaaaggtggcttcaacttctatgcggggctgaagggccaggtgctggtgctgcggacaacttcaactgtctacaattatgattacatttgggactttatcttctaccccaacggggtgatggaggccaagatgcatgccactggctacgtccacgccaccttctacacccccgagggctgcgcccggcactcgcctgcacacccacctgattggcaacatacacactcacttgtgcactaccgcgtagacctggatgtggcaggcaccaagaacagcttccagacactgcagatgaagctagaaaacatcaccaacccctggagcccaagacaccgcgtggtccagccaactctggagcagacgcagtactcctgggagcgccaggcggccttccgcttcaaaaggaagctgcctaagtacctgctctttaccagcccccaggagaacccctggggccacaagcgcacgtaccgcctgcagatccactccatggccgaccaggtgctgcccccaggctggcaggaggagcaggccatcacctgggcaaggtaccccctggcagtgaccaagtaccgggagtcggagctgtgcagcagcagcatctaccaccagaacgacccctggcacccgcccgtggtctttgagcagtttcttcacaacaacgagaacattgaaaatgaggacctggtggcctgggtgacggtgggcttcctgcacatcccccactcagaggacattcccaacacagccacacctgggaactccgtgggcttcctgctccggccattcaacttcttcccagaggacccctggcatccagagacactgtgatcgtgtggcctcgggacaacggccccaactacgtccagcgctggatccctgaggacagggactgctcgatgcctcccccttttagctacaatgggacctatagacctgtgtgaccagcccccagttcctcccccagttcctcccaggaagcccaggagcctcactggggcagacaataaaccctcagagcctc

SEQ ID NO: 106835 - DNA, 2657 bp, Homo sapiens
  Payload ID: 981
  Gene Symbol: AOC2
  Gene Name: amine oxidase, copper containing 2 (retina-specific)
  Uniprot ID: O75106
  ENST ID: ENST00000253799
  CDS Start-End: 28-2298
ttctgatttcagctctcagcatccaccatgcatctcaagatagtcctggcgttcctggcactgtccctcattaccatctttgccctggcctatgttttgctgaccagcccaggtggttccagccagcctccccactgcccctctgtatcccatagggcccagccctggccacaccctggccagagccagctgtttgcagacctgagccgagaggagttgacagctgtgatgcgctttctgacccagcggctggggccagggctggtggacgcagcccaggctcagccctcggacaactgcatcttctcagtggagctgcagctgccccccaaggctgcagccctggcccacctggacagggggagccccccacctgcccgggaggcactggccatcgtcctctttggtggacaaccccaacccaatgtgagtgagctggtggtggggccgctgcctcacccctcgtacatgcgggatgtgactgtggagcgtcacggcgggcccctgccctatcaccgtcgcccggtgctgagagctgagtttacacagatgtggaggcatctgaaagaggtggagctacccaaggcacccatcttcctgtcgtccaccttcaactacaatggctctaccctggcagctgtgcatgccacccctcggggcttgcgctcaggggaccgagctacctggatggccctctaccataacatctcaggggttggtcttttccttcaccccgtggggctggagctactactggaccacagggccctggaccctgcccactggactgtccagcaggtcttctaccttgggcactactatgcagacttgggccagttggaacgggagtttaagtctggccggttggaagtggttagagtccctctacctccaccaaatggagcttcatccctgaggtctcggaactctccaggtcctcttccccctcttcagttctcgccccagggttcccagtacagtgtgcaaggaaacctggtggtatcctccctctggtcatttacctttggccatggggtgttcagcggcctgaggatttttgatgttcggttccagggtgagcgaatagcctatgaagtcagtgtccaggagtgtgtatctatctatggtgccgattcacccaagacgatgctgactcgctatttggatagcagctttggactcggccgtaacagccgaggcttggtgcggggagtggactgcccctatcaagccacgatggtggacatccatatattagtgggcaaaggggcagtccagctgcttccaggggctgtgtgtgtatttgaggaagcccagggactgccccttcgaaggcaccacaattaccttcaaaatcatttctatggtggtttggccagctcagcccttgtggtcaggtctgtgtcatctgtgggcaactatgactacatttgggactttgtgttgtacccaaatggggcacttgaagggcgggtccatgccacgggttatatcaacacagctttcctgaaagggggagaggagggcctcctctttgggaaccgtgtgggggaaagagtgctgggaacggtgcacacacatgccttccacttcaagctggacctggatgtggcagggctgaaaaactgggtggtagctgaagacgtggtgtttaaacctgtggctgccccctggaacccggagcactggctacagcgcccacagctgactcggcaggtcctgggaaaggaggacctgacagctttttccttgggaagccccctaccccgctacctctacctggctagcaaccagactaatgcgtggggtcaccagcgcgggtaccgaatccagatccacagcccccttggcatacacatacccctggagagtgacatggagagggccctcagctgggggagataccagcttgtggtgacccagagaaaggaggaggagtcacagagcagtagcatctatcaccagaatgacatctggacacccacagttacctttgctgacttcatcaacaatgaaaccctcttaggagaggatctggtggcttgggtcacagccagcttcctgcacattccccatgccgaggacatcccaaacacagtgactctggggaacagagttggcttcttgctccgaccctataacttctttgatgaggacccctccatcttctcccctggcagtgtctactttgagaagggccaggatgctgggctctgcagcatcaatcctgtggcctgcctccccgacctggcagcctgtgtcccggacttaccccctttctcttaccacggcttctagtcctgagggtgtggcgggcggcgtggttaggcacatgtacttttccctgtttctactttctattctccgtgtttttatcacacctgctccccagattcccaccccctcaatgttcctctcacacgaaacccccatcagtccctttggttaattcttacttcctgttcatctctaaagtgttaaattataaaaatgatttttaaatattcaaagaaaaatatcacaaatcctactactcagaaataggtggtcacattacatcagacatctctttatgcatgtgcattcaaaaggaagagtagatagaattttgtaaaacagatgttgtatgtaatttataataaaaagtattagaggaa

SEQ ID NO: 106836 - DNA, 2572 bp, Homo sapiens
  Payload ID: 981
  Gene Symbol: AOC2
  Gene Name: amine oxidase, copper containing 2 (retina-specific)
  Uniprot ID: O75106
  ENST ID: ENST00000452774
  CDS Start-End: 27-2216
tctgatttcagctctcagcatccaccatgcatctcaagatagtcctggcgttcctggcactgtccctcattaccatctttgccctggcctatgttttgctgaccagcccaggtggttccagccagcctccccactgcccctctgtatcccatagggcccagccctggccacaccctggccagagccagctgtttgcagacctgagccgagaggagttgacagctgtgatgcgctttctgacccagcggctggggccagggctggtggacgcagcccaggctcagccctcggacaactgcatcttctcagtggagctgcagctgccccccaaggctgcagccctggcccacctggacagggggagccccccacctgcccgggaggcactggccatcgtcctctttggtggacaaccccaacccaatgtgagtgagctggtggtggggccgctgcctcacccctcgtacatgcgggatgtgactgtggagcgtcacggcgggcccctgccctatcaccgtcgcccggtgctgagagctgagtttacacagatgtggaggcatctgaaagaggtggagctacccaaggcacccatcttcctgtcgtccaccttcaactacaatggctctaccctggcagctgtgcatgccacccctcggggcttgcgctcaggggaccgagctacctggatggccctctaccataacatctcaggggttggtcttttccttcaccccgtggggctggagctactactggaccacagggccctggaccctgcccactggactgtccagcaggtcttctaccttgggcactactatgcagacttgggccagttggaacgggagtttaagtctggccggttggaagtggttagagtccctctacctccaccaaatggagcttcatccctgaggtctcggaactctccaggtcctcttccccctcttcagttctcgccccagggttcccagtacagtgtgcaaggaaacctggtggtatcctccctctggtcatttacctttggccatggggtgttcagcggcctgaggatttttgatgttcggttccagggtgagcgaatagcctatgaagtcagtgtccaggagtgtgtatctatctatggtgccgattcacccaagacgatgctgactcgctatttggatagcagctttggactcggccgtaacagccgaggcttggtgcggggagtggactgcccctatcaagccacgatggtggacatccatatattagtgggcaaaggggcagtccagctgcttccaggggctgtgtgtgtatttgaggaagcccagggactgccccttcgaaggcaccacaattaccttcaaaatcatttctatggtggtttggccagctcagcccttgtggtcaggtctgtgtcatctgtgggcaactatgactacatttgggactttgtgttgtacccaaatggggcacttgaagggcgggtccatgccacgggttatatcaacacagctttcctgaaagggggagaggagggcctcctctttgggaaccgtgtgggggaaagagtgctgggaacggtgcacacacatgccttccacttcaagctggacctggatgtggcagggctgaaaaactgggtggtagctgaagacgtggtgtttaaacctgtggctgccccctggaacccggagcactggctacagcgcccacagctgactcggcaggtcctgggaaaggaggacctgacagctttttccttgggaagccccctaccccgctacctctacctggctagcaaccagactaatgcgtggggtcaccagcgcggataccagcttgtggtgacccagagaaaggaggaggagtcacagagcagtagcatctatcaccagaatgacatctggacacccacagttacctttgctgacttcatcaacaatgaaaccctcttaggagaggatctggtggcttgggtcacagccagcttcctgcacattccccatgccgaggacatcccaaacacagtgactctggggaacagagttggcttcttgctccgaccctataacttctttgatgaggacccctccatcttctcccctggcagtgtctactttgagaagggccaggatgctgggctctgcagcatcaatcctgtggcctgcctccccgacctggcagcctgtgtcccggacttaccccctttctcttaccacggcttctagtcctgagggtgtggcgggcggcgtggttaggcacatgtacttttccctgtttctactttctattctccgtgtttttatcacacctgctccccagattcccaccccctcaatgttcctctcacacgaaacccccatcagtccctttggttaattcttacttcctgttcatctctaaagtgttaaattataaaaatgatttttaaatattcaaagaaaaatatcacaaatcctactactcagaaataggtggtcacattacatcagacatctctttatgcatgtgcattcaaaaggaagagtagatagaattttgtaaaacagatgttgtatgtaatttataataaaaagtattagag

SEQ ID NO: 106837 - DNA, 4026 bp, Homo sapiens
  Payload ID: 982
  Gene Symbol: AOC3
  Gene Name: amine oxidase, copper containing 3
  Uniprot ID: Q16853
  ENST ID: ENST00000308423
  CDS Start-End: 161-2452
gtccttcccacccttagtcccaggcatctgactaccgggaacctcagccagagtccgggagccccccaccccgtccaggagccaacagagcccccgtcttgctggcgtgagaatacattgctctcctttggttgaatcagctgtccctcttcgtgggaaaatgaaccagaagacaatcctcgtgctcctcattctggccgtcatcaccatctttgccttggtttgtgtcctgctggtgggcaggggtggagatgggggtgaacccagccagcttccccattgcccctctgtatctcccagtgcccagccttggacacaccctggccagagccagctgtttgcagacctgagccgagaggagctgacggctgtgatgcgctttctgacccagcggctggggccagggctggtggatgcagcccaggcccggccctcggacaactgtgtcttctcagtggagttgcagctgcctcccaaggctgcagccctggctcacttggacagggggagccccccacctgcccgggaggcactggccatcgtcttctttggcaggcaaccccagcccaacgtgagtgagctggtggtggggccactgcctcacccctcctacatgcgggacgtgactgtggagcgtcatggaggccccctgccctatcaccgacgccccgtgctgttccaagagtacctggacatagaccagatgatcttcaacagagagctgccccaggcttctgggcttctccaccactgttgcttctacaagcaccggggacggaacctggtgacaatgaccacggctccccgtggtctgcaatcaggggaccgggccacctggtttggcctctactacaacatctcgggcgctgggttcttcctgcaccacgtgggcttggagctgctagtgaaccacaaggcccttgaccctgcccgctggactatccagaaggtgttctatcaaggccgctactacgacagcctggcccagctggaggcccagtttgaggccggcctggtgaatgtggtgctgatcccagacaatggcacaggtgggtcctggtccctgaagtcccctgtgcccccgggtccagctccccctctacagttctatccccaaggcccccgcttcagtgtccagggaagtcgagtggcctcctcactgtggactttctcctttggcctcggagcattcagtggcccaaggatctttgacgttcgcttccaaggagaaagactagtttatgagataagcctccaagaggccttggccatctatggtggaaattccccagcagcaatgacgacccgctatgtggatggaggctttggcatgggcaagtacaccacgcccctgacccgtggggtggactgcccctacttggccacctacgtggactggcacttccttttggagtcccaggcccccaagacaatacgtgatgccttttgtgtgtttgaacagaaccagggcctccccctgcggcgacaccactcagatctctactcgcactactttgggggtcttgcggaaacggtgctggtcgtcagatctatgtccaccttgctcaactatgactatgtgtgggatacggtcttccaccccagtggggccatagaaatacgattctatgccacgggctacatcagctcggcattcctctttggtgctactgggaagtacgggaaccaagtgtcagagcacaccctgggcacggtccacacccacagcgcccacttcaaggtggatctggatgtagcaggactggagaactgggtctgggccgaggatatggtctttgtccccatggctgtgccctggagccctgagcaccagctgcagaggctgcaggtgacccggaagctgctggagatggaggagcaggccgccttcctcgtgggaagcgccacccctcgctacctgtacctggccagcaaccacagcaacaagtggggtcacccccggggctaccgcatccagatgctcagctttgctggagagccgctgccccaaaacagctccatggcgagaggcttcagctgggagaggtaccagctggctgtgacccagcggaaggaggaggagcccagtagcagcagcgttttcaatcagaatgacccttgggcccccactgtggatttcagtgacttcatcaacaatgagaccattgctggaaaggatttggtggcctgggtgacagctggttttctgcatatcccacatgcagaggacattcctaacacagtgactgtggggaacggcgtgggcttcttcctccgaccctataacttctttgacgaagacccctccttctactctgccgactccatctacttccgaggggaccaggatgctggggcctgcgaggtcaaccccctagcttgcctgccccaggctgctgcctgtgcccccgacctccctgccttctcccacgggggcttctctcacaactaggcggtcctgggatggggcatgtggccaagggctccagggccagggtgtgagggatggggagcagctgggcactgggccggcagcctggttccctctttcctgtgccaggactctctttcttccactaccctccctcgcatccgcctctgagccaggagcctcctgaccctgtgatgcctgacacaggggacactgaaccttgttgatgccagctgtactgagttctcatccacagaggccaggcatggcccagcctggagccgtggccgagggcttccctagatggttccctttgttgctgtctggctttcccgaatctttttaggccacctccaaggactctaaaagggggctattccctggagaccccagagtagggttgccagtcctgcaagtccatagctgagctggaaaggatgcttctgctcacattccctctcatccaggtcctttccttctcgtcttcctctctctcacctacttcctcctcctcctcctgttcctgccttctcttctatcctgcaatttctcccgaatcctgaggggatatccctatgtcccagcccctggtactcccccagccctcagttttcagtcaagttccgtctcctctccagccctatggaagtctcaaggtcacgggacccctaatcagagtggccaatccctgtgtgtcgttcccttgtgtctgttgcttattgggagtaggagttgctcctacccctgtcctggggctgggtgtgtttcaggacagctgcttctgtgcatttgtgtctgcctgcctcatgctctctatagaggaggatggtcatcgtgacagcagcagctcaagttagcatttcaagtgatttgggggtgcaatgataatgaagaatggccattttgtaccagggctctgtattctgcaacagcctgtttgggaggctggagtggaaacaaagggtgggcatcaaagatgagaagccaaagcccctacaactccagccacccagccaggaggggctgtccaatcacattcaggcatgcgaatgagctgggccctgggtgaggtgggggtctggcctagtggggaggggcctggcctgggtggggcagggcctggcctggtccaggcttgggctccattcccatcactgctgtccctcctgaggtctggattggggatggggacaaagaaatagcaagagatgagaaacaacagaaacttttttctctaaaggactggttaaatcaattctgatacagccttacaatacaatagtatgcagctaaaaaataattgtatgtctttatatactaatatgtaataatcttcaggtgaaaaaggcaagccacagaaatgtgtatagcgcacttcccatttgtgtttcagaaaggagtagaatataaacacataattgcttatgtatgcctattcagaataaatgggtaacactgattacttttgggaggggaaccagtaggttgaggacaggagagggaagggtcttaacacttacacccttttgtacattttgaattttgaaccatgtgactgtattacctattcaaaataaacaataaatgggcccaaa

SEQ ID NO: 106838 - DNA, 545 bp, Homo sapiens
  Payload ID: 982
  Gene Symbol: AOC3
  Gene Name: amine oxidase, copper containing 3
  ENST ID: ENST00000587330
  CDS Start-End: 1-433
ctatgactatgtgtgggatacggtcttccaccccagtggggccatagaaatacgattctatgccacgggctacatcagctcggcattcctctttggtgctactgggaagtacgggaaccaagtgtcagagcacaccctgggcacggtccacacccacagcgcccacttcaaggtggatctggatgtagcaggtgacccggaagctgctggagatggaggagcaggccgccttcctcgtgggaagcgccacccctcgctacctgtacctggccagcaaccacagcaacaagtggggtcacccccggggctaccgcatccagatgctcagctttgctggagagccgctgccccaaaacagctccatggcgagaggcttcagctgggagaggtaccagctggctgtgacccagcggaaggaggaggagcccagtagcagcagcgttttcaatcagaatgacccttgggcccccactgtggatttcagtgacttcatcaacaatgagaccattgctggaaaggatttggtggcctgggtgacagctggt

SEQ ID NO: 106839 - DNA, 573 bp, Homo sapiens
  Payload ID: 982
  Gene Symbol: AOC3
  Gene Name: amine oxidase, copper containing 3
  ENST ID: ENST00000592999
  CDS Start-End: 118-573
tgtttgtcagctcagttctgtgtctggcctgtggtggtggtgttttggaggatctctttgcattctaccacgtccctggcatgtgcaggactggagaactgggtctgggccgaggatatggtctttgtccccatggctgtgccctggagccctgagcaccagctgcagaggctgcaggtgacccggaagctgctggagatggaggagcaggccgccttcctcgtgggaagcgccacccctcgctacctgtacctggccagcaaccacagcaacaagtggggtcacccccggggctaccgcatccagatgctcagctttgctggagagccgctgccccaaaacagctccatggcgagaggcttcagctgggagaggtaccagctggctgtgacccagcggaaggaggaggagcccagtagcagcagcgttttcaatcagaatgacccttgggcccccactgtggatttcagtgacttcatcaacaatgagaccattgctggaaaggatttggtggcctgggtgacagctggttttctgcatatcccacatgcagaggacattcctaacacagtg

SEQ ID NO: 106840 - DNA, 542 bp, Homo sapiens
  Payload ID: 982
  Gene Symbol: AOC3
  Gene Name: amine oxidase, copper containing 3
  ENST ID: ENST00000588033
  CDS Start-End: 207-542
gtttgtctgtctgcgtggaaagcaagagggtaaggatgatcattcatctctatccccagggacgagtacagtcctctctgctaatgaatgttgaaagaatgaatgagtgaaatggaatgaactccctgatgaagtattttaatttacaggtcaacagctttggctaaaggattggaggactggagaactgggtctgggccgaggatatggtctttgtccccatggctgtgccctggagccctgagcaccagctgcagaggctgcaggtgacccggaagctgctggagatggaggagcaggccgccttcctcgtgggaagcgccacccctcgctacctgtacctggccagcaaccacagcaacaagtggggtcacccccggggctaccgcatccagatgctcagctttgctggagagccgctgccccaaaacagctccatggcgagaggcttcagctgggagaggtaccagctggctgtgacccagcggaaggaggaggagcccagtagcagcagcgttttcaatcagaatgacccttgggcc

SEQ ID NO: 106841 - DNA, 2522 bp, Homo sapiens
  Payload ID: 982
  Gene Symbol: AOC3
  Gene Name: amine oxidase, copper containing 3
  Uniprot ID: Q16853
  ENST ID: ENST00000591562
  CDS Start-End: 280-942
ccggaagttgcctaggccatgctcctctcacaggacaggccagtcagtggtttgtctgtctgcgtggaaagcaagagggtcaacagctttggctaaaggattggaggtatcctggggagagggaagagaaggaggggcacactcagttctgggctgctctttggcccccactctgaagccagatgggggcagagtccagaggggccagggcagttgcctgacaggccctcccctatcccaccctgagcaggactggagaactgggtctgggccgaggatatggtctttgtccccatggctgtgccctggagccctgagcaccagctgcagaggctgcaggtgacccggaagctgctggagatggaggagcaggccgccttcctcgtgggaagcgccacccctcgctacctgtacctggccagcaaccacagcaacaagtggggtcacccccggggctaccgcatccagatgctcagctttgctggagagccgctgccccaaaacagctccatggcgagaggcttcagctgggagaggtaccagctggctgtgacccagcggaaggaggaggagcccagtagcagcagcgttttcaatcagaatgacccttgggcccccactgtggatttcagtgacttcatcaacaatgagaccattgctggaaaggatttggtggcctgggtgacagctggttttctgcatatcccacatgcagaggacattcctaacacagtgactgtggggaacggcgtgggcttcttcctccgaccctataacttctttgacgaagacccctccttctactctgccgactccatctacttccgaggggaccaggatgctggggcctgcgaggtcaaccccctagcttgcctgccccaggctgctgcctgtgcccccgacctccctgccttctcccacgggggcttctctcacaactaggcggtcctgggatggggcatgtggccaagggctccagggccagggtgtgagggatggggagcagctgggcactgggccggcagcctggttccctctttcctgtgccaggactctctttcttccactaccctccctcgcatccgcctctgagccaggagcctcctgaccctgtgatgcctgacacaggggacactgaaccttgttgatgccagctgtactgagttctcatccacagaggccaggcatggcccagcctggagccgtggccgagggcttccctagatggttccctttgttgctgtctggctttcccgaatctttttaggccacctccaaggactctaaaagggggctattccctggagaccccagagtagggttgccagtcctgcaagtccatagctgagctggaaaggatgcttctgctcacattccctctcatccaggtcctttccttctcgtcttcctctctctcacctacttcctcctcctcctcctgttcctgccttctcttctatcctgcaatttctcccgaatcctgaggggatatccctatgtcccagcccctggtactcccccagccctcagttttcagtcaagttccgtctcctctccagccctatggaagtctcaaggtcacgggacccctaatcagagtggccaatccctgtgtgtcgttcccttgtgtctgttgcttattgggagtaggagttgctcctacccctgtcctggggctgggtgtgtttcaggacagctgcttctgtgcatttgtgtctgcctgcctcatgctctctatagaggaggatggtcatcgtgacagcagcagctcaagttagcatttcaagtgatttgggggtgcaatgataatgaagaatggccattttgtaccagggctctgtattctgcaacagcctgtttgggaggctggagtggaaacaaagggtgggcatcaaagatgagaagccaaagcccctacaactccagccacccagccaggaggggctgtccaatcacattcaggcatgcgaatgagctgggccctgggtgaggtgggggtctggcctagtggggaggggcctggcctgggtggggcagggcctggcctggtccaggcttgggctccattcccatcactgctgtccctcctgaggtctggattggggatggggacaaagaaatagcaagagatgagaaacaacagaaacttttttctctaaaggactggttaaatcaattctgatacagccttacaatacaatagtatgcagctaaaaaataattgtatgtctttatatactaatatgtaataatcttcaggtgaaaaaggcaagccacagaaatgtgtatagcgcacttcccatttgtgtttcagaaaggagtagaatataaacacataattgcttatgtatgcctattcagaataaatgggtaacactgattacttttgggaggggaaccagtaggttgaggacaggagagggaagggtcttaacacttacacccttttgtacattttgaattttgaaccatgtgactgtattacctattcaaaataaacaataaatgggcccaaacaggaa

SEQ ID NO: 106842 - DNA, 2392 bp, Homo sapiens
  Payload ID: 982
  Gene Symbol: AOC3
  Gene Name: amine oxidase, copper containing 3
  Uniprot ID: Q16853
  ENST ID: ENST00000617500
  CDS Start-End: 152-814
acttatatgggctctgctgctgggagcagccttctgtttgtcagctcagttctgtgtctggcctgtggtggtggtgttttggaggatctctttgcattctaccacgtccctggcatgtgcaggactggagaactgggtctgggccgaggatatggtctttgtccccatggctgtgccctggagccctgagcaccagctgcagaggctgcaggtgacccggaagctgctggagatggaggagcaggccgccttcctcgtgggaagcgccacccctcgctacctgtacctggccagcaaccacagcaacaagtggggtcacccccggggctaccgcatccagatgctcagctttgctggagagccgctgccccaaaacagctccatggcgagaggcttcagctgggagaggtaccagctggctgtgacccagcggaaggaggaggagcccagtagcagcagcgttttcaatcagaatgacccttgggcccccactgtggatttcagtgacttcatcaacaatgagaccattgctggaaaggatttggtggcctgggtgacagctggttttctgcatatcccacatgcagaggacattcctaacacagtgactgtggggaacggcgtgggcttcttcctccgaccctataacttctttgacgaagacccctccttctactctgccgactccatctacttccgaggggaccaggatgctggggcctgcgaggtcaaccccctagcttgcctgccccaggctgctgcctgtgcccccgacctccctgccttctcccacgggggcttctctcacaactaggcggtcctgggatggggcatgtggccaagggctccagggccagggtgtgagggatggggagcagctgggcactgggccggcagcctggttccctctttcctgtgccaggactctctttcttccactaccctccctcgcatccgcctctgagccaggagcctcctgaccctgtgatgcctgacacaggggacactgaaccttgttgatgccagctgtactgagttctcatccacagaggccaggcatggcccagcctggagccgtggccgagggcttccctagatggttccctttgttgctgtctggctttcccgaatctttttaggccacctccaaggactctaaaagggggctattccctggagaccccagagtagggttgccagtcctgcaagtccatagctgagctggaaaggatgcttctgctcacattccctctcatccaggtcctttccttctcgtcttcctctctctcacctacttcctcctcctcctcctgttcctgccttctcttctatcctgcaatttctcccgaatcctgaggggatatccctatgtcccagcccctggtactcccccagccctcagttttcagtcaagttccgtctcctctccagccctatggaagtctcaaggtcacgggacccctaatcagagtggccaatccctgtgtgtcgttcccttgtgtctgttgcttattgggagtaggagttgctcctacccctgtcctggggctgggtgtgtttcaggacagctgcttctgtgcatttgtgtctgcctgcctcatgctctctatagaggaggatggtcatcgtgacagcagcagctcaagttagcatttcaagtgatttgggggtgcaatgataatgaagaatggccattttgtaccagggctctgtattctgcaacagcctgtttgggaggctggagtggaaacaaagggtgggcatcaaagatgagaagccaaagcccctacaactccagccacccagccaggaggggctgtccaatcacattcaggcatgcgaatgagctgggccctgggtgaggtgggggtctggcctagtggggaggggcctggcctgggtggggcagggcctggcctggtccaggcttgggctccattcccatcactgctgtccctcctgaggtctggattggggatggggacaaagaaatagcaagagatgagaaacaacagaaacttttttctctaaaggactggttaaatcaattctgatacagccttacaatacaatagtatgcagctaaaaaataattgtatgtctttatatactaatatgtaataatcttcaggtgaaaaaggcaagccacagaaatgtgtatagcgcacttcccatttgtgtttcagaaaggagtagaatataaacacataattgcttatgtatgcctattcagaataaatgggtaacactgattacttttgggaggggaaccagtaggttgaggacaggagagggaagggtcttaacacttacacccttttgtacattttgaattttgaaccatgtgactgtattacctattcaaaataaacaataaatgggcccaaacagg

SEQ ID NO: 106843 - DNA, 3900 bp, Homo sapiens
  Payload ID: 982
  Gene Symbol: AOC3
  Gene Name: amine oxidase, copper containing 3
  Uniprot ID: Q16853
  ENST ID: ENST00000613571
  CDS Start-End: 161-2065
gtccttcccacccttagtcccaggcatctgactaccgggaacctcagccagagtccgggagccccccaccccgtccaggagccaacagagcccccgtcttgctggcgtgagaatacattgctctcctttggttgaatcagctgtccctcttcgtgggaaaatgaaccagaagacaatcctcgtgctcctcattctggccgtcatcaccatctttgccttggtttgtgtcctgctggtgggcaggggtggagatgggggtgaacccagccagcttccccattgcccctctgtatctcccagtgcccagccttggacacaccctggccagagccagctgtttgcagacctgagccgagaggagctgacggctgtgatgcgctttctgacccagcggctggggccagggctggtggatgcagcccaggcccggccctcggacaactgtgtcttctcagtggagttgcagctgcctcccaaggctgcagccctggctcacttggacagggggagccccccacctgcccgggaggcactggccatcgtcttctttggcaggcaaccccagcccaacgtgagtgagctggtggtggggccactgcctcacccctcctacatgcgggacgtgactgtggagcgtcatggaggccccctgccctatcaccgacgccccgtgctgttccaagagtacctggacatagaccagatgatcttcaacagagagctgccccaggcttctgggcttctccaccactgttgcttctacaagcaccggggacggaacctggtgacaatgaccacggctccccgtggtctgcaatcaggggaccgggccacctggtttggcctctactacaacatctcgggcgctgggttcttcctgcaccacgtgggcttggagctgctagtgaaccacaaggcccttgaccctgcccgctggactatccagaaggtgttctatcaaggccgctactacgacagcctggcccagctggaggcccagtttgaggccggcctggtgaatgtggtgctgatcccagacaatggcacaggtgggtcctggtccctgaagtcccctgtgcccccgggtccagctccccctctacagttctatccccaaggcccccgcttcagtgtccagggaagtcgagtggcctcctcactgtggactttctcctttggcctcggagcattcagtggcccaaggatctttgacgttcgcttccaaggagaaagactagtttatgagataagcctccaagaggccttggccatctatggtggaaattccccagcagcaatgacgacccgctatgtggatggaggctttggcatgggcaagtacaccacgcccctgacccgtggggtggactgcccctacttggccacctacgtggactggcacttccttttggagtcccaggcccccaagacaatacgtgatgccttttgtgtgtttgaacagaaccagggcctccccctgcggcgacaccactcagatctctactcgcactactttgggggtcttgcggaaacggtgctggtcgtcagatctatgtccaccttgctcaactatgactatgtgtgggatacggtcttccaccccagtggggccatagaaatacgattctatgccacgggctacatcagctcggcattcctctttggtgctactgggaagtacgggaaccaagtgtcagagcacaccctgggcacggtccacacccacagcgcccacttcaaggtggatctggatgtagcaggactggagaactgggtctgggccgaggatatggtctttgtccccatggctgtgccctggagccctgagcaccagctgcagaggctgcaggtgacccggaagctgctggagatggaggagcaggccgccttcctcgtgggaagcgccacccctcgctacctgtacctggccagcaaccacagcaacaagtggggtcacccccggggctaccgcatccagatgctcagctttgctggagagccgctgccccaaaacagctccatggcgagaggcttcagctgggagaggatttggtggcctgggtgacagctggttttctgcatatcccacatgcagaggacattcctaacacagtgactgtggggaacggcgtgggcttcttcctccgaccctataacttctttgacgaagacccctccttctactctgccgactccatctacttccgaggggaccaggatgctggggcctgcgaggtcaaccccctagcttgcctgccccaggctgctgcctgtgcccccgacctccctgccttctcccacgggggcttctctcacaactaggcggtcctgggatggggcatgtggccaagggctccagggccagggtgtgagggatggggagcagctgggcactgggccggcagcctggttccctctttcctgtgccaggactctctttcttccactaccctccctcgcatccgcctctgagccaggagcctcctgaccctgtgatgcctgacacaggggacactgaaccttgttgatgccagctgtactgagttctcatccacagaggccaggcatggcccagcctggagccgtggccgagggcttccctagatggttccctttgttgctgtctggctttcccgaatctttttaggccacctccaaggactctaaaagggggctattccctggagaccccagagtagggttgccagtcctgcaagtccatagctgagctggaaaggatgcttctgctcacattccctctcatccaggtcctttccttctcgtcttcctctctctcacctacttcctcctcctcctcctgttcctgccttctcttctatcctgcaatttctcccgaatcctgaggggatatccctatgtcccagcccctggtactcccccagccctcagttttcagtcaagttccgtctcctctccagccctatggaagtctcaaggtcacgggacccctaatcagagtggccaatccctgtgtgtcgttcccttgtgtctgttgcttattgggagtaggagttgctcctacccctgtcctggggctgggtgtgtttcaggacagctgcttctgtgcatttgtgtctgcctgcctcatgctctctatagaggaggatggtcatcgtgacagcagcagctcaagttagcatttcaagtgatttgggggtgcaatgataatgaagaatggccattttgtaccagggctctgtattctgcaacagcctgtttgggaggctggagtggaaacaaagggtgggcatcaaagatgagaagccaaagcccctacaactccagccacccagccaggaggggctgtccaatcacattcaggcatgcgaatgagctgggccctgggtgaggtgggggtctggcctagtggggaggggcctggcctgggtggggcagggcctggcctggtccaggcttgggctccattcccatcactgctgtccctcctgaggtctggattggggatggggacaaagaaatagcaagagatgagaaacaacagaaacttttttctctaaaggactggttaaatcaattctgatacagccttacaatacaatagtatgcagctaaaaaataattgtatgtctttatatactaatatgtaataatcttcaggtgaaaaaggcaagccacagaaatgtgtatagcgcacttcccatttgtgtttcagaaaggagtagaatataaacacataattgcttatgtatgcctattcagaataaatgggtaacactgattacttttgggaggggaaccagtaggttgaggacaggagagggaagggtcttaacacttacacccttttgtacattttgaattttgaaccatgtgactgtattacctattcaaaataaacaataaatgggcccaaacagg

SEQ ID NO: 106844 - DNA, 2412 bp, Homo sapiens
  Payload ID: 983
  Gene Symbol: AIMP1
  Gene Name: aminoacyl tRNA synthetase complex-interacting multifunctional protein 1
  Uniprot ID: Q12904
  ENST ID: ENST00000358008
  CDS Start-End: 675-1613
agtgacagagcgattactaagcctacggttcccaaacgactcaggtgaacctgatttacaggaaaggcgggctgtagctagggatggagacagtacctatcagcaagcggctccacagctcggttctctatctattctgaagacatgcggggccactcactgctcctgatagtcctctacctcccacagaccccacccactacgacacggaaaactggattacccaaatacctgcctctgagtctggggacgcaggcaagcacaaagacaagggggatggagcttctacacagggccccagcgctgtcgctgtggctgctgctgccgctacggcttagtgcaccagacgctgcatttcaggtgctcctacaaaagaggccactcctggaacgccgggagctcagacgctgccctttgctcgcgagccaagtcagccaaggttaaccttcgcggaacccggcgaggagcgcaagcctggccttccccaaacacagatccgagcttttcaccctctaccctcccctcagcctggccttttcttccgccctcacagccaccgcgacccaacgctgaggaaagaccccgacttgtggtgtccttccccttgcccaaactggccacgaaaggacatatagcgagagagaaagaggattttctgccgtctcttggcaaaaatggcaaataatgatgctgttctgaagagactggagcagaagggtgcagaggcagatcaaatcattgaatatcttaagcagcaagtttctctacttaaggagaaagcaattttgcaggcaactttgagggaagagaagaaacttcgagttgaaaatgctaaactgaagaaagaaattgaagaactgaaacaagagctaattcaggcagaaattcaaaatggagtgaagcaaataccatttccatctggtactccactgcacgctaattctatggtttctgaaaatgtgatacagtctacagcagtaacaaccgtatcttctggtaccaaagaacagataaaaggaggaacaggagacgaaaagaaagcgaaagagaaaattgaaaagaaaggagagaagaaggagaaaaaacagcaatcaatagctggaagtgccgactctaagccaatagatgtttcccgtctggatcttcgaattggttgcatcataactgctagaaaacaccctgatgcagattctttgtatgtggaagaagtagatgtcggagaaatagccccaaggacagttgtcagtggcctggtgaatcatgttcctcttgaacagatgcaaaatcggatggtgattttactttgtaacctgaaacctgcaaagatgaggggagtattatctcaagcaatggtcatgtgtgctagttcaccagagaaaattgaaatcttggctcctccaaatgggtctgttcctggagacagaattacttttgatgctttcccaggagagcctgacaaggagctgaatcctaagaagaagatttgggagcagatccagcctgatcttcacactaatgatgagtgtgtggctacatacaaaggagttccctttgaggtgaaagggaagggagtatgtagggctcaaaccatgagcaacagtggaatcaaataaaatgcttccactaccaaaagacattagagaaaaccttaaaagtaataaagagaaatatatttgtcacttatacctaaaatatgagtggctcatttttgcattactctcttctagacttgactagtcatttacttggtatatattgttttcattgattggggaaacactagatttttacctcggtttttgatcatttataatggagagaggaagttgcctatgttttgtaataatttattttttagcaggaatattgattagcagcttttttttctttatacacatagataactaactagattaatgtttagtttcttatttgtaggcacaggatgcatgaaatttcaagctctgggattttttgtatattgtgtatctgtatcaaaaatatcctctccttttcaaaaatgacaggttggaaaatgtttgtcagacttattaactggtcatattataataatactgataatgaccaactgctcattctgaaagccaaacataaaagctaggagaagtggcatctgaacatttttgctttgctgccagagtaaccctgactaataatacaataacagcaatttttttaaaaaactgagatttcctactggcttgaagtttttctatttagcaaaataattagtaataagttttgactaggtctaaagaatgaacacattgtaaacagttgccacagtagtttctaataaattgatcataaaagcagctatcctttttttttttaattctagcttctttttaaagattatttgggtacctaataaaggataatttatatctt

SEQ ID NO: 106845 - DNA, 2586 bp, Homo sapiens
  Payload ID: 983
  Gene Symbol: AIMP1
  Gene Name: aminoacyl tRNA synthetase complex-interacting multifunctional protein 1
  Uniprot ID: Q12904
  ENST ID: ENST00000394701
  CDS Start-End: 42-1052
gtcctttctcactgctatagtacgcgggtggctggacctacatgcttcctgctgtggctgtctcggaacccgtggtcctccgcttcatgattttctgccgtctcttggcaaaaatggcaaataatgatgctgttctgaagagactggagcagaagggtgcagaggcagatcaaatcattgaatatcttaagcagcaagtttctctacttaaggagaaagcaattttgcaggcaactttgagggaagagaagaaacttcgagttgaaaatgctaaactgaagaaagaaattgaagaactgaaacaagagctaattcaggcagaaattcaaaatggagtgaagcaaataccatttccatctggtactccactgcacgctaattctatggtttctgaaaatgtgatacagtctacagcagtaacaaccgtatcttctggtaccaaagaacagataaaaggaggaacaggagacgaaaagaaagcgaaagagaaaattgaaaagaaaggagagaagaaggagaaaaaacagcaatcaatagctggaagtgccgactctaagccaatagatgtttcccgtctggatcttcgaattggttgcatcataactgctagaaaacaccctgatgcagattctttgtatgtggaagaagtagatgtcggagaaatagccccaaggacagttgtcagtggcctggtgaatcatgttcctcttgaacagatgcaaaatcggatggtgattttactttgtaacctgaaacctgcaaagatgaggggagtattatctcaagcaatggtcatgtgtgctagttcaccagagaaaattgaaatcttggctcctccaaatgggtctgttcctggagacagaattacttttgatgctttcccaggagagcctgacaaggagctgaatcctaagaagaagatttgggagcagatccagcctgatcttcacactaatgatgagtgtgtggctacatacaaaggagttccctttgaggtgaaagggaagggagtatgtagggctcaaaccatgagcaacagtggaatcaaataaaatgcttccactaccaaaagacattagagaaaaccttaaaagtaataaagagaaatatatttgtcacttatacctaaaatatgagtggctcatttttgcattactctcttctagacttgactagtcatttacttggtatatattgttttcattgattggggaaacactagatttttacctcggtttttgatcatttataatggagagaggaagttgcctatgttttgtaataatttattttttagcaggaatattgattagcagcttttttttctttatacacatagataactaactagattaatgtttagtttcttatttgtaggcacaggatgcatgaaatttcaagctctgggattttttgtatattgtgtatctgtatcaaaaatatcctctccttttcaaaaatgacaggttggaaaatgtttgtcagacttattaactggtcatattataataatactgataatgaccaactgctcattctgaaagccaaacataaaagctaggagaagtggcatctgaacatttttgctttgctgccagagtaaccctgactaataatacaataacagcaatttttttaaaaaactgagatttcctactggcttgaagtttttctatttagcaaaataattagtaataagttttgactaggtctaaagaatgaacacattgtaaacagttgccacagtagtttctaataaattgatcataaaagcagctatcctttttttttttaattctagcttctttttaaagattatttgggtacctaataaaggataatttatatcttattacagactgatattttgctttttcatgtgtcatcatactgtcagtatattaaaagaaattacagcctaaaacttaacatataccatacatatatattaaggtgtcaaatagctattctcactcatcttacaaatattgtaagagcaataaaaattaattgaggaattataagcctacaggtcatcagccttgaggtgattactgatgatttgggcttacacacatgtcagcaagatagggagtgtggataggggagggctggtagctaacaaggggcctcacagagaaatattagtgactttaaccaggtttcagaatctgggccttacctttacaggttcaacaaaagaatggcatcaatagaggcagaagtatagacattgttttaaaaatacacacatgcacacacacacaaaacattttagcattatagctgtctgaatccttcaataagaaggagaggcacacacaaatacacacactcacacaaaactcaacaaccataaaacaaccctgcatgttataaaaggcagaattaaattttatttatttaaatccatggaactctggtaggccaggatatattatagtaccattatcaatgtgatattctgaaaatatgaactgagcgtcattaacaattgttggtacctaaacacaaaatgaatttcaaaagttactttgttctcaagatatgtcattcttttgggaataaatacttctggtgacaaag

SEQ ID NO: 106846 - DNA, 2519 bp, Homo sapiens
  Payload ID: 983
  Gene Symbol: AIMP1
  Gene Name: aminoacyl tRNA synthetase complex-interacting multifunctional protein 1
  Uniprot ID: Q12904
  ENST ID: ENST00000442366
  CDS Start-End: 53-991
aaaccaaagcaaaattctgcctccaaggattttctgccgtctcttggcaaaaatggcaaataatgatgctgttctgaagagactggagcagaagggtgcagaggcagatcaaatcattgaatatcttaagcagcaagtttctctacttaaggagaaagcaattttgcaggcaactttgagggaagagaagaaacttcgagttgaaaatgctaaactgaagaaagaaattgaagaactgaaacaagagctaattcaggcagaaattcaaaatggagtgaagcaaataccatttccatctggtactccactgcacgctaattctatggtttctgaaaatgtgatacagtctacagcagtaacaaccgtatcttctggtaccaaagaacagataaaaggaggaacaggagacgaaaagaaagcgaaagagaaaattgaaaagaaaggagagaagaaggagaaaaaacagcaatcaatagctggaagtgccgactctaagccaatagatgtttcccgtctggatcttcgaattggttgcatcataactgctagaaaacaccctgatgcagattctttgtatgtggaagaagtagatgtcggagaaatagccccaaggacagttgtcagtggcctggtgaatcatgttcctcttgaacagatgcaaaatcggatggtgattttactttgtaacctgaaacctgcaaagatgaggggagtattatctcaagcaatggtcatgtgtgctagttcaccagagaaaattgaaatcttggctcctccaaatgggtctgttcctggagacagaattacttttgatgctttcccaggagagcctgacaaggagctgaatcctaagaagaagatttgggagcagatccagcctgatcttcacactaatgatgagtgtgtggctacatacaaaggagttccctttgaggtgaaagggaagggagtatgtagggctcaaaccatgagcaacagtggaatcaaataaaatgcttccactaccaaaagacattagagaaaaccttaaaagtaataaagagaaatatatttgtcacttatacctaaaatatgagtggctcatttttgcattactctcttctagacttgactagtcatttacttggtatatattgttttcattgattggggaaacactagatttttacctcggtttttgatcatttataatggagagaggaagttgcctatgttttgtaataatttattttttagcaggaatattgattagcagcttttttttctttatacacatagataactaactagattaatgtttagtttcttatttgtaggcacaggatgcatgaaatttcaagctctgggattttttgtatattgtgtatctgtatcaaaaatatcctctccttttcaaaaatgacaggttggaaaatgtttgtcagacttattaactggtcatattataataatactgataatgaccaactgctcattctgaaagccaaacataaaagctaggagaagtggcatctgaacatttttgctttgctgccagagtaaccctgactaataatacaataacagcaatttttttaaaaaactgagatttcctactggcttgaagtttttctatttagcaaaataattagtaataagttttgactaggtctaaagaatgaacacattgtaaacagttgccacagtagtttctaataaattgatcataaaagcagctatcctttttttttttaattctagcttctttttaaagattatttgggtacctaataaaggataatttatatcttattacagactgatattttgctttttcatgtgtcatcatactgtcagtatattaaaagaaattacagcctaaaacttaacatataccatacatatatattaaggtgtcaaatagctattctcactcatcttacaaatattgtaagagcaataaaaattaattgaggaattataagcctacaggtcatcagccttgaggtgattactgatgatttgggcttacacacatgtcagcaagatagggagtgtggataggggagggctggtagctaacaaggggcctcacagagaaatattagtgactttaaccaggtttcagaatctgggccttacctttacaggttcaacaaaagaatggcatcaatagaggcagaagtatagacattgttttaaaaatacacacatgcacacacacacaaaacattttagcattatagctgtctgaatccttcaataagaaggagaggcacacacaaatacacacactcacacaaaactcaacaaccataaaacaaccctgcatgttataaaaggcagaattaaattttatttatttaaatccatggaactctggtaggccaggatatattatagtaccattatcaatgtgatattctgaaaatatgaactgagcgtcattaacaattgttggtacctaaacacaaaatgaatttcaaaagttactttgttctcaagatatgtcattcttttgggaataaatacttctggtg

SEQ ID NO: 106847 - DNA, 568 bp, Homo sapiens
  Payload ID: 983
  Gene Symbol: AIMP1
  Gene Name: aminoacyl tRNA synthetase complex-interacting multifunctional protein 1
  ENST ID: ENST00000510207
  CDS Start-End: 119-568
actttctcctactgctcaagggggtgttacactttgacgactgactaaacctcgagggccagaaacaaaccaaagcaaaattctgcctccaaggattttctgccgtctcttggcaaaaatggcaaataatgatgctgttctgaagagactggagcagaagggtgcagaggcagatcaaatcattgaatatcttaagcagcaagtttctctacttaaggagaaagcaattttgcaggcaactttgagggaagagaagaaacttcgagttgaaaatgctaaactgaagaaagaaattgaagaactgaaacaagagctaattcaggcagaaattcaaaatggagtgaagcaaataccatttccatctggtactccactgcacgctaattctatggtttctgaaaatgtgatacagtctacagcagtaacaaccgtatcttctggtaccaaagaacagataaaaggaggaacaggagacgaaaagaaagcgaaagagaaaattgaaaagaaaggagagaagaaggagaaaaaacagcaatcaatagctggaagtgccgactctaagccaata

SEQ ID NO: 106848 - DNA, 1225 bp, Homo sapiens
  Payload ID: 984
  Gene Symbol: AIMP2
  Gene Name: aminoacyl tRNA synthetase complex-interacting multifunctional protein 2
  Uniprot ID: Q13155
  ENST ID: ENST00000223029
  CDS Start-End: 120-1082
gttttcccgaacgcccgcagcagggtcagaagggaggtggccggtctccgtcgtgacctctgacggtttctgagcgttggcctttggcacgcgctacccccttttgctttggttctgccatgccgatgtaccaggtaaagccctatcacgggggcggcgcgcctctccgtgtggagcttcccacctgcatgtaccggctccccaacgtgcacggcaggagctacggcccagcgccgggcgctggccacgtgcaggaagagtctaacctgtctctgcaagctcttgagtcccgccaagatgatattttaaaacgtctgtatgagttgaaagctgcagttgatggcctctccaagatgattcaaacaccagatgcagacttggatgtaaccaacataatccaagcggatgagcccacgactttaaccaccaatgcgctggacttgaattcagtgcttgggaaggattacggggcgctgaaagacatcgtgatcaacgcaaacccggcctcccctcccctctccctgcttgtgctgcacaggctgctctgtgagcacttcagggtcctgtccacggtgcacacgcactcctcggtcaagagcgtgcctgaaaaccttctcaagtgctttggagaacagaataaaaaacagccccgccaagactatcagctgggattcactttaatttggaagaatgtgccgaagacgcagatgaaattcagcatccagacgatgtgccccatcgaaggcgaagggaacattgcacgtttcttgttctctctgtttggccagaagcataatgctgtcaacgcaacccttatagatagctgggtagatattgcgatttttcagttaaaagagggaagcagtaaagaaaaagccgctgttttccgctccatgaactctgctcttgggaagagcccttggctcgctgggaatgaactcaccgtagcagacgtggtgctgtggtctgtactccagcagatcggaggctgcagtgtgacagtgccagccaatgtgcagaggtggatgaggtcttgtgaaaacctggctccttttaacacggccctcaagctccttaagtgaattgccgtaactgattttaaagggtttagattttaagaatggtgctctttcatgcctattatcagtaaggggacttgtattagagtcagagtctttttatttaggccagttgtcaagtgtcaataaaagcatcatgtaattta

SEQ ID NO: 106849 - DNA, 860 bp, Homo sapiens
  Payload ID: 984
  Gene Symbol: AIMP2
  Gene Name: aminoacyl tRNA synthetase complex-interacting multifunctional protein 2
  ENST ID: ENST00000395236
  CDS Start-End: 49-804
gagcgttggcctttggcacgcgctacccccttttgctttggttctgccatgccgatgtaccaggtaaagccctatcacgggggcggcgcgcctctccgtgtggagcttcccacctgcatgtaccggctccccaacgtgcacggcaggagctacggcccagcgccgggcgctggccacgtgcaggattacggggcgctgaaagacatcgtgatcaacgcaaacccggcctcccctcccctctccctgcttgtgctgcacaggctgctctgtgagcacttcagggtcctgtccacggtgcacacgcactcctcggtcaagagcgtgcctgaaaaccttctcaagtgctttggagaacagaataaaaaacagccccgccaagactatcagctgggattcactttaatttggaagaatgtgccgaagacgcagatgaaattcagcatccagacgatgtgccccatcgaaggcgaagggaacattgcacgtttcttgttctctctgtttggccagaagcataatgctgtcaacgcaacccttatagatagctgggtagatattgcgatttttcagttaaaagagggaagcagtaaagaaaaagccgctgttttccgctccatgaactctgctcttgggaagagcccttggctcgctgggaatgaactcaccgtagcagacgtggtgctgtggtctgtactccagcagatcggaggctgcagtgtgacagtgccagccaatgtgcagaggtggatgaggtcttgtgaaaacctggctccttttaacacggccctcaagctccttaagtgaattgccgtaactgattttaaagggtttagattttaagaatggtgctctttcatgcc

SEQ ID NO: 106850 - DNA, 1107 bp, Homo sapiens
  Payload ID: 984
  Gene Symbol: AIMP2
  Gene Name: aminoacyl tRNA synthetase complex-interacting multifunctional protein 2
  ENST ID: ENST00000400479
  CDS Start-End: 375-1103
acgcccgcagcagggtcagaagggaggtggccggtctccgtcgtgacctctgacggtttctgagcgttggcctttggcacgcgctacccccttttgctttggttctgccatgccgatgtaccagtagagacggggtttcaccatgttggccaggctggtcttgaactcctgacgtcagatgatctgcctacctggacctcccgaagtgctgggattacaggcgtgagccaccacacccagcccataatgtcttcttttaaagggtgggaggtttggaagagtctaacctgtctctgcaagctcttgagtcccgccaagatgatattttaaaacgtctgtatgagttgaaagctgcagttgatggcctctccaagatgattcaaacaccagatgcagacttggatgtaaccaacataatccaagcggatgagcccacgactttaaccaccaatgcgctggacttgaattcagtgcttgggaaggattacggggcgctgaaagacatcgtgatcaacgcaaacccggcctcccctcccctctccctgcttgtgctgcacaggctgctctgtgagcacttcagggtcctgtccacggtgcacacgcactcctcggtcaagagcgtgcctgaaaaccttctcaagtgctttggagaacagaataaaaaacagccccgccaagactatcagctgggattcactttaatttggaagaatgtgccgaagacgcagatgaaattcagcatccagacgatgtgccccatcgaaggcgaagggaacattgcacgtttcttgttctctctgtttggccagaagcataatgctgtcaacgcaacccttatagatagctgggtagatattgcgatttttcagttaaaagagggaagcagtaaagaaaaagccgctgttttccgctccatgaactctgctcttgggaagagcccttggctcgctgggaatgaactcaccgtagcagacgtggtgctgtggtctgtactccagcagatcggaggctgcagtgtgacagtgccagccaatgtgcagaggtggatgaggtcttgtgaaaacctggctccttttaacacggccctcaagctccttaagtgaattg

SEQ ID NO: 106851 - DNA, 777 bp, Homo sapiens
  Payload ID: 984
  Gene Symbol: AIMP2
  Gene Name: aminoacyl tRNA synthetase complex-interacting multifunctional protein 2
  ENST ID: ENST00000415999
  CDS Start-End: 75-221
ctccgtcgtgacctctgacggtttctgagcgttggcctttggcacgcgctacccccttttgctttggttctgccatgccgatgtaccaggtaaagccctatcacgggggcggcgcgcctctccgtgtggagcttcccacctgcatgtaccggctccccaacgtgcacggcaggagctacggcccagcgccgggcgctggccacgtgcagcctctccagtagctgggattacaggtgccccccaccaagcccagctaatttttgtgtttcagtagaaatggagtttcatcatgttgtcctctcgaactcctgacctcaagtgatccacccgcctcgcccttccaaagtgctgagattacaggtatcagccactgtgcctagccagcactcaataatttaattggcatactgaactctgttccacccggaagtcagtggacttcacatttctctgacgtttgatcttaaataagagcagcagactaggagaggtgagaaagtgctgattaagcccgaaggtaaataggagttaagcaaacaagagaagaaggaagagtgatgcagatggagggaacagcacatgtgaagatctgtggtcagagccagggtggtggtttaggaactcctcggacagtgtggctagagcacaggcaaaggacgaaattgggtgaggaagagtctaacctgtctctgcaagctcttgagtcccgccaagatgatattttaaaacgtctgtatgagttgaaagctgcagttgatggcctctccaagatgattc

SEQ ID NO: 106852 - DNA, 1444 bp, Homo sapiens
  Payload ID: 985
  Gene Symbol: ACY1
  Gene Name: aminoacylase 1
  Uniprot ID: Q03154
  ENST ID: ENST00000404366
  CDS Start-End: 147-1373
cgtggtgggcggaccggggcggtcctgagcctgcgacctcgcaggcgacctcgctggaccctaagtccaggccacagtcagggaagggcgctgagaggcgagcgtgagcccagcgacaggagagtgagctcaccacgcgcagcgccatgaccagcaagggtcccgaggaggagcacccatcggtgacgctcttccgccagtacctgcgtatccgcactgtccagcccaagcctgactatggagctgctgtggctttctttgaggagacagcccgccagctgggcctgggctgtcagaaagtagaggtggcacctggctatgtggtgaccgtgttgacctggccaggcaccaaccctacactctcctccatcttgctcaactcccacacggatgtggtgcctgtcttcaaggaacattggagtcacgacccctttgaggccttcaaggattctgagggctacatctatgccaggggtgcccaggacatgaagtgcgtcagcatccagtacctggaagctgtgaggaggctgaaggtggagggccaccggttccccagaaccatccacatgacctttgtgcctgatgaggaggttgggggtcaccaaggcatggagctgttcgtgcagcggcctgagttccacgccctgagggcaggctttgccctggatgagggcatagccaatcccactgatgccttcactgtcttttatagtgagcggagtccctggtgggtgcgggttaccagcactgggaggccaggccatgcctcacgcttcatggaggacacagcagcagagaagctgcacaaggttgtaaactccatcctggcattccgggagaaggaatggcagaggctgcagtcaaacccccacctgaaagaggggtccgtgacctccgtgaacctgactaagctagagggtggcgtggcctataacgtgatacctgccaccatgagcgccagctttgacttccgtgtggcaccggatgtggacttcaaggcttttgaggagcagctgcagagctggtgccaggcagctggcgagggggtcaccctagagtttgctcagaagtggatgcacccccaagtgacacctactgatgactcaaacccttggtgggcagcttttagccgggtctgcaaggatatgaacctcactctggagcctgagatcatgcctgctgccactgacaaccgctatatccgcgcggtgggggtcccagctctaggcttctcacccatgaaccgcacacctgtgctgctgcacgaccacgatgaacggctgcatgaggctgtgttcctccgtggggtggacatatatacacgcctgctgcctgcccttgccagtgtgcctgccctgcccagtgacagctgagccctggaactcctaaacctttgcccctggggcttccatcccaaccagtgccaaggacctcctcttccccc

SEQ ID NO: 106853 - DNA, 1409 bp, Homo sapiens
  Payload ID: 985
  Gene Symbol: ACY1
  Gene Name: aminoacylase 1
  Uniprot ID: Q03154
  ENST ID: ENST00000476351
  CDS Start-End: 166-1287
cgacatccggcctcggccacgtggtgggcggaccggggcggtcctgagcctgcgacctcgcaggcgacctcgctggaccctaagtccaggccacagtcagggaagggcgctgagaggcgagcgtgagcccagcgacaggagagtgagctcaccacgcgcagcgccatgaccagcaagggtcccgaggaggagcacccatcggtgacgctcttccgccagtacctgcgtatccgcactgtccagcccaagcctgactatggcaccaaccctacactctcctccatcttgctcaactcccacacggatgtggtgcctgtcttcaaggaacattggagtcacgacccctttgaggccttcaaggattctgagggctacatctatgccaggggtgcccaggacatgaagtgcgtcagcatccagtacctggaagctgtgaggaggctgaaggtggagggccaccggttccccagaaccatccacatgacctttgtgcctgatgaggaggttgggggtcaccaaggcatggagctgttcgtgcagcggcctgagttccacgccctgagggcaggctttgccctggatgagggcatagccaatcccactgatgccttcactgtcttttatagtgagcggagtccctggtgggtgcgggttaccagcactgggaggccaggccatgcctcacgcttcatggaggacacagcagcagagaagctgcacaaggttgtaaactccatcctggcattccgggagaaggaatggcagaggctgcagtcaaacccccacctgaaagaggggtccgtgacctccgtgaacctgactaagctagagggtggcgtggcctataacgtgatacctgccaccatgagcgccagctttgacttccgtgtggcaccggatgtggacttcaaggcttttgaggagcagctgcagagctggtgccaggcagctggcgagggggtcaccctagagtttgctcagaagtggatgcacccccaagtgacacctactgatgactcaaacccttggtgggcagcttttagccgggtctgcaaggatatgaacctcactctggagcctgagatcatgcctgctgccactgacaaccgctatatccgcgcggtgggggtcccagctctaggcttctcacccatgaaccgcacacctgtgctgctgcacgaccacgatgaacggctgcatgaggctgtgttcctccgtggggtggacatatatacacgcctgctgcctgcccttgccagtgtgcctgccctgcccagtgacagctgagccctggaactcctaaacctttgcccctggggcttccatcccaaccagtgccaaggacctcctcttcccccttccaaataataaagtctatggacagggctgtctctgaagtactaacacaa

SEQ ID NO: 106854 - DNA, 1298 bp, Homo sapiens
  Payload ID: 985
  Gene Symbol: ACY1
  Gene Name: aminoacylase 1
  Uniprot ID: Q03154
  ENST ID: ENST00000494103
  CDS Start-End: 166-1176
cgacatccggcctcggccacgtggtgggcggaccggggcggtcctgagcctgcgacctcgcaggcgacctcgctggaccctaagtccaggccacagtcagggaagggcgctgagaggcgagcgtgagcccagcgacaggagagtgagctcaccacgcgcagcgccatgaccagcaagggtcccgaggaggagcacccatcggtgacgctcttccgccagtacctgcgtatccgcactgtccagcccaagcctgactatggagctgctgtggctttctttgaggagacagcccgccagctgggcctgggctgtcagaaagtagaggtggcacctggctatgtggtgaccgtgttgacctggccaggcaccaaccctacactctcctccatcttgctcaactcccacacggatgtggtgcctgtcttcaaggaacattggagtcacgacccctttgaggccttcaaggattctgagggcatagccaatcccactgatgccttcactgtcttttatagtgagcggagtccctggtgggtgcgggttaccagcactgggaggccaggccatgcctcacgcttcatggaggacacagcagcagagaagctgcacaaggttgtaaactccatcctggcattccgggagaaggaatggcagaggctgcagtcaaacccccacctgaaagaggggtccgtgacctccgtgaacctgactaagctagagggtggcgtggcctataacgtgatacctgccaccatgagcgccagctttgacttccgtgtggcaccggatgtggacttcaaggcttttgaggagcagctgcagagctggtgccaggcagctggcgagggggtcaccctagagtttgctcagaagtggatgcacccccaagtgacacctactgatgactcaaacccttggtgggcagcttttagccgggtctgcaaggatatgaacctcactctggagcctgagatcatgcctgctgccactgacaaccgctatatccgcgcggtgggggtcccagctctaggcttctcacccatgaaccgcacacctgtgctgctgcacgaccacgatgaacggctgcatgaggctgtgttcctccgtggggtggacatatatacacgcctgctgcctgcccttgccagtgtgcctgccctgcccagtgacagctgagccctggaactcctaaacctttgcccctggggcttccatcccaaccagtgccaaggacctcctcttcccccttccaaataataaagtctatggacagggctgtctctgaagtactaacacaa

SEQ ID NO: 106855 - DNA, 1390 bp, Homo sapiens
  Payload ID: 985
  Gene Symbol: ACY1
  Gene Name: aminoacylase 1
  ENST ID: ENST00000491318
  CDS Start-End: 166-771
cgacatccggcctcggccacgtggtgggcggaccggggcggtcctgagcctgcgacctcgcaggcgacctcgctggaccctaagtccaggccacagtcagggaagggcgctgagaggcgagcgtgagcccagcgacaggagagtgagctcaccacgcgcagcgccatgaccagcaagggtcccgaggaggagcacccatcggtgacgctcttccgccagtacctgcgtatccgcactgtccagcccaagcctgactatggagctgctgtggctttctttgaggagacagcccgccagctgggcctgggctgtcagaaagtagaggtggcacctggctatgtggtgaccgtgttgacctggccaggcaccaaccctacactctcctccatcttgctcaactcccacacggatgtggtgcctgtcttcaaggaacattggagtcacgacccctttgaggccttcaaggattctgagggctacatctatgccaggggtgcccaggacatgaagtgcgtcagcatccagtacctggaagctgtgaggaggctgaaggtggagggccaccggttccccagaaccatccacatgacctttgtgcctgatgaggaggttgggggtcaccaaggcatggagctgttcgtgcagcggcctgagttccacgccctgagggcaggctttgccctggatgagggcatagccaatcccactgatgccttcactgtcttttatagtgagcggagtccctggtgctgcagtcaaacccccacctgaaagaggggtccgtgacctccgtgaacctgactaagctagagggtggcgtggcctataacgtgatacctgccaccatgagcgccagctttgacttccgtgtggcaccggatgtggacttcaaggcttttgaggagcagctgcagagctggtgccaggcagctggcgagggggtcaccctagagtttgctcagaagtggatgcacccccaagtgacacctactgatgactcaaacccttggtgggcagcttttagccgggtctgcaaggatatgaacctcactctggagcctgagatcatgcctgctgccactgacaaccgctatatccgcgcggtgggggtcccagctctaggcttctcacccatgaaccgcacacctgtgctgctgcacgaccacgatgaacggctgcatgaggctgtgttcctccgtggggtggacatatatacacgcctgctgcctgcccttgccagtgtgcctgccctgcccagtgacagctgagccctggaactcctaaacctttgcccctggggcttccatcccaaccagtgccaaggacctcctcttcccccttccaaataataaagtctatggacagggctgtctctgaagtactaacacaa

SEQ ID NO: 106856 - DNA, 1319 bp, Homo sapiens
  Payload ID: 985
  Gene Symbol: ACY1
  Gene Name: aminoacylase 1
  Uniprot ID: Q03154
  ENST ID: ENST00000476854
  CDS Start-End: 166-1197
cgacatccggcctcggccacgtggtgggcggaccggggcggtcctgagcctgcgacctcgcaggcgacctcgctggaccctaagtccaggccacagtcagggaagggcgctgagaggcgagcgtgagcccagcgacaggagagtgagctcaccacgcgcagcgccatgaccagcaagggtcccgaggaggagcacccatcggtgacgctcttccgccagtacctgcgtatccgcactgtccagcccaagcctgactatggagctgctgtggctttctttgaggagacagcccgccagctgggcctgggctgtcagaaagtagaggtggcacctggctatgtggtgaccgtgttgacctggccaggcaccaaccctacactctcctccatcttgctcaactcccacacggatgtggtgcctgtcttcaaggaacattggagtcacgacccctttgaggccttcaaggattctgagggctacatctatgccaggggtgcccaggacatgaagtgcgtcagcatccagtacctggaagctgtgaggaggctgaaggtggagggccaccggttccccagaaccatccacatgacctttgtgcctgatgaggaggttgggggtcaccaaggcatggagctgttcgtgcagcggcctgagttccacgccctgagggcaggctttgccctggatgagggcatagccaatcccactgatgccttcactgtcttttatagtgagcggagtccctggtgggtgcgggttaccagcactgggaggccaggccatgcctcacgcttcatggaggacacagcagcagagaagctggcttttgaggagcagctgcagagctggtgccaggcagctggcgagggggtcaccctagagtttgctcagaagtggatgcacccccaagtgacacctactgatgactcaaacccttggtgggcagcttttagccgggtctgcaaggatatgaacctcactctggagcctgagatcatgcctgctgccactgacaaccgctatatccgcgcggtgggggtcccagctctaggcttctcacccatgaaccgcacacctgtgctgctgcacgaccacgatgaacggctgcatgaggctgtgttcctccgtggggtggacatatatacacgcctgctgcctgcccttgccagtgtgcctgccctgcccagtgacagctgagccctggaactcctaaacctttgcccctggggcttccatcccaaccagtgccaaggacctcctcttcccccttccaaataataaagtctatggacagggctgtctctgaagtactaacacaa

SEQ ID NO: 106857 - DNA, 755 bp, Homo sapiens
  Payload ID: 985
  Gene Symbol: ACY1
  Gene Name: aminoacylase 1
  ENST ID: ENST00000469863
  CDS Start-End: 72-755
agtcagggaagggcgctgagaggcgagcgtgagcccagcgacaggagagtgagctcaccacgcgcagcgccatgaccagcaagggtcccgaggaggagcacccatcggtgacgctcttccgccagtacctgcgtatccgcactgtccagcccaagcctgactatggagctgctgtggctttctttgaggagacagcccgccagctgggcctgggctgtcagaaagtagagaccacctaccctcctgaccatctccaggtggcacctggctatgtggtgaccgtgttgacctggccaggcaccaaccctacactctcctccatcttgctcaactcccacacggatgtggtgcctgtcttcaaggaacattggagtcacgacccctttgaggccttcaaggattctgagggctacatctatgccaggggtgcccaggacatgaagtgcgtcagcatccagtacctggaagctgtgaggaggctgaaggtggagggccaccggttccccagaaccatccacatgacctttgtgcctgatgaggaggttgggggtcaccaaggcatggagctgttcgtgcagcggcctgagttccacgccctgagggcaggctttgccctggatgagggcatagccaatcccactgatgccttcactgtcttttatagtgagcggagtccctggtgggtgcgggttaccagcactgggaggccaggccatgcctcacgcttcatggaggacacagcagcagagaagctg

SEQ ID NO: 106858 - DNA, 1300 bp, Homo sapiens
  Payload ID: 986
  Gene Symbol: ACY3
  Gene Name: aminoacylase 3
  Uniprot ID: Q96HD9
  ENST ID: ENST00000255082
  CDS Start-End: 172-1131
cggagtgacagccccacgggccacgcagcaagcagaagatccccgggagtcaccctcaaccctctggggccacgtgggcccatgaataccagcctgtctgcgagttagacgccagtcctggtggcccgggaagcccagatccgcatcagcggttctgcaccccacaccagcatgtgctcactgcctgtgccccgggagcccctgcgtcgcgtggctgtgactgggggcacgcatggcaacgagatgtcgggcgtctacctggcccggcactggctgcatgcccccgcagagctgcagagagccagcttctccgctgtgcctgtgctggccaacccggcagccacatccggctgccgccgctacgtggaccatgacctcaaccgcaccttcaccagcagcttcctcaattccaggcccaccccggacgacccatatgaggtgacaagagcccgagagctgaaccagctgctggggcccaaggcctcgggccaggcctttgactttgtccttgacctgcacaacaccacggccaacatgggcacctgcttaatcgcgaagtcctcccacgaagtctttgccatgcacctgtgccgccatctgcagctgcagtaccccgagctgtcctgccaggtcttcctgtaccagcggtctggggaggagagctacaacctggactctgtggccaaaaatggactgggtctggagctgggcccccagccacagggtgtgctgcgggctgacattttctcaaggatgaggaccctggtggccacagttctggacttcatcgaactcttcaaccagggtacggcctttcctgcctttgagatggaagcctatagacccgtgggcgtcgtggacttcccccgcaccgaggccgggcacctggcaggcactgtgcatcctcagctgcaggaccgagacttccagccactgcagcctggtgctcccatcttccagatgttcagtggggaggacctgctctatgagggagagtccacggtgtaccccgtgttcattaacgaggctgcctactatgagaagggcgttgcctttgtccagactgagaagttcacattcaccgtgcctgccatgcccgcgctgacccctgccccgagcccagcttcctaacccaagacacacctccccaacctcagtcttcccatctgaacgatgggtcctgaggcacagctctgagcacagaggtcccttctgccacctaccatgcaccatgttccttgccaggcctccccaacccctggcctcaatttccctttctataaaatggaagatgtccaga

SEQ ID NO: 106859 - DNA, 933 bp, Homo sapiens
  Payload ID: 986
  Gene Symbol: ACY3
  Gene Name: aminoacylase 3
  ENST ID: ENST00000529256
  CDS Start-End: 314-910
gaataccagcctgtctgcgagttagacgccagtcctggtggcccgggaagcccagatccgcatcagcgagctgcagagagccagcttctccgctgtgcctgtgctggccaacccggcagccacatccggctgccgccgctacgtggaccatgacctcaaccgcaccttcaccagcagcttcctcaattccaggcccaccccggacgacccatatgaggtgacaagagcccgagagctgaaccagctgctggggcccaaggcctcgggccaggcctttgactttgtccttgacctgcacaacaccacggccaacatgggcacctgcttaatcgcgaagtcctcccacgaagtctttgccatgcacctgtgccgccatctgcagctgcagtaccccgagctgtcctgccaggtcttcctgtaccagcggtctggggaggagagctacaacctggactctgtggccaaaaatggactgggtctggagctgggcccccagccacagggtgtgctgcgggctgacattttctcaaggatgaggaccctggtggccacagttctggacttcatcgaactcttcaaccagggtacggcctttcctgcctttgagatggaagcctatagacccgtgggcgtcgtggacttcccccgcaccgaggccgggcacctggcaggcactgtgcatcctcagctgcaggaccgagacttccagccactgcagcctggtgctcccatcttccagatgttcagtggggaggacctgctctatgagggagagtccacggtgtaccccgtgttcattaacgaggctgcctactatgagaagggcgttgcctttgtccagactgagaagttcacattcaccgtgcctgccatgcccgcgctgacccctgccccgagcccagcttcctaacccaagacacacctccccaacct

SEQ ID NO: 106860 - DNA, 2101 bp, Homo sapiens
  Payload ID: 987
  Gene Symbol: AADAT
  Gene Name: aminoadipate aminotransferase
  Uniprot ID: Q8N5Z0
  ENST ID: ENST00000353187
  CDS Start-End: 125-1402
agcccctgggctagcctctgggccggcgcctaggccggccaacgcggacgccgggttgcggtgattcccagcggcgagtcctcaaccactgaagaagaagcttgatgcttggctgtcagaagacatgaattacgcacggttcatcacggcagcgagcgcagccagaaacccttctcccatccggaccatgactgacatattgagcagaggaccaaaatcgatgatctccttggctggtggcttaccaaatccaaacatgtttccttttaagactgccgtaatcactgtagaaaatggaaagaccatccaatttggagaagagatgatgaagagagcacttcagtattctccgagtgctggaattccagagcttttgtcctggctaaaacagttacaaataaaattgcataatcctcctaccatccattacccacccagtcaaggacaaatggatctatgtgtcacatctggcagccaacaaggtctttgtaaggtgtttgaaatgatcattaatcctggagataatgtcctcctagatgaacctgcttattcaggaactcttcaaagtctgcacccactgggctgcaacattattaatgttgccagtgatgaaagtgggattgttccagattccctaagagacatactttccagatggaaaccagaagatgcaaagaatccccagaaaaacacccccaaatttctttatactgttccaaatggcaacaaccctactggaaactcattaaccagtgaacgcaaaaaggaaatctatgagcttgcaagaaaatatgatttcctcataatagaagatgatccttactattttctccagtttaacaagttcagggtaccaacatttctttccatggatgttgatggacgtgtcatcagagctgactctttttcaaaaatcatttcctctgggttgagaataggatttttaactggtccaaaacccttaatagagagagttattttacacatacaagtttcaacattgcaccccagcacttttaaccagctcatgatatcacagcttctacacgaatggggagaagaaggtttcatggctcatgtagacagggttattgatttctatagtaaccagaaggatgcaatactggcagctgcagacaagtggttaactggtttggcagaatggcatgttcctgctgctggaatgtttttatggattaaagttaaaggcattaatgatgtaaaagaactgattgaagaaaaggccgttaagatgggggtattaatgctccctggaaatgctttctacgtcgatagctcagctcctagcccttacttgagagcatccttctcttcagcttctccagaacagatggatgtggccttccaggtattagcacaacttataaaagaatctttatgaagaaattaaactaggttgggcatggtggctcacacctataatcccagcactttgggaggcagaggagggaggatcacttgaacccaggaattcaaggctgcagtaagctacgatcacaccactgcactctggcctgcatgcactctggcctgcatggcagaacaagaccctgtctctaaaaaaagagaaagaaatcaaactaatcatgctgctcatggatttttccaataaatttcttgttttggcaggaagaaatgaacactggtattagacttaaagattaaatttcctcaaacatgtcctatctgtagtagttcaactagacaccttttaaagtgcctctaaattcatcagatggccaaactgtatttataatccacttaggcattttgaaaaactttcaacctgtaaaaagttacttttatcttggatttattatgaagaactttgtagttgctttgtaatttcccataaattgtctttgaaactaacattttacactgaattattttgagattttaaagaagtaattaagtgcaaaatggtatataatgtgtactttttctacttttaggaaaatttaatgagagcttattgcaaaaattgttataatttggtcattataagtgacttttagtaaaagtaccataaaccttatgttatgccacagaaattcctttaaaataaaattcttaaact

SEQ ID NO: 106861 - DNA, 2261 bp, Homo sapiens
  Payload ID: 987
  Gene Symbol: AADAT
  Gene Name: aminoadipate aminotransferase
  Uniprot ID: Q8N5Z0
  ENST ID: ENST00000337664
  CDS Start-End: 278-1555
ctggcggccgcaggagcgcgtgcggcgtggactttgccgggctcgccacacagccccagacccgtttaggaccgggagaccgaacgcagcgtccagccggggagtttcggcggcgttctccgggcaccgcgcgcgggaagccagacgcagcggggggacacatctcgcggtggcgttgccagagtgaggagttagcaggcaggacttgacgaggctctttggtttttctagtcctcaaccactgaagaagaagcttgatgcttggctgtcagaagacatgaattacgcacggttcatcacggcagcgagcgcagccagaaacccttctcccatccggaccatgactgacatattgagcagaggaccaaaatcgatgatctccttggctggtggcttaccaaatccaaacatgtttccttttaagactgccgtaatcactgtagaaaatggaaagaccatccaatttggagaagagatgatgaagagagcacttcagtattctccgagtgctggaattccagagcttttgtcctggctaaaacagttacaaataaaattgcataatcctcctaccatccattacccacccagtcaaggacaaatggatctatgtgtcacatctggcagccaacaaggtctttgtaaggtgtttgaaatgatcattaatcctggagataatgtcctcctagatgaacctgcttattcaggaactcttcaaagtctgcacccactgggctgcaacattattaatgttgccagtgatgaaagtgggattgttccagattccctaagagacatactttccagatggaaaccagaagatgcaaagaatccccagaaaaacacccccaaatttctttatactgttccaaatggcaacaaccctactggaaactcattaaccagtgaacgcaaaaaggaaatctatgagcttgcaagaaaatatgatttcctcataatagaagatgatccttactattttctccagtttaacaagttcagggtaccaacatttctttccatggatgttgatggacgtgtcatcagagctgactctttttcaaaaatcatttcctctgggttgagaataggatttttaactggtccaaaacccttaatagagagagttattttacacatacaagtttcaacattgcaccccagcacttttaaccagctcatgatatcacagcttctacacgaatggggagaagaaggtttcatggctcatgtagacagggttattgatttctatagtaaccagaaggatgcaatactggcagctgcagacaagtggttaactggtttggcagaatggcatgttcctgctgctggaatgtttttatggattaaagttaaaggcattaatgatgtaaaagaactgattgaagaaaaggccgttaagatgggggtattaatgctccctggaaatgctttctacgtcgatagctcagctcctagcccttacttgagagcatccttctcttcagcttctccagaacagatggatgtggccttccaggtattagcacaacttataaaagaatctttatgaagaaattaaactaggttgggcatggtggctcacacctataatcccagcactttgggaggcagaggagggaggatcacttgaacccaggaattcaaggctgcagtaagctacgatcacaccactgcactctggcctgcatgcactctggcctgcatggcagaacaagaccctgtctctaaaaaaagagaaagaaatcaaactaatcatgctgctcatggatttttccaataaatttcttgttttggcaggaagaaatgaacactggtattagacttaaagattaaatttcctcaaacatgtcctatctgtagtagttcaactagacaccttttaaagtgcctctaaattcatcagatggccaaactgtatttataatccacttaggcattttgaaaaactttcaacctgtaaaaagttacttttatcttggatttattatgaagaactttgtagttgctttgtaatttcccataaattgtctttgaaactaacattttacactgaattattttgagattttaaagaagtaattaagtgcaaaatggtatataatgtgtactttttctacttttaggaaaatttaatgagagcttattgcaaaaattgttataatttggtcattataagtgacttttagtaaaagtaccataaaccttatgttatgccacagaaattcctttaaaataaaattcttaaactaaacata

SEQ ID NO: 106862 - DNA, 810 bp, Homo sapiens
  Payload ID: 987
  Gene Symbol: AADAT
  Gene Name: aminoadipate aminotransferase
  ENST ID: ENST00000507375
  CDS Start-End: 182-810
ccctgcagtggacccaagtcgccgccagatggttcccgaggattaggatcacgggcacttccggtcccctcggtcagcccctgggctagcctctgggccggcgcctaggccggccaacgcggacgccgggttgcgtcctcaaccactgaagaagaagcttgatgcttggctgtcagaagacatgaattacgcacggttcatcacggcagcgagcgcagccagaaacccttctcccatccggaccatgactgacatattgagcagaggaccaaaatcgatgatctccttggctggtggcttaccaaatccaaacatgtttccttttaagactgccgtaatcactgtagaaaatggaaagaccatccaatttggagaagagatgatgaagagagcacttcagtattctccgagtgctggaattccagagcttttgtcctggctaaaacagttacaaataaaattgcataatcctcctaccatccattacccacccagtcaaggacaaatggatctatgtgtcacatctggcagccaacaaggtctttgtaaggtgtttgaaatgatcattaatcctggagataatgtcctcctagatgaacctgcttattcaggaactcttcaaagtctgcacccactgggctgcaacattattaatgttgccagtgatgaaagtgggattgttccagattccctaagagacatactttccagatggaaaccagaagatgcaaagaatccccagaaaaacacccccaaatttctttatactgttccaaatggcaacaaccctactggaaactcattaaccag

SEQ ID NO: 106863 - DNA, 2113 bp, Homo sapiens
  Payload ID: 987
  Gene Symbol: AADAT
  Gene Name: aminoadipate aminotransferase
  Uniprot ID: Q8N5Z0
  ENST ID: ENST00000509167
  CDS Start-End: 118-1407
gggctagcctctgggccggcgcctaggccggccaacgcggacgccgggttgcggtgattcccagcggcgagtcctcaaccactgaagaagaagcttgatgcttggctgtcagaagacatgaattacgcacggttcatcacggcagcgagcgcagccagaaacccttctcccatccggaccatgagtgagaaacgggctgacatattgagcagaggaccaaaatcgatgatctccttggctggtggcttaccaaatccaaacatgtttccttttaagactgccgtaatcactgtagaaaatggaaagaccatccaatttggagaagagatgatgaagagagcacttcagtattctccgagtgctggaattccagagcttttgtcctggctaaaacagttacaaataaaattgcataatcctcctaccatccattacccacccagtcaaggacaaatggatctatgtgtcacatctggcagccaacaaggtctttgtaaggtgtttgaaatgatcattaatcctggagataatgtcctcctagatgaacctgcttattcaggaactcttcaaagtctgcacccactgggctgcaacattattaatgttgccagtgatgaaagtgggattgttccagattccctaagagacatactttccagatggaaaccagaagatgcaaagaatccccagaaaaacacccccaaatttctttatactgttccaaatggcaacaaccctactggaaactcattaaccagtgaacgcaaaaaggaaatctatgagcttgcaagaaaatatgatttcctcataatagaagatgatccttactattttctccagtttaacaagttcagggtaccaacatttctttccatggatgttgatggacgtgtcatcagagctgactctttttcaaaaatcatttcctctgggttgagaataggatttttaactggtccaaaacccttaatagagagagttattttacacatacaagtttcaacattgcaccccagcacttttaaccagctcatgatatcacagcttctacacgaatggggagaagaaggtttcatggctcatgtagacagggttattgatttctatagtaaccagaaggatgcaatactggcagctgcagacaagtggttaactggtttggcagaatggcatgttcctgctgctggaatgtttttatggattaaagttaaaggcattaatgatgtaaaagaactgattgaagaaaaggccgttaagatgggggtattaatgctccctggaaatgctttctacgtcgatagctcagctcctagcccttacttgagagcatccttctcttcagcttctccagaacagatggatgtggccttccaggtattagcacaacttataaaagaatctttatgaagaaattaaactaggttgggcatggtggctcacacctataatcccagcactttgggaggcagaggagggaggatcacttgaacccaggaattcaaggctgcagtaagctacgatcacaccactgcactctggcctgcatgcactctggcctgcatggcagaacaagaccctgtctctaaaaaaagagaaagaaatcaaactaatcatgctgctcatggatttttccaataaatttcttgttttggcaggaagaaatgaacactggtattagacttaaagattaaatttcctcaaacatgtcctatctgtagtagttcaactagacaccttttaaagtgcctctaaattcatcagatggccaaactgtatttataatccacttaggcattttgaaaaactttcaacctgtaaaaagttacttttatcttggatttattatgaagaactttgtagttgctttgtaatttcccataaattgtctttgaaactaacattttacactgaattattttgagattttaaagaagtaattaagtgcaaaatggtatataatgtgtactttttctacttttaggaaaatttaatgagagcttattgcaaaaattgttataatttggtcattataagtgacttttagtaaaagtaccataaaccttatgttatgccacagaaattcctttaaaataaaattcttaaactaaacata

SEQ ID NO: 106864 - DNA, 2193 bp, Homo sapiens
  Payload ID: 987
  Gene Symbol: AADAT
  Gene Name: aminoadipate aminotransferase
  Uniprot ID: Q8N5Z0
  ENST ID: ENST00000515480
  CDS Start-End: 210-1487
aaaatgcacagtcccagtgactgagaggaggccagcggagcgcgcgggaacgagggtggggccgctcccggctgggcgcagctcgggagccccctgcagtggacccaagtcgccgccagatggttcccgaggattaggatcacgggcacttccggtcccctcgtcctcaaccactgaagaagaagcttgatgcttggctgtcagaagacatgaattacgcacggttcatcacggcagcgagcgcagccagaaacccttctcccatccggaccatgactgacatattgagcagaggaccaaaatcgatgatctccttggctggtggcttaccaaatccaaacatgtttccttttaagactgccgtaatcactgtagaaaatggaaagaccatccaatttggagaagagatgatgaagagagcacttcagtattctccgagtgctggaattccagagcttttgtcctggctaaaacagttacaaataaaattgcataatcctcctaccatccattacccacccagtcaaggacaaatggatctatgtgtcacatctggcagccaacaaggtctttgtaaggtgtttgaaatgatcattaatcctggagataatgtcctcctagatgaacctgcttattcaggaactcttcaaagtctgcacccactgggctgcaacattattaatgttgccagtgatgaaagtgggattgttccagattccctaagagacatactttccagatggaaaccagaagatgcaaagaatccccagaaaaacacccccaaatttctttatactgttccaaatggcaacaaccctactggaaactcattaaccagtgaacgcaaaaaggaaatctatgagcttgcaagaaaatatgatttcctcataatagaagatgatccttactattttctccagtttaacaagttcagggtaccaacatttctttccatggatgttgatggacgtgtcatcagagctgactctttttcaaaaatcatttcctctgggttgagaataggatttttaactggtccaaaacccttaatagagagagttattttacacatacaagtttcaacattgcaccccagcacttttaaccagctcatgatatcacagcttctacacgaatggggagaagaaggtttcatggctcatgtagacagggttattgatttctatagtaaccagaaggatgcaatactggcagctgcagacaagtggttaactggtttggcagaatggcatgttcctgctgctggaatgtttttatggattaaagttaaaggcattaatgatgtaaaagaactgattgaagaaaaggccgttaagatgggggtattaatgctccctggaaatgctttctacgtcgatagctcagctcctagcccttacttgagagcatccttctcttcagcttctccagaacagatggatgtggccttccaggtattagcacaacttataaaagaatctttatgaagaaattaaactaggttgggcatggtggctcacacctataatcccagcactttgggaggcagaggagggaggatcacttgaacccaggaattcaaggctgcagtaagctacgatcacaccactgcactctggcctgcatgcactctggcctgcatggcagaacaagaccctgtctctaaaaaaagagaaagaaatcaaactaatcatgctgctcatggatttttccaataaatttcttgttttggcaggaagaaatgaacactggtattagacttaaagattaaatttcctcaaacatgtcctatctgtagtagttcaactagacaccttttaaagtgcctctaaattcatcagatggccaaactgtatttataatccacttaggcattttgaaaaactttcaacctgtaaaaagttacttttatcttggatttattatgaagaactttgtagttgctttgtaatttcccataaattgtctttgaaactaacattttacactgaattattttgagattttaaagaagtaattaagtgcaaaatggtatataatgtgtactttttctacttttaggaaaatttaatgagagcttattgcaaaaattgttataatttggtcattataagtgacttttagtaaaagtaccataaaccttatgttatgccacagaaattcctttaaaataaaattcttaaactaaacata

SEQ ID NO: 106865 - DNA, 806 bp, Homo sapiens
  Payload ID: 987
  Gene Symbol: AADAT
  Gene Name: aminoadipate aminotransferase
  ENST ID: ENST00000502392
  CDS Start-End: 267-806
actcaggagcccagctggcttcccccagtggagccggcactggggccacaggtggagctgcctgccagtcccgggctgtgagcccgcactcctcagcccttgggcgaactccatcgtcactccaaaatgctgagatcttcgagaaagtgatgttgaaattcgtcttggtcgccgggatgcttcccaggagagtgcccagagtttcactaacgaaagatggtcctcaaccactgaagaagaagcttgatgcttggctgtcagaagacatgaattacgcacggttcatcacggcagcgagcgcagccagaaacccttctcccatccggaccatgactgacatattgagcagaggaccaaaatcgatgatctccttggctggtggcttaccaaatccaaacatgtttccttttaagactgccgtaatcactgtagaaaatggaaagaccatccaatttggagaagagatgatgaagagagcacttcagtattctccgagtgctggaattccagagcttttgtcctggctaaaacagttacaaataaaattgcataatcctcctaccatccattacccacccagtcaaggacaaatggatctatgtgtcacatctggcagccaacaaggtctttgtaaggtgtttgaaatgatcattaatcctggagataatgtcctcctagatgaacctgcttattcaggaactcttcaaagtctgcacccactgggctgcaacattattaatgttgccagtgatgaaagtgggattgttccagattccctaagagacatactttccagatggaaacca

SEQ ID NO: 106866 - DNA, 755 bp, Homo sapiens
  Payload ID: 987
  Gene Symbol: AADAT
  Gene Name: aminoadipate aminotransferase
  ENST ID: ENST00000510340
  CDS Start-End: 95-755
agtagagagaggcgcagactgctgtggggcacggccttggaagggagggggcgtgctatcaagaaaggctcttcctgggaagctgagaaggggcatgcacagcgtgcagatgggtgtacagtggagagggccagctgacatattgagcagaggaccaaaatcgatgatctccttggctggtggcttaccaaatccaaacatgtttccttttaagactgccgtaatcactgtagaaaatggaaagaccatccaatttggagaagagatgatgaagagagcacttcagtattctccgagtgctggaattccagagcttttgtcctggctaaaacagttacaaataaaattgcataatcctcctaccatccattacccacccagtcaaggacaaatggatctatgtgtcacatctggcagccaacaaggtctttgtaaggtgtttgaaatgatcattaatcctggagataatgtcctcctagatgaacctgcttattcaggaactcttcaaagtctgcacccactgggctgcaacattattaatgttgccagtgatgaaagtgggattgttccagattccctaagagacatactttccagatggaaaccagaagatgcaaagaatccccagaaaaacacccccaaatttctttatactgttccaaatggcaacaaccctactggaaactcattaaccagtgaacgcaaaaaggaaatctatgagcttgcaagaaaatatgatttcctcataatagaag

SEQ ID NO: 106867 - DNA, 3590 bp, Homo sapiens
  Payload ID: 988
  Gene Symbol: AASDH
  Gene Name: aminoadipate-semialdehyde dehydrogenase
  Uniprot ID: Q4L235
  ENST ID: ENST00000205214
  CDS Start-End: 182-3478
ggaagatttacgtatggtgcctcgctctgggatagctttacggcttctgggagctgctgcttcgctgtgagaagtatccgcgacgagctatccgggaaagggccgaatgcgatcaaacctaatccgcgagacttgctaaggttctgtgctacaaattgatgtttagataaacttcagtgaaatgactcttcaggaattggtgcataaggctgcctcctgttatatggacagagtagctgtatgttttgatgaatgcaacaaccagcttccagtttactacacctacaagactgtggttaatgctgcttctgaattatcaaattttctgctgttacactgtgactttcaaggaattcgggaaattggtctctactgccaacctgggatagacttaccctcttggattttaggaattctccaagtcccggctgcttatgtacctatcgagccagattcaccaccgtcattatcaactcattttatgaaaaaatgtaatctaaagtatatccttgttgaaaaaaaacaaattaataaatttaaatcttttcatgaaacattattgaactatgatacatttacagtggaacataatgacctagtgctcttcagacttcactggaaaaatactgaggtgaacttgatgctaaatgatggaaaagagaaatatgaaaaagaaaaaataaaaagcataagttctgagcatgtcaatgaagaaaaagcagaagaacacatggatctgaggctaaagcattgcttagcctatgttctacatacatcagggactacagggataccgaagattgtcagagtgcctcataagtgtatagtaccaaatatccagcattttcgggtactttttgacatcacacaagaagatgttttgtttctggcttcacctctgaccttcgatccttctgttgtggaaatatttcttgctctatcaagtggtgcctctctgcttattgtaccaacttccgtcaagttgctcccatcaaaattagccagcgttctcttttcccatcatagagtgactgttttgcaggcaacaccaacattgcttagaagatttggatctcagcttatcaagtcaactgttttgtcagccactacttctcttcgagtattagcccttggtggtgaagcgtttccatcattgacagttctcagaagctggagaggagaaggcaataaaacacaaatatttaatgtttatggtatcacagaggtatcaagttgggcgaccatttataggattccagagaagactcttaactctactctcaaatgtgaattgcctgtacaactgggatttccacttcttggaacagtagttgaagtcagagatactaatggcttcacaattcaggaaggcagtggccaagtatttttaggtggcagaaacagagtgtgttttcttgatgatgaagtgacagtaccacttggcacaatgcgagctacaggagactttgtgactgtgaaagatggagagattttttttttgggacgaaaagacagtcagatcaaacgtcatggcaaacgtcttaacattgaacttgtgcaacaggttgctgaagagcttcagcaagtggagtcttgtgcagttacatggtataatcaggaaaaattaattctcttcatggtgtctaaagatgcttcagtaaaagaatacatctttaaagaactgcagaaatatcttccaagtcatgcagtcccggatgagcttgtattgatcgactctctaccatttacatcccacggcaaaattgatgtttctgagttaaacaagatatatttaaactacataaacttgaagtctgagaataagctcagtgggaaagaggacctttgggaaaaattacagtatttgtggaagtctactctgaatctcccagaagatcttttgagggttcctgatgagtcactcttcttaaatagtggtggagattccttaaagtccatccggctcctcagtgagattgaaaaacttgttggtacatcagtacctgggcttctggaaattattctcagcagttccattttagagatttataatcacatccttcaaacagtggttccagatgaagatgtgacattcaggaagagttgtgccacaaaaaggaaactcagcgacattaatcaagaggaagccagtggaacatctttacatcagaaagccatcatgactttcacttgccacaatgagattaatgcttttgttgtactgagcagagggagtcaaattttgtctctgaattccactaggtttttaacaaagttaggacattgctcttcagcctgtccttctgactcagtttcacagaccaacattcaaaatttgaaaggcttaaattctccagttcttattgggaagtcaaaagatccatcctgtgttgcaaaagtttctgaagaggggaaacctgcgatagggactcagaaaatggagttacatgtgaggtggaggtcagacacaggcaaatgtgtagatgcttcaccgctggttgtaatacccacttttgataagtcatctacaactgtgtacattggttcccattctcatagaatgaaggcagttgacttttactctgggaaggtaaaatgggaacagattttgggagatcgaattgaatcctcagcatgtgtatctaagtgtggaaactttattgtggtgggctgttataatggattagtttatgttctgaaaagtaatagtggagaaaaatactggatgtttactactgaagatgctgtcaaaagctcggcaaccatggatccaaccacaggactcatttacattggatctcatgaccagcacgcatatgctttagatatttatagaaagaagtgtgtttggaagtcaaaatgtggaggaactgtcttttcctctccgtgtttgaacctgattccacatcatttgtattttgctacattgggaggacttttactggctgtaaatcctgctactgggaacgttatttggaaacattcctgtggaaaaccactcttctcttccccacaatgttgctcacagtatatttgtattggctgtgtagatgggaatttactctgctttactcactttggagaacaggtttggcagttctctaccagtggaccaatcttttcatccccgtgtacctcaccatcagagcaaaaaatattttttggttcccatgattgctttatctactgttgtaacatgaaaggtcacctgcagtggaaatttgaaactacttcaagggtctatgcaacaccgtttgctttccataactacaatggcagcaatgaaatgttgctggcagcagcatctactgatgggaaagtgtggatcttggaatctcagagtggacaattgcaaagtgtttatgaacttcctggagaagtcttctcttctcctgtggtcctggaatcaatgctcattattgggtgtagagataattatgtttattgtctggatttattgggtggcaatcaaaaataatcaaatacagtccttatttgtataacaaatgtgagatatttgaaaatattttaccattatacatcatgtggacttattttatattaaagaagattatattttggctaagaaa

SEQ ID NO: 106868 - DNA, 3182 bp, Homo sapiens
  Payload ID: 988
  Gene Symbol: AASDH
  Gene Name: aminoadipate-semialdehyde dehydrogenase
  Uniprot ID: Q4L235
  ENST ID: ENST00000451613
  CDS Start-End: 190-2763
agcgacgcggaagatttacgtatggtgcctcgctctgggatagctttacggcttctgggagctgctgcttcgctgtgagaagtatccgcgacgagctatccgggaaagggccgaatgcgatcaaacctaatccgcgagacttgctaaggttctgtgctacaaattgatgtttagataaacttcagtgaaatgactcttcaggaattggtgcataaggctgcctcctgttatatggacagagtagctgtatgttttgatgaatgcaacaaccagcttccagtttactacacctacaagactgtggttaatgctgcttctgaattatcaaattttctgctgttacactgtgactttcaaggaattcgggaaattggtctctactgccaacctgggatagacttaccctcttggattttaggaattctccaagtcccggctgcttatgtacctatcgagccagattcaccaccgtcattatcaactcattttatgaaaaaatgtaatctaaagtatatccttgttgaaaaaaaacaaattaataaatttaaatcttttcatgaaacattattgaactatgatacatttacagtggaacataatgacctagtgctcttcagacttcactggaaaaatactgaggtgaacttgatgctaaatgatggaaaagagaaatatgaaaaagaaaaaataaaaagcataagttctgagcatgtcaatgaagaaaaagcagaagaacacatggatctgaggctaaagcattgcttagcctatgttctacatacatcagggactacagggataccgaagattgtcagagtgcctcataagtgtatagtaccaaatatccagcattttcgggtactttttgacatcacacaagaagatgttttgtttctggcttcacctctgaccttcgatccttctgttgtggaaatatttcttgctctatcaagtggtgcctctctgcttattgtaccaacttccgtcaagttgctcccatcaaaattagccagcgttctcttttcccatcatagagtgactgttttgcaggcaacaccaacattgcttagaagatttggatctcagcttatcaagtcaactgttttgtcagccactacttctcttcgagtattagcccttggtggtgaagcgtttccatcattgacagttctcagaagctggagaggagaaggcaataaaacacaaatatttaatgtttatggtatcacagaggtatcaagttgggcgaccatttataggattccagagaagactcttaactctactctcaaatgtgaattgcctgtacaactgggatttccacttcttggaacagtagttgaagtcagagatactaatggcttcacaattcaggaaggcagtggccaagtatttttaggtggcagaaacagagtgtgttttcttgatgatgaagtgacagtaccacttggcacaatgcgagctacaggagactttgtgactgtgaaagatggagagattttttttttgggacgaaaagacagtcagatcaaacgtcatggcaaacgtcttaacattgaacttgtgcaacaggttgctgaagagcttcagcaagtggagtcttgtgcagttacatggtataatcaggaaaaattaattctcttcatggtgtctaaagatgcttcagtaaaagaatacatctttaaagaactgcagaaatatcttccaagtcatgcagtcccggatgagcttgtattgatcgactctctaccatttacatcccacggcaaaattgatgtttctgagttaaacaagatatatttaaactacataaacttgaagtctgagaataagctcagtgggaaagaggacctttgggaaaaattacagtatttgtggaagtctactctgaatctcccagaagatcttttgagggttcctgatgagtcactcttcttaaatagtggtggagattccttaaagtccatccggctcctcagtgagattgaaaaacttgttggtacatcagtacctgggcttctggaaattattctcagcagttccattttagagatttataatcacatccttcaaacagtggttccagatgaagatgtgacattcaggaagagttgtgccacaaaaaggaaactcagcgacattaatcaagaggaagccagtggaacatctttacatcagaaagccatcatgactttcacttgccacaatgagattaatgcttttgttgtactgagcagagggagtcaaattttgtctctgaattccactaggtttttaacaaagttaggacattgctcttcagcctgtccttctgactcagtttcacagaccaacattcaaaatttgaaaggcttaaattctccagttcttattgggaagtcaaaagatccatcctgtgttgcaaaagtttctgaagaggggaaacctgcgatagggactcagaaaatggagttacatgtgaggtggaggtcagacacaggcaaatgtgtagatgcttcaccgctggttgtaatacccacttttgataagtcatctacaactgtgtacattggttcccattctcatagaatgaaggcagttgacttttactctgggaaggtaaaatgggaacagattttgggagatcgaattgaatcctcagcatgtgtatctaagtgtggaaactttattgtggtgggtttggcagttctctaccagtggaccaatcttttcatccccgtgtacctcaccatcagagcaaaaaatattttttggttcccatgattgctttatctactgttgtaacatgaaaggtcacctgcagtggaaatttgaaactacttcaagggtctatgcaacaccgtttgctttccataactacaatggcagcaatgaaatgttgctggcagcagcatctactgatgggaaagtgtggatcttggaatctcagagtggacaattgcaaagtgtttatgaacttcctggagaagtcttctcttctcctgtggtcctggaatcaatgctcattattgggtgtagagataattatgtttattgtctggatttattgggtggcaatcaaaaataatcaaatacagtccttatttgtataacaaatgtgagatatttgaaaatattttaccattatacatcatgtggacttattttatattaaagaagattatattttggctaagaaacgg

SEQ ID NO: 106869 - DNA, 3004 bp, Homo sapiens
  Payload ID: 988
  Gene Symbol: AASDH
  Gene Name: aminoadipate-semialdehyde dehydrogenase
  Uniprot ID: Q4L235
  ENST ID: ENST00000502617
  CDS Start-End: 182-2707
ggaagatttacgtatggtgcctcgctctgggatagctttacggcttctgggagctgctgcttcgctgtgagaagtatccgcgacgagctatccgggaaagggccgaatgcgatcaaacctaatccgcgagacttgctaaggttctgtgctacaaattgatgtttagataaacttcagtgaaatgactcttcaggaattggtgcataaggctgcctcctgttatatggacagagtagctgtatgttttgatgaatgcaacaaccagcttccagtttactacacctacaagactgtggttaatgctgcttctgaattatcaaattttctgctgttacactgtgactttcaaggaattcgggaaattggtctctactgccaacctgggatagacttaccctcttggattttaggaattctccaagtcccggctgcttatgtacctatcgagccagattcaccaccgtcattatcaactcattttatgaaaaaatgtaatctaaagtatatccttgttgaaaaaaaacaaattaataaatttaaatcttttcatgaaacattattgaactatgatacatttacagtggaacataatgacctagtgctcttcagacttcactggaaaaatactgaggtgaacttgatgctaaatgatggaaaagagaaatatgaaaaagaaaaaataaaaagcataagttctgagcatgtcaatgaagaaaaagcagaagaacacatggatctgaggctaaagcattgcttagcctatgttctacatacatcagggactacagggataccgaagattgtcagagtgcctcataagtgtatagtaccaaatatccagcattttcgggtactttttgacatcacacaagaagatgttttgtttctggcttcacctctgaccttcgatccttctgttgtggaaatatttcttgctctatcaagtggtgcctctctgcttattgtaccaacttccgtcaagttgctcccatcaaaattagccagcgttctcttttcccatcatagagtgactgttttgcaggcaacaccaacattgcttagaagatttggatctcagcttatcaagtcaactgttttgtcagccactacttctcttcgagtattagcccttggtggtgaagcgtttccatcattgacagttctcagaagctggagaggagaaggcaataaaacacaaatatttaatgtttatggtatcacagaggtatcaagttgggcgaccatttataggattccagagaagactcttaactctactctcaaatgtgaattgcctgtacaactgggatttccacttcttggaacagtagttgaagtcagagatactaatggcttcacaattcaggaaggcagtggccaagtatttttaggtggcagaaacagagtgtgttttcttgatgatgaagtgacagtaccacttggcacaatgcgagctacaggagactttgtgactgtgaaagatggagagattttttttttgggacgaaaagacagtcagatcaaacgtcatggcaaacgtcttaacattgaacttgtgcaacaggttgctgaagagcttcagcaagtggagtcttgtgcagttacatggtataatcaggaaaaattaattctcttcatggtgtctaaagatgcttcagtaaaagaatacatctttaaagaactgcagaaatatcttccaagtcatgcagtcccggatgagcttgtattgatcgactctctaccatttacatcccacggcaaaattgatgtttctgagttaaacaagatatatttaaactacataaacttgaagtctgagaataagctcagtgggaaagaggacctttgggaaaaattacagtatttgtggaagtctactctgaatctcccagaagatcttttgagggttcctgatgagtcactcttcttaaatagtggtggagattccttaaagtccatccggctcctcagtgagattgaaaaacttgttggtacatcagtacctgggcttctggaaattattctcagcagttccattttagagatttataatcacatccttcaaacagtggttccagatgaagatgtgacattcaggaagagttgtgccacaaaaaggaaactcagcgacattaatcaagaggaagccagtggaacatctttacatcagaaagccatcatgactttcacttgccacaatgagattaatgcttttgttgtactgagcagagggagtcaaattttgtctctgaattccactaggtttttaacaaagttaggacattgctcttcagcctgtccttctgactcagtttcacagaccaacattcaaaatttgaaaggcttaaattctccagttcttattgggaagtcaaaagatccatcctgtgttgcaaaagtttctgaagaggggaaacctgcgatagggactcagaaaatggagttacatgtgaggtggaggtcagacacaggcaaatgtgtagatgcttcaccgctggttgtaatacccacttttgataagtcatctacaactgtgtacattggttcccattctcatagaatgaaggcagttgacttttactctgggaaggtaaaatgggaacagattttgggagatcgaattgaatcctcagcatgtgtatctaagtgtggaaactttattgtggtgggtaagtttttgaatttgaggtttgtggagttaaattgaattaccatacaataatcttcataggcccaagttaaattttttaaaaatctaaatatgatgggtttggttgctgtccaaaaattatagttaaccctgtgctgattaatattgtgggccttggggtcaagagtccctggatttgaacctacctgtatagctattatgaactctgtgacctttggcaagttactgaacctcttagaatttcactttccttgtgggtaaaatgggaataataataaaatgtgttgctgtatcacaaataccccaaaactcaacaacctagaacaacacaaa

SEQ ID NO: 106870 - DNA, 2949 bp, Homo sapiens
  Payload ID: 988
  Gene Symbol: AASDH
  Gene Name: aminoadipate-semialdehyde dehydrogenase
  ENST ID: ENST00000503808
  CDS Start-End: 141-401
ggcttctgggagctgctgcttcgctgtgagaagtatccgcgacgagctatccgggaaagggccgaatgcgatcaaacctaatccgcgagacttgctaaggttctgtgctacaaattgatgtttagataaacttcagtgaaatgactcttcaggaattggtgcataaggctgcctcctgttatatggacagagtagctgtatgttttgatgaatgcaacaaccagcttccagtttactacacctacaagactgtggttaatgctgcttctgaattatcaaattttctgctgttacactgtgactttcaaggaattcgggaaattggtctctactgccaacctgggatagacttaccctcttggattttaggaaatttaaatcttttcatgaaacattattgaactatgatacatttacagtggaacataatgacctagtgctcttcagacttcactggaaaaatactgaggtgaacttgatgctaaatgatggaaaagagaaatatgaaaaagaaaaaataaaaagcataagttctgagcatgtcaatgaagaaaaagcagaagaacacatggatctgaggctaaagcattgcttagcctatgttctacatacatcagggactacagggataccgaagattgtcagagtgcctcataagtgtatagtaccaaatatccagcattttcgggtactttttgacatcacacaagaagatgttttgtttctggcttcacctctgaccttcgatccttctgttgtggaaatatttcttgctctatcaagtggtgcctctctgcttattgtaccaacttccgtcaagttgctcccatcaaaattagccagcgttctcttttcccatcatagagtgactgttttgcaggcaacaccaacattgcttagaagatttggatctcagcttatcaagtcaactgttttgtcagccactacttctcttcgagtattagcccttggtggtgaagcgtttccatcattgacagttctcagaagctggagaggagaaggcaataaaacacaaatatttaatgtttatggtatcacagaggtatcaagttgggcgaccatttataggattccagagaagactcttaactctactctcaaatgtgaattgcctgtacaactgggatttccacttcttggaacagtagttgaagtcagagatactaatggcttcacaattcaggaaggcagtggccaagtatttttaggtggcagaaacagagtgtgttttcttgatgatgaagtgacagtaccacttggcacaatgcgagctacaggagactttgtgactgtgaaagatggagagattttttttttgggacgaaaagacagtcagatcaaacgtcatggcaaacgtcttaacattgaacttgtgcaacaggttgctgaagagcttcagcaagtggagtcttgtgcagttacatggtataatcaggaaaaattaattctcttcatggtgtctaaagatgcttcagtaaaagaatacatctttaaagaactgcagaaatatcttccaagtcatgcagtcccggatgagcttgtattgatcgactctctaccatttacatcccacggcaaaattgatgtttctgagttaaacaagatatatttaaactacataaacttgaagtctgagaataagctcagtgggaaagaggacctttgggaaaaattacagtatttgtggaagtctactctgaatctcccagaagatcttttgagggttcctgatgagtcactcttcttaaatagtggtggagattccttaaagtccatccggctcctcagtgagattgaaaaacttgttggtacatcagtacctgggcttctggaaattattctcagcagttccattttagagatttataatcacatccttcaaacagtggttccagatgaagatgtgacattcaggaagagttgtgccacaaaaaggaaactcagcgacattaatcaagaggaagccagtggaacatctttacatcagaaagccatcatgactttcacttgccacaatgagattaatgcttttgttgtactgagcagagggagtcaaattttgtctctgaattccactaggtttttaacaaagttaggacattgctcttcagcctgtccttctgactcagtttcacagaccaacattcaaaatttgaaaggcttaaattctccagttcttattgggaagtcaaaagatccatcctgtgttgcaaaagtttctgaagaggggaaacctgcgatagggactcagaaaatggagttacatgtgaggtggaggtcagacacaggcaaatgtgtagatgcttcaccgctggttgtaatacccacttttgataagtcatctacaactgtgtacattggttcccattctcatagaatgaaggcagttgacttttactctgggaaggtaaaatgggaacagattttgggagatcgaattgaatcctcagcatgtgtatctaagtgtggaaactttattgtggtggagaaagaagtgtgtttggaagtcaaaatgtggaggaactgtcttttcctctccgtgtttgaacctgattccacatcatttgtattttgctacattgggaggacttttactggctgtaaatcctgctactgggaacgttatttggaaacattcctgtggaaaaccactcttctcttccccacaatgttgctcacagtatatttgtattggctgtgtagatgggaatttactctgctttactcactttggagaacaggtttggcagttctctaccagtggaccaatcttttcatccccgtgtacctcaccatcagagcaaaaaatattttttggttcccatgattgctttatctactgttgtaacatgaaaggtcacctgcagtggaaatttgaaactacttcaagggtctatgcaacaccgtttgctttccataactacaatg

SEQ ID NO: 106871 - DNA, 3241 bp, Homo sapiens
  Payload ID: 988
  Gene Symbol: AASDH
  Gene Name: aminoadipate-semialdehyde dehydrogenase
  Uniprot ID: Q4L235
  ENST ID: ENST00000513376
  CDS Start-End: 133-3129
ccgcgacgagctatccgggaaagggccgaatgcgatcaaacctaatccgcgagacttgctaaaattctccaagtcccggctgcttatgtacctatcgagccagattcaccaccgtcattatcaactcattttatgaaaaaatgtaatctaaagtatatccttgttgaaaaaaaacaaattaataaatttaaatcttttcatgaaacattattgaactatgatacatttacagtggaacataatgacctagtgctcttcagacttcactggaaaaatactgaggtgaacttgatgctaaatgatggaaaagagaaatatgaaaaagaaaaaataaaaagcataagttctgagcatgtcaatgaagaaaaagcagaagaacacatggatctgaggctaaagcattgcttagcctatgttctacatacatcagggactacagggataccgaagattgtcagagtgcctcataagtgtatagtaccaaatatccagcattttcgggtactttttgacatcacacaagaagatgttttgtttctggcttcacctctgaccttcgatccttctgttgtggaaatatttcttgctctatcaagtggtgcctctctgcttattgtaccaacttccgtcaagttgctcccatcaaaattagccagcgttctcttttcccatcatagagtgactgttttgcaggcaacaccaacattgcttagaagatttggatctcagcttatcaagtcaactgttttgtcagccactacttctcttcgagtattagcccttggtggtgaagcgtttccatcattgacagttctcagaagctggagaggagaaggcaataaaacacaaatatttaatgtttatggtatcacagaggtatcaagttgggcgaccatttataggattccagagaagactcttaactctactctcaaatgtgaattgcctgtacaactgggatttccacttcttggaacagtagttgaagtcagagatactaatggcttcacaattcaggaaggcagtggccaagtatttttaggtggcagaaacagagtgtgttttcttgatgatgaagtgacagtaccacttggcacaatgcgagctacaggagactttgtgactgtgaaagatggagagattttttttttgggacgaaaagacagtcagatcaaacgtcatggcaaacgtcttaacattgaacttgtgcaacaggttgctgaagagcttcagcaagtggagtcttgtgcagttacatggtataatcaggaaaaattaattctcttcatggtgtctaaagatgcttcagtaaaagaatacatctttaaagaactgcagaaatatcttccaagtcatgcagtcccggatgagcttgtattgatcgactctctaccatttacatcccacggcaaaattgatgtttctgagttaaacaagatatatttaaactacataaacttgaagtctgagaataagctcagtgggaaagaggacctttgggaaaaattacagtatttgtggaagtctactctgaatctcccagaagatcttttgagggttcctgatgagtcactcttcttaaatagtggtggagattccttaaagtccatccggctcctcagtgagattgaaaaacttgttggtacatcagtacctgggcttctggaaattattctcagcagttccattttagagatttataatcacatccttcaaacagtggttccagatgaagatgtgacattcaggaagagttgtgccacaaaaaggaaactcagcgacattaatcaagaggaagccagtggaacatctttacatcagaaagccatcatgactttcacttgccacaatgagattaatgcttttgttgtactgagcagagggagtcaaattttgtctctgaattccactaggtttttaacaaagttaggacattgctcttcagcctgtccttctgactcagtttcacagaccaacattcaaaatttgaaaggcttaaattctccagttcttattgggaagtcaaaagatccatcctgtgttgcaaaagtttctgaagaggggaaacctgcgatagggactcagaaaatggagttacatgtgaggtggaggtcagacacaggcaaatgtgtagatgcttcaccgctggttgtaatacccacttttgataagtcatctacaactgtgtacattggttcccattctcatagaatgaaggcagttgacttttactctgggaaggtaaaatgggaacagattttgggagatcgaattgaatcctcagcatgtgtatctaagtgtggaaactttattgtggtgggctgttataatggattagtttatgttctgaaaagtaatagtggagaaaaatactggatgtttactactgaagatgctgtcaaaagctcggcaaccatggatccaaccacaggactcatttacattggatctcatgaccagcacgcatatgctttagatatttatagaaagaagtgtgtttggaagtcaaaatgtggaggaactgtcttttcctctccgtgtttgaacctgattccacatcatttgtattttgctacattgggaggacttttactggctgtaaatcctgctactgggaacgttatttggaaacattcctgtggaaaaccactcttctcttccccacaatgttgctcacagtatatttgtattggctgtgtagatgggaatttactctgctttactcactttggagaacaggtttggcagttctctaccagtggaccaatcttttcatccccgtgtacctcaccatcagagcaaaaaatattttttggttcccatgattgctttatctactgttgtaacatgaaaggtcacctgcagtggaaatttgaaactacttcaagggtctatgcaacaccgtttgctttccataactacaatggcagcaatgaaatgttgctggcagcagcatctactgatgggaaagtgtggatcttggaatctcagagtggacaattgcaaagtgtttatgaacttcctggagaagtcttctcttctcctgtggtcctggaatcaatgctcattattgggtgtagagataattatgtttattgtctggatttattgggtggcaatcaaaaataatcaaatacagtccttatttgtataacaaatgtgagatatttgaaaatattttaccattatacatcatgtggacttattttatattaaagaagattatattttggctaagaaa

SEQ ID NO: 106872 - DNA, 2959 bp, Homo sapiens
  Payload ID: 988
  Gene Symbol: AASDH
  Gene Name: aminoadipate-semialdehyde dehydrogenase
  ENST ID: ENST00000514745
  CDS Start-End: 151-513
atagctttacggcttctgggagctgctgcttcgctgtgagaagtatccgcgacgagctatccgggaaagggccgaatgcgatcaaacctaatccgcgagacttgctaaggttctgtgctacaaattgatgtttagataaacttcagtgaaatgactcttcaggaattggtgcataaggctgcctcctgttatatggacagagtagctgtatgttttgatgaatgcaacaaccagcttccagtttactacacctacaagactgtggttaatgctgcttctgaattatcaaattttctgctgttacactgtgactttcaaggaattcgggaaattggtctctactgccaacctgggatagacttaccctcttggattttaggaattctccaagtcccggctgcttatgtacctatcgagccagattcaccaccgtcattatcaactcattttatgaaaaaatgtaatctaaagtatatccttgttgaaaaaaaacaaattaatggtactttttgacatcacacaagaagatgttttgtttctggcttcacctctgaccttcgatccttctgttgtggaaatatttcttgctctatcaagtggtgcctctctgcttattgtaccaacttccgtcaagttgctcccatcaaaattagccagcgttctcttttcccatcatagagtgactgttttgcaggcaacaccaacattgcttagaagatttggatctcagcttatcaagtcaactgttttgtcagccactacttctcttcgagtattagcccttggtggtgaagcgtttccatcattgacagttctcagaagctggagaggagaaggcaataaaacacaaatatttaatgtttatggtatcacagaggtatcaagttgggcgaccatttataggattccagagaagactcttaactctactctcaagttgctgaagagcttcagcaagtggagtcttgtgcagttacatggtataatcaggaaaaattaattctcttcatggtgtctaaagatgcttcagtaaaagaatacatctttaaagaactgcagaaatatcttccaagtcatgcagtcccggatgagcttgtattgatcgactctctaccatttacatcccacggcaaaattgatgtttctgagttaaacaagatatatttaaactacataaacttgaagtctgagaataagctcagtgggaaagaggacctttgggaaaaattacagtatttgtggaagtctactctgaatctcccagaagatcttttgagggttcctgatgagtcactcttcttaaatagtggtggagattccttaaagtccatccggctcctcagtgagattgaaaaacttgttggtacatcagtacctgggcttctggaaattattctcagcagttccattttagagatttataatcacatccttcaaacagtggttccagatgaagatgtgacattcaggaagagttgtgccacaaaaaggaaactcagcgacattaatcaagaggaagccagtggaacatctttacatcagaaagccatcatgactttcacttgccacaatgagattaatgcttttgttgtactgagcagagggagtcaaattttgtctctgaattccactaggtttttaacaaagttaggacattgctcttcagcctgtccttctgactcagtttcacagaccaacattcaaaatttgaaaggcttaaattctccagttcttattgggaagtcaaaagatccatcctgtgttgcaaaagtttctgaagaggggaaacctgcgatagggactcagaaaatggagttacatgtgaggtggaggtcagacacaggcaaatgtgtagatgcttcaccgctggttgtaatacccacttttgataagtcatctacaactgtgtacattggttcccattctcatagaatgaaggcagttgacttttactctgggaaggtaaaatgggaacagattttgggagatcgaattgaatcctcagcatgtgtatctaagtgtggaaactttattgtggtgggctgttataatggattagtttatgttctgaaaagtaatagtggagaaaaatactggatgtttactactgaagatgctgtcaaaagctcggcaaccatggatccaaccacaggactcatttacattggatctcatgaccagcacgcatatgctttagatatttatagaaagaagtgtgtttggaagtcaaaatgtggaggaactgtcttttcctctccgtgtttgaacctgattccacatcatttgtattttgctacattgggaggacttttactggctgtaaatcctgctactgggaacgttatttggaaacattcctgtggaaaaccactcttctcttccccacaatgttgctcacagtatatttgtattggctgtgtagatgggaatttactctgctttactcactttggagaacaggtttggcagttctctaccagtggaccaatcttttcatccccgtgtacctcaccatcagagcaaaaaatattttttggttcccatgattgctttatctactgttgtaacatgaaaggtcacctgcagtggaaatttgaaactacttcaagggtctatgcaacaccgtttgctttccataactacaatggcagcaatgaaatgttgctggcagcagcatctactgatgggaaagtgtggatcttggaatctcagagtggacaattgcaaagtgtttatgaacttcctggagaagtcttctcttctcctgtggtcctggaatcaatgctcattattgggtgtagagataattatgtttattgtctggatttattgggtggcaatcaaaaataatcaaatacagtccttatttgtataacaaatgtgagatatttgaaaatattttaccattatacatcatgtggacttattttatattaaagaagattatattttggctaag

SEQ ID NO: 106873 - DNA, 3480 bp, Homo sapiens
  Payload ID: 988
  Gene Symbol: AASDH
  Gene Name: aminoadipate-semialdehyde dehydrogenase
  ENST ID: ENST00000602986
  CDS Start-End: 528-3365
agcgacgcggaagatttacgtatggtgcctcgctctgggatagctttacggcttctgggagctgctgcttcgctgtgagaagtatccgcgacgagctatccgggaaagggccgaatgcgatcaaacctaatccgcgagacttgctaaggttctgtgctacaaattgatgtttagataaacttcagtgaaatgactcttcaggaattggtgcataaggctgcctcctgttatatggacagagtagctgtatgttttgatgaatgcaacaaccagcttccagtttactacacctacaagactgtggttaatgctgcttctgaattatcaaattttctgctgttacactgtgactttcaaggaattcgggaaattggtctctactgccaacctgggatagacttaccctcttggattttaggaaatttaaatcttttcatgaaacattattgaactatgatacatttacagtggaacataatgacctagtgctcttcagacttcactggaaaaatactgaggtgaacttgatgctaaatgatggaaaagagaaatatgaaaaagaaaaaataaaaagcataagttctgagcatgtcaatgaagaaaaagcagaagaacacatggatctgaggctaaagcattgcttagcctatgttctacatacatcagggactacagggataccgaagattgtcagagtgcctcataagtgtatagtaccaaatatccagcattttcgggtactttttgacatcacacaagaagatgttttgtttctggcttcacctctgaccttcgatccttctgttgtggaaatatttcttgctctatcaagtggtgcctctctgcttattgtaccaacttccgtcaagttgctcccatcaaaattagccagcgttctcttttcccatcatagagtgactgttttgcaggcaacaccaacattgcttagaagatttggatctcagcttatcaagtcaactgttttgtcagccactacttctcttcgagtattagcccttggtggtgaagcgtttccatcattgacagttctcagaagctggagaggagaaggcaataaaacacaaatatttaatgtttatggtatcacagaggtatcaagttgggcgaccatttataggattccagagaagactcttaactctactctcaaatgtgaattgcctgtacaactgggatttccacttcttggaacagtagttgaagtcagagatactaatggcttcacaattcaggaaggcagtggccaagtatttttaggtggcagaaacagagtgtgttttcttgatgatgaagtgacagtaccacttggcacaatgcgagctacaggagactttgtgactgtgaaagatggagagattttttttttgggacgaaaagacagtcagatcaaacgtcatggcaaacgtcttaacattgaacttgtgcaacaggttgctgaagagcttcagcaagtggagtcttgtgcagttacatggtataatcaggaaaaattaattctcttcatggtgtctaaagatgcttcagtaaaagaatacatctttaaagaactgcagaaatatcttccaagtcatgcagtcccggatgagcttgtattgatcgactctctaccatttacatcccacggcaaaattgatgtttctgagttaaacaagatatatttaaactacataaacttgaagtctgagaataagctcagtgggaaagaggacctttgggaaaaattacagtatttgtggaagtctactctgaatctcccagaagatcttttgagggttcctgatgagtcactcttcttaaatagtggtggagattccttaaagtccatccggctcctcagtgagattgaaaaacttgttggtacatcagtacctgggcttctggaaattattctcagcagttccattttagagatttataatcacatccttcaaacagtggttccagatgaagatgtgacattcaggaagagttgtgccacaaaaaggaaactcagcgacattaatcaagaggaagccagtggaacatctttacatcagaaagccatcatgactttcacttgccacaatgagattaatgcttttgttgtactgagcagagggagtcaaattttgtctctgaattccactaggtttttaacaaagttaggacattgctcttcagcctgtccttctgactcagtttcacagaccaacattcaaaatttgaaaggcttaaattctccagttcttattgggaagtcaaaagatccatcctgtgttgcaaaagtttctgaagaggggaaacctgcgatagggactcagaaaatggagttacatgtgaggtggaggtcagacacaggcaaatgtgtagatgcttcaccgctggttgtaatacccacttttgataagtcatctacaactgtgtacattggttcccattctcatagaatgaaggcagttgacttttactctgggaaggtaaaatgggaacagattttgggagatcgaattgaatcctcagcatgtgtatctaagtgtggaaactttattgtggtgggctgttataatggattagtttatgttctgaaaagtaatagtggagaaaaatactggatgtttactactgaagatgctgtcaaaagctcggcaaccatggatccaaccacaggactcatttacattggatctcatgaccagcacgcatatgctttagatatttatagaaagaagtgtgtttggaagtcaaaatgtggaggaactgtcttttcctctccgtgtttgaacctgattccacatcatttgtattttgctacattgggaggacttttactggctgtaaatcctgctactgggaacgttatttggaaacattcctgtggaaaaccactcttctcttccccacaatgttgctcacagtatatttgtattggctgtgtagatgggaatttactctgctttactcactttggagaacaggtttggcagttctctaccagtggaccaatcttttcatccccgtgtacctcaccatcagagcaaaaaatattttttggttcccatgattgctttatctactgttgtaacatgaaaggtcacctgcagtggaaatttgaaactacttcaagggtctatgcaacaccgtttgctttccataactacaatggcagcaatgaaatgttgctggcagcagcatctactgatgggaaagtgtggatcttggaatctcagagtggacaattgcaaagtgtttatgaacttcctggagaagtcttctcttctcctgtggtcctggaatcaatgctcattattgggtgtagagataattatgtttattgtctggatttattgggtggcaatcaaaaataatcaaatacagtccttatttgtataacaaatgtgagatatttgaaaatattttaccattatacatcatgtggacttattttatattaaagaagattatattttggctaagaaacgg

SEQ ID NO: 106874 - DNA, 2955 bp, Homo sapiens
  Payload ID: 989
  Gene Symbol: AASDHPPT
  Gene Name: aminoadipate-semialdehyde dehydrogenase-phosphopantetheinyl transferase
  Uniprot ID: Q9NRN7
  ENST ID: ENST00000278618
  CDS Start-End: 223-1152
atacaatgccgcaaagcgcagggctgatctccgtctccgcccccagctgctttctccgagaggaggtggctgagtcgggggcgggctgggagggctgtcggtgggccagtctgcgtagcgacggcccgtcccctgcgcacggacgccgggaagaagggggtggggccacgtttgcgtccgcgccatcaggcccgagatagcggcgaggtccgctttcagtgtatggttttccctgccaaacggttctgcttggtgccatccatggagggcgtgcgctgggccttttcctgcggcacttggctgccgagccgagccgaatggctgctggcagtgcgatcgattcagcccgaggagaaggagcgcattggccagttcgtctttgcccgggacgctaaggcagccatggctggtcgtctgatgataaggaaattagttgcagagaaattgaatatcccttggaatcatattcgtttgcaaagaactgcaaaaggaaaaccagttcttgcaaaggactcatcgaatccttacccgaatttcaactttaacatctctcatcaaggagactatgcagtgcttgctgctgaacctgagctgcaagttggaattgatataatgaagactagttttccaggtcgtggttcaattccagaattctttcatattatgaaaagaaagtttaccaacaaagaatgggaaacaatcagaagctttaaggatgagtggactcagctggatatgttttataggaattgggcacttaaggaaagcttcataaaagccattggtgttggactaggatttgaattgcagcggcttgaatttgatctatctccattaaacttggatataggccaagtttataaagaaacacgtttattcctggatggagaggaagaaaaagaatgggcatttgaggaaagcaaaatagatgagcaccattttgttgcagttgctcttaggaaacccgatggatctagacatcaggatgttccatctcaggatgattccaaaccaacccagaggcaatttactattctcaactttaatgatttaatgtcatctgccgttcccatgacacctgaagatccttcattttgggactgtttttgcttcacagaagaaattccaatacgaaatggtacaaagtcatgatgattccctgagtaacaaagggaaatgaaaactgtttgtgatcttccgtattcactgaaaaataaatgcttgtttagtatcaaattttatttcacgaaagtttttttaaagaacagaaacttttccaattaaaaaaaaaaagcagacttctggttcaagatagctcactggaatacatgtttacctctttctttcctaaattgcattgaattgataggaaggatggcggaatcttaaagtgatacatgctaactgtagaaaaaaatagaaaatgcacataagcaaaaggaaacatttaaatgctatctttcaaagataactactcttaaaaccttgagtatcttttcagacctttttcttggcaaatgaatccatattgacatatttgatttttttaaaaacatggaaacgtactgttttgtaaattctttttaactgcacatctactgttcataaatatacctctgtaacataactttttgtggttctaatgtactctgttgtatagctaatacaagttaggatgcttttggccagaggtaacagtgtccaaatataattggcctaagtaacctaggaaattgtttgacataacacagggttcaggggtgtcattaaagacacactttttttgccttgacctcagttggtttgttttgccttaggctattccacctctcgatcacaagagctgctgctataacttccagttttacatctttgtaaaattgtatctcaaaggcagaaaaggccatttcgtctctcatttgttttatccatgaggaagatttttaacaaaagcctccagaagatttcccctcagtttccattgacttagatcaggttacagagaaaggcaatgtctgacatttttggtctctgttagaagtagactctgttgaaaagaaagaagctaagctaggtgtgaagaatggaattggaagcccactgccttcccataagaaaggtttaccataatttactcacttttttctgtgttagacattttgattatctgcagtttattactacaagcagtggcagagtgaatgtccttgtacattttgagttacatgcttaattatgtccttgagaaagtttctaaaagtggaatgattggtttgactggttcatagggctttaattatacaatttacccctctaattagtactatatgtatgtgacttccctccccctgccagaatactccttggtcaattgtaggtattctttttggtttaatttttgccaatgtaattaaaaaatggtatgtcatttttaaaatttgtatttctttcattacaaataagattgttatgtcagtattgttattggcttttcgtattcctcttaacgtgaaccgtctgttcattgtttttacctgttttcgttttagcaagtagtacttaatttaaagtgtgaacttaatatataagatgccaggaccatcatattgatgacaaaaatctattatgtggttgtagtgcatgtcttggagttaaactcttaagtatcaagaagtaaaataatttcattgtttctgttactaacattaaaagtgtgcaaattgtataaaattaggtacttcgattagtaaaagaaaaaaatttgaatgttttttttttttattttattaagcatgcccagttatgccaagcatagtaaataaaggtcaagtagcatttataatagaggaagtattgttatccctagcatgagtgtaatggtgatatgaaaaactttgtcttgtcattataataataaaaaaatgaacatttattatggaatttctatgagcctga

SEQ ID NO: 106875 - DNA, 629 bp, Homo sapiens
  Payload ID: 989
  Gene Symbol: AASDHPPT
  Gene Name: aminoadipate-semialdehyde dehydrogenase-phosphopantetheinyl transferase
  ENST ID: ENST00000524411
  CDS Start-End: 60-629
gcagctggtaagcagattttcaacatggcagctgacacaggcttttggctggtcgtctgatgataaggaaattagttgcagagaaattgaatatcccttggaatcatattcgtttgcaaagaactgcaaaaggaaaaccagttcttgcaaaggactcatcgaatccttacccgaatttcaactttaacatctctcatcaaggagactatgcagtgcttgctgctgaacctgagctgcaagttggaattgatataatgaagactagttttccaggtcgtggttcaattccagaattctttcatattatgaaaagaaagtttaccaacaaagaatgggaaacaatcagaagctttaaggatgagtggactcagctggatatgttttataggaattgggcacttaaggaaagcttcataaaagccattggtgttggactaggatttgaattgcagcggcttgaatttgatctatctccattaaacttggatataggccaagtttataaagaaacacgtttattcctggatggagaggaagaaaaagaatgggcatttgaggaaagcaaaatagatgagcaccattttgttgcagttgctcttaggaaacccgatggatctagacatcaggat

SEQ ID NO: 106876 - DNA, 1252 bp, Homo sapiens
  Payload ID: 989
  Gene Symbol: AASDHPPT
  Gene Name: aminoadipate-semialdehyde dehydrogenase-phosphopantetheinyl transferase
  Uniprot ID: Q9NRN7
  ENST ID: ENST00000525660
  CDS Start-End: 54-470
gtttgcgtccgcgccatcaggcccgagatagcggcgaggtccgctttcagtgtatggttttccctgccaaacggttctgcttggtgccatccatggagggcgtgcgctgggccttttcctgcggcacttggctgccgagccgagccgaatggctgctggcagtgcgatcgattcagcccgaggagaaggagcgcattggccagttcgtctttgcccgggacgctaaggcagccatggctggtcgtctgatgataaggaaattagttgcagagaaattgaatatcccttggaatcatattcgtttgcaaagaactgcaaaaggaaaaccagttcttgcaaaggactcatcgaatccttacccgaatttcaactttaacatctctcatcaaggagactatgcagtgcttgctgctgaacctgagctgcaagttggaattgatataatgaagactagttttccaggcacttaaggaaagcttcataaaagccattggtgttggactaggatttgaattgcagcggcttgaatttgatctatctccattaaacttggatataggccaagtttataaagaaacacgtttattcctggatggagaggaagaaaaagaatgggcatttgaggaaagcaaaatagatgagcaccattttgttgcagttgctcttaggaaacccgatggatctagacatcaggatgttccatctcaggatgattccaaaccaacccagaggcaatttactattctcaactttaatgatttaatgtcatctgccgttcccatgacacctgaagatccttcattttgggactgtttttgcttcacagaagaaattccaatacgaaatggtacaaagtcatgatgattccctgagtaacaaagggaaatgaaaactgtttgtgatcttccgtattcactgaaaaataaatgcttgtttagtatcaaattttatttcacgaaagtttttttaaagaacagaaacttttccaattaaaaaaaaaaagcagacttctggttcaagatagctcactggaatacatgtttacctctttctttcctaaattgcattgaattgataggaaggatggcggaatcttaaagtgatacatgctaactgtagaaaaaaatagaaaatgcacataagcaaaaggaaacatttaaatgctatctttcaaagataactactcttaaaaccttgagtatcttttcagacctttttcttggcaaatgaatccatattgacatatttgatt

SEQ ID NO: 106877 - DNA, 568 bp, Homo sapiens
  Payload ID: 989
  Gene Symbol: AASDHPPT
  Gene Name: aminoadipate-semialdehyde dehydrogenase-phosphopantetheinyl transferase
  ENST ID: ENST00000533423
  CDS Start-End: 89-568
aataggagagacgtcataaggcaatactagaataactgccaaatgaattacataaacaatactgttttggaaaaaggctggtcgtctgatgataaggaaattagttgcagagaaattgaatatcccttggaatcatattcgtttgcaaagaactgcaaaaggaaaaccagttcttgcaaaggactcatcgaatccttacccgaatttcaactttaacatctctcatcaaggagactatgcagtgcttgctgctgaacctgagctgcaagttggaattgatataatgaagactagttttccaggtcgtggttcaattccagaattctttcatattatgaaaagaaagtttaccaacaaagaatgggaaacaatcagaagctttaaggatgagtggactcagctggatatgttttataggaattgggcacttaaggaaagcttcataaaagccattggtgttggactaggatttgaattgcagcggcttgaatttgatctatctccattaaacttggatataggccaagtttataaagaaacacgtttattcctggatggagaggaagaa

SEQ ID NO: 106878 - DNA, 3126 bp, Homo sapiens
  Payload ID: 990
  Gene Symbol: AASS
  Gene Name: aminoadipate-semialdehyde synthase
  ENST ID: ENST00000358954
  CDS Start-End: 56-2254
gctgccttttgttgctctgctctttacattgtctttacagtcaccaggtgtcaagatgctgcaagtacataggactggactgggcaggctgggggtcagcctctccaagggtcttcaccacaaagctgtgttggccgtccggagggaggatgtgaacgcctgggagagaagggccccgctagctcccaagcacatcaaaggcatcaccaatctgggatacaaggtcttgatacagccttcgaatcggcgggccattcatgataaggactatgtcaaagctggtggcattcttcaggaggatatttctgaagcttgtctaattttaggagttaaaagacctccagaggaaaaattaatgtccaggaagacttatgcatttttctcccacacaataaaagctcaggaggccaatatgggcttgttggatgagattctaaaacaggaaattcgccttattgattatgagaaaatggtggatcatagaggagtacgggtagtggcatttggacagtgggctggtgtggcaggaatgatcaacattttacatggaatgggtttaaggctccttgctttgggacatcacacaccttttatgcacattggcatggctcataactacaggaatagcagtcaggctgtgcaagctgtccgtgatgctggctatgaaatatctttgggtttgatgcctaagtcaataggacccttaacatttgtgttcacaggaactggtaatgtttctaagggagcccaagcaatctttaatgagctaccttgtgaatatgtggagccccatgaattaaaagaagtttcccaaactggagacctcagaaaagtgtatgggacggtgttaagtcgtcatcatcatcttgtcaggaaaacagatgctgtgtatgatcctgcagagtatgacaaacatccggagcgctacataagtcgttttaatactgatattgcaccctatacaacttgcttaattaatggaatctactgggaacaaaacactcctcgcctcctaacccgccaagatgctcagagtctcctggctccgggcaagttctcacctgctggtgtggaaggctgccctgcattaccacacaaactcgtggcaatatgtgacatttcagctgacacaggagggtctatagagtttatgactgagtgtacaacaatagagcatcccttttgcatgtatgatgcagaccagcatattattcatgacagtgttgaaggctcggggatcctgatgtgttccattgacaatttgccggcacagctcccaattgaagctacagaatgctttggagacatgctttacccttatgttgaagaaatgatattatcagacgcgacacagcctcttgaaagtcagaatttttctcctgtggtgagagatgcagtgattacatccaacggtacattacctgataaatataaatatatccagacactccgggagagcagggaacgtgctcagtcactttcaatgggcaccaggagaaaggttttggttcttggatctggctacatatctgagcctgtattagaatatttatcaagagatggcaatatagaaataacagtaggatctgacatgaagaatcaaattgaacagttaggcaagaaatataatattaatcctgttagcatggacatttgtaaacaagaagagaagctgggcttcttggtggcaaaacaggatcttgtcatcagcttgttgccttatgtattgcaccctcttgtggccaaggcctgcatcacaaacaaagttaacatggtcactgcaagctacatcacaccagcactaaaagaattggaaaagagtgtggaagatgctggcatcacaatcattggtgaattgggattggaccctggtctggatcacatgttagcaatggaaacaatagataaagccaaggaagtgggagccacgattgaatcatatatttcctactgtggtgggcttccagcccctgaacattcaaacaatccattgagatataaatttagctggagtccagtgggagttttgatgaatgtaatgcagtctgccacctatctgctcgatggaaaggttgtgaatgttgcaggaggcatctcctttcttgatgccgttacgtccatggatttttttccaggattaaatttggaaggctatcctaacagagacagtacgaaatatgctgagatttatggcatttcttctgctcacactttgttgcgggggacactgagatataagggattggaatgctgaataatggattggaatgttgaataatgttgaataccttcctatggtatcctccctaactccttccccttgaaccacccagccccatctatggatatatgaaagctttgaatggatttgtaaaattaggtcttataaacagagaagcgcttcctgcctttagacctgaggccaaccctctcacctggaaacaactcctctgtgacctagttgggatttcaccctcctctgagcatgatgtgttgaaggaagctgttcttaagaaactaggaggagacaatacccagttggaggctgctgaatggttgggcttacttggggatgaacaagttcctcaggcagagtccattctggatgccctctccaagcatttggtcatgaagctttcctatggtcctgaagaaaaagatatgattgtgatgagagacagctttggaatcagacatccttctggacatttagaacataaaacgattgatcttgtggcttatggggacatcaatggcttttcagccatggctaaaaccgtggggttacccaccgccatggcagccaaaatgttgcttgatggtgaaattggagccaaaggcctaatggggcccttttcaaaggagatctatggaccaatattggagcgaattaaagcagaaggcattatatatactacacagagtacaattaaaccataattgggaattatattttgtttttttcttcccaggcaatacacctctgaacatgtgtgtgataaatgggtttgctaatgtgctgttttaaagtataaagcataatatgttttggttaacacaatgtactttttgaactataaatctttattttaatatggaaatgtttggaacaggagatgcaagcca

SEQ ID NO: 106879 - DNA, 3233 bp, Homo sapiens
  Payload ID: 990
  Gene Symbol: AASS
  Gene Name: aminoadipate-semialdehyde synthase
  Uniprot ID: Q9UDR5
  ENST ID: ENST00000393376
  CDS Start-End: 97-2877
cctcagatttctcaggagaccagaactgatctgccagccttgctgccttttgttgctctgctctttacattgtctttacagtcaccaggtgtcaagatgctgcaagtacataggactggactgggcaggctgggggtcagcctctccaagggtcttcaccacaaagctgtgttggccgtccggagggaggatgtgaacgcctgggagagaagggccccgctagctcccaagcacatcaaaggcatcaccaatctgggatacaaggtcttgatacagccttcgaatcggcgggccattcatgataaggactatgtcaaagctggtggcattcttcaggaggatatttctgaagcttgtctaattttaggagttaaaagacctccagaggaaaaattaatgtccaggaagacttatgcatttttctcccacacaataaaagctcaggaggccaatatgggcttgttggatgagattctaaaacaggaaattcgccttattgattatgagaaaatggtggatcatagaggagtacgggtagtggcatttggacagtgggctggtgtggcaggaatgatcaacattttacatggaatgggtttaaggctccttgctttgggacatcacacaccttttatgcacattggcatggctcataactacaggaatagcagtcaggctgtgcaagctgtccgtgatgctggctatgaaatatctttgggtttgatgcctaagtcaataggacccttaacatttgtgttcacaggaactggtaatgtttctaagggagcccaagcaatctttaatgagctaccttgtgaatatgtggagccccatgaattaaaagaagtttcccaaactggagacctcagaaaagtgtatgggacggtgttaagtcgtcatcatcatcttgtcaggaaaacagatgctgtgtatgatcctgcagagtatgacaaacatccggagcgctacataagtcgttttaatactgatattgcaccctatacaacttgcttaattaatggaatctactgggaacaaaacactcctcgcctcctaacccgccaagatgctcagagtctcctggctccgggcaagttctcacctgctggtgtggaaggctgccctgcattaccacacaaactcgtggcaatatgtgacatttcagctgacacaggagggtctatagagtttatgactgagtgtacaacaatagagcatcccttttgcatgtatgatgcagaccagcatattattcatgacagtgttgaaggctcggggatcctgatgtgttccattgacaatttgccggcacagctcccaattgaagctacagaatgctttggagacatgctttacccttatgttgaagaaatgatattatcagacgcgacacagcctcttgaaagtcagaatttttctcctgtggtgagagatgcagtgattacatccaacggtacattacctgataaatataaatatatccagacactccgggagagcagggaacgtgctcagtcactttcaatgggcaccaggagaaaggttttggttcttggatctggctacatatctgagcctgtattagaatatttatcaagagatggcaatatagaaataacagtaggatctgacatgaagaatcaaattgaacagttaggcaagaaatataatattaatcctgttagcatggacatttgtaaacaagaagagaagctgggcttcttggtggcaaaacaggatcttgtcatcagcttgttgccttatgtattgcaccctcttgtggccaaggcctgcatcacaaacaaagttaacatggtcactgcaagctacatcacaccagcactaaaagaattggaaaagagtgtggaagatgctggcatcacaatcattggtgaattgggattggaccctggtctggatcacatgttagcaatggaaacaatagataaagccaaggaagtgggagccacgattgaatcatatatttcctactgtggtgggcttccagcccctgaacattcaaacaatccattgagatataaatttagctggagtccagtgggagttttgatgaatgtaatgcagtctgccacctatctgctcgatggaaaggttgtgaatgttgcaggaggcatctcctttcttgatgccgttacgtccatggatttttttccaggattaaatttggaaggctatcctaacagagacagtacgaaatatgctgagatttatggcatttcttctgctcacactttgttgcgggggacactgagatataagggatatatgaaagctttgaatggatttgtaaaattaggtcttataaacagagaagcgcttcctgcctttagacctgaggccaaccctctcacctggaaacaactcctctgtgacctagttgggatttcaccctcctctgagcatgatgtgttgaaggaagctgttcttaagaaactaggaggagacaatacccagttggaggctgctgaatggttgggcttacttggggatgaacaagttcctcaggcagagtccattctggatgccctctccaagcatttggtcatgaagctttcctatggtcctgaagaaaaagatatgattgtgatgagagacagctttggaatcagacatccttctggacatttagaacataaaacgattgatcttgtggcttatggggacatcaatggcttttcagccatggctaaaaccgtggggttacccaccgccatggcagccaaaatgttgcttgatggtgaaattggagccaaaggcctaatggggcccttttcaaaggagatctatggaccaatattggagcgaattaaagcagaaggcattatatatactacacagagtacaattaaaccataattgggaattatattttgtttttttcttcccaggcaatacacctctgaacatgtgtgtgataaatgggtttgctaatgtgctgttttaaagtataaagcataatatgttttggttaacacaatgtactttttgaactataaatctttattttaatatggaaatgtttggaacaggagatgcaagccactaacagagaactttaataattctaccctgtattttataaatacgtatgtgaaagtgatgatcatgctatttgttaatttattgtgccactttttttcttttgttttttttttgttgttgttgttttttgagatggagtctcgctctgtcacccaggctggagtgcagtg

SEQ ID NO: 106880 - DNA, 722 bp, Homo sapiens
  Payload ID: 990
  Gene Symbol: AASS
  Gene Name: aminoadipate-semialdehyde synthase
  ENST ID: ENST00000426162
  CDS Start-End: 1-66
tggattggaatgttgaataatgttgaataccttcctatggtatcctccctaactccttccccttgaaccacccagccccatctatggatatatgaaagctttgaatggatttgtaaaattaggtcttataaacagagaagcgcttcctgcctttagacctgaggccaaccctctcacctggttgggatttcaccctcctctgagcatgatgtgttgaaggaagctgttcttaagaaactaggaggagacaatacccagttggaggctgctgaatggagatttggagtagtcatagaatattacatgaaaacattctttcatatgaccgctgtggcatcctgctggtatacctaatgttggagaactaacctataaattaatctcataaagatctttgtaagaacatgggattacaatccatcatctctgccctgctccagggagcagtgcctgggttgggcttacttggggatgaacaagttcctcaggcagagtccattctggatgccctctccaagcatttggtcatgaagctttcctatggtcctgaagaaaaagatatgattgtgatgagagacagctttggaatcagacatccttctggacatttagaacataaaacgattgatcttgtggcttatggggacatcaatggcttttcagccatggctaaaaccgtggggttacccaccgccatggcagccaaaatgttgcttgatggt

SEQ ID NO: 106881 - DNA, 3163 bp, Homo sapiens
  Payload ID: 990
  Gene Symbol: AASS
  Gene Name: aminoadipate-semialdehyde synthase
  Uniprot ID: Q9UDR5
  ENST ID: ENST00000417368
  CDS Start-End: 136-2916
aaacacctcctacttcccggccttccatcccagtttcttctaggaattcggagcctcccctgcagcgactcggaagattcgaggcggcgggggacaagtcggcgccccagagcggacgagtcaccaggtgtcaagatgctgcaagtacataggactggactgggcaggctgggggtcagcctctccaagggtcttcaccacaaagctgtgttggccgtccggagggaggatgtgaacgcctgggagagaagggccccgctagctcccaagcacatcaaaggcatcaccaatctgggatacaaggtcttgatacagccttcgaatcggcgggccattcatgataaggactatgtcaaagctggtggcattcttcaggaggatatttctgaagcttgtctaattttaggagttaaaagacctccagaggaaaaattaatgtccaggaagacttatgcatttttctcccacacaataaaagctcaggaggccaatatgggcttgttggatgagattctaaaacaggaaattcgccttattgattatgagaaaatggtggatcatagaggagtacgggtagtggcatttggacagtgggctggtgtggcaggaatgatcaacattttacatggaatgggtttaaggctccttgctttgggacatcacacaccttttatgcacattggcatggctcataactacaggaatagcagtcaggctgtgcaagctgtccgtgatgctggctatgaaatatctttgggtttgatgcctaagtcaataggacccttaacatttgtgttcacaggaactggtaatgtttctaagggagcccaagcaatctttaatgagctaccttgtgaatatgtggagccccatgaattaaaagaagtttcccaaactggagacctcagaaaagtgtatgggacggtgttaagtcgtcatcatcatcttgtcaggaaaacagatgctgtgtatgatcctgcagagtatgacaaacatccggagcgctacataagtcgttttaatactgatattgcaccctatacaacttgcttaattaatggaatctactgggaacaaaacactcctcgcctcctaacccgccaagatgctcagagtctcctggctccgggcaagttctcacctgctggtgtggaaggctgccctgcattaccacacaaactcgtggcaatatgtgacatttcagctgacacaggagggtctatagagtttatgactgagtgtacaacaatagagcatcccttttgcatgtatgatgcagaccagcatattattcatgacagtgttgaaggctcggggatcctgatgtgttccattgacaatttgccggcacagctcccaattgaagctacagaatgctttggagacatgctttacccttatgttgaagaaatgatattatcagacgcgacacagcctcttgaaagtcagaatttttctcctgtggtgagagatgcagtgattacatccaacggtacattacctgataaatataaatatatccagacactccgggagagcagggaacgtgctcagtcactttcaatgggcaccaggagaaaggttttggttcttggatctggctacatatctgagcctgtattagaatatttatcaagagatggcaatatagaaataacagtaggatctgacatgaagaatcaaattgaacagttaggcaagaaatataatattaatcctgttagcatggacatttgtaaacaagaagagaagctgggcttcttggtggcaaaacaggatcttgtcatcagcttgttgccttatgtattgcaccctcttgtggccaaggcctgcatcacaaacaaagttaacatggtcactgcaagctacatcacaccagcactaaaagaattggaaaagagtgtggaagatgctggcatcacaatcattggtgaattgggattggaccctggtctggatcacatgttagcaatggaaacaatagataaagccaaggaagtgggagccacgattgaatcatatatttcctactgtggtgggcttccagcccctgaacattcaaacaatccattgagatataaatttagctggagtccagtgggagttttgatgaatgtaatgcagtctgccacctatctgctcgatggaaaggttgtgaatgttgcaggaggcatctcctttcttgatgccgttacgtccatggatttttttccaggattaaatttggaaggctatcctaacagagacagtacgaaatatgctgagatttatggcatttcttctgctcacactttgttgcgggggacactgagatataagggatatatgaaagctttgaatggatttgtaaaattaggtcttataaacagagaagcgcttcctgcctttagacctgaggccaaccctctcacctggaaacaactcctctgtgacctagttgggatttcaccctcctctgagcatgatgtgttgaaggaagctgttcttaagaaactaggaggagacaatacccagttggaggctgctgaatggttgggcttacttggggatgaacaagttcctcaggcagagtccattctggatgccctctccaagcatttggtcatgaagctttcctatggtcctgaagaaaaagatatgattgtgatgagagacagctttggaatcagacatccttctggacatttagaacataaaacgattgatcttgtggcttatggggacatcaatggcttttcagccatggctaaaaccgtggggttacccaccgccatggcagccaaaatgttgcttgatggtgaaattggagccaaaggcctaatggggcccttttcaaaggagatctatggaccaatattggagcgaattaaagcagaaggcattatatatactacacagagtacaattaaaccataattgggaattatattttgtttttttcttcccaggcaatacacctctgaacatgtgtgtgataaatgggtttgctaatgtgctgttttaaagtataaagcataatatgttttggttaacacaatgtactttttgaactataaatctttattttaatatggaaatgtttggaacaggagatgcaagccactaacagagaactttaataattctaccctgtattttataaatacgtatgtgaaagtgatga

SEQ ID NO: 106882 - DNA, 2922 bp, Homo sapiens
  Payload ID: 990
  Gene Symbol: AASS
  Gene Name: aminoadipate-semialdehyde synthase
  ENST ID: ENST00000431170
  CDS Start-End: 56-1591
gctgccttttgttgctctgctctttacattgtctttacagtcaccaggtgtcaagatgctgcaagtacataggactggactgggcaggctgggggtcagcctctccaagggtcttcaccacaaagctgtgttggccgtccggagggaggatgtgaacgcctgggagagaagggccccgctagctcccaagcacatcaaaggcatcaccaatctgggatacaaggtcttgatacagccttcgaatcggcgggccattcatgataaggactatgtcaaagctggtggcattcttcaggaggatatttctgaagcttgtctaattttaggagttaaaagacctccagaggaaaaattaatgtccaggaagacttatgcatttttctcccacacaataaaagctcaggaggccaatatgggcttgttggatgagattctaaaacaggaaattcgccttattgattatgagaaaatggtggatcatagaggagtacgggtagtggcatttggacagtgggctggtgtggcaggaatgatcaacattttacatggaatgggtttaaggctccttgctttgggacatcacacaccttttatgcacattggcatggctcataactacaggaatagcagtcaggctgtgcaagctgtccgtgatgctggctatgaaatatctttgggtttgatgcctaagtcaataggacccttaacatttgtgttcacaggaactggtaatgtttctaagggagcccaagcaatctttaatgagctaccttgtgaatatgtggagccccatgaattaaaagaagtttcccaaactggagacctcagaaaagtgtatgggacggtgttaagtcgtcatcatcatcttgtcaggaaaacagatgctgtgtatgatcctgcagagtatgacaaacatccggagcgctacataagtcgttttaatactgatattgcaccctatacaacttgcttaattaatggaatctactgggaacaaaacactcctcgcctcctaacccgccaagatgctcagagtctcctggctccgggcaagttctcacctgctggtgtggaaggctgccctgcattaccacacaaactcgtggcaatatgtgacatttcagctgacacaggagggtctatagagtttatgactgagtgtacaacaatagagcatcccttttgcatgtatgatgcagaccagcatattattcatgacagtgttgaaggctcggggatcctgatgtgttccattgacaatttgccggcacagctcccaattgaagctacagaatgctttggagacatgctttacccttatgttgaagaaatgatattatcagacgcgacacagcctcttgaaagtcagaatttttctcctgtggtgagagatgcagtgattacatccaacggtacattacctgataaatataaatatatccagacactccgggagagcagggaacgtgctcagtcactttcaatgggcaccaggagaaaggttttggttcttggatctggctacatatctgagcctgtattagaatatttatcaagagatggcaatatagaaataacagatctgacatgaagaatcaaattgaacagttaggcaagaaatataatattaatcctgttagcatggacatttgtaaacaagaagagaagctgggcttcttggtggcaaaacaggatcttgtcatcagcttgttgccttatgtattgcaccctcttgtggccaaggcctgcatcacaaacaaagttaacatggtcactgcaagctacatcacaccagcactaaaagaattggaaaagagtgtggaagatgctggcatcacaatcattggtgaattgggattggaccctggtctggatcacatgttagcaatggaaacaatagataaagccaaggaagtgggagccacgattgaatcatatatttcctactgtggtgggcttccagcccctgaacattcaaacaatccattgagatataaatttagctggagtccagtgggagttttgatgaatgtaatgcagtctgccacctatctgctcgatggaaaggttgtgaatgttgcaggaggcatctcctttcttgatgccgttacgtccatggatttttttccaggattaaatttggaaggctatcctaacagagacagtacgaaatatgctgagatttatggcatttcttctgctcacactttgttgcgggggacactgagatataagaaacaactcctctgtgacctagttgggatttcaccctcctctgagcatgatgtgttgaaggaagctgttcttaagaaactaggaggagacaatacccagttggaggctgctgaatggttgggcttacttggggatgaacaagttcctcaggcagagtccattctggatgccctctccaagcatttggtcatgaagctttcctatggtcctgaagaaaaagatatgattgtgatgagagacagctttggaatcagacatccttctggacatttagaacataaaacgattgatcttgtggcttatggggacatcaatggcttttcagccatggctaaaaccgtggggttacccaccgccatggcagccaaaatgttgcttgatggtgaaattggagccaaaggcctaatggggcccttttcaaaggagatctatggaccaatattggagcgaattaaagcagaaggcattatatatactacacagagtacaattaaaccataattgggaattatattttgtttttttcttcccaggcaatacacctctgaacatgtgtgtgataaatgggtttgctaatgtgctgttttaaagtataaagcataatatgttttggttaacacaatgtactttttgaactataaatctttattttaatatggaaatgtttggaacaggagatgcaagcca

SEQ ID NO: 106883 - DNA, 1321 bp, Homo sapiens
  Payload ID: 991
  Gene Symbol: ACMSD
  Gene Name: aminocarboxymuconate semialdehyde decarboxylase
  Uniprot ID: Q8TDX5
  ENST ID: ENST00000356140
  CDS Start-End: 137-1147
gggttgggcaggcctactgactgctgcctgaaggttgctgtaaagggactaagtaaatcaattaactccacagttttcacaaaggtctcttgatatcaaaacttctttccttgcatgcttctctgatcctgtggagatgaaaattgacatccatagtcatattctaccaaaagaatggccagatctaaaaaagaggtttggctacggaggctgggtgcagctccaacaccacagcaagggagaagcaaagttgttgaaagatgggaaagtcttcagagtggtgcgagagaattgctgggatccagaagttcgtattagagaaatggaccaaaaaggagtaacagtgcaagccctttccacagttcctgtcatgtttagctactgggccaaacctgaggacactttaaacctgtgccagcttttaaacaacgaccttgccagcaccgttgtgagctaccccaggaggttcgtgggtctggggacgttgcccatgcaggcccctgagctggcggtcaaggagatggagcgctgtgtgaaagagctgggctttcccggggtccaaattggcacccacgtcaacgagtgggacctgaacgcgcaggagctctttcctgtctatgcggcagccgaaaggctgaagtgttccctgttcgtgcatccctgggacatgcagatggatggacgaatggccaaatactggctcccttggcttgtaggaatgccagcagagaccaccatagccatttgctccatgatcatgggtggagtatttgagaagtttcccaaactgaaagtgtgtttcgcacatggtggtggtgccttccccttcacagtgggaagaatctcccatggattcagcatgcgcccagatctgtgtgcccaggacaaccccatgaacccgaagaaataccttggttccttttacacagatgctttggttcatgatcctctgtccctcaagctgttaacagatgtcataggaaaggataaagtcattttgggaaccgattacccctttccactaggtgagctggaacctgggaaactaatagagtccatggaagaatttgatgaagaaacaaagaataaactcaaagccggcaatgccctggcatttttgggtcttgagagaaaacaatttgaatgactgaatttactacaaaggcaaactttcaaaaggatatctcatttttgtttctaaatatgtatcaacaggtatcaacaaaatcctattttgaactattttactcagaaatgaatgtcccaaatatcctaaattattcataataaaaatgatttgtaagtgttttcattctgaaaa

SEQ ID NO: 106884 - DNA, 1307 bp, Homo sapiens
  Payload ID: 991
  Gene Symbol: ACMSD
  Gene Name: aminocarboxymuconate semialdehyde decarboxylase
  Uniprot ID: Q8TDX5
  ENST ID: ENST00000392928
  CDS Start-End: 297-1133
agttttcacaaaggtctcttgatatcaaaacttctttccttgcatgcttctctgatcctgtggagatgaaaattgacatccatagtcatattctaccaaaagaatggccagatctaaaaaagaccctgagacaaggattcagatgcaagtagtttgctttggaggtgatcccaggaaacaccagtagagtgaggaagtgagacagggaaaacagggcagccagtgaaagaggtttggctacggaggctgggtgcagctccaacaccacagcaagggagaagcaaagttgttgaaagatgggaaagtcttcagagtggtgcgagagaattgctgggatccagaagttcgtattagagaaatggaccaaaaaggccaaacctgaggacactttaaacctgtgccagcttttaaacaacgaccttgccagcaccgttgtgagctaccccaggaggttcgtgggtctggggacgttgcccatgcaggcccctgagctggcggtcaaggagatggagcgctgtgtgaaagagctgggctttcccggggtccaaattggcacccacgtcaacgagtgggacctgaacgcgcaggagctctttcctgtctatgcggcagccgaaaggctgaagtgttccctgttcgtgcatccctgggacatgcagatggatggacgaatggccaaatactggctcccttggcttgtaggaatgccagcagagaccaccatagccatttgctccatgatcatgggtggagtatttgagaagtttcccaaactgaaagtgtgtttcgcacatggtggtggtgccttccccttcacagtgggaagaatctcccatggattcagcatgcgcccagatctgtgtgcccaggacaaccccatgaacccgaagaaataccttggttccttttacacagatgctttggttcatgatcctctgtccctcaagctgttaacagatgtcataggaaaggataaagtcattttgggaaccgattacccctttccactaggtgagctggaacctgggaaactaatagagtccatggaagaatttgatgaagaaacaaagaataaactcaaagccggcaatgccctggcatttttgggtcttgagagaaaacaatttgaatgactgaatttactacaaaggcaaactttcaaaaggatatctcatttttgtttctaaatatgtatcaacaggtatcaacaaaatcctattttgaactattttactcagaaatgaatgtcccaaatatcctaaattattcataataaaaatgatttgtaagtgttttcattctgaaaa

SEQ ID NO: 106885 - DNA, 3173 bp, Homo sapiens
  Payload ID: 992
  Gene Symbol: ALAD
  Gene Name: aminolevulinate dehydratase
  Uniprot ID: P13716
  ENST ID: ENST00000409155
  CDS Start-End: 198-1190
gggggcggaccgtggggaagctgcttccgggtgagccccccccgctcttacgcggtctgtgggagaccggagcgggagacagcggtgacaggagcagcggccgggagcccttagggaggcagacagagcctgcagccaatgccccaggagccctcggttccaaccaactgatgcccctgtgcccactggcccacgccatgcagccccagtccgttctgcacagcggctacttccacccactacttcgggcctggcagacagccaccaccaccctcaatgcctccaacctcatctaccccatctttgtcacggatgttcctgatgacatacagcctatcaccagcctcccaggagtggccaggtatggtgtgaagcggctggaagagatgctgaggcccttggtggaagagggcctacgctgtgtcttgatctttggcgtccccagcagagttcccaaggacgagcggggttccgcagctgactccgaggagtccccagctattgaggcaatccatctgttgaggaagaccttccccaacctcctggtggcctgtgatgtctgcctgtgtccctacacctcccatggtcactgcgggctcctgagtgaaaacggagcattccgggctgaggagagccgccagcggctggctgaggtggcattggcgtatgccaaggcaggatgtcaggtggtagccccgtcggacatgatggatggacgcgtggaagccatcaaagaggccctgatggcacatggacttggcaacagggtatcggtgatgagctacagtgccaaatttgcttcctgtttctatggccctttccgggatgcagctaagtcaagcccagcttttggggaccgccgctgctaccagctgccccctggagcacgaggcctggctctccgagctgtggaccgggatgtacgggaaggagctgacatgctcatggtgaagccgggaatgccctacctggacatcgtgcgggaggtaaaggacaagcaccctgacctccctctcgccgtgtaccacgtctctggagagtttgccatgctgtggcatggagcccaggccggggcatttgatctcaaggctgccgtactggaggccatgactgccttccgcagagcaggtgctgacatcatcatcacctactacacaccgcagctgctgcagtggctgaaggaggaatgatggagacagtgccaggcccaagaactagaactttaaaacgttcccggggcctcagacaagtgaaaaccaaagtaaatgctgcttttagaactgtgccctcatgccctcttcctgctcacatgctagcggggcccagcagccctgggtggttttgccagcatgctaactcttgtaactcgcagctgcatcctatgagctctcccaagcttccccgcccctcccctgggtcagccgtgaggcccacctttgccaccctcagctctttcctctggtgtggcttcagcttgaaagcaacctggagtcgggggcacagcctttggggcctggctgggagagggtcttggagcattaggggaagaagagagcagtgggatcttggggcctgagaagccttggaacgcttctggcagcagagctgggtgtgggaatgaggcctagatcgatatccctgggttagagttgaaatttgccgcaattccactggaaggcatttcccacgaggccagaggttgccaggctgcctgaggtctcctattctactctgaaccataaacccagagaagaattactcattaaccagcataaatactgcctgaggatcaaaactcagaggcaaagagggagttcctgactgctagaggtgccaccaccacaaacactttttattcaggagatactttttgagaatctctgctctgttcctaggttcagtgctgggtcctgggaatacagcaggacagacctcagcttatctcttcatagaaattatacaaagagaattggggagacagctaagaagaaaacaaagaaataaagcagttacaaattgtgataagtgctttgaaggaaagaaggggtctgagacaacaacagggaaggggcctctcttgaaacagtagttgggaaggaggcagacatgcaccagtgatgtggtgacaggtgctctgaaggaggtcaccaggacctgacctctttgaaggatcagaaaatacttccctgaaggactgacatttgagcctagacctgaagggtgagccatcaagctaagacaattggggaagagcattccagggagagggaggagttgtgcaaaggccctggggctccttctagctggaggaatgcaaggctagcttgtctggagcactgagaggatggcctgaactgagtggagagagacagaccaggaccaaaccatgcagaggtcaagggccacattcaccttttcagagtgactcaatcaaatttgtagtttgtaaaagtattttaacagctctgcggcaaagtgcaaatgaaaagtcttgatggcatggactggagcggggacagtggggatggagaaaggggaatggattgtggatgtgtttagaaggtagattcgatgtgaaggatgaatctggcttgaccttctgggtggctgatgggccatttactgagatggggcagcctggaagaggaacagaagcagggtcggggtggagggagaatactaaacttagcttgagacattttgcaataaggaagctatatctagagtgcttatgtgactcacctaaggccactcaacaagtttgtggcagaactggattagaactgcacagaaaacagccaagctgggatttgaacccatgtagtccaactccaaggcctctgcccctaaccactgtgccataccacctcccaataatcaacagcaaaattataggtctaacaatgttttatagacacccctccatttatgtgatgggtttgcatcctgataaacccatcataagttgaaaatatgatcataagttgaaaatatgatcataagtcaaaaatgtatttaatatacctaacctaccaaacatcatagcttagcctagcctgccttaaacatgctcagaacacttacattagcctacagtgggcaaaactatccaacacaaaatctatattgtaataaagttgtaaagaattttgaataaaaattcaatatttgaa

SEQ ID NO: 106886 - DNA, 536 bp, Homo sapiens
  Payload ID: 992
  Gene Symbol: ALAD
  Gene Name: aminolevulinate dehydratase
  ENST ID: ENST00000448137
  CDS Start-End: 175-536
gctcttacgcggtctgtgggagaccggagcgggagacagcggtgacaggagcagcggccgggagcccttagggaggcagcacccaaagcagaaacagtatgggcagagagacgcctactgaatcagacagagcctgcagccaatgccccaggagccctcggttccaaccaactgatgcccctgtgcccactggcccacgccatgcagccccagtccgttctgcacagcggctacttccacccactacttcgggcctggcagacagccaccaccaccctcaatgcctccaacctcatctaccccatctttgtcacggatgttcctgatgacatacagcctatcaccagcctcccaggagtggccaggtatggtgtgaagcggctggaagagatgctgaggcccttggtggaagagggcctacgctgtgtcttgatctttggcgtccccagcagagttcccaaggacgagcggggttccgcagctgactccgaggagtccccagctattgaggcaatccatctgttgaggaagacctt

SEQ ID NO: 106887 - DNA, 703 bp, Homo sapiens
  Payload ID: 992
  Gene Symbol: ALAD
  Gene Name: aminolevulinate dehydratase
  ENST ID: ENST00000445750
  CDS Start-End: 662-703
acctcctctccaagcccagctccccactgccctcttcctgccctgtccctgtctccgctgccctttagatcaggcaggcaggcaggcctagagcatccgccctgagacactgcctgttggctgccttaagacgccccttccttctctgcccgcagcctccccagcctctgcattcctctgcttcctgtctgctctgctcagcctgcaggattgatcttcccaaagccaggtgtcaaccaggccactaaccctacccactgctcagaaatcttcccacagcctcagcctggccccctcttatccatcccctccatacacacttgcctcagctcctcaaaacagtccacagccatcctccttccccacctttgcccctttcttcccttcctaaggaaatattggcccccttctctccaccaggctgaacccactcatcctgcaaaaccaagttcaacgccctgtcattttcttttttttttttttttttgagatggagtctcacactgtcgcccaggctagagtgcaatgggtgcactctcggctcactgcaacctctgcctcctaggttcaatcgattcttctgcctcagcctccagaggaactctgactacagacagagcctgcagccaatgccccaggagccctcggttccaaccaactgatgcccctgtgcccactggcccacgccatgcagccccagtcc

SEQ ID NO: 106888 - DNA, 583 bp, Homo sapiens
  Payload ID: 992
  Gene Symbol: ALAD
  Gene Name: aminolevulinate dehydratase
  ENST ID: ENST00000452726
  CDS Start-End: 406-583
aggaagactggataaaatgggcccctgagatggctgaaggcagctaaaggggcctaagagactatggggagaagggcagccagttcctaggcagccctgccccactgtttctgataagcaggaggcagttgttccctcagcctcctgaaagcaatgaggagttgaggccacgggaatgcagctttggattccagaagccaaggacctgttacaaaggtggttttctgggaagcaaattagagggattagacctggcttcgacatctgacttgactccaacctaccaaaggatctcccagttcacctgggagttaacacaccagggttctagtccttttgctcgctgtgtggctttggacagagcctgcagccaatgccccaggagccctcggttccaaccaactgatgcccctgtgcccactggcccacgccatgcagccccagtccgttctgcacagcggctacttccacccactacttcgggcctggcagacagccaccaccaccctcaatgcctccaacctcatctaccccatctttgtcacggatgttcctgatgacatacagcctatcaccagcctcc

SEQ ID NO: 106889 - DNA, 2276 bp, Homo sapiens
  Payload ID: 993
  Gene Symbol: AMT
  Gene Name: aminomethyltransferase
  Uniprot ID: P48728
  ENST ID: ENST00000273588
  CDS Start-End: 304-1515
agacagggcggttctgcagggggcggtctagcccctagctttgttctgggcagcccaatcagctctggattgcccgagctgccctgaagagtcagccgaaagagctggaggcttcttccctgtggttgcgggttcctgcattctctgctctaaatcccagcctgcccttggggctgcccacgcccccttcagatcctttgctccggagagagacctgtccgagcagaggcctggactacatctcccggcgtgcctggcagtgtggtggcctctgtgcgccgtctgcactcgttgcaggcgacgatgcagagggctgtaagtgtggtggcccgtctgggctttcgcctgcaggcattccccccggccttgtgtcgtccacttagttgcgcacaggaggtgctccgcaggacaccgctctatgacttccacctggcccacggcgggaaaatggtggcgtttgcgggttggagtctgccagtgcagtaccgggacagtcacactgactcgcacctgcacacacgccagcactgctcgctctttgacgtgtctcatatgctgcagaccaagatacttggtagtgaccgggtgaagctgatggagagtctagtggttggagacattgcagagctaagaccaaaccaggggacactgtcgctgtttaccaacgaggctggaggcatcttagatgacttgattgtaaccaatacttctgagggccacctgtatgtggtgtccaacgctggctgctgggagaaagatttggccctcatgcaggacaaggtcagggagcttcagaaccagggcagagatgtgggcctggaggtgttggataatgccctgctagctctgcaaggccccactgcagcccaggtactacaggccggcgtggcagatgacctgaggaaactgcccttcatgaccagtgctgtgatggaggtgtttggcgtgtctggctgccgcgtgacccgctgtggctacacaggagaggatggtgtggagatctcggtgccggtagcgggggcagttcacctggcaacagctattctgaaaaacccagaggtgaagctggcagggctggcagccagggacagcctgcgcctggaggcaggcctctgcctgtatgggaatgacattgatgaacacactacacctgtggagggcagcctcagttggacactggggaagcgccgccgagctgctatggacttccctggagccaaggtcattgttccccagctgaagggcagggtgcagcggaggcgtgtggggttgatgtgtgagggggcccccatgcgggcacacagtcccatcctgaacatggagggtaccaagattggtactgtgactagtggctgcccctccccctctctgaagaagaatgtggcgatgggttatgtgccctgcgagtacagtcgtccagggacaatgctgctggtagaggtgcggcggaagcagcagatggctgtagtcagcaagatgccctttgtgcccacaaactactataccctcaagtgaagctggctcagggtggggctgtcccttccaggagttttgcccctacaaggggttagtcaagaagctgaggcagaactcactgggggtgggcagttaaggtggaggctgattctaattgtctggttgaggggccacaccacctattccccccacctaactcatgccattccagcttccttcaggaccctgcttctgagtgacggaccagctcacacaatgtcttgtttcagtccatgatcccactgacctactcttgcctgctggagggtaatgagaagctttggttctgccatctctcccactctgccaggtgctggctgtggagcaaaggctcacctttgtggagaggataaaacctgcccaacctacctcaccatggtttttcacattgcaaagggtaataacatgggcagtgcggacttaggctaccccctccagtttgctttccgtaaatgcaaattgtccttactgcaagtcaggaatgattgctgactcacagtagggctgctatgcctgtgtgtaaacttggggatggctgagggaacatagactcactcttccacattcccaagttggtctagtgtgctgcccagtagcaaaccatggcagactcaccacctattctgagttccagggctgctgtagggcagggtgggcttcctcccagacttgccttaccctgggctgatctttgcccctggtatgcattaatggactccactgaatcctgaaaaaaaaattaaacttccttcttacttgcc

SEQ ID NO: 106890 - DNA, 1955 bp, Homo sapiens
  Payload ID: 993
  Gene Symbol: AMT
  Gene Name: aminomethyltransferase
  Uniprot ID: P48728
  ENST ID: ENST00000395338
  CDS Start-End: 229-1389
gagctgccctgaagagtcagccgaaagagctggaggcttcttccctgtggttgcgggttcctgcattctctgctctaaatcccagcctgcccttggggctgcccacgcccccttcagatcctttgctccggagagagacctgtccgagcagaggcctggactacatctcccggcgtgcctggcagtgtggtggcctctgtgcgccgtctgcactcgttgcaggcgacgatgcagagggctgtaagtgtggtggcccgtctgggctttcgcctgcaggcattccccccggccttgtgtcgtccacttagttgcgcacaggaggtgctccgcaggacaccgctctatgacttccacctggcccacggcgggaaaatggtggcgtttgcgggttggagtctgccagtgcagtaccgggacagtcacactgactcgcacctgcacacacgccagcactgctcgctctttgacgtgtctcatatgctgcagaccaagatacttggtagtgaccgggtgaagctgatggagagtctagtggttggagacattgcagagctaagaccaaaccaggggacactgtcgctgtttaccaacgaggctggaggcatcttagatgacttgattgtaaccaatacttctgagggccacctgtatgtggtgtccaacgctggctgctgggagaaagatttggccctcatgcaggacaaggtcagggagcttcagaaccagggcagagatgtgggcctggaggtgttggataatgccctgctagctctgcaaggccccactgcagcccaggtactacaggccggcgtggcagatgacctgaggaaactgcccttcatgaccagtgctgtgatggaggtgtttggcgtgtctggctgccgcgtgacccgctgtggctacacaggagaggatggtgtggagatctcggtgccggtagcgggggcagttcacctggcaacagctattctgaaaaacccagaggtgaagctggcagggctggcagccagggacagcctgcgcctggaggcaggcctctgcctgtatgggaatgacattgatgaacacactacacctgtggagggcagcctcagttggacactggggaagcgccgccgagctgctatggacttccctggagccaaggtcattgttccccagctgaagggcagggtgcagcggaggcgtgtggggttgatgtgtgagggggcccccatgcgggcacacagtcccatcctgaacatggagggtaccaagattggtactgtgactagtggctgcccctccccctctctgaagaagaatgtggcgatgggttatgtgccctgcgagtacagtcgtccagggacaatgctgctggtagagcttccttcaggaccctgcttctgagtgacggaccagctcacacaatgtcttgtttcagtccatgatcccactgacctactcttgcctgctggagggtaatgagaagctttggttctgccatctctcccactctgccaggtgctggctgtggagcaaaggctcacctttgtggagaggataaaacctgcccaacctacctcaccatggtttttcacattgcaaagggtaataacatgggcagtgcggacttaggctaccccctccagtttgctttccgtaaatgcaaattgtccttactgcaagtcaggaatgattgctgactcacagtagggctgctatgcctgtgtgtaaacttggggatggctgagggaacatagactcactcttccacattcccaagttggtctagtgtgctgcccagtagcaaaccatggcagactcaccacctattctgagttccagggctgctgtagggcagggtgggcttcctcccagacttgccttaccctgggctgatctttgcccctggtatgcattaatggactccactgaatcctgaaaaaaaaattaaacttccttcttacttgcca

SEQ ID NO: 106891 - DNA, 811 bp, Homo sapiens
  Payload ID: 993
  Gene Symbol: AMT
  Gene Name: aminomethyltransferase
  ENST ID: ENST00000430521
  CDS Start-End: 24-811
gtctgcactcgttgcaggcgacgatgcagagggctgtaagtgtggtggcccgtctgggctttcgcctgcaggcattccccccggccttgtgtcgtccacttagttgcgcacagaccaagatacttggtagtgaccgggtgaagctgatggagagtctagtggttggagacattgcagagctaagaccaaaccaggggacactgtcgctgtttaccaacgaggctggaggcatcttagatgacttgattgtaaccaatacttctgagggccacctgtatgtggtgtccaacgctggctgctgggagaaagatttggccctcatgcaggacaaggtcagggagcttcagaaccagggcagagatgtgggcctggaggtgttggataatgccctgctagctctgcaaggccccactgcagcccaggtactacaggccggcgtggcagatgacctgaggaaactgcccttcatgaccagtgctgtgatggaggtgtttggcgtgtctggctgccgcgtgacccgctgtggctacacaggagaggatggtgtggagatctcggtgccggtagcgggggcagttcacctggcaacagctattctgaaaaacccagaggtgaagctggcagggctggcagccagggacagcctgcgcctggaggcaggcctctgcctgtatgggaatgacattgatgaacacactacacctgtggagggcagcctcagttggacactggggaagcgccgccgagctgctatggacttccctggagccaaggtcattgttccccagctgaagggcagggtgcagcggag

SEQ ID NO: 106892 - DNA, 1123 bp, Homo sapiens
  Payload ID: 993
  Gene Symbol: AMT
  Gene Name: aminomethyltransferase
  ENST ID: ENST00000399379
  CDS Start-End: 2-121
gatgcagagggctgtaagtgtggtggcccgtctgggctttcgcctgcaggcattccccccggccttgtgtcgtccacttagttgcgcacagtggtccactccttggctttgtttgctgtgaactggattccaaggacagccttctcagaagagctagagaccaagatacttggtagtgaccgggtgaagctgatggagagtctagtggttggagacattgcagagctaagaccaaaccaggggacactgtcgctgtttaccaacgaggctggaggcatcttagatgacttgattgtaaccaatacttctgagggccacctgtatgtggtgtccaacgctggctgctgggagaaagatttggccctcatgcaggacaaggtcagggagcttcagaaccagggcagagatgtgggcctggaggtgttggataatgccctgctagctctgcaaggccccactgcagcccaggtactacaggccggcgtggcagatgacctgaggaaactgcccttcatgaccagtgctgtgatggaggtgtttggcgtgtctggctgccgcgtgacccgctgtggctacacaggagaggatggtgtggagatctcggtgccggtagcgggggcagttcacctggcaacagctattctgaaaaacccagaggtgaagctggcagggctggcagccagggacagcctgcgcctggaggcaggcctctgcctgtatgggaatgacattgatgaacacactacacctgtggagggcagcctcagttggacactggggaagcgccgccgagctgctatggacttccctggagccaaggtcattgttccccagctgaagggcagggtgcagcggaggcgtgtggggttgatgtgtgagggggcccccatgcgggcacacagtcccatcctgaacatggagggtaccaagattggtactgtgactagtggctgcccctccccctctctgaagaagaatgtggcgatgggttatgtgccctgcgagtacagtcgtccagggacaatgctgctggtagaggtgcggcggaagcagcagatggctgtagtcagcaagatgccctttgtgcccacaaactactataccctcaagtgaagctggctca

SEQ ID NO: 106893 - DNA, 1719 bp, Homo sapiens
  Payload ID: 993
  Gene Symbol: AMT
  Gene Name: aminomethyltransferase
  ENST ID: ENST00000427987
  CDS Start-End: 1-1153
ggctgtaagtgtggtggcccgtctgggctttcgcctgcaggcattccccccggccttgtgtcgtccacttagttgcgcacaggaggtgctccgcaggacaccgctctatgacttccacctggcccacggcgggaaaatggtggcgtttgcgggttggagtctgccagtgcagtaccgggacagtcacactgactcgcacctgcacacacgccagcactgctcgctctttgacgtgtctcatatgctgcagaccaagatacttggtagtgaccgggtgaagctgatggagagtctagtggttggagacattgcagagctaagaccaaaccaggggacactgtcgctgtttaccaacgaggctggaggcatcttagatgacttgattgtaaccaatacttctgagggccacctgtatgtggtgtccaacgctggctgctgggagaaagatttggccctcatgcaggacaaggtcagggagcttcagaaccagggcagagatgtgggcctggaggtgttggataatgccctgctagctctgcaaggccccactgcagcccaggtactacaggccggcgtggcagatgacctgaggaaactgcccttcatgaccagtgctgtgatggaggtgtttggcgtgtctggctgccgcgtgacccgctgtggctacacaggagaggatggtgtggagatctcggtgccggtagcgggggcagttcacctggcaacagctattctgaaaaacccagaggtgaagctggcagggctggcagccagggacagcctgcgcctggaggcaggcctctgcctgtatgggaatgacattgatgaacacactacacctgtggagggcagcctcagttggacactggggaagcgccgccgagctgctatggacttccctggagccaaggtcattgttccccagctgaagggcagggtgcagcggaggcgtgtggggttgatgtgtgagggggcccccatgcgggcacacagtcccatcctgaacatggagggtaccaagattggtactgtgactagtggctgcccctccccctctctgaagaagaatgtggcgatgggttatgtgccctgcgagtacagtcgtccagggacaatgctgctggtagagcttccttcaggaccctgcttctgagtgacggaccagctcacacaatgtcttgtttcagtccatgatcccactgacctactcttgcctgctggagggtaatgagaagctttggttctgccatctctcccactctgccaggtgctggctgtggagcaaaggctcacctttgtggagaggataaaacctgcccaacctacctcaccatggtttttcacattgcaaagggtaataacatgggcagtgcggacttaggctaccccctccagtttgctttccgtaaatgcaaattgtccttactgcaagtcaggaatgattgctgactcacagtagggctgctatgcctgtgtgtaaacttggggatggctgagggaacatagactcactcttccacattcccaagttggtctagtgtgctgcccagtagcaaaccatggcagactcaccacctattctgagttccagggctgctgtagggcagggtgggcttcctcccagacttgccttaccctgggctgatctttgcccctggtatgcattaatggactccactgaatcctgaaaaaaaaattaaacttccttcttacttgcca

SEQ ID NO: 106894 - DNA, 1860 bp, Homo sapiens
  Payload ID: 993
  Gene Symbol: AMT
  Gene Name: aminomethyltransferase
  Uniprot ID: P48728
  ENST ID: ENST00000458307
  CDS Start-End: 20-1099
gcactcgttgcaggcgacgatgcagagggctgtaagtgtggtggcccgtctgggctttcgcctgcaggcattccccccggccttgtgtcgtccacttagttgcgcacaggaggtgctccgcaggacaccgctctatgacttccacctggcccacggcgggaaaatggtggcgtttgcgggttggagtctgccagtgcagtaccgggacagtcacactgactcgcacctgcacacacgccagcactgctcgctctttgacgtgtctcatatgctgcagaccaagatacttggtagtgaccgggtgaagctgatggagagtctagtggttggagacattgcagagctaagaccaaaccaggacaaggtcagggagcttcagaaccagggcagagatgtgggcctggaggtgttggataatgccctgctagctctgcaaggccccactgcagcccaggtactacaggccggcgtggcagatgacctgaggaaactgcccttcatgaccagtgctgtgatggaggtgtttggcgtgtctggctgccgcgtgacccgctgtggctacacaggagaggatggtgtggagatctcggtgccggtagcgggggcagttcacctggcaacagctattctgaaaaacccagaggtgaagctggcagggctggcagccagggacagcctgcgcctggaggcaggcctctgcctgtatgggaatgacattgatgaacacactacacctgtggagggcagcctcagttggacactggggaagcgccgccgagctgctatggacttccctggagccaaggtcattgttccccagctgaagggcagggtgcagcggaggcgtgtggggttgatgtgtgagggggcccccatgcgggcacacagtcccatcctgaacatggagggtaccaagattggtactgtgactagtggctgcccctccccctctctgaagaagaatgtggcgatgggttatgtgccctgcgagtacagtcgtccagggacaatgctgctggtagaggtgcggcggaagcagcagatggctgtagtcagcaagatgccctttgtgcccacaaactactataccctcaagtgaagctggctcagggtggggctgtcccttccaggagttttgcccctacaaggggttagtcaagaagctgaggcagaactcactgggggtgggcagttaaggtggaggctgattctaattgtctggttgaggggccacaccacctattccccccacctaactcatgccattccagcttccttcaggaccctgcttctgagtgacggaccagctcacacaatgtcttgtttcagtccatgatcccactgacctactcttgcctgctggagggtaatgagaagctttggttctgccatctctcccactctgccaggtgctggctgtggagcaaaggctcacctttgtggagaggataaaacctgcccaacctacctcaccatggtttttcacattgcaaagggtaataacatgggcagtgcggacttaggctaccccctccagtttgctttccgtaaatgcaaattgtccttactgcaagtcaggaatgattgctgactcacagtagggctgctatgcctgtgtgtaaacttggggatggctgagggaacatagactcactcttccacattcccaagttggtctagtgtgctgcccagtagcaaaccatggcagactcaccacctattctgagttccagggctgctgtagggcagggtgggcttcctcccagacttgccttaccctgggctgatctttgcccctggtatgcattaatggactccactgaatcctgaaaaaaaaattaaacttccttcttacttgcc

SEQ ID NO: 106895 - DNA, 2033 bp, Homo sapiens
  Payload ID: 993
  Gene Symbol: AMT
  Gene Name: aminomethyltransferase
  Uniprot ID: P48728
  ENST ID: ENST00000538581
  CDS Start-End: 229-1272
gagctgccctgaagagtcagccgaaagagctggaggcttcttccctgtggttgcgggttcctgcattctctgctctaaatcccagcctgcccttggggctgcccacgcccccttcagatcctttgctccggagagagacctgtccgagcagaggcctggactacatctcccggcgtgcctggcagtgtggtggcctctgtgcgccgtctgcactcgttgcaggcgacgatgcagagggctgtaagtgtggtggcccgtctgggctttcgcctgcaggcattccccccggccttgtgtcgtccacttagttgcgcacagaccaagatacttggtagtgaccgggtgaagctgatggagagtctagtggttggagacattgcagagctaagaccaaaccaggggacactgtcgctgtttaccaacgaggctggaggcatcttagatgacttgattgtaaccaatacttctgagggccacctgtatgtggtgtccaacgctggctgctgggagaaagatttggccctcatgcaggacaaggtcagggagcttcagaaccagggcagagatgtgggcctggaggtgttggataatgccctgctagctctgcaaggccccactgcagcccaggtactacaggccggcgtggcagatgacctgaggaaactgcccttcatgaccagtgctgtgatggaggtgtttggcgtgtctggctgccgcgtgacccgctgtggctacacaggagaggatggtgtggagatctcggtgccggtagcgggggcagttcacctggcaacagctattctgaaaaacccagaggtgaagctggcagggctggcagccagggacagcctgcgcctggaggcaggcctctgcctgtatgggaatgacattgatgaacacactacacctgtggagggcagcctcagttggacactggggaagcgccgccgagctgctatggacttccctggagccaaggtcattgttccccagctgaagggcagggtgcagcggaggcgtgtggggttgatgtgtgagggggcccccatgcgggcacacagtcccatcctgaacatggagggtaccaagattggtactgtgactagtggctgcccctccccctctctgaagaagaatgtggcgatgggttatgtgccctgcgagtacagtcgtccagggacaatgctgctggtagaggtgcggcggaagcagcagatggctgtagtcagcaagatgccctttgtgcccacaaactactataccctcaagtgaagctggctcagggtggggctgtcccttccaggagttttgcccctacaaggggttagtcaagaagctgaggcagaactcactgggggtgggcagttaaggtggaggctgattctaattgtctggttgaggggccacaccacctattccccccacctaactcatgccattccagcttccttcaggaccctgcttctgagtgacggaccagctcacacaatgtcttgtttcagtccatgatcccactgacctactcttgcctgctggagggtaatgagaagctttggttctgccatctctcccactctgccaggtgctggctgtggagcaaaggctcacctttgtggagaggataaaacctgcccaacctacctcaccatggtttttcacattgcaaagggtaataacatgggcagtgcggacttaggctaccccctccagtttgctttccgtaaatgcaaattgtccttactgcaagtcaggaatgattgctgactcacagtagggctgctatgcctgtgtgtaaacttggggatggctgagggaacatagactcactcttccacattcccaagttggtctagtgtgctgcccagtagcaaaccatggcagactcaccacctattctgagttccagggctgctgtagggcagggtgggcttcctcccagacttgccttaccctgggctgatctttgcccctggtatgcattaatggactccactgaatcctgaaaaaaaaattaaacttccttcttacttgcc

SEQ ID NO: 106896 - DNA, 4353 bp, Homo sapiens
  Payload ID: 994
  Gene Symbol: NPEPPS
  Gene Name: aminopeptidase puromycin sensitive
  Uniprot ID: P55786
  ENST ID: ENST00000322157
  CDS Start-End: 238-2997
gggcgcgcccggccggcggggccgcgcacgcagccgccgccaccacttccccctctccctccctccttgcgggccctcctccccttccctcccctccgcccccttccccgtaggcagcccgcccgccagtccgcccgcaccgcctccttcccagcccctagcgctccggctgggtctctcccccgccccccaggctcccccggtcgctctcctccggcggtcgcccgcgctcggtggatgtggctggcagctgccgccccctccctcgctcgccgcctgctcttcctcggccctccgcctcctcccctcctccttctcgtcttcagccgctcctctcgccgccgcctccacagcctgggcctcgccgcgatgccggagaagaggcccttcgagcggctgcctgccgatgtctcccccatcaactacagcctttgcctcaagcccgacttgctggacttcaccttcgagggcaagctggaggccgccgcccaggtgaggcaggcgactaatcagattgtgatgaattgtgctgatattgatattattacagcttcatatgcaccagaaggagatgaagaaatacatgctacaggatttaactatcagaatgaagatgaaaaagtcaccttgtctttccctagtactctgcaaacaggtacgggaaccttaaagatagattttgttggagagctgaatgacaaaatgaaaggtttctatagaagtaaatatactaccccttctggagaggtgcgctatgctgctgtaacacagtttgaggctactgatgcccgaagggcttttccttgctgggatgagcctgctatcaaagcaacttttgatatctcattggttgttcctaaagacagagtagctttatcaaacatgaatgtaattgaccggaaaccataccctgatgatgaaaatttagtggaagtgaagtttgcccgcacacctgttatgtctacatatctggtggcatttgttgtgggtgaatatgactttgtagaaacaaggtcaaaagatggtgtgtgtgtccgtgtttacactcctgttggcaaagcagagcaaggaaaatttgcgttagaggttgctgctaaaaccttgcctttttataaggactacttcaatgttccttatcctctacctaaaattgatctcattgctattgcagactttgcagctggtgccatggagaactggggccttgttacttatagggagactgcattgcttattgatccaaaaaattcctgttcttcatcccgccagtgggttgctctggttgtgggacatgaactcgcccatcaatggtttggaaatcttgttactatggaatggtggactcatctttggttaaatgaaggttttgcatcctggattgaatatctgtgtgtagaccactgcttcccagagtatgatatttggactcagtttgtttctgctgattacacccgtgcccaggagcttgacgccttagataacagccatcctattgaagtcagtgtgggccatccatctgaggttgatgagatatttgatgctatatcatatagcaaaggtgcatctgtcatccgaatgctgcatgactacattggggataaggactttaagaaaggaatgaacatgtatttaaccaagttccaacaaaagaatgctgccacagaggatctctgggaaagtttagaaaatgctagtggtaaacctatagcagctgtgatgaatacctggaccaaacaaatgggatttcccctcatttatgtggaagctgaacaggtagaagatgacagattattgaggttgtcccaaaagaagttctgtgctggtgggtcatatgttggtgaagattgtccccagtggatggtccctatcacaatctctactagtgaagaccccaaccaggccaaactaaaaattctaatggacaagccagagatgaatgtggttttgaaaaatgtcaaaccagaccaatgggtgaagttaaacttaggaacagttgggttttatcggacccagtacagctctgccatgctggaaagtttattaccaggcattcgtgacctttctctgccccctgtggatcgacttggattacagaatgacctcttctccttggctcgagctggaatcattagcactgtagaggttctaaaagtcatggaggcttttgtgaatgagcccaattatactgtatggagcgacctgagctgtaacctggggattctctcaactctcttgtcccacacagacttctatgaggaaatccaggagtttgtgaaagatgtcttttcacctataggggagagactgggctgggaccccaaacctggagaaggtcatctcgatgcactcctgaggggcttggttctgggaaaactaggaaaagcaggacataaggcaacgttagaagaagcccgtcgtcggtttaaggaccacgtggaaggaaaacagattctctccgctgatctgaggagtcctgtctatctgactgttttgaagcatggtgatggcactactttagatattatgttaaaacttcataaacaagcagatatgcaagaagagaaaaaccgaatcgaaagagtccttggcgctactcttttgcctgacctgattcaaaaagtcctcacgtttgcactttcagaagaggtacgtccacaggacactgtatcggtaattggtggagtagctggaggcagcaagcatggtaggaaagctgcttggaaattcataaaggacaactgggaagaactttataaccgataccagggaggattcttaatatccagactaataaagctatcagttgagggatttgcagttgataaaatggctggagaggttaaggctttcttcgagagtcacccagctccttcagctgagcgtaccatccagcagtgttgtgaaaatattctgctgaatgctgcctggctaaagcgagatgctgagagcatccaccagtacctccttcagcggaaggcctcaccacccacagtgtgaatcctgaggtgccgccattggcggttctgctgcttcgctgcagggataaggtggagctaccgaacagctgattcatatgccaagaatttggagtcttctttcaaaccagtgggggttggacaatgaatgtagttaactggttcctgctcacactccagaattaaattctattgaaaaaggaaaatcagcaattcagcaaaaaataaataaaaaataaaaatgtaaatatgatagtaataaaatagagcataacgaaactgtgaaactttctgaagccttgtcagtggttaaaagtatttaacactctactgttaatgacagatgttctgtttttataacctaccaaaaggaaactagaggcttcttggtgaagagcatttttgtgaagtgggttctgcaaggagcctataaagccaagggtggtgtccatttctgggaatggttaaacacaaaaggctgatagctggtatcacatagttggagtcagtgcataattccaagtggctttttttttttttggcacggggactgatcaggaagatatattcctgcataactcaatctgaaccaaggattgtagtttagttttcctccttgccttcccttctgtgtgaccgaccccttggccaaaaaaaaacaaaaagcaaaaaacaaaaacctaccctgttctggtttttttcctccctttagttccacccccaacccccattccctggtgtccttcttagagatgaagaaataataaggaaacatctttcatagccacattaaataagagaaactgatatacattatttttttctttttaaagatgacttataagaaccctgaaatttatataggtgagacaatagaaataaaaagatcttcagccaggcctttctgaaggagttattctgctaaaaatggtcttagttgtctgaaaagccagctcttgaacctcttcacaacagtatcaacactggcttctcccggttcattttatgcgtgcgagaagtcagtggtaactgctgcagggcttaatacattagtggtaactggtttaaaaaacaaagactgtaagcctgtgtgtgccactgtttgcttcaacagtatatcctaataagcctcacctatttaatccaatgagttttaaatctaaatctcattcccttcttctttccctaccttttttttctttttttcttaaaaaaatattttgtgttattaacagaaattcatatttggtgtggcttaacggtatttcagaaggtcatcagattgtgagactgcttccttgaaacatttttgtgctattgttttaaaaaaataattaaaaaacagttggcgttaataaaaatgtcaatgtgaaactga

SEQ ID NO: 106897 - DNA, 534 bp, Homo sapiens
  Payload ID: 994
  Gene Symbol: NPEPPS
  Gene Name: aminopeptidase puromycin sensitive
  ENST ID: ENST00000525048
  CDS Start-End: 1-197
tgaaaaatgtcaaaccagaccaatgggtgaagttaaacttaggaacagttgggttttatcggacccagtacagctctgccatgctggaaagtttattaccaggcattcgtgacctttctctgccccctgtggatcgacttggattacagaatgacctcttctccttgacttctatgaggaaatccaggagtttgtgaaagatgtcttttcacctataggggagagactgggctgggaccccaaacctggagaaggtcatctcgatgcactcctgaggggcttggttctgggaaaactaggaaaagcaggacataaggcaacgttagaagaagcccgtcgtcggtttaaggaccacgtggaaggaaaacagattctctccgctgatctgaggagtcctgtctatctgactgttttgaagcatggtgatggcactactttagatattatgttaaaacttcataaacaagcagatatgcaagaagagaaaaaccgaatcgaaagagtccttggcgctactcttttgcctgacctgat

SEQ ID NO: 106898 - DNA, 2864 bp, Homo sapiens
  Payload ID: 994
  Gene Symbol: NPEPPS
  Gene Name: aminopeptidase puromycin sensitive
  ENST ID: ENST00000530173
  CDS Start-End: 31-2778
aagttacggaagagtcaaggctgggacctcatggcatcattttccatggattgctctccaagtttttgtgttcctggcctttggaaccccttcatcatattccgcagccgctcctctcgccgccgcctccacagcctgggcctcgccgcgatgccggagaagaggcccttcgagcggctgcctgccgatgtctcccccatcaactacagcctttgcctcaagcccgacttgctggacttcaccttcgagggcaagctggaggccgccgcccaggtgaggcaggcgactaatcagattgtgatgaattgtgctgatattgatattattacagcttcatatgcaccagaaggagatgaagaaatacatgctacaggatttaactatcagaatgaagatgaaaaagtcaccttgtctttccctagtactctgcaaacaggtacgggaaccttaaagatagattttgttggagagctgaatgacaaaatgaaaggtttctatagaagtaaatatactaccccttctggagaggtgcgctatgctgctgtaacacagtttgaggctactgatgcccgaagggcttttccttgctgggatgagcctgctatcaaagcaacttttgatatctcattggttgttcctaaagacagagtagctttatcaaacatgaatgtaattgaccggaaaccataccctgatgatgaaaatttagtggaagtgaagtttgcccgcacacctgttatgtctacatatctggtggcatttgttgtgggtgaatatgactttgtagaaacaaggtcaaaagatggtgtgtgtgtccgtgtttacactcctgttggcaaagcagagcaaggaaaatttgcgttagaggttgctgctaaaaccttgcctttttataaggactacttcaatgttccttatcctctacctaaaattgatctcattgctattgcagactttgcagctggtgccatggagaactggggccttgttacttatagggagactgcattgcttattgatccaaaaaattcctgttcttcatcccgccagtgggttgctctggttgtgggacatgaactcgcccatcaatggtttggaaatcttgttactatggaatggtggactcatctttggttaaatgaaggttttgcatcctggattgaatatctgtgtgtagaccactgcttcccagagtatgatatttggactcagtttgtttctgctgattacacccgtgcccaggagcttgacgccttagataacagccatcctattgaagtcagtgtgggccatccatctgaggttgatgagatatttgatgctatatcatatagcaaaggtgcatctgtcatccgaatgctgcatgactacattggggataaggactttaagaaaggaatgaacatgtatttaaccaagttccaacaaaagaatgctgccacagaggatctctgggaaagtttagaaaatgctagtggtaaacctatagcagctgtgatgaatacctggaccaaacaaatgggatttcccctcatttatgtggaagctgaacaggtagaagatgacagattattgaggttgtcccaaaagaagttctgtgctggtgggtcatatgttggtgaagattgtccccagtggatggtccctatcacaatctctactagtgaagaccccaaccaggccaaactaaaaattctaatggacaagccagagatgaatgtggttttgaaaaatgtcaaaccagaccaatgggtgaagttaaacttaggaacagttgggttttatcggacccagtacagctctgccatgctggaaagtttattaccaggcattcgtgacctttctctgccccctgtggatcgacttggattacagaatgacctcttctccttggctcgagctggaatcattagcactgtagaggttctaaaagtcatggaggcttttgtgaatgagcccaattatactgtatggagcgacctgagctgtaacctggggattctctcaactctcttgtcccacacagacttctatgaggaaatccaggagtttgtgaaagatgtcttttcacctataggggagagactgggctgggaccccaaacctggagaaggtcatctcgatgcactcctgaggggcttggttctgggaaaactaggaaaagcaggacataaggcaacgttagaagaagcccgtcgtcggtttaaggaccacgtggaaggaaaacagattctctccgctgatctgaggagtcctgtctatctgactgttttgaagcatggtgatggcactactttagatattatgttaaaacttcataaacaagcagatatgcaagaagagaaaaaccgaatcgaaagagtccttggcgctactcttttgcctgacctgattcaaaaagtcctcacgtttgcactttcagaagaggtacgtccacaggacactgtatcggtaattggtggagtagctggaggcagcaagcatggtaggaaagctgcttggaaattcataaaggacaactgggaagaactttataaccgataccagggaggattcttaatatccagactaataaagctatcagttgagggatttgcagttgataaaatggctggagaggttaaggctttcttcgagagtcacccagctccttcagctgagcgtaccatccagcagtgttgtgaaaatattctgctgaatgctgcctggctaaagcgagatgctgagagcatccaccagtacctccttcagcggaaggcctcaccacccacagtgtgaatcctgaggtgccgccattggcggttctgctgcttcgctgcagggataaggtggagctaccgaacagctgattcatatgccaagaa

SEQ ID NO: 106899 - DNA, 558 bp, Homo sapiens
  Payload ID: 994
  Gene Symbol: NPEPPS
  Gene Name: aminopeptidase puromycin sensitive
  ENST ID: ENST00000528565
  CDS Start-End: 1-510
cttcataaacaagcagatatgcaagaagagaaaaaccgaatcgaaagagtccttggcgctactcttttgcctgacctgattcaaaaagtcctcacgtttgcactttcagaagaggtacgtccacaggacactgtatcggtaattggtggagtagctggaggcagcaagcatggtaggaaagctgcttggaaattcataaaggacaactgggaagaactttataaccgataccagggaggattcttaatatccagactaataaaggtgcagtggctcacgcctgtaataccagcactttgggacgccgagctatcagttgagggatttgcagttgataaaatggctggagaggttaaggctttcttcgagagtcacccagctccttcagctgagcgtaccatccagcagtgttgtgaaaatattctgctgaatgctgcctggctaaagcgagatgctgagagcatccaccagtacctccttcagcggaaggcctcaccacccacagtgtgaatcctgaggtgccgccattggcggttctgctgcttcgctgcagggata

SEQ ID NO: 106900 - DNA, 548 bp, Homo sapiens
  Payload ID: 994
  Gene Symbol: NPEPPS
  Gene Name: aminopeptidase puromycin sensitive
  ENST ID: ENST00000534691
  CDS Start-End: 1-426
agccgctcctctcgccgccgcctccacagcctgggcctcgccgcgatgccggagaagaggcccttcgagcggctgcctgccgatgtctcccccatcaactacagcctttgcctcaagcccgacttgctggacttcaccttcgagggcaagctggaggccgccgcccaggtgaggcaggcgactaatcagattgtgatgaattgtgctgatattgatattattacagcttcatatgcaccagaaggagatgaagaaatacatgctacaggatttaactatcagaatgaagatgaaaaagtcaccttgtctttccctagtactctgcaaacaggtacgggaaccttaaagatagattttgttggagagctgaatgacaaaatgaaaggtttctatagaattaatgcctggcttgttgcctggcactgaagagaaagtaaatatttgaacaagggaatgaatgaatgacagagggaaatggtgactgctttatgaaataacttgttaggttaattctaagacagagtagctttatcaaacatgaatgtaat

SEQ ID NO: 106901 - DNA, 678 bp, Homo sapiens
  Payload ID: 994
  Gene Symbol: NPEPPS
  Gene Name: aminopeptidase puromycin sensitive
  ENST ID: ENST00000526247
  CDS Start-End: 20-424
gagtcaaggctgggacctcatggcatcattttccatggattgctctccaagtttttgtgttcctggcctttggaaccccttcatcatattccgcagccgctcctctcgccgccgcctccacagcctgggcctcgccgcgatgccggagaagaggcccttcgagcggctgcctgccgatgtctcccccatcaactacagcctttgcctcaagcccgacttgctggacttcaccttcgagggcaagctggaggccgccgcccaggtgaggcaggcgactaatcagattgtgatgaattgtgctgatattgatattattacagcttcatatgcaccagaaggagatgaagtgtctgggcttcagatgttcagaagtttaatcacattccacttgtggactgcttttcttcttgttcatctttcctgaaatacatgctacaggatttaactatcagaatgaagatgaaaaagtcaccttgtctttccctagtactctgcaaacagtatgccactttttggaagtggtcactgtcaatatcttgttatggtttgatggccttggagatttaaaaccgagtaaaagtgtacgggaaccttaaagatagattttgttggagagctgaatgacaaaatgaaaggtttctatagaagctactgatgcccgaagggcttttccttgct

SEQ ID NO: 106902 - DNA, 711 bp, Homo sapiens
  Payload ID: 994
  Gene Symbol: NPEPPS
  Gene Name: aminopeptidase puromycin sensitive
  ENST ID: ENST00000532729
  CDS Start-End: 11-547
ctgggacctcatggcatcattttccatggattgctctccaagtttttgtgttcctggcctttggaaccccttcatcatattccgcagccgctcctctcgccgccgcctccacagcctgggcctcgccgcgatgccggagaagaggcccttcgagcggctgcctgccgatgtctcccccatcaactacagcctttgcctcaagcccgacttgctggacttcaccttcgagggcaagctggaggccgccgcccaggtgaggcaggcgactaatcagattgtgatgaattgtgctgatattgatattattacagcttcatatgcaccagaaggagatgaagaaatacatgctacaggatttaactatcagaatgaagatgaaaaagtcaccttgtctttccctagtactctgcaaacaggtaataactctttccaatactttgtattttgtttagtatgccactttttggaagtggtcactgtcaatatcttgttatggtttgatggccttggagatttaaaaccgagtaaaagtgtacgggaaccttaaagatagattttgttggagagctgaatgacaaaatgaaaggtttctatagaagtaaatatactaccccttctggagaggtgcgctatgctgctgtaacacagtttgaggctactgatgcccgaagggcttttccttgctgggatgagcctgctatcaaagcaact

SEQ ID NO: 106903 - DNA, 1569 bp, Homo sapiens
  Payload ID: 994
  Gene Symbol: NPEPPS
  Gene Name: aminopeptidase puromycin sensitive
  ENST ID: ENST00000527298
  CDS Start-End: 20-511
ggtcgcccgcgctcggtggatgtggctggcagctgccgccccctccctcgctcgccgcctgctcttcctcggccctccgcctcctcccctcctccttctcgtcttcagccgctcctctcgccgccgcctccacagcctgggcctcgccgcgatgccggagaagaggcccttcgagcggctgcctgccgatgtctcccccatcaactacagcctttgcctcaagcccgacttgctggacttcaccttcgagggcaagctggaggccgccgcccaggtgaggcaggcgactaatcagattgtgatgaattgtgctgatattgatattattacagcttcatatgcaccagaaggagatgaagaaatacatgctacaggatttaactatcagaatgaagatgaaaaagtcaccttgtctttccctagtactctgcaaacaggtacgggaaccttaaagatagattttgttggagagctgaatgacaaaatgaaaggtttctatagaagctactgatgcccgaagggcttttccttgctgggatgagcctgctatcaaagcaacttttgatatctcattggttgttcctaaagacagagtagctttatcaaacatgaatgtaattgaccggaaaccataccctgatgatgaaaatttagtggaagtgaagtttgcccgcacacctgttatgtctacatatctggtggcatttgttgtgggtgaatatgactttgtagaaacaaggtcaaaagatggtgtgtgtgtccgtgtttacactcctgttggcaaagcagagcaaggaaaatttgcgttagaggtaaatgtacttgaagaggattgttccaacagtccataactccaggttgctgctaaaaccttgcctttttataaggactacttcaatgttccttatcctctacctaaaattgatctcattgctattgcagactttgcagctggtgccatggagaactggggccttgttacttatagggagactgcattgcttattgatccaaaaaattcctgttcttcatcccgccagtgggttgctctggttgtgggacatgaactcgcccatcaatggtttggaaatcttgttactatggaatggtggactcatctttggttaaatgaaggttttgcatcctggattgaatatctgtgtgtagaccactgcttcccagagtatgatatttggactcagtttgtttctgctgattacacccgtgcccaggagcttgacgccttagataacagccatcctattgaagtcagtgtgggccatccatctgaggttgatgagatatttgatgctatatcatatagcaaaggtgcatctgtcatccgaatgctgcatgactacattggggataaggactttaagaaaggaatgaacatgtatttaaccaagttccaacaaaagaatgctgccacaggtaatctctaatagcttgagatagaaatggagagaaagtattgtcactctatccaggctgggacattttatttttgttctgaatacttaaggtcaggatccatgtaataaataaattagccttatttgaagctgt

SEQ ID NO: 106904 - DNA, 554 bp, Homo sapiens
  Payload ID: 994
  Gene Symbol: NPEPPS
  Gene Name: aminopeptidase puromycin sensitive
  ENST ID: ENST00000527964
  CDS Start-End: 80-554
attttgtgacttttgatgcaagagtatatatatatatatatatatcaataaatgtttatatttattttgtgaaggtgccatggagaactggggccttgttacttatagggagactgcattgcttattgatccaaaaaattcctgttcttcatcccgccagtgggttgctctggttgtgggacatgaactcgcccatcaatggtttggaaatcttgttactatggaatggtggactcatctttggttaaatgaaggttttgcatcctggattgaatatctgtgtgtagaccactgcttcccagagtatgatatttggactcagtttgtttctgctgattacacccgtgcccaggagcttgacgccttagataacagccatcctattgaagtcagtgtgggccatccatctgaggttgatgagatatttgatgctatatcatatagcaaaggtgcatctgtcatccgaatgctgcatgactacattggggataaggactttaagaaaggaatgaacatgtatttaaccaagttccaacaaaagaatgctgccacag

SEQ ID NO: 106905 - DNA, 534 bp, Homo sapiens
  Payload ID: 994
  Gene Symbol: NPEPPS
  Gene Name: aminopeptidase puromycin sensitive
  ENST ID: ENST00000527360
  CDS Start-End: 18-534
tattttgtgaaggtgccatggagaactggggccttgttacttatagtagtttcatagctatttatccagcttggagaaccttccctaatttcatatcttctagccaagtttttacatgtctgtcaccacaacataaacattgggttgctctggttgtgggacatgaactcgcccatcaatggtttggaaatcttgttactatggaatggtggactcatctttggttaaatgaaggttttgcatcctggattgaatatctgtgtgtagaccactgcttcccagagtatgatatttggactcagtttgtttctgctgattacacccgtgcccaggagcttgacgccttagataacagccatcctattgaagtcagtgtgggccatccatctgaggttgatgagatatttgatgctatatcatatagcaaaggtgcatctgtcatccgaatgctgcatgactacattggggataaggactttaagaaaggaatgaacatgtatttaaccaagttccaacaaaagaatgctgccacag

SEQ ID NO: 106906 - DNA, 2092 bp, Homo sapiens
  Payload ID: 994
  Gene Symbol: NPEPPS
  Gene Name: aminopeptidase puromycin sensitive
  ENST ID: ENST00000530514
  CDS Start-End: 35-418
caataaatgtttatatttattttgtgaaggtgccatggagaactggggccttgttacttatagggagactgcattgcttattgatccaaaaaattcctgttcttcatcccgccagtgggttgctctggttgtgggacatgaactcgcccatcaatggtttggaaatcttgttactatggaatggtggactcatctttggttaaatgaaggttttgcatcctggattgaatatctgtgtgtagaccactgcttcccagagtatgatatttggactcagtttgtttctgctgattacacccgtgcccaggagcttgacgccttagataacagccatcctattgaatattacaggctatctgcttcctgtcataaccctgaatcacactgtctgccaggtcagtgtgggccatccatctgaggttgatgagatatttgatgctatatcatatagcaaaggtgcatctgtcatccgaatgctgcatgactacattggggataaggactttaagaaaggaatgaacatgtatttaaccaagttccaacaaaagaatgctgccacagaggatctctgggaaagtttagaaaatgctagtggtaaacctatagcagctgtgatgaatacctggaccaaacaaatgggatttcccctcatttatgtggaagctgaacaggtagaagatgacagattattgaggttgtcccaaaagaagttctgtgctggtgggtcatatgttggtgaagattgtccccagtggatggtccctatcacaatctctactagtgaagaccccaaccaggccaaactaaaaattctaatggacaagccagagatgaatgtggttttgaaaaatgtcaaaccagaccaatgggtgaagttaaacttaggaacagttgggttttatcggacccagtacagctctgccatgctggaaagtttattaccaggcattcgtgacctttctctgccccctgtggatcgacttggattacagaatgacctcttctccttggctcgagctggaatcattagcactgtagaggttctaaaagtcatggaggcttttgtgaatgagcccaattatactgtatggagcgacctgagctgtaacctggggattctctcaactctcttgtcccacacagacttctatgaggaaatccaggagtttgtgaaagatgtcttttcacctataggggagagactgggctgggaccccaaacctggagaaggtcatctcgatgcactcctgaggggcttggttctgggaaaactaggaaaagcaggacataaggcaacgttagaagaagcccgtcgtcggtttaaggaccacgtggaaggaaaacagattctctccgctgatctgaggagtcctgtctatctgactgttttgaagcatggtgatggcactactttagatattatgttaaaacttcataaacaagcagatatgcaagaagagaaaaaccgaatcgaaagagtccttggcgctactcttttgcctgacctgattcaaaaagtcctcacgtttgcactttcagaagaggtacgtccacaggacactgtatcggtaattggtggagtagctggaggcagcaagcatggtaggaaagctgcttggaaattcataaaggacaactgggaagaactttataaccgataccagggaggattcttaatatccagactaataaagctatcagttgagggatttgcagttgataaaatggctggagaggttaaggctttcttcgagagtcacccagctccttcagctgagcgtaccatccagcagtgttgtgaaaatattctgctgaatgctgcctggctaaagcgagatgctgagagcatccaccagtacctccttcagcggaaggcctcaccacccacagtgtgaatcctgaggtgccgccattggcggttctgctgcttcgctgcagggataaggtggagctaccgaacagctgattcatatgccaagaatttggagtcttctttcaaaccagtgggggttggacaatgaatgtagttaactggttcctgctcacactccagaattaaattctattgaaaaaggaaaatcagcaattcagc

SEQ ID NO: 106907 - DNA, 649 bp, Homo sapiens
  Payload ID: 994
  Gene Symbol: NPEPPS
  Gene Name: aminopeptidase puromycin sensitive
  ENST ID: ENST00000525007
  CDS Start-End: 46-649
ttcaacagccattttaagttacggaagagtcaaggctgggacctcatggcatcattttccatggattgctctccaagtttttgtgttcctggcctttggaaccccttcatcatattccgcagcctgggcctcgccgcgatgccggagaagaggcccttcgagcggctgcctgccgatgtctcccccatcaactacagcctttgcctcaagcccgacttgctggacttcaccttcgagggcaagctggaggccgccgcccaggtgaggcaggcgactaatcagattgtgatgaattgtgctgatattgatattattacagcttcatatgcaccagaaggagatgaagaaatacatgctacaggatttaactatcagaatgaagatgaaaaagtcaccttgtctttccctagtactctgcaaacaggtacgggaaccttaaagatagattttgttggagagctgaatgacaaaatgaaaggtttctatagaagtaaatatactaccccttctggagaggtgcgctatgctgctgtaacacagtttgaggctactgatgcccgaagggcttttccttgctgggatgagcctgctatcaaagcaacttttgatatctcattggttgttcctaaagacagagtagctttatcaa

SEQ ID NO: 106908 - DNA, 2378 bp, Homo sapiens
  Payload ID: 995
  Gene Symbol: NPEPL1
  Gene Name: aminopeptidase-like 1
  Uniprot ID: Q8NDH3
  ENST ID: ENST00000356091
  CDS Start-End: 289-1860
tggaggccgggcgcgcgggccctactcggcagggcctgctcggggccggcttcgggcctgcccggccgggcctgcccgcacccttccgcccggcctggccggcgccccctcgcgccccgggcgggccctgcacgtctcgcgagcagcccggagcggcgggggaggcggggcccgcgggctgccgggcagggccggggcggtgccgaggccgggccggagcggggcgaagggggccgagcggcgggccgggccgggccgggcagggccggggcgtgggccggcaggaagatggcgaacgtggggctgcagttccaggcgagcgcgggggactcggacccacagagccggcccctgctgctgctcgggcagctgcaccacctgcaccgcgtgccctggagccacgtccgcgggaagctgcagccccgggtcaccgaggagctctggcaggctgccctgagcacgctcaaccccaaccccacggacagctgtcccctctacctgaactacgccaccgtggctgccctgccctgcagggtgagccggcacaacagcccctcggccgcccacttcatcacgcggctggtgcggacctgcctgccgcccggagcgcatcgctgcattgtgatggtctgcgagcagccggaggtctttgcttccgcctgtgccctggcccgggccttcccgctgttcacccaccgctcaggtgcctctcggcgcttggagaagaagacggtcaccgtggagtttttcctggtgggacaagacaacgggccggtggaggtgtccacattgcagtgcttagcgaatgccacagacggcgtgcggctagcagcccgcatcgtggacacaccctgcaatgagatgaacaccgacaccttcctcgaggagattaacaaagttggaaaggagctggggatcatcccaaccatcatccgggatgaggaactgaagacgagaggatttggaggaatctatggggttggcaaagccgccctgcatcccccagccctggccgtcctcagccacaccccagatggagccacgcagaccatcgcctgggtgggcaaaggcatcgtctatgacactggaggcctcagcatcaaagggaagactaccatgccggggatgaagcgagactgcgggggtgctgcggccgtcctgggggccttcagagccgcaatcaagcagggtttcaaagacaacctccacgctgtgttctgcttggctgagaactcggtggggcccaatgcgacaaggccagatgacatccacctgctgtactcagggaagacggtggaaatcaacaacacggatgccgagggcaggctggtgctggcagatggcgtgtcctatgcttgcaaggacctgggggccgacatcatcctggacatggccaccctgaccggggctcagggcattgccacagggaagtaccacgccgcggtgctcaccaacagcgctgagtgggaggccgcctgtgtgaaggcgggcaggaagtgtggggacctggtgcacccgctggtctactgccccgagctgcacttcagcgagttcacctcagctgtggcggacatgaagaactcagtggcggaccgagacaacagccccagctcctgtgctggcctcttcatcgcctcacacatcggcttcgactggcccggagtctgggtccacctggacattgctgcaccggtgcatgctggtgagcgagccacaggcttcggtgtggccctcctgctggcgctcttcggccgtgcctctgaggaccctctgctgaacctggtgtccccactgggctgtgaggtggatgtcgaggagggggacctggggagggactccaagagacgcaggcttgtgtgagcctcctgcctcggccctgacaaacggggatcttttacctcactttgcactgattaattttaagcaattgaaagattgcccttcatatgggttttggtttgtctttctggtcgtcagcgtggtggtggaaacagctgaagttttaggagacagcttagggtttggtgcgggccacggggaggggaccgggaagcgctggggcttgtttctgtttgttacttacaggactgagacatcttctgtaaactgctacccctggggccttctgcaccccggggtgaggcctcctgcctgcctggtgccctgtcccagccccaggtcctgtgcagggcacctgcgtggctgacagccaggctcttactccagccggggctgccagcgcatccagccagcccagccctgtgaaagatggagctgacttgctgcaggggacctgatttatagggcaagagaagtcacactccggcctctcagaattcacttgaggttcaattaaatacagtcacaccgccccctca

SEQ ID NO: 106909 - DNA, 1917 bp, Homo sapiens
  Payload ID: 995
  Gene Symbol: NPEPL1
  Gene Name: aminopeptidase-like 1
  Uniprot ID: Q8NDH3
  ENST ID: ENST00000525967
  CDS Start-End: 123-1610
cttccttgcttccacttcaggcctgcctgaggcacttccactggtctccagttacttgcaaggtcaagtacaacctgcaaggctggttatgaagaagaaactcaaaataacaggagtggcttatggaactacatggaggtaacagaggagggtaccaaccaaaggcccttgagcaatcaggatgttggctctggcaggctgccctgagcacgctcaaccccaaccccacggacagctgtcccctctacctgaactacgccaccgtggctgccctgccctgcagggtgagccggcacaacagcccctcggccgcccacttcatcacgcggctggtgcggacctgcctgccgcccggagcgcatcgctgcattgtgatggtctgcgagcagccggaggtctttgcttccgcctgtgccctggcccgggccttcccgctgttcacccaccgctcaggtgcctctcggcgcttggagaagaagacggtcaccgtggagtttttcctggtgggacaagacaacgggccggtggaggtgtccacattgcagtgcttagcgaatgccacagacggcgtgcggctagcagcccgcatcgtggacacaccctgcaatgagatgaacaccgacaccttcctcgaggagattaacaaagttggaaaggagctggggatcatcccaaccatcatccgggatgaggaactgaagacgagaggatttggaggaatctatggggttggcaaagccgccctgcatcccccagccctggccgtcctcagccacaccccagatggagccacgcagaccatcgcctgggtgggcaaaggcatcgtctatgacactggaggcctcagcatcaaagggaagactaccatgccggggatgaagcgagactgcgggggtgctgcggccgtcctgggggccttcagagccgcaatcaagcagggtttcaaagacaacctccacgctgtgttctgcttggctgagaactcggtggggcccaatgcgacaaggccagatgacatccacctgctgtactcagggaagacggtggaaatcaacaacacggatgccgagggcaggctggtgctggcagatggcgtgtcctatgcttgcaaggacctgggggccgacatcatcctggacatggccaccctgaccggggctcagggcattgccacagggaagtaccacgccgcggtgctcaccaacagcgctgagtgggaggccgcctgtgtgaaggcgggcaggaagtgtggggacctggtgcacccgctggtctactgccccgagctgcacttcagcgagttcacctcagctgtggcggacatgaagaactcagtggcggaccgagacaacagccccagctcctgtgctggcctcttcatcgcctcacacatcggcttcgactggcccggagtctgggtccacctggacattgctgcaccggtgcatgctggtgagcgagccacaggcttcggtgtggccctcctgctggcgctcttcggccgtgcctctgaggaccctctgctgaacctggtgtccccactgggctgtgaggtggatgtcgaggagggggacctggggagggactccaagagacgcaggcttgtgtgagcctcctgcctcggccctgacaaacggggatcttttacctcactttgcactgattaattttaagcaattgaaagattgcccttcatatgggttttggtttgtctttctggtcgtcagcgtggtggtggaaacagctgaagttttaggagacagcttagggtttggtgcgggccacggggaggggaccgggaagcgctggggcttgtttctgtttgttacttacaggactgagacatcttctgtaaactgctacccctggggccttctgcaccccggggtgaggcctcctgcctgcctggtgccctgt

SEQ ID NO: 106910 - DNA, 899 bp, Homo sapiens
  Payload ID: 995
  Gene Symbol: NPEPL1
  Gene Name: aminopeptidase-like 1
  ENST ID: ENST00000533788
  CDS Start-End: 1-541
gatggtctgcgagcagccggaggtctttgcttccgcctgtgccctggcccgggccttcccgctgttcacccaccgctcaggtgcctctcggcgcttggagaagaagacggtcaccgtggagtttttcctggtgggacaagacaacgggccggtggaggtgtccacattgcagtgcttagcgaatgccacagacggcgtgcggctagcagcccgcatcgtggacacaccctgcaatgagatgaacaccgacaccttcctcgaggagattaacaaagttggaaaggagctggggatcatcccaaccatcatccgggatgaggaactgaagacgagaggatttggaggaatctatggggttggcaaagccgccctgcatcccccagccctggccgtcctcagccacaccccagatggagccacgcagaccatcgcctgggtgggcaaaggcatcgtctatgacactggaggcctcagcatcaaagggaagagggcacggaaacgaatacagtggctcccggacctctttgggactgtggcctgatactccagcacagggggtactaccatgccggggatgaagcgagactgcgggggtgctgcggccgtcctgggggccttcagagccgcaatcaagcagggtttcaaagacaacctccacgctgtgttctgcttggctgagaactcggtggggcccaatgcgacaaggccagatgacatccacctgctgtactcagggaagacggtggaaatcaacaacacggatgccgagggcaggctggtgctggcagatggcgtgtcctatgcttgcaaggacctgggggccgacatcatcctggacatggccaccctgaccggggctcaggtgagtgctccctggatccaccccttagctgtagtcc

SEQ ID NO: 106911 - DNA, 1780 bp, Homo sapiens
  Payload ID: 995
  Gene Symbol: NPEPL1
  Gene Name: aminopeptidase-like 1
  Uniprot ID: Q8NDH3
  ENST ID: ENST00000525817
  CDS Start-End: 129-1556
cttgcttccacttcaggcctgcctgaggcacttccactggtctccagttacttgcaaggtcaagtacaacctgcaaggctggttatgaagaagaaactcaaaataacaggagtggcttatggaactacatggagctctggcaggctgccctgagcacgctcaaccccaaccccacggacagctgtcccctctacctgaactacgccaccgtggctgccctgccctgcagggtgagccggcacaacagcccctcggccgcccacttcatcacgcggctggtgcggacctgcctgccgcccggagcgcatcgctgcattgtgatggtctgcgagcagccggaggtctttgcttccgcctgtgccctggcccgggccttcccgctgttcacccaccgctcaggtgcctctcggcgcttggagaagaagacggtcaccgtggagtttttcctggtgggacaagacaacgggccggtggaggtgtccacattgcagtgcttagcgaatgccacagacggcgtgcggctagcagcccgcatcgtggacacaccctgcaatgagatgaacaccgacaccttcctcgaggagattaacaaagttggaaaggagctggggatcatcccaaccatcatccgggatgaggaactgaagacgagaggatttggaggaatctatggggttggcaaagccgccctgcatcccccagccctggccgtcctcagccacaccccagatggagccacgcagaccatcgcctgggtgggcaaaggcatcgtctatgacactggaggcctcagcatcaaagggaagactaccatgccggggatgaagcgagactgcgggggtgctgcggccgtcctgggggccttcagagccgcaatcaagcagggtttcaaagacaacctccacgctgtgttctgcttggctgagaactcggtggggcccaatgcgacaaggccagatgacatccacctgctgtactcagggaagacggtggaaatcaacaacacggatgccgagggcaggctggtgctggcagatggcgtgtcctatgcttgcaaggacctgggggccgacatcatcctggacatggccaccctgaccggggctcagggcattgccacagggaagtaccacgccgcggtgctcaccaacagcgctgagtgggaggccgcctgtgtgaaggcgggcaggaagtgtggggacctggtgcacccgctggtctactgccccgagctgcacttcagcgagttcacctcagctgtggcggacatgaagaactcagtggcggaccgagacaacagccccagctcctgtgctggcctcttcatcgcctcacacatcggcttcgactggcccggagtctgggtccacctggacattgctgcaccggtgcatgctggtgagcgagccacaggcttcggtgtggccctcctgctggcgctcttcggccgtgcctctgaggaccctctgctgaacctggtgtccccactgggctgtgaggtggatgtcgaggagggggacctggggagggactccaagagacgcaggcttgtgtgagcctcctgcctcggccctgacaaacggggatcttttacctcactttgcactgattaattttaagcaattgaaagattgcccttcatatgggttttggtttgtctttctggtcgtcagcgtggtggtggaaacagctgaagttttaggagacagcttagggtttggtgcgggccacggggaggggaccgggaagcgctggggcttgtttctgtttgttacttaca

SEQ ID NO: 106912 - DNA, 1884 bp, Homo sapiens
  Payload ID: 996
  Gene Symbol: AES
  Gene Name: amino-terminal enhancer of split
  Uniprot ID: Q08117
  ENST ID: ENST00000221561
  CDS Start-End: 181-975
attctcccggctggtttttctgcagaactgtccccaccatctgacctgccaggaattcagcttgtgaatttgtctctgtctgtctccaggcaccaccaccagggcagggacccacccccgccccgccccaccccagggccctggagcagcggggcctggcacacagtaggcgttctataaatgtgtcacaagaatggcttccctcaggaaggcggcattaccgctgcctttctgcagaaaaggaaactaaggctcagcaagaaccaccgcccagccagagccaaggtcacagagcacgtccgtggcacgcgtccaggtcgtgccacagcagggccggcggcttcgacgcgggcagccgggtcccttttctttgacagatggggaaaccgaggcccggccggctgccggggctcctcgcacctaccccagcaactcaaattcaccacctcggactcctgcgaccgcatcaaagacgaatttcagctactgcaagctcagtaccacagcctcaagctcgaatgtgacaagttggccagtgagaagtcagagatgcagcgtcactatgtgatgtactacgagatgtcctacggcttgaacatcgagatgcacaaacaggctgagatcgtcaaaaggctgaacgggatttgtgcccaggtcctgccctacctctcccaagagcaccagcagcaggtcttgggagccattgagagggccaagcaggtcaccgctcccgagctgaactctatcatccgacagcagctccaagcccaccagctgtcccagctgcaggccctggccctgcccttgaccccactacccgtggggctgcagccgccttcgctgccggcggtcagcgcaggcaccggcctcctctcgctgtccgcgctgggttcccaggcccacctctccaaggaagacaagaacgggcacgatggtgacacccaccaggaggatgatggcgagaagtcggattagcagggggccgggacagggaggttgggaggggggacagaggggagacagaggcacggagagaaaggaatgtttagcacaagacacagcggagctcgggattggctaaactcccatagtatttatggtggccgccggcgggggccccagcccagcttgcaggccacctctagctttcttcctaccccattcccggcttccctcctcctcccctgcagcctggttaggtggatacctgccctgacatgtgaggcaagctaaggcctggagggtcagatgggagaccaggtcccaagggagcaagacctcgcgaagcgcagcagccccggcccttcccccgttttgaacatgtgtaaccgacagtctgcctgggccacagccctctcaccctggtactgcatgcacgcaatgctagctgcccctttcccgtcctgggcaccccgagtctcccccgaccccgggtcccaggtatgctcccacctccacctgccccactcaccacctctgctagttccagacacctccacgcccacctggtcctctcccatcgcccacaaaagggggggcacgagggacgagcttagctgagctgggaggagcagggtgagggtgggcgacccaggattccccctccccttcccaaataaagatgagggtactaaagttgtcttggtttttattttattattatttttttctttttccagtatactagcttgtcttttaagaaaggggatattaaaaaaaaaaaaagacaaaagtgtttttaaaaaaaagcaacacccacacctgtgtctgtatatagtcagcttatctcgtgttcaatcgtctgatctctacagagagaagtggaaaatgctgtatcaagggtgggcttagctgtgcctttccaataaagatgtgagaagcttc

SEQ ID NO: 106913 - DNA, 1608 bp, Homo sapiens
  Payload ID: 996
  Gene Symbol: AES
  Gene Name: amino-terminal enhancer of split
  Uniprot ID: Q08117
  ENST ID: ENST00000327141
  CDS Start-End: 358-951
gcgcacggggcacgggcggcggcaggtggagccgaagcctccgcagcagccgagccgcggccactgccggcgtcgccgccattagacaatagcggtggggccggggagcggggaggcgggcggcggggaggggcggggaggggcgccgggcgcgcaggaagcggggcccggggcgcgccggggccgggcgcgcggggagggggcgcaggaagcgggcgaggccgggcgcgggaggcggcggcggccccgggagctgccgatcggcgccgggacaaaggcgcggccgcccggcgcccccagcagcccgagccggggcgcacagccggggcgcagcccgcgccccccgccgcgattgacatgatgtttccacaaagcaggcattcgggctcctcgcacctaccccagcaactcaaattcaccacctcggactcctgcgaccgcatcaaagacgaatttcagctactgcaagctcagtaccacagcctcaagctcgaatgtgacaagttggccagtgagaagtcagagatgcagcgtcactatgtgatgtactacgagatgtcctacggcttgaacatcgagatgcacaaacaggctgagatcgtcaaaaggctgaacgggatttgtgcccaggtcctgccctacctctcccaagagcaccagcagcaggtcttgggagccattgagagggccaagcaggtcaccgctcccgagctgaactctatcatccgacagcagctccaagcccaccagctgtcccagctgcaggccctggccctgcccttgaccccactacccgtggggctgcagccgccttcgctgccggcggtcagcgcaggcaccggcctcctctcgctgtccgcgctgggttcccaggcccacctctccaaggaagacaagaacgggcacgatggtgacacccaccaggaggatgatggcgagaagtcggattagcagggggccgggacagggaggttgggaggggggacagaggggagacagaggcacggagagaaaggaatgtttagcacaagacacagcggagctcgggattggctaaactcccatagtatttatggtggccgccggcgggggccccagcccagcttgcaggccacctctagctttcttcctaccccattcccggcttccctcctcctcccctgcagcctggttaggtggatacctgccctgacatgtgaggcaagctaaggcctggagggtcagatgggagaccaggtcccaagggagcaagacctcgcgaagcgcagcagccccggcccttcccccgttttgaacatgtgtaaccgacagtctgcctgggccacagccctctcaccctggtactgcatgcacgcaatgctagctgcccctttcccgtcctgggcaccccgagtctcccccgaccccgggtcccaggtatgctcccacctccacctgccccactcaccacctctgctagttccagacacctccacgcccacctggtcctctcccatcgcccacaaaagggggggcacgagggacgagcttagctgagctgggaggagcagggtgagggtgggcgacccaggattccccctccccttcccaaataaagatgagggtact

SEQ ID NO: 106914 - DNA, 1666 bp, Homo sapiens
  Payload ID: 996
  Gene Symbol: AES
  Gene Name: amino-terminal enhancer of split
  ENST ID: ENST00000586742
  CDS Start-End: 1-793
tgcctttctgcagaaaaggaaactaaggctcagcaagaaccaccgcccagccagagccaaggtcacagagcacgtccgtggcacgcgtccaggtcgtgccacagcagggccggcggcttcgacgcgggcagccgggtcccttttctttgacagatggggaaaccgaggcccggccggctgccggggctcctcgcacctaccccagcaactcaaattcaccacctcggactcctgcgaccgcatcaaagacgaatttcagctactgcaagctcagtaccacagcctcaagctcgaatgtgacaagttggccagtgagaagtcagagatgcagcgtcactatgtgatgtactacgagatgtcctacggcttgaacatcgagatgcacaaacaggctgagatcgtcaaaaggctgaacgggatttgtgcccaggtcctgccctacctctcccaagagcaccagcagcaggtcttgggagccattgagagggccaagcaggtcaccgctcccgagctgaactctatcatccgagtatgtatggggacctgggcgggtgggcgggggacaggtgggccccaggcagctaatgttcccctcccccgccctgcagcagcagctccaagcccaccagctgtcccagctgcaggccctggccctgcccttgaccccactacccgtggggctgcagccgccttcgctgccggcggtcagcgcaggcaccggcctcctctcgctgtccgcgctgggttcccaggcccacctctccaaggaagacaagaacgggcacgatggtgacacccaccaggaggatgatggcgagaagtcggattagcagggggccgggacagggaggttgggaggggggacagaggggagacagaggcacggagagaaaggaatgtttagcacaagacacagcggagctcgggattggctaaactcccatagtatttatggtggccgccggcgggggccccagcccagcttgcaggccacctctagctttcttcctaccccattcccggcttccctcctcctcccctgcagcctggttaggtggatacctgccctgacatgtgaggcaagctaaggcctggagggtcagatgggagaccaggtcccaagggagcaagacctcgcgaagcgcagcagccccggcccttcccccgttttgaacatgtgtaaccgacagtctgcctgggccacagccctctcaccctggtactgcatgcacgcaatgctagctgcccctttcccgtcctgggcaccccgagtctcccccgaccccgggtcccaggtatgctcccacctccacctgccccactcaccacctctgctagttccagacacctccacgcccacctggtcctctcccatcgcccacaaaagggggggcacgagggacgagcttagctgagctgggaggagcagggtgagggtgggcgacccaggattccccctccccttcccaaataaagatgagggtactaaagttgtcttggtttttattttattattatttttttctttttccagtatactagcttgtcttttaagaaaggggatattaaaaaaaaaaaaagacaaaagtgtttttaaaaaaaagcaacacccacacctgtgtctgtatatagtcagcttatctcgtgttcaatcgtctgatctcta

SEQ ID NO: 106915 - DNA, 491 bp, Homo sapiens
  Payload ID: 996
  Gene Symbol: AES
  Gene Name: amino-terminal enhancer of split
  ENST ID: ENST00000585557
  CDS Start-End: 211-357
gggcgcgcaggaagcggggcccggggcgcgccggggccgggcgcgcggggagggggcgcaggaagcgggcgaggccgggcgcgggaggcggcggcggccccgggagctgccgatcggcgccgggacaaaggcgcggccgcccggcgcccccagcagcccgagccggggcgcacagccggggcgcagcccgcgccccccgccgcgattgacatgatgtttccacaaagcaggcattcgggctcctcgcacctaccccagcaactcaaattcaccacctcggactcctgcgaccgcatcaaagacgaatttcagctactgcaagctcagtaccacaggctgagatcgtcaaaaggctgaacgggatttgtgcccaggtcctgccctacctctcccaagagcaccagcagcaggtcttgggagccattgagagggccaagcaggtcaccgctcccgagctgaactctatcatccgacagcagctccaagcccac

SEQ ID NO: 106916 - DNA, 942 bp, Homo sapiens
  Payload ID: 996
  Gene Symbol: AES
  Gene Name: amino-terminal enhancer of split
  ENST ID: ENST00000586839
  CDS Start-End: 289-714
ggggtcgcgccaggggccgtaaacacgggcccaggaagtggggcaggagggggggcgccgcagctgcgcggccgctccctcctagccggcccttgaggggggtccagcccacgcctgggcctgacccgggccgccccatccctacagggctcctcgcacctaccccagcaactcaaattcaccacctcggactcctgcgaccgcatcaaagacgaatttcagctactgcaagctcagtaccacagcctcaagctcgaatgtgacaagttggccagtgagaagtcagagatgcagcgtcactatgtgatgtactacgagatgtcctacggcttgaacatcgagatgcacaaacaggctgagatcgtcaaaaggctgaacgggatttgtgcccaggtcctgccctacctctcccaagagcaccagcagcaggtcttgggagccattgagagggccaagcaggtcaccgctcccgagctgaactctatcatccgacagcagctccaagcccaccagctgtcccagctgcaggccctggccctgcccttgaccccactacccgtggggctgcagccgccttcgctgccggcggtcagcgcaggcaccggcctcctctcgctgtccgcgctgggttcccaggcccacctctccaaggaagacaagaacgggcacgatggtgacacccaccaggaggatgatggcgagaagtcggattagcagggggccgggacagggaggttgggaggggggacagaggggagacagaggcacggagagaaaggaatgtttagcacaagacacagcggagctcgggattggctaaactcccatagtatttatggtggccgccggcgggggccccagcccagcttgcaggccacctctagctttcttcctaccccattcccggcttccctcctcctcccctgcagcctggttaggtgg

SEQ ID NO: 106917 - DNA, 4658 bp, Homo sapiens
  Payload ID: 997
  Gene Symbol: AMMECR1L
  Gene Name: AMMECR1-like
  Uniprot ID: Q6DCA0
  ENST ID: ENST00000272647
  CDS Start-End: 262-1194
ggccagcttctctcgggagcccccacccaggcgcatggctccatgaagcaagaggaggaggcagagcgcgagaggtcccgtccgccccagccgcgtctgggccaggagaaaaggtacaggaagaaggaatggaatcggaaggaagaaaattcattccagagacaaaatagctcccctcctctgttgtagctgttcctctggcaatacaaactttctgctttcaggttctgcagcattccagaccttgagcactgaatcaggatgggaaaaagacgttgtgttcctccactcgagcccaagttggcagcaggctgttgtggggtcaagaagcccaaattatctggaagtggaacgcacagtcacgggaatcagtccacaactgtccccggctctagttcaggacctcttcaaaaccaccagcatgtggacagcagcagtggacgggagaatgtgtcagacttaactctgggacctggaaactctcccatcacacgaatgaatcccgcatcgggagcgctgagccctcttccccggcctaatggaactgccaacaccactaagaatctggtggtgactgcagagatgtgctgctactgcttcgacgtactctactgtcacctctatggcttcccacagccacgacttcctagattcaccaatgacccctatccgctctttgtgacgtggaagacagggcgggacaagcggcttcgtggctgcattgggaccttctcagccatgaatcttcattcaggactcagggaatacacgttaaccagtgcacttaaggacagccgatttccccccctgacccgagaggagctgcctaaacttttctgctctgtctccctccttactaactttgaggatgccagtgattacctggactgggaggtaggggtccatgggattcgaattgaattcattaatgaaaaaggtgtcaaacgcacagccacatatttacctgaggttgctaaggaacaagactgggatcagatccagacaatagactccttgctcaggaaaggtggctttaaagctccaattaccagtgaattcagaaaaacgatcaaactcaccaggtaccgaagtgagaaggtgacaatcagttacgcagagtatattgcttcccgacagcactgtttccagaacggcactcttcatgccccgcccctctacaatcattactcctgacacacggctgcatgaccagtcccacccccccgtggccaccaatggctatgacatcattggagcagatgcctcctcttcctggtccagttacttctattactgcaccattttatgatgctagcttccgttgccaagtctgcctcccgctgactgagggagggtagggttaccttgaacgaaacagaacttgaggggcccaagccttatctcagcctttcctcaatatggggttccgttggattggggctcctccatgactagtgggaattactgtgggttcagaagacccttgtctggtatttgccacatggggtattggccacacgctggaagctgaaattgatgatccctgaaggttgaacccacacacacccctgcagcctccccagatgaagtaggtgtattcccctggcagtctgggcaacggagaccaagaaacatttttaggttgttttaaattcctttttttaaacttccagtttattgcgtaccaagagttgattacaacctccatgcttcataagcggacgccacgttagggttggacgtgggcaccacgagtcctttgaggctcctggacagagacccacatcaagatcggaagccctttgggtggcgttgcagatctcattgctcagtaggccgtgaagattttcatcctcatcccactctcagttggattttctggcactcttcctgcattgagtctcctgattactgaacagagctccgtcatgtagcctgctgaggaatggaatggaatggagatgcccacaggaggtcctgatgtcatcactgcacgcaggtgtgagaggagagacctcttctgcaccgcctggctacctcactcctctgctggtagcagtgcctatagctggacctaagttctcagaagcgtagatgtgcaaacaagcgattgagttgggctttaggaggacacatcataggagagaatccagggtctgtaagctggttttcttttcaggtgacatcctgaggggcctgtaagcaggggagctcctttttctagtttgcctgtagaggtgggaagactgttggtgtttctgtcctttacaggacattaggaaacagttgtgtaattacacaaggtggacctttatcttgcctgacatgctgggaatcttcaccccaccagggcaaatttccaaatagctcattttattctaggtctttcaaactttcatgtgacatatttccctttcccattgttgctgatttccaaatcgctgtcagcaattttttcctctctccttgcctattcttcactcatttggtggcaaagttcatagaactaggggacttggaagatgctttgaaaatattgttacaaaggcactgctaaaatgattcacagggagagtggccagttggaagaaggatcctaaggatgtgacactggttttcaacaacatgcttagagaactcatgaagtggattgggtgtcaacccagtgaacatgtttttatttaatttattttttgaagtttatgtggtgatggtgtggctttccgaaatgggcaaatattcagaagatcttttgcattttcttctgtcaggaatggggaaggggagtgggggcacaatctgagaaaggacacctgtgctgttctaggcatcgctggcaagtttgtgggaagggatgggcaagggtgagtgggtttgctccacaccgtcctgtgctgctcgagaggacctgggacgtgcgagggaaacgtgggtgacggtgcctaggctgcggcccttcactgctgtgctgggttcctgcagcctgctacgtttcccttggcaatgtaaatgaagatggaggggtcgtttcgtgatttcctgctgctgagaataaatgtcttgttaaaaacgtggcaacggttactcttaggtgccatggatcgatgtcagggtggtcagctctggactaagccacccacctccaatttgtacaacagtattgatacatagggctacactcattactgttcaagtgttctatgttaagagttgtgtttaatttctaaagattaaaaaaagcaaaaaaattggtgctaaaccttcacccctgagcacgctcagtgagactggtcatgcaagcatttacagtgccatgctcctcaagccgattttttcttgtagaaatgttgccctatttgtcttctccaatgtatggtatgttattttattttattattttattttattttattttattttatcgagggggggtacgatacctgccatttaagaaaatgaatagaaaattttaaaacccgagaaatggggaaaaaaaaatcagtgcacaagaattgggctggttaggcccagcaccacactgaagtgggctcagtggtttttggagtgaagaagccttactccctgcacattccctcatgctcccacacaagtccagcaatggaaatgcttgggttcctcttgctttgtcaggggactcaggagtcgaccaagggaaaccatttggccccgtgaggaatgggcattgtcagtatccgtcctgaacggggcctagtcaggaagcggtctagaagtgtacggtcacggtcgcctcatgaaagtgtgtagcaggtggctctcaggaaaaataccaagtctggatcatccatgtggcagctttgcatagggagaggatagctccgaactggaactgaactgccttctctgcacgcttgaccaaagcagtgatgagggcggccagtacctgcggtgtgcgtggtaggtttaaagaaaagggaatgttttctgctgagtgtttcctttgtccttgggctgctcgagctggacagtaggtaaccactgttttcaaggaccagcccaatttctctggcttggttcggagttcgtttcatccctagctgtgagtgccttttggtctggaaagttggcttgtctcataatacccacagctaggacattctctctgtaattatgaattgtccttgttttacattaaaagagaatgtctttgatcactagagtctgtcggtgttggattatttccactgtgagattcttaaaacttttttgcttcataataataaaacaactcatgttagagaccctttcaacatgaaaggtttgtagttgagacattacatatattttattgtttataataaaaatcatctatacaaaagaagtcctgggtgttaatattttgcacaagatctgttttccatgatgtgttgacatctacaatttcactaactgttgacgttattttctattgagattctggagcctagggagctatgtgttctttttgttcatttcgttcttacttccctgaagcaagagactatatggccttcagtgcaaagacttcagaccaattctttgtattacacttggttgcctcttggctatataacttctgagtgcaaatcattgaacactttaacgaagtattgtagagaataaatcataatggataaaaa

SEQ ID NO: 106918 - DNA, 4641 bp, Homo sapiens
  Payload ID: 997
  Gene Symbol: AMMECR1L
  Gene Name: AMMECR1-like
  Uniprot ID: Q6DCA0
  ENST ID: ENST00000393001
  CDS Start-End: 252-1184
gttggtgaagagatcaggaagagatttcttcgagactaaggatggatgacccttagcaacagtgaccgtctcctcccggcatagcaagatggcctgccctcaggtacaggaagaaggaatggaatcggaaggaagaaaattcattccagagacaaaatagctcccctcctctgttgtagctgttcctctggcaatacaaactttctgctttcaggttctgcagcattccagaccttgagcactgaatcaggatgggaaaaagacgttgtgttcctccactcgagcccaagttggcagcaggctgttgtggggtcaagaagcccaaattatctggaagtggaacgcacagtcacgggaatcagtccacaactgtccccggctctagttcaggacctcttcaaaaccaccagcatgtggacagcagcagtggacgggagaatgtgtcagacttaactctgggacctggaaactctcccatcacacgaatgaatcccgcatcgggagcgctgagccctcttccccggcctaatggaactgccaacaccactaagaatctggtggtgactgcagagatgtgctgctactgcttcgacgtactctactgtcacctctatggcttcccacagccacgacttcctagattcaccaatgacccctatccgctctttgtgacgtggaagacagggcgggacaagcggcttcgtggctgcattgggaccttctcagccatgaatcttcattcaggactcagggaatacacgttaaccagtgcacttaaggacagccgatttccccccctgacccgagaggagctgcctaaacttttctgctctgtctccctccttactaactttgaggatgccagtgattacctggactgggaggtaggggtccatgggattcgaattgaattcattaatgaaaaaggtgtcaaacgcacagccacatatttacctgaggttgctaaggaacaagactgggatcagatccagacaatagactccttgctcaggaaaggtggctttaaagctccaattaccagtgaattcagaaaaacgatcaaactcaccaggtaccgaagtgagaaggtgacaatcagttacgcagagtatattgcttcccgacagcactgtttccagaacggcactcttcatgccccgcccctctacaatcattactcctgacacacggctgcatgaccagtcccacccccccgtggccaccaatggctatgacatcattggagcagatgcctcctcttcctggtccagttacttctattactgcaccattttatgatgctagcttccgttgccaagtctgcctcccgctgactgagggagggtagggttaccttgaacgaaacagaacttgaggggcccaagccttatctcagcctttcctcaatatggggttccgttggattggggctcctccatgactagtgggaattactgtgggttcagaagacccttgtctggtatttgccacatggggtattggccacacgctggaagctgaaattgatgatccctgaaggttgaacccacacacacccctgcagcctccccagatgaagtaggtgtattcccctggcagtctgggcaacggagaccaagaaacatttttaggttgttttaaattcctttttttaaacttccagtttattgcgtaccaagagttgattacaacctccatgcttcataagcggacgccacgttagggttggacgtgggcaccacgagtcctttgaggctcctggacagagacccacatcaagatcggaagccctttgggtggcgttgcagatctcattgctcagtaggccgtgaagattttcatcctcatcccactctcagttggattttctggcactcttcctgcattgagtctcctgattactgaacagagctccgtcatgtagcctgctgaggaatggaatggaatggagatgcccacaggaggtcctgatgtcatcactgcacgcaggtgtgagaggagagacctcttctgcaccgcctggctacctcactcctctgctggtagcagtgcctatagctggacctaagttctcagaagcgtagatgtgcaaacaagcgattgagttgggctttaggaggacacatcataggagagaatccagggtctgtaagctggttttcttttcaggtgacatcctgaggggcctgtaagcaggggagctcctttttctagtttgcctgtagaggtgggaagactgttggtgtttctgtcctttacaggacattaggaaacagttgtgtaattacacaaggtggacctttatcttgcctgacatgctgggaatcttcaccccaccagggcaaatttccaaatagctcattttattctaggtctttcaaactttcatgtgacatatttccctttcccattgttgctgatttccaaatcgctgtcagcaattttttcctctctccttgcctattcttcactcatttggtggcaaagttcatagaactaggggacttggaagatgctttgaaaatattgttacaaaggcactgctaaaatgattcacagggagagtggccagttggaagaaggatcctaaggatgtgacactggttttcaacaacatgcttagagaactcatgaagtggattgggtgtcaacccagtgaacatgtttttatttaatttattttttgaagtttatgtggtgatggtgtggctttccgaaatgggcaaatattcagaagatcttttgcattttcttctgtcaggaatggggaaggggagtgggggcacaatctgagaaaggacacctgtgctgttctaggcatcgctggcaagtttgtgggaagggatgggcaagggtgagtgggtttgctccacaccgtcctgtgctgctcgagaggacctgggacgtgcgagggaaacgtgggtgacggtgcctaggctgcggcccttcactgctgtgctgggttcctgcagcctgctacgtttcccttggcaatgtaaatgaagatggaggggtcgtttcgtgatttcctgctgctgagaataaatgtcttgttaaaaacgtggcaacggttactcttaggtgccatggatcgatgtcagggtggtcagctctggactaagccacccacctccaatttgtacaacagtattgatacatagggctacactcattactgttcaagtgttctatgttaagagttgtgtttaatttctaaagattaaaaaaagcaaaaaaattggtgctaaaccttcacccctgagcacgctcagtgagactggtcatgcaagcatttacagtgccatgctcctcaagccgattttttcttgtagaaatgttgccctatttgtcttctccaatgtatggtatgttattttattttattattttattttattttattttattttatcgagggggggtacgatacctgccatttaagaaaatgaatagaaaattttaaaacccgagaaatggggaaaaaaaaatcagtgcacaagaattgggctggttaggcccagcaccacactgaagtgggctcagtggtttttggagtgaagaagccttactccctgcacattccctcatgctcccacacaagtccagcaatggaaatgcttgggttcctcttgctttgtcaggggactcaggagtcgaccaagggaaaccatttggccccgtgaggaatgggcattgtcagtatccgtcctgaacggggcctagtcaggaagcggtctagaagtgtacggtcacggtcgcctcatgaaagtgtgtagcaggtggctctcaggaaaaataccaagtctggatcatccatgtggcagctttgcatagggagaggatagctccgaactggaactgaactgccttctctgcacgcttgaccaaagcagtgatgagggcggccagtacctgcggtgtgcgtggtaggtttaaagaaaagggaatgttttctgctgagtgtttcctttgtccttgggctgctcgagctggacagtaggtaaccactgttttcaaggaccagcccaatttctctggcttggttcggagttcgtttcatccctagctgtgagtgccttttggtctggaaagttggcttgtctcataatacccacagctaggacattctctctgtaattatgaattgtccttgttttacattaaaagagaatgtctttgatcactagagtctgtcggtgttggattatttccactgtgagattcttaaaacttttttgcttcataataataaaacaactcatgttagagaccctttcaacatgaaaggtttgtagttgagacattacatatattttattgtttataataaaaatcatctatacaaaagaagtcctgggtgttaatattttgcacaagatctgttttccatgatgtgttgacatctacaatttcactaactgttgacgttattttctattgagattctggagcctagggagctatgtgttctttttgttcatttcgttcttacttccctgaagcaagagactatatggccttcagtgcaaagacttcagaccaattctttgtattacacttggttgcctcttggctatataacttctgagtgcaaatcattgaacactttaacgaagtattgtagagaataaatcataatgg

SEQ ID NO: 106919 - DNA, 1907 bp, Homo sapiens
  Payload ID: 998
  Gene Symbol: AMN
  Gene Name: amnion associated transmembrane protein
  Uniprot ID: Q9BXJ7
  ENST ID: ENST00000299155
  CDS Start-End: 34-1395
gtctcctggtggggtgcaaggagccgaggcgagatgggcgtcctgggccgggtcctgctgtggctgcagctctgcgcactgacccaggcggtctccaaactctgggtccccaacacggacttcgacgtcgcagccaactggagccagaaccggaccccgtgcgccggcggcgccgttgagttcccggcggacaagatggtgtcagtcctggtgcaagaaggtcacgccgtctcagacatgctcctgccgctggatggggaactcgtcctggcttcaggagccggattcggcgtctcagacgtgggctcgcacctggactgtggcgcgggcgaacctgccgtcttccgcgactctgaccgcttctcctggcatgacccgcacctgtggcgctctggggacgaggcacctggcctcttcttcgtggacgccgagcgcgtgccctgccgccacgacgacgtcttctttccgcctagtgcctccttccgcgtggggctcggccctggcgctagccccgtgcgtgtccgcagcatctcggctctgggccggacgttcacgcgcgacgaggacctggctgttttcctggcgtcccgcgcgggccgcctacgcttccacgggccgggcgcgctgagcgtgggccccgaggactgcgcggacccgtcgggctgcgtctgcggcaacgcggaggcgcagccgtggatctgcgcggccctgctccagcccctgggcggccgctgcccccaggccgcctgccacagcgccctccggccccaggggcagtgctgtgacctctgtggagccgttgtgttgctgacccacggccccgcatttgacctggagcggtaccgggcgcggatactggacaccttcctgggtctgcctcagtaccacgggctgcaggtggccgtgtccaaggtgccacgctcgtcccggctccgtgaggccgatacggagatccaggtggtgctggtggagaatgggcccgagacaggcggagcggggcggctggcccgggccctcctggcggacgtcgccgagaacggcgaggccctcggcgtcctggaggcgaccatgcgggagtcgggcgcacacgtctggggcagctccgcggctgggctggcgggcggcgtggcggctgccgtgctgctggcgctgctggtcctgctggtggcgccgccgctgctgcgccgcgcggggaggctcaggtggaggaggcacgaggcggcggccccggctggagcgcccctcggcttccgcaacccggtgttcgacgtgacggcctccgaggagctgcccctgccgcggcggctcagcctggttccgaaggcggccgcagacagcaccagccacagttacttcgtcaaccctctgttcgccggggccgaggccgaggcctgagcggccgcctgaccgtcgaccttggggctctccacccgctctggccccagtcgaactgggggctagccacctcctcgtccagcccccaaacctccccttcctttccccctcctccgggggccaaggacagggtggccttactcagtaaaggtgtttcctgcacctgctgtcagcctggctatgccgccaccggccccgcccatgaggactaggagcccagccttgcgccgcattcgcactgggggacatgggaggggtctagctggccactgctggaggcagcgctggtcgtcacctgggcggccagaggctgggatctgcgaagttgaacccagaactaggagtggggcttcccccgccttccggtgaggggagggtgaggagctggagggaggggcgggagagaggcaaggggtggacggagccaaaggccgtgcctggtggggcggacggaaaaggggtgggcatccctcctggtaccaagctgctgggtgcgaaggcagatcatatgg

SEQ ID NO: 106920 - DNA, 393 bp, Homo sapiens
  Payload ID: 998
  Gene Symbol: AMN
  Gene Name: amnion associated transmembrane protein
  ENST ID: ENST00000559789
  CDS Start-End: 1-393
aggcacctggcctcttcttcgtggacgccgagcgcgtgccctgccgccacgacgacgtcttctttccgcctagtgcctccttccgcgtggggctcggccctggcgctagccccgtgcgtgtccgcagcgaggccctcggcgtcctggaggcgaccatgcgggagtcgggcgcacacgtctggggcagctccgcggctgggctggcgggcggcgtggcggctgccgtgctgctggcgctgctggtcctgctggtggcgccgccgctgctgcgccgcgcggggaggctcaggtggaggaggcacgaggcggcggccccggctggagcgcccctcggcttccgcaacccggtgttcgacgtgacggcctccgaggagctgcccctgccgcggcggc

SEQ ID NO: 106921 - DNA, 320 bp, Homo sapiens
  Payload ID: 998
  Gene Symbol: AMN
  Gene Name: amnion associated transmembrane protein
  ENST ID: ENST00000559525
  CDS Start-End: 1-320
acctgtggcgctctggggacgaggcacctggcctcttcttcgtggacgccgagcgcgtgccctgccgccacgacgacgtcttctttccgcctagtgcctccttccgcgtggggctcggccctggcgctagccccacgttcacgcgcgacgaggacctggctgttttcctggcgtcccgcgcgggccgcctacgcttccacgggccgggcgcgctgagcgtgggccccgaggactgcgcggacccgtcgggctgcgtctgcggcaacgcggaggcgcagccgtggatctgcgcggccctgctccagcccctgggcggccgc

SEQ ID NO: 106922 - DNA, 3145 bp, Homo sapiens
  Payload ID: 999
  Gene Symbol: AMPH
  Gene Name: amphiphysin
  Uniprot ID: P49418
  ENST ID: ENST00000325590
  CDS Start-End: 70-2031
cccgctcctccgcgccgccgccagccccgctgcgcgctctgctcttcgcagctccccggacccgcagccatggccgacatcaagacgggcatcttcgccaagaacgtccagaagcgactcaaccgcgcgcaggaaaaggtcctccaaaagctggggaaagctgatgagacaaaagacgaacagttcgaagaatatgtccagaacttcaaacggcaagaagcagagggtaccagacttcagcgagaactccgaggatatttagcagcaatcaaaggcatgcaggaggcctccatgaagctcacagagtcgctgcatgaagtctatgagcctgactggtatgggcgggaagatgtgaaaatggttggtgagaaatgtgatgtgctgtgggaagacttccatcaaaaactcgtggatgggtccttgctaacactggatacctacctggggcaatttcctgacataaagaatcgcatcgccaagcgcagcaggaagctagtggactatgacagtgcccgccaccatctggaagctctgcagagctccaagaggaaggatgagagtcgaatctctaaggcagaagaagaatttcagaaagcacagaaagtgtttgaagagtttaacgttgacttacaagaagagttaccatcattatggtcaagacgagttggattttatgttaatactttcaaaaacgtctccagccttgaagccaagtttcataaggaaattgcggtgctttgccacaaactgtatgaagtgatgacaaaactgggtgaccagcacgccgacaaggccttcaccatccaaggagcgcccagtgattcgggtcctctccgcattgcaaagacaccatcaccgcctgaggagccttcacccctcccgagcccgacagcaagtccaaatcatacattagcacctgcgtctcccgcaccagcacggcctcggtcaccttcacagacaaggaaagggcctcctgtcccacctctacctaaagtcaccccgacaaaggaactgcagcaggagaacatcatcagtttctttgaggacaactttgttccagaaatcagtgtgacaacaccttcccagaatgaagtccctgaggtgaagaaagaggagactttgctggatctggactttgatcctttcaagcccgaggtgacacctgcaggttctgctggagtgacccactcacccatgtctcagacattgccctgggacctatggacgacaagcactgatttggtacagccggcttctggtggttcatttaatggattcacacagccccaggatacttcattattcacaatgcagacagaccagagtatgatctgcaacttgatcatacctggagctgatgctgatgcagctgttggaaccttggtgtcagcagctgagggggccccaggagaggaagcagaggcggagaaggccactgtccctgccggggaaggagtaagtttagaggaggccaaaattggaactgaaaccactgagggtgcagagagtgcccaacctgaagcagaggagctcgaagcaacagtgcctcaggagaaggtcattccttcggtggtcatagagcctgcctccaaccatgaagaggaaggagaaaacgaaataactataggtgcagagcccaaggagaccaccgaggacgcggctcctccgggccccaccagcgagacaccggagctggctacggagcagaagcctatccaggaccctcagcccacgccttctgcaccagccatgggggctgctgaccagctagcatctgcaagggaggcctctcaggaattgcctcctggctttctctacaaggtggaaacactgcatgattttgaggcagcaaattctgatgaacttaccttacaaaggggtgatgtggtgctggtggtcccctcagattcagaagctgatcaggatgcaggctggctggtgggagtgaaggaatcagactggcttcagtacagagaccttgccacctacaaaggcctctttccagagaacttcacccgacgcttagattagggcaacaagtactgcaagaaggagctcagttacggggtttttaaaccttcatgaaaacctgaagagttcacttttgttattatgctcttaatgatttacagactgatgccagacaaaccttgggaagatgtatcaatggagcatgtgtgcaaaaaaatgtaagaggaaaaaaagtaaattaaggaaaaaatcctcactcattcccatgttgtcaataacaggtttgtttgtgctttgtccaagctgtggagactcttgtacttgatcccctcccaccaattctaaagtagctttctccagatcagactttaatttctctgcatcaggtgtatcgtattgagtggctgccctgcagaagatgtgatgaattatcctgtagtacaagattatcttattcccctgcccaggtgtgagcacgtgctctcgctccctttcaggtttactatgtttaaaactaaactgctgcaaaagttctcaatgttcttttccaacacatctatatatatatggacacacagtcacgcaagctagttcccatgactcctggatctatgtgtatgcagaaggctacatatacatagttgcttctttcctttccattgtagctctttgcctctcaattgtcattgatacatgcattgctcttattctgtctggcattacaattgcagttttgcctaatggcaaaaccagccatcccattggcaaaagagtcaacagtatctgtgtttgtactgtgcagttttcaggatgagatgacagatagcacgactacactgaggcaccctcagagaaggcagggcctgatttatctagctgtccagccgctgtggctggaggtaggctagttgggatgggcagctaagcagtcttctcttctgcctttatgagattgggtagaaagatggggcatattcatctacccccaaaagaacactataaaaacagctcctctatatttccacctctttctatttatgcaactcatcttcacagattgttctaaagtaaaatagatggtgtatgctgtatccacaaatcatctgtaacaattatgttttcagtgctgtgtcattccaaataaacctttggtaatcttcaacgattaccctaa

SEQ ID NO: 106923 - DNA, 3418 bp, Homo sapiens
  Payload ID: 999
  Gene Symbol: AMPH
  Gene Name: amphiphysin
  Uniprot ID: P49418
  ENST ID: ENST00000356264
  CDS Start-End: 217-2304
cagtcccgacgcatcccgcccccgctctgtcgctttaagctggtcccgccgccgcgccccgccctcacccctccgcgctccgcggctccccgccgcttctcccgctcctcccttgctcggccctctcctcctcctcccgctcctcctcccgctcctccgcgccgccgccagccccgctgcgcgctctgctcttcgcagctccccggacccgcagccatggccgacatcaagacgggcatcttcgccaagaacgtccagaagcgactcaaccgcgcgcaggaaaaggtcctccaaaagctggggaaagctgatgagacaaaagacgaacagttcgaagaatatgtccagaacttcaaacggcaagaagcagagggtaccagacttcagcgagaactccgaggatatttagcagcaatcaaaggcatgcaggaggcctccatgaagctcacagagtcgctgcatgaagtctatgagcctgactggtatgggcgggaagatgtgaaaatggttggtgagaaatgtgatgtgctgtgggaagacttccatcaaaaactcgtggatgggtccttgctaacactggatacctacctggggcaatttcctgacataaagaatcgcatcgccaagcgcagcaggaagctagtggactatgacagtgcccgccaccatctggaagctctgcagagctccaagaggaaggatgagagtcgaatctctaaggcagaagaagaatttcagaaagcacagaaagtgtttgaagagtttaacgttgacttacaagaagagttaccatcattatggtcaagacgagttggattttatgttaatactttcaaaaacgtctccagccttgaagccaagtttcataaggaaattgcggtgctttgccacaaactgtatgaagtgatgacaaaactgggtgaccagcacgccgacaaggccttcaccatccaaggagcgcccagtgattcgggtcctctccgcattgcaaagacaccatcaccgcctgaggagccttcacccctcccgagcccgacagcaagtccaaatcatacattagcacctgcgtctcccgcaccagcacggcctcggtcaccttcacagacaaggaaagggcctcctgtcccacctctacctaaagtcaccccgacaaaggaactgcagcaggagaacatcatcagtttctttgaggacaactttgttccagaaatcagtgtgacaacaccttcccagaatgaagtccctgaggtgaagaaagaggagactttgctggatctggactttgatcctttcaagcccgaggtgacacctgcaggttctgctggagtgacccactcacccatgtctcagacattgccctgggacctatggacgacaagcactgatttggtacagccggcttctggtggttcatttaatggattcacacagccccaggatacttcattattcacaatgcagacagaccagagtatgatctgcaacttggctgaatctgaacaggctccacccacagagccaaaagcagaggagcctctggctgctgtcacacctgccgttggtctggaccttggaatggacactcgggctgaggagccagtggaggaggcagtgatcatacctggagctgatgctgatgcagctgttggaaccttggtgtcagcagctgagggggccccaggagaggaagcagaggcggagaaggccactgtccctgccggggaaggagtaagtttagaggaggccaaaattggaactgaaaccactgagggtgcagagagtgcccaacctgaagcagaggagctcgaagcaacagtgcctcaggagaaggtcattccttcggtggtcatagagcctgcctccaaccatgaagaggaaggagaaaacgaaataactataggtgcagagcccaaggagaccaccgaggacgcggctcctccgggccccaccagcgagacaccggagctggctacggagcagaagcctatccaggaccctcagcccacgccttctgcaccagccatgggggctgctgaccagctagcatctgcaagggaggcctctcaggaattgcctcctggctttctctacaaggtggaaacactgcatgattttgaggcagcaaattctgatgaacttaccttacaaaggggtgatgtggtgctggtggtcccctcagattcagaagctgatcaggatgcaggctggctggtgggagtgaaggaatcagactggcttcagtacagagaccttgccacctacaaaggcctctttccagagaacttcacccgacgcttagattagggcaacaagtactgcaagaaggagctcagttacggggtttttaaaccttcatgaaaacctgaagagttcacttttgttattatgctcttaatgatttacagactgatgccagacaaaccttgggaagatgtatcaatggagcatgtgtgcaaaaaaatgtaagaggaaaaaaagtaaattaaggaaaaaatcctcactcattcccatgttgtcaataacaggtttgtttgtgctttgtccaagctgtggagactcttgtacttgatcccctcccaccaattctaaagtagctttctccagatcagactttaatttctctgcatcaggtgtatcgtattgagtggctgccctgcagaagatgtgatgaattatcctgtagtacaagattatcttattcccctgcccaggtgtgagcacgtgctctcgctccctttcaggtttactatgtttaaaactaaactgctgcaaaagttctcaatgttcttttccaacacatctatatatatatggacacacagtcacgcaagctagttcccatgactcctggatctatgtgtatgcagaaggctacatatacatagttgcttctttcctttccattgtagctctttgcctctcaattgtcattgatacatgcattgctcttattctgtctggcattacaattgcagttttgcctaatggcaaaaccagccatcccattggcaaaagagtcaacagtatctgtgtttgtactgtgcagttttcaggatgagatgacagatagcacgactacactgaggcaccctcagagaaggcagggcctgatttatctagctgtccagccgctgtggctggaggtaggctagttgggatgggcagctaagcagtcttctcttctgcctttatgagattgggtagaaagatggggcatattcatctacccccaaaagaacactataaaaacagctcctctatatttccacctctttctatttatgcaactcatcttcacagattgttctaaagtaaaatagatggtgtatgctgtatccacaaatcatctgtaacaattatgttttcagtgctgtgtcattccaaataaacctttggtaatcttcaacgattaccctaa

SEQ ID NO: 106924 - DNA, 665 bp, Homo sapiens
  Payload ID: 999
  Gene Symbol: AMPH
  Gene Name: amphiphysin
  ENST ID: ENST00000450124
  CDS Start-End: 1-338
caggtggaaatgaacaactgcccccaaagcctgcgccggaggctggagttgccattgctgcttgtgtggagatggagcagctgtatgacccacttgactcagacatgccagccatggacacagctggcctgttcaaagaaagtcatgaagatatgaagaagtcagatgaagaggaagagaaacagaagatggaagattctctgtgggcaggtgtggaggcgtgtcaaaaggcttctggtggttcatttaatggattcacacagccccaggatacttcattattcacaatgcagacagaccagagtatgatctgcaacttggaaatcacagtgaactgatgtctcccagtgagtcgtgattgtacacgatcttcccaggagcaagaaaacgccccagtgtttggctcattgactattctgagcgagatcatacctggagctgatgctgatgcagctgttggaaccttggtgtcagcagctgagggggccccaggagaggaagcagaggcggagaaggccactgtccctgccggggaaggagtaagtttagaggaggccaaaattggaactgaaaccactgagggtgcagagagtgcccaacctgaagcagaggagctcgaagcaacagtgcctcaggagaaggtcattccttcggtggtcatagag

SEQ ID NO: 106925 - DNA, 1735 bp, Homo sapiens
  Payload ID: 999
  Gene Symbol: AMPH
  Gene Name: amphiphysin
  ENST ID: ENST00000441628
  CDS Start-End: 1-1735
tgattcgggtcctctccgcattgcaaagacaccatcaccgcctgaggagccttcacccctcccgagcccgacagcaagtccaaatcatacattagcacctgcgtctcccgcaccagcacggcctcggtcaccttcacagacaaggaaagggcctcctgtcccacctctacctaaagtcaccccgacaaaggaactgcagcaggagaacatcatcagtttctttgaggacaactttgttccagaaatcagtgtgacaacaccttcccagaatgaagtccctgaggtgaagaaagaggagactttgctggatctggactttgatcctttcaagcccgaggtgacacctgcaggttctgctggagtgacccactcacccatgtctcagacattgccctgggacctatggacgacaagcactgatttggtacagccgactgactcttcagaaagtctttccttgtgtaacctgatcatggaggaaactccagacagtgggttggccgaagaaattcaaagatctcaaaatgatataggtgcatttacttggggccctgacgctagtacagacagggtcagccaagaagttacctcaggtgggtttggagaagactctgcatgtccctccgaaacagagcaagacataagattatccaccagcctgctttcgtctgctgactggcccactgtagctgaagagagtgagcatgccccggggccagcctttccaggtggaaatgaacaactgcccccaaagcctgcgccggaggctggagttgccattgctgcttgtgtggagatggagcagctgtatgacccacttgactcagacatgccagccatggacacagctggcctgttcaaagaaagtcatgaagatatgaagaagtcagatgaagaggaagagaaacagaagatggaagattctctgtgggcaggtgtggaggcgtgtcaaaaggcttctggtggttcatttaatggattcacacagccccaggatacttcattattcacaatgcagacagaccagagtatgatctgcaacttgatcatacctggagctgatgctgatgcagctgttggaaccttggtgtcagcagctgagggggccccaggagaggaagcagaggcggagaaggccactgtccctgccggggaaggagtaagtttagaggaggccaaaattggaactgaaaccactgagggtgcagagagtgcccaacctgaagcagaggagctcgaagcaacagtgcctcaggagaaggtcattccttcggtggtcatagagcctgcctccaaccatgaagaggaaggagaaaacgaaataactataggtgcagagcccaaggagaccaccgaggacgcggctcctccgggccccaccagcgagacaccggagctggctacggagcagaagcctatccaggaccctcagcccacgccttctgcaccagccatgggggctgctgaccagctagcatctgcaagggaggcctctcaggaattgcctcctggctttctctacaaggtggaaacactgcatgattttgaggcagcaaattctgatgaacttaccttacaaaggggtgatgtggtgctggtggtcccctcagattcagaagctgatcaggatgcaggctggctggtgggagtgaaggaatcagactggcttcagtacagagaccttgccacctacaaaggcctctttccagagaacttcacccgacgcttagattag

SEQ ID NO: 106926 - DNA, 1240 bp, Homo sapiens
  Payload ID: 1000
  Gene Symbol: AREG
  Gene Name: amphiregulin
  Uniprot ID: P15514
  ENST ID: ENST00000395748
  CDS Start-End: 213-971
acagacgttcgcacacctgggtgccagcgccccagaggtcccgggacagcccgaggcgccgcgcccgccgccccgagctccccaagccttcgagagcggcgcacactcccggtctccactcgctcttccaacacccgctcgttttggcggcagctcgtgtcccagagaccgagttgccccagagaccgagacgccgccgctgcgaaggaccaatgagagccccgctgctaccgccggcgccggtggtgctgtcgctcttgatactcggctcaggccattatgctgctggattggacctcaatgacacctactctgggaagcgtgaaccattttctggggaccacagtgctgatggatttgaggttacctcaagaagtgagatgtcttcagggagtgagatttcccctgtgagtgaaatgccttctagtagtgaaccgtcctcgggagccgactatgactactcagaagagtatgataacgaaccacaaatacctggctatattgtcgatgattcagtcagagttgaacaggtagttaagcccccccaaaacaagacggaaagtgaaaatacttcagataaacccaaaagaaagaaaaagggaggcaaaaatggaaaaaatagaagaaacagaaagaagaaaaatccatgtaatgcagaatttcaaaatttctgcattcacggagaatgcaaatatatagagcacctggaagcagtaacatgcaaatgtcagcaagaatatttcggtgaacggtgtggggaaaagtccatgaaaactcacagcatgattgacagtagtttatcaaaaattgcattagcagccatagctgcctttatgtctgctgtgatcctcacagctgttgctgttattacagtccagcttagaagacaatacgtcaggaaatatgaaggagaagctgaggaacgaaagaaacttcgacaagagaatggaaatgtacatgctatagcataactgaagataaaattacaggatatcacattggagtcactgccaagtcatagccataaatgatgagtcggtcctctttccagtggatcataagacaatggaccctttttgttatgatggttttaaactttcaattgtcactttttatgctatttctgtatataaaggtgcacgaaggtaaaaagtattttttcaagttgtaaataatttatttaatatttaatggaagtgtatttattttacagctcattaaacttttttaaccaaacaga

SEQ ID NO: 106927 - DNA, 956 bp, Homo sapiens
  Payload ID: 1000
  Gene Symbol: AREG
  Gene Name: amphiregulin
  ENST ID: ENST00000502307
  CDS Start-End: 45-869
ccgagttgccccagagaccgagacgccgccgctgcgaaggaccaatgagagccccgctgctaccgccggcgccggtggtgctgtcgctcttgatactcggctcaggccattatgctgctggattggacctcaatgacacctactctgggaagcgtgaaccattttctggggaccacagtgctgatggatttgaggttacctcaagaagtgagatgtcttcagggagtgagatttcccctgtgagtgaaatgccttctagtagtgaaccgtcctcgggagccgactatgactactcagaagagtatgataacgaaccacaaatacctggctatattgtcgatgattcagtcagagttgaacaggtagttaagcccccccaaaacaagacggaaagtgaaaatacttcagataaacccaaaagaaagaaaaagggaggcaaaaatggaaaaaatagaagaaacagaaagaagaaaaatccatgtaatgcagaatttcaaaatttctgcattcacggagaatgcaaatatatagagcacctggaagcagtaacatgcaaatgtcagcaagaatatttcggtgaacggtgtggggaaaagtccatgaaaactcacagcatgattgacagtagtttatcaaaaattgcattagcagccatagctgcctttatgtctgctgtgatcctcacagctgttgctgttattacagtccagatatcacattggagtcactgccaagtcatagccataaatgatgagtcggtcctctttccagtggatcataagacaatggaccctttttgttatgatggttttaaactttcaattgtcactttttatgctatttctgtatataaaggtgcacgaaggtaaaaagtattttttcaagttgtaaataatttatttaatatttaatggaagtgtatttattttacagctcattaaacttttttaaccaaa

SEQ ID NO: 106928 - DNA, 1790 bp, Homo sapiens
  Payload ID: 1001
  Gene Symbol: AMY1A
  Gene Name: amylase, alpha 1A (salivary)
  Uniprot ID: P04745
  ENST ID: ENST00000370083
  CDS Start-End: 221-1756
gatttatctagaggctgggaagggctcctgaaccagttgtttccgtcttgtcggtctgtcagggttggaaagtccaagccataggacccagtttcctttcttagcttacgttatctaccagagcaccgtgggctgttacttgccttgagttggaagcggttcgcatttataccggaatataaatagtttctggaaaggacactgacaacttcaaagcaaaatgaagctcttttggttgcttttcaccattgggttctgctgggctcagtattcctcaaatacacaacaaggacgaacatctattgttcatctgtttgaatggcgatgggttgatattgctcttgaatgtgagcgatatttagctcccaagggatttggaggggttcaggtctctccaccaaatgaaaatgttgccattcacaaccctttcagaccttggtgggaaagataccaaccagttagctataaattatgcacaagatctggaaatgaagatgaatttagaaacatggtgactagatgcaacaatgttggggttcgtatttatgtggatgctgtaattaatcatatgtgtggtaatgctgtgagtgcaggaacaagcagtacctgtggaagttacttcaaccctggaagtagggactttccagcagtcccatattctggatgggattttaatgatggtaaatgtaaaactggaagtggagatatcgagaactataatgatgctactcaggtcagagattgtcgtctgtctggtcttctcgatcttgcactggggaaggattatgtgcgttctaagattgccgaatatatgaaccatctcattgacattggtgttgcagggttcagaattgatgcttccaagcacatgtggcctggagacataaaggcaattttggacaaactgcataatctaaacagtaactggttcccggaaggtagtaaacctttcatttaccaggaggtaattgatctgggtggtgagccaattaaaagcagtgactactttggtaatggccgggtgacagaattcaagtatggtgcaaaactcggcacagttattcgcaagtggaatggagagaagatgtcttacttaaagaactggggagaaggttggggtttcatgccttctgacagagcgcttgtctttgtggataaccatgacaatcaacgaggacatggcgctggaggagcctctatacttaccttctgggatgctaggctgtacaaaatggcagttggatttatgcttgctcatccttatggatttacacgagtaatgtcaagctaccgttggccaagatattttgaaaatggaaaagatgttaatgattgggttgggccaccaaatgataatggagtaactaaagaagttactattaatccagacactacttgtggcaatgactgggtctgtgaacatcgatggcgccaaataaggaacatggttaatttccgcaatgtagtggatggccagccttttacaaactggtatgataatgggagcaaccaagtggcttttgggagaggaaacagaggattcattgttttcaacaatgatgactggacattttctttaactttgcaaactggtcttcctgctggcacatactgtgatgtcatttctggagataaaattaatggcaactgcacaggcattaaaatctacgtttctgatgatggcaaagctcatttttctattagtaactctgctgaagatccatttattgcaattcatgctgaatctaaattgtaaaatttaaaattaaatgcaaatccgcaaagcaata

SEQ ID NO: 106929 - DNA, 1363 bp, Homo sapiens
  Payload ID: 1001
  Gene Symbol: AMY1A
  Gene Name: amylase, alpha 1A (salivary)
  ENST ID: ENST00000430659
  CDS Start-End: 686-1363
atgcacccgtggtcagggagaaacagaatatggaagggagtttcacaatgttcttctatacaatgtctggaatctatgaataacatcggcttctaaatcataagttgatttgtaactactgggtttaggccaaccaggcccaggcctggttttgtgcctttgattttgcttccttgttgtttttactgaatagaaaacaatataaaacaagaggacagggtctttctctcttctcaatatcagcactggattgtagaacttgttgctgattttggcctggcattcaagttaactcttccccttggtatctgtacatacctttgatgtcagtgtttagtacacgtggcttggtcacttcatggctaaaaacgtgcttgtggaagacaagtctggcttggtgagtctgtgtggtcagcagtctctgatccgtgcagggtattaatgtgtcagggctgagtgttctgagatttatctagaggctgggaagggctcctgaaccagttgtttccgtcttgtcggtctgtcagggttggaaagtccaagccataggacccagtttcctttcttagcttacgttatctaccagagcaccgtgggctgttacttgccttgagttggaagcggttcgcatttataccggaatataaatagtttctggaaaggacactgacaacttcaaagcaaaatgaagctcttttggttgcttttcaccattgggttctgctgggctcagtattcctcaaatacacaacaaggacgaacatctattgttcatctgtttgaatggcgatgggttgatattgctcttgaatgtgagcgatatttagctcccaagggatttggaggggttcaggtctctccaccaaatgaaaatgttgccattcacaaccctttcagaccttggtgggaaagataccaaccagttagctataaattatgcacaagatctggaaatgaagatgaatttagaaacatggtgactagatgcaacaatgttggggttcgtatttatgtggatgctgtaattaatcatatgtgtggtaatgctgtgagtgcaggaacaagcagtacctgtggaagttacttcaaccctggaagtagggactttccagcagtcccatattctggatgggattttaatgatggtaaatgtaaaactggaagtggagatatcgagaactataatgatgctactcaggtcagagattgtcgtctgtctggtcttctcgatcttgcactggggaaggattatgtgcgttctaagattgccgaatatatgaaccatctcattgacattggtgttgcagggttcagaattgatgcttccaagcacatgtggcctggagacataaaggcaattttg

SEQ ID NO: 106930 - DNA, 403 bp, Homo sapiens
  Payload ID: 1001
  Gene Symbol: AMY1A
  Gene Name: amylase, alpha 1A (salivary)
  ENST ID: ENST00000422549
  CDS Start-End: 89-403
gctgttatgtgagaacattaggccacagcaacatgtcattgtgaatataaatagtttctggaaaggacactgacaacttcaaagcaaaatgaagctcttttggttgcttttcaccattgggttctgctgggctcagtattcctcaaatacacaacaaggacgaacatctattgttcatctgtttgaatggcgatgggttgatattgctcttgaatgtgagcgatatttagctcccaagggatttggaggggttcaggtctctccaccaaatgaaaatgttgccattcacaaccctttcagaccttggtgggaaagataccaaccagttagctataaattatgcacaagatctggaaatgaagatgaatttagaaacatggtgactagatgcaacaatgttggg

SEQ ID NO: 106931 - DNA, 1862 bp, Homo sapiens
  Payload ID: 1002
  Gene Symbol: AMY1B
  Gene Name: amylase, alpha 1B (salivary)
  Uniprot ID: P04745
  ENST ID: ENST00000330330
  CDS Start-End: 296-1831
tggcttggtgagtctgtgtggtcagcagtctctgatccgtgcagggtattaatgtgtcagggctgagtgttctgagatttatctagaggctgggaagggctcctgaaccagttgtttccgtcttgtcggtctgtcagggttggaaagtccaagccataggacccagtttcctttcttagcttacgttatctaccagagcaccgtgggctgttacttgccttgagttggaagcggttcgcatttataccggaatataaatagtttctggaaaggacactgacaacttcaaagcaaaatgaagctcttttggttgcttttcaccattgggttctgctgggctcagtattcctcaaatacacaacaaggacgaacatctattgttcatctgtttgaatggcgatgggttgatattgctcttgaatgtgagcgatatttagctcccaagggatttggaggggttcaggtctctccaccaaatgaaaatgttgccattcacaaccctttcagaccttggtgggaaagataccaaccagttagctataaattatgcacaagatctggaaatgaagatgaatttagaaacatggtgactagatgcaacaatgttggggttcgtatttatgtggatgctgtaattaatcatatgtgtggtaatgctgtgagtgcaggaacaagcagtacctgtggaagttacttcaaccctggaagtagggactttccagcagtcccatattctggatgggattttaatgatggtaaatgtaaaactggaagtggagatatcgagaactataatgatgctactcaggtcagagattgtcgtctgtctggtcttctcgatcttgcactggggaaggattatgtgcgttctaagattgccgaatatatgaaccatctcattgacattggtgttgcagggttcagaattgatgcttccaagcacatgtggcctggagacataaaggcaattttggacaaactgcataatctaaacagtaactggttcccggaaggtagtaaacctttcatttaccaggaggtaattgatctgggtggtgagccaattaaaagcagtgactactttggtaatggccgggtgacagaattcaagtatggtgcaaaactcggcacagttattcgcaagtggaatggagagaagatgtcttacttaaagaactggggagaaggttggggtttcatgccttctgacagagcgcttgtctttgtggataaccatgacaatcaacgaggacatggcgctggaggagcctctatacttaccttctgggatgctaggctgtacaaaatggcagttggatttatgcttgctcatccttatggatttacacgagtaatgtcaagctaccgttggccaagatattttgaaaatggaaaagatgttaatgattgggttgggccaccaaatgataatggagtaactaaagaagttactattaatccagacactacttgtggcaatgactgggtctgtgaacatcgatggcgccaaataaggaacatggttaatttccgcaatgtagtggatggccagccttttacaaactggtatgataatgggagcaaccaagtggcttttgggagaggaaacagaggattcattgttttcaacaatgatgactggacattttctttaactttgcaaactggtcttcctgctggcacatactgtgatgtcatttctggagataaaattaatggcaactgcacaggcattaaaatctacgtttctgatgatggcaaagctcatttttctattagtaactctgctgaagatccatttattgcaattcatgctgaatctaaattgtaaaatttaaaattaaatgcaaatccgcaaagca

SEQ ID NO: 106932 - DNA, 1787 bp, Homo sapiens
  Payload ID: 1002
  Gene Symbol: AMY1B
  Gene Name: amylase, alpha 1B (salivary)
  Uniprot ID: P04745
  ENST ID: ENST00000370080
  CDS Start-End: 218-1753
tctcttctcaatatcagcactggattgtagaacttgttgctgattttggcctggcattcaagttaactcttccccttggtatctgtacatacctttgatgtcagtgtttagtacacgtggcttggtcacttcatggctaaaaacgtgcttgtggaagacaagtctggcttggaatataaatagtttctggaaaggacactgacaacttcaaagcaaaatgaagctcttttggttgcttttcaccattgggttctgctgggctcagtattcctcaaatacacaacaaggacgaacatctattgttcatctgtttgaatggcgatgggttgatattgctcttgaatgtgagcgatatttagctcccaagggatttggaggggttcaggtctctccaccaaatgaaaatgttgccattcacaaccctttcagaccttggtgggaaagataccaaccagttagctataaattatgcacaagatctggaaatgaagatgaatttagaaacatggtgactagatgcaacaatgttggggttcgtatttatgtggatgctgtaattaatcatatgtgtggtaatgctgtgagtgcaggaacaagcagtacctgtggaagttacttcaaccctggaagtagggactttccagcagtcccatattctggatgggattttaatgatggtaaatgtaaaactggaagtggagatatcgagaactataatgatgctactcaggtcagagattgtcgtctgtctggtcttctcgatcttgcactggggaaggattatgtgcgttctaagattgccgaatatatgaaccatctcattgacattggtgttgcagggttcagaattgatgcttccaagcacatgtggcctggagacataaaggcaattttggacaaactgcataatctaaacagtaactggttcccggaaggtagtaaacctttcatttaccaggaggtaattgatctgggtggtgagccaattaaaagcagtgactactttggtaatggccgggtgacagaattcaagtatggtgcaaaactcggcacagttattcgcaagtggaatggagagaagatgtcttacttaaagaactggggagaaggttggggtttcatgccttctgacagagcgcttgtctttgtggataaccatgacaatcaacgaggacatggcgctggaggagcctctatacttaccttctgggatgctaggctgtacaaaatggcagttggatttatgcttgctcatccttatggatttacacgagtaatgtcaagctaccgttggccaagatattttgaaaatggaaaagatgttaatgattgggttgggccaccaaatgataatggagtaactaaagaagttactattaatccagacactacttgtggcaatgactgggtctgtgaacatcgatggcgccaaataaggaacatggttaatttccgcaatgtagtggatggccagccttttacaaactggtatgataatgggagcaaccaagtggcttttgggagaggaaacagaggattcattgttttcaacaatgatgactggacattttctttaactttgcaaactggtcttcctgctggcacatactgtgatgtcatttctggagataaaattaatggcaactgcacaggcattaaaatctacgtttctgatgatggcaaagctcatttttctattagtaactctgctgaagatccatttattgcaattcatgctgaatctaaattgtaaaatttaaaattaaatgcaaatccgcaaagcaata

SEQ ID NO: 106933 - DNA, 1363 bp, Homo sapiens
  Payload ID: 1002
  Gene Symbol: AMY1B
  Gene Name: amylase, alpha 1B (salivary)
  ENST ID: ENST00000446703
  CDS Start-End: 686-1363
atgcacccgtggtcagggagaaacagaatacggaagggagtttcacaatgttcttctatacaatgtctggaatctatgaataacatcggcttctaaatcataagttgatttgtaactactgggtttaggccaaccaggcccaggcctggttttgtgcctttgattttgcttccttgttgtttttactgaatagaaaacaatataaaacaagaggacagggtctttctctcttctcaatatcagcactggattgtagaacttgttgctgattttggcctggcattcaagttaactcttccccttggtatctgtacatacctttgatgtcagtgtttagtacacgtggcttggtcacttcatggctaaaaacgtgcttgtggaagacaagtctggcttggtgagtctgtgtggtcagcagtctctgatccgtgcagggtattaatgtgtcagggctgagtgttctgagatttatctagaggctgggaagggctcctgaaccagttgtttccgtcttgtcggtctgtcagggttggaaagtccaagccataggacccagtttcctttcttagcttacgttatctaccagagcaccgtgggctgttacttgccttgagttggaagcggttcgcatttataccggaatataaatagtttctggaaaggacactgacaacttcaaagcaaaatgaagctcttttggttgcttttcaccattgggttctgctgggctcagtattcctcaaatacacaacaaggacgaacatctattgttcatctgtttgaatggcgatgggttgatattgctcttgaatgtgagcgatatttagctcccaagggatttggaggggttcaggtctctccaccaaatgaaaatgttgccattcacaaccctttcagaccttggtgggaaagataccaaccagttagctataaattatgcacaagatctggaaatgaagatgaatttagaaacatggtgactagatgcaacaatgttggggttcgtatttatgtggatgctgtaattaatcatatgtgtggtaatgctgtgagtgcaggaacaagcagtacctgtggaagttacttcaaccctggaagtagggactttccagcagtcccatattctggatgggattttaatgatggtaaatgtaaaactggaagtggagatatcgagaactataatgatgctactcaggtcagagattgtcgtctgtctggtcttctcgatcttgcactggggaaggattatgtgcgttctaagattgccgaatatatgaaccatctcattgacattggtgttgcagggttcagaattgatgcttccaagcacatgtggcctggagacataaaggcaattttg

SEQ ID NO: 106934 - DNA, 403 bp, Homo sapiens; identical to SEQ ID NO: 106930
  Payload ID: 1002
  Gene Symbol: AMY1B
  Gene Name: amylase, alpha 1B (salivary)
  ENST ID: ENST00000425410
  CDS Start-End: 89-403

SEQ ID NO: 106935 - DNA, 1632 bp, Homo sapiens
  Payload ID: 1003
  Gene Symbol: AMY1C
  Gene Name: amylase, alpha 1C (salivary)
  Uniprot ID: P04745
  ENST ID: ENST00000370079
  CDS Start-End: 65-1600
aaaatgtgcttcttacaggaatataaatagtttctggaaaggacactgacaacttcaaagcaaaatgaagctcttttggttgcttttcaccattgggttctgctgggctcagtattcctcaaatacacaacaaggacgaacatctattgttcatctgtttgaatggcgatgggttgatattgctcttgaatgtgagcgatatttagctcccaagggatttggaggggttcaggtctctccaccaaatgaaaatgttgccattcacaaccctttcagaccttggtgggaaagataccaaccagttagctataaattatgcacaagatctggaaatgaagatgaatttagaaacatggtgactagatgcaacaatgttggggttcgtatttatgtggatgctgtaattaatcatatgtgtggtaatgctgtgagtgcaggaacaagcagtacctgtggaagttacttcaaccctggaagtagggactttccagcagtcccatattctggatgggattttaatgatggtaaatgtaaaactggaagtggagatatcgagaactataatgatgctactcaggtcagagattgtcgtctgtctggtcttctcgatcttgcactggggaaggattatgtgcgttctaagattgccgaatatatgaaccatctcattgacattggtgttgcagggttcagaattgatgcttccaagcacatgtggcctggagacataaaggcaattttggacaaactgcataatctaaacagtaactggttcccggaaggtagtaaacctttcatttaccaggaggtaattgatctgggtggtgagccaattaaaagcagtgactactttggtaatggccgggtgacagaattcaagtatggtgcaaaactcggcacagttattcgcaagtggaatggagagaagatgtcttacttaaagaactggggagaaggttggggtttcatgccttctgacagagcgcttgtctttgtggataaccatgacaatcaacgaggacatggcgctggaggagcctctatacttaccttctgggatgctaggctgtacaaaatggcagttggatttatgcttgctcatccttatggatttacacgagtaatgtcaagctaccgttggccaagatattttgaaaatggaaaagatgttaatgattgggttgggccaccaaatgataatggagtaactaaagaagttactattaatccagacactacttgtggcaatgactgggtctgtgaacatcgatggcgccaaataaggaacatggttaatttccgcaatgtagtggatggccagccttttacaaactggtatgataatgggagcaaccaagtggcttttgggagaggaaacagaggattcattgttttcaacaatgatgactggacattttctttaactttgcaaactggtcttcctgctggcacatactgtgatgtcatttctggagataaaattaatggcaactgcacaggcattaaaatctacgtttctgatgatggcaaagctcatttttctattagtaactctgctgaagatccatttattgcaattcatgctgaatctaaattgtaaaatttaaaattaaatgcaaatccgcaaagcaa

SEQ ID NO: 106936 - DNA, 626 bp, Homo sapiens
  Payload ID: 1004
  Gene Symbol: AMY2A
  Gene Name: amylase, alpha 2A (pancreatic)
  ENST ID: ENST00000423678
  CDS Start-End: 1-626
gttctttctgttgcttttcaccattgggttctgctgggctcagtattccccaaatacacaacaaggacggacatctattgttcatctgtttgaatggcgatgggttgatattgctcttgaatgtgagcgatatttagctccgaagggatttggaggggttcaggtctctccaccaaatgaaaatgttgcaatttacaaccctttcagaccttggtgggaaagataccaaccagttagctataaattatgcacaagatctggaaatgaagatgaatttagaaacatggtgactagatgtaacaatgttggggttcgtatttatgtggatgctgtaattaatcatatgtgtggtaacgctgtgagtgcaggaacaagcagtacctgtggaagttacttcaaccctggaagtagggactttccagcagtcccatattctggatgggatttcaatgatggtaaatgtaaaactggaagtggagatatcgagaactacaatgatgctactcaggtaattgatctgggtggtgagccaattaaaagcagtgactactttggtaatggccgggtgacagaattcaagtatggtgcaaaactcggcacagttattcgcaagtggaatggagaga

SEQ ID NO: 106937 - DNA, 1634 bp, Homo sapiens
  Payload ID: 1004
  Gene Symbol: AMY2A
  Gene Name: amylase, alpha 2A (pancreatic)
  Uniprot ID: P04746
  ENST ID: ENST00000414303
  CDS Start-End: 65-1600
aaaatgtgcttcttacaggaatataaatagtttctggaaaggacactgacaacttcaaagcaaaatgaagttctttctgttgcttttcaccattgggttctgctgggctcagtattccccaaatacacaacaaggacggacatctattgttcatctgtttgaatggcgatgggttgatattgctcttgaatgtgagcgatatttagctccgaagggatttggaggggttcaggtctctccaccaaatgaaaatgttgcaatttacaaccctttcagaccttggtgggaaagataccaaccagttagctataaattatgcacaagatctggaaatgaagatgaatttagaaacatggtgactagatgtaacaatgttggggttcgtatttatgtggatgctgtaattaatcatatgtgtggtaacgctgtgagtgcaggaacaagcagtacctgtggaagttacttcaaccctggaagtagggactttccagcagtcccatattctggatgggatttcaatgatggtaaatgtaaaactggaagtggagatatcgagaactacaatgatgctactcaggtcagagattgtcgtctgactggtcttcttgatcttgcactggagaaggattacgtgcgttctaagattgccgaatatatgaaccatctcattgacattggtgttgcagggttcagacttgatgcttccaagcacatgtggcctggagacataaaggcaattttggacaaactgcataatctaaacagtaactggttccctgcaggaagtaaacctttcatttaccaggaggtaattgatctgggtggtgagccaattaaaagcagtgactactttggtaatggccgggtgacagaattcaagtatggtgcaaaactcggcacagttattcgcaagtggaatggagagaagatgtcttacttaaagaactggggagaaggttggggtttcgtaccttctgacagagcgcttgtctttgtggataaccatgacaatcaacgaggacatggggctggaggagcctctattcttaccttctgggatgctaggctgtacaaaatggcagttggatttatgcttgctcatccttacggatttacacgagtaatgtcaagctaccgttggccaagacagtttcaaaatggaaacgatgttaatgattgggttgggccaccaaataataatggagtaattaaagaagttactattaatccagacactacttgtggcaatgactgggtctgtgaacatcgatggcgccaaataaggaacatggttattttccgcaatgtagtggatggccagccttttacaaattggtatgataatgggagcaaccaagtggcttttgggagaggaaacagaggattcattgttttcaacaatgatgactggtcattttctttaactttgcaaactggtcttcctgctggcacatactgtgatgtcatttctggagataaaattaatggcaattgcacaggcattaaaatttacgtttctgatgatggcaaagctcatttttctattagtaactctgctgaagatccatttattgcaattcatgctgaatctaaattgtaaaatttaaaattaaatgcatgtcctcaaaacaata

SEQ ID NO: 106938 - DNA, 1862 bp, Homo sapiens
  Payload ID: 1004
  Gene Symbol: AMY2A
  Gene Name: amylase, alpha 2A (pancreatic)
  Uniprot ID: P04746
  ENST ID: ENST00000622339
  CDS Start-End: 296-1831
tggctcggtgagtctgtgcggccagcagtctctgatctgtacagggtattaatgtgtcagggctgagtgttctgggatttgtctagaggctggtaagggcttctggaccacttgtttctgtcctgtcagtctgtcagggttggaaagtccaagccataggacccagtttcctttcttagcttacgttatctaccagagcaccgtgggctgttacttaccttgagttggaaggggttcgcatttatacctgaatataaatagtttctggaaaggacactgacaacttcaaagcaaaatgaagttctttctgttgcttttcaccattgggttctgctgggctcagtattccccaaatacacaacaaggacggacatctattgttcatctgtttgaatggcgatgggttgatattgctcttgaatgtgagcgatatttagctccgaagggatttggaggggttcaggtctctccaccaaatgaaaatgttgcaatttacaaccctttcagaccttggtgggaaagataccaaccagttagctataaattatgcacaagatctggaaatgaagatgaatttagaaacatggtgactagatgtaacaatgttggggttcgtatttatgtggatgctgtaattaatcatatgtgtggtaacgctgtgagtgcaggaacaagcagtacctgtggaagttacttcaaccctggaagtagggactttccagcagtcccatattctggatgggatttcaatgatggtaaatgtaaaactggaagtggagatatcgagaactacaatgatgctactcaggtcagagattgtcgtctgactggtcttcttgatcttgcactggagaaggattacgtgcgttctaagattgccgaatatatgaaccatctcattgacattggtgttgcagggttcagacttgatgcttccaagcacatgtggcctggagacataaaggcaattttggacaaactgcataatctaaacagtaactggttccctgcaggaagtaaacctttcatttaccaggaggtaattgatctgggtggtgagccaattaaaagcagtgactactttggtaatggccgggtgacagaattcaagtatggtgcaaaactcggcacagttattcgcaagtggaatggagagaagatgtcttacttaaagaactggggagaaggttggggtttcgtaccttctgacagagcgcttgtctttgtggataaccatgacaatcaacgaggacatggggctggaggagcctctattcttaccttctgggatgctaggctgtacaaaatggcagttggatttatgcttgctcatccttacggatttacacgagtaatgtcaagctaccgttggccaagacagtttcaaaatggaaacgatgttaatgattgggttgggccaccaaataataatggagtaattaaagaagttactattaatccagacactacttgtggcaatgactgggtctgtgaacatcgatggcgccaaataaggaacatggttattttccgcaatgtagtggatggccagccttttacaaattggtatgataatgggagcaaccaagtggcttttgggagaggaaacagaggattcattgttttcaacaatgatgactggtcattttctttaactttgcaaactggtcttcctgctggcacatactgtgatgtcatttctggagataaaattaatggcaattgcacaggcattaaaatttacgtttctgatgatggcaaagctcatttttctattagtaactctgctgaagatccatttattgcaattcatgctgaatctaaattgtaaaatttaaaattaaatgcatgtcctcaaaaca

SEQ ID NO: 106939 - DNA, 2181 bp, Homo sapiens
  Payload ID: 1005
  Gene Symbol: AMY2B
  Gene Name: amylase, alpha 2B (pancreatic)
  Uniprot ID: P19961
  ENST ID: ENST00000361355
  CDS Start-End: 617-2152
ggaaaataaagggttggagcctctgtgtttctttgttgaaaaatctgctactattattagatctgtgaaaacaattgaaaattcggttattatcaccttaaaagtacaaaacctatagattttgaaaatgtaattatttttctgtaggcatagttaaaaagattttgtaaatgttataaatcagtttctttataagcggtttatttagataaattttgttatactgacatgattcactaattttctaaatataaatggttcagctcttagttatttttaaactaatgacctgtgttatacttcctatttttaatgggcttttatgatgttttaggtttttttgaatcccgtgtccttcaagtgctttctaactttgagaggaagaaattgaccacctggactatggaactttggttgaatctggcgatgtggaacccatggatatggagggctgactatatacaccatgttttttcctggcacatcactcaactactattagctggcgagtcaactcacgttgttggaatgactagggacaactagacttcaagtgatctttcatcccaggaatataaatagtttctggaaaggacactgacaacttcaaagcaaaatgaagttctttctgttgcttttcaccattgggttctgctgggctcagtattccccaaatacacaacaaggacggacatctattgttcatctgtttgaatggcgatgggttgatattgctcttgaatgtgagcgatatttagctcccaagggatttggaggggttcaggtctctccaccaaatgaaaatgttgcaattcacaaccctttcagaccttggtgggaaagataccaaccagttagctataaattatgcacaagatctggaaatgaagatgaatttagaaacatggtgactagatgtaacaatgttggggttcgtatttatgtggatgctgtaattaatcatatgtctggtaatgctgtgagtgcaggaacaagcagtacctgtggaagttacttcaaccctggaagtagggactttccagcagtcccatattctggatgggattttaatgatggtaaatgtaaaactggaagtggagatatcgagaactacaatgatgctactcaggtcagagattgtcgtctggttggtcttcttgatcttgcactggagaaagattatgtgcgttccaagattgccgaatatatgaatcatctcattgacattggtgttgcagggttcagacttgatgcttccaagcacatgtggcctggagacataaaggcaattttggacaaactgcataatctaaacagtaactggttccctgcaggaagtaaacctttcatttaccaggaggtaattgatctgggtggtgagccaattaaaagcagtgactactttggaaatggccgggtgacagaattcaagtatggtgcaaaactcggcacagttattcgcaagtggaatggagagaagatgtcttacctaaagaactggggagaaggttggggtttcatgccttctgacagagcacttgtctttgtggataaccatgacaatcaacgaggacatggggctggaggagcctctattcttaccttctgggatgctaggctgtataaaatggcagttggatttatgcttgctcatccttatggttttacacgagtaatgtcaagctaccgttggccaagacagtttcaaaatggaaacgatgttaatgattgggttgggccaccaaataataatggagtaattaaagaagttactattaatccagacactacttgtggcaatgactgggtctgtgaacatcgatggcgccaaataaggaacatggttaatttccgcaatgtagtggatggccagccttttacaaactggtatgataatgggagcaaccaagtggcttttgggagaggaaacagaggattcattgttttcaacaatgatgactggacattttctttaactttgcaaactggtcttcctgctggcacatactgtgatgtcatttctggagataaaattaatggcaattgcacaggcattaaaatctacgtttctgacgatggcaaagctcatttttctattagtaactctgctgaggatccatttattgcaattcatgctgaatctaaattataaaatttaaaattaaatgcatatcctcaaaa

SEQ ID NO: 106940 - DNA, 832 bp, Homo sapiens
  Payload ID: 1005
  Gene Symbol: AMY2B
  Gene Name: amylase, alpha 2B (pancreatic)
  ENST ID: ENST00000435302
  CDS Start-End: 545-832
gagatatagtgtagtaagaagaggtggcagggcagcaaactgagcagaggagagaagacagtggtttgcttaggaaacaggagtgtggtgatcaacctgttgtaatactggagttcagagaagattccttgtacaaatctgatttggagaattggagtaggactctagggccacatattgaaagtaagaggttatagaaaatctataagattctaaattcagcaattttttttccaactgaagaaaaagcaaaaccagaactgtgagatttttattttatgattgtaaaacactcaactgtgggtttgggagattgctgattgagagaagttaatgtgttggttgaatctggcgatgtggaacccatggatatggagggctgactatatacaccatgttttttcctggcacatcactcaactactattagctggcgagtcaactcacgttgttggaatgactagggacaactagacttcaagtgatctttcatcccaggaatataaatagtttctggaaaggacactgacaacttcaaagcaaaatgaagttctttctgttgcttttcaccattgggttctgctgggctcagtattccccaaatacacaacaaggacggacatctattgttcatctgtttgaatggcgatgggttgatattgctcttgaatgtgagcgatatttagctcccaagggatttggaggggttcaggtctctccaccaaatgaaaatgttgcaattcacaaccctttcagaccttggtgggaaagataccaaccagttagctataaattatgcacaagatctggaaatgaagatgaatttagaaac

SEQ ID NO: 106941 - DNA, 869 bp, Homo sapiens
  Payload ID: 1005
  Gene Symbol: AMY2B
  Gene Name: amylase, alpha 2B (pancreatic)
  ENST ID: ENST00000453959
  CDS Start-End: 611-869
caccaagtctgttatatctcccctctctgttttacataaacatttcccctctattccaggggtatatgttccaagacccccagcaggtgcctgaaaccacagatagtaccaagccttttgcagtcatctctccagtatctgtgggggattggttccaggacctcccatggataccaaaatctacagatgctcaagtgccttatataaaatagcatagtatttgcatataaccaatgcacatcctcctgtatactttaaatcatctctatattgctagagatgtaatatctactgtaatataaatgctatgcagatagttacattgtttagggaataatgacagaaaagtctatatgttcagtacagatgcaactatccttctttaaaaatatgttcttccacagttggttgaatctggcgatgtggaacccatggatatggagggctgactatatacaccatgttttttcctggcacatcactcaactactattagctggcgagtcaactcacgttgttggaatgactagggacaactagacttcaagtgatctttcatcccaggaatataaatagtttctggaaaggacactgacaacttcaaagcaaaatgaagttctttctgttgcttttcaccattgggttctgctgggctcagtattccccaaatacacaacaaggacggacatctattgttcatctgtttgaatggcgatgggttgatattgctcttgaatgtgagcgatatttagctcccaagggatttggaggggttcaggtctctccaccaaatgaaaatgttgcaattcacaaccctttcagaccttggtgggaaagataccaaccagttagctataaattatgcacaa

SEQ ID NO: 106942 - DNA, 2788 bp, Homo sapiens
  Payload ID: 1005
  Gene Symbol: AMY2B
  Gene Name: amylase, alpha 2B (pancreatic)
  Uniprot ID: P19961
  ENST ID: ENST00000477657
  CDS Start-End: 1342-2454
agtgaatctcttttgacatagatagcaatagaagtatctttcttctttcccctttctttttctaaacaagagaagaaaagcgtaatagaggggagaacacataatgcccactaagggtagtgcattaaggaaaaacagtcttggcaggtatataggaatagtggtttccagactggttgatgaccgtaatcaccaagaacagtggttctcagtcttggctgcacattgcagtgatctggaacttaaatactaattttaaaagggtgcagtggctcatacctgtaatcccagcactttgcaagtccgagatgggagaatcacttgagcccaggagtttgagaccagcctgggcaatgtagggagaccctgtccctacaaaaaatacaaaaattagccaagtgtggtggcttgcacctctggtctcagctacttgggatgctaaggcaggaggattacttgagccccagaggttgaggttgcagtgaaccatgatcacaccactgcattctagcctgggtgacagagtgagaccctctccctcctaaaaaaatccttaagaaatatattgatgcttggttcctttggtcagaattttgatttaaggtgttgggagtgtagcacagatgttggaataaacctctcaaactgattttaatatacaaacaaggtcgagaaccaccaaggaagagtttttatgcataaagattcctgtactctaccctagaactaatacatctgaatctctgggaatggagtataacaatcagatttgaaaaggtttctttagtaattttaaggactgaccagtttagacactgctttgttagagtaaaatgattaggtacctagtatcaacctagccatccaaccttatattaataactaggaaaataaagggttggagcctctgtgtttctttgttgaaaaatctgctactattattagatctgtgaaaacaattgaaaattcggttattatcaccttaaaagtacaaaacctatagattttgaaaatgtaattatttttctgtaggcatagttaaaaagattttgtaaatgttataaatcagtttctttataagcggtttatttagataaattttgttatactgacatgattcactaattttctaaatataaatggttcagctcttagttatttttaaactaatgacctgtgttatacttcctatttttaatgggcttttatgatgttttaggtttttttgaatcccgtgtccttcaagtgctttctaactttgagaggaagaaattgaccacctggactatggaactgaatataaatagtttctggaaaggacactgacaacttcaaagcaaaatgaagttctttctgttgcttttcaccattgggttctgctgggctcagtattccccaaatacacaacaaggacggacatctattgttcatctgtttgaatggcgatgggttgatattgctcttgaatgtgagcgatatttagctcccaagggatttggaggggttcaggtctctccaccaaatgaaaatgttgcaattcacaaccctttcagaccttggtgggaaagataccaaccagttagctataaattatgcacaagatctggaaatgaagatgaatttagaaacatggtgactagatgtaacaatgttggggttcgtatttatgtggatgctgtaattaatcatatgtctggtaatgctgtgagtgcaggaacaagcagtacctgtggaagttacttcaaccctggaagtagggactttccagcagtcccatattctggatgggattttaatgatggtaaatgtaaaactggaagtggagatatcgagaactacaatgatgctactcaggtcagagattgtcgtctggttggtcttcttgatcttgcactggagaaagattatgtgcgttccaagattgccgaatatatgaatcatctcattgacattggtgttgcagggttcagacttgatgcttccaagcacatgtggcctggagacataaaggcaattttggacaaactgcataatctaaacagtaactggttccctgcaggaagtaaacctttcatttaccaggaggtaattgatctgggtggtgagccaattaaaagcagtgactactttggaaatggccgggtgacagaattcaagtatggtgcaaaactcggcacagttattcgcaagtggaatggagagaagatgtcttacctaaagaactggggagaaggttggggtttcatgccttctgacagagcacttgtctttgtggataaccatgacaatcaacgaggacatggggctggaggagcctctattcttaccttctgggatgctaggctgtataaaatggcagttggatttatgcttgctcatccttatggttttacacgagtaatgtcaagctaccgttggccaagacagtttcaaaatggaaacgaacatggttaatttccgcaatgtagtggatggccagccttttacaaactggtatgataatgggagcaaccaagtggcttttgggagaggaaacagaggattcattgttttcaacaatgatgactggacattttctttaactttgcaaactggtcttcctgctggcacatactgtgatgtcatttctggagataaaattaatggcaattgcacaggcattaaaatctacgtttctgacgatggcaaagctcatttttctattagtaactctgctgaggatccatttattgcaattcatgctgaatctaaattataaaatttaaaattaaatgcatatcctcaaaac

SEQ ID NO: 106943 - DNA, 1736 bp, Homo sapiens
  Payload ID: 1005
  Gene Symbol: AMY2B
  Gene Name: amylase, alpha 2B (pancreatic)
  Uniprot ID: P19961
  ENST ID: ENST00000610648
  CDS Start-End: 171-1706
tcggtctgtcagggttggaaagtccaagccataggacccagtttcctttcttagcttctgttgtctgccagaacaccatgggctgttactcgccttgagttggaagcggtttgcatttatacctgaatataaatagtttctggaaaggacactgacaacttcaaagcaaaatgaagttctttctgttgcttttcaccattgggttctgctgggctcagtattccccaaatacacaacaaggacggacatctattgttcatctgtttgaatggcgatgggttgatattgctcttgaatgtgagcgatatttagctcccaagggatttggaggggttcaggtctctccaccaaatgaaaatgttgcaattcacaaccctttcagaccttggtgggaaagataccaaccagttagctataaattatgcacaagatctggaaatgaagatgaatttagaaacatggtgactagatgtaacaatgttggggttcgtatttatgtggatgctgtaattaatcatatgtctggtaatgctgtgagtgcaggaacaagcagtacctgtggaagttacttcaaccctggaagtagggactttccagcagtcccatattctggatgggattttaatgatggtaaatgtaaaactggaagtggagatatcgagaactacaatgatgctactcaggtcagagattgtcgtctggttggtcttcttgatcttgcactggagaaagattatgtgcgttccaagattgccgaatatatgaatcatctcattgacattggtgttgcagggttcagacttgatgcttccaagcacatgtggcctggagacataaaggcaattttggacaaactgcataatctaaacagtaactggttccctgcaggaagtaaacctttcatttaccaggaggtaattgatctgggtggtgagccaattaaaagcagtgactactttggaaatggccgggtgacagaattcaagtatggtgcaaaactcggcacagttattcgcaagtggaatggagagaagatgtcttacctaaagaactggggagaaggttggggtttcatgccttctgacagagcacttgtctttgtggataaccatgacaatcaacgaggacatggggctggaggagcctctattcttaccttctgggatgctaggctgtataaaatggcagttggatttatgcttgctcatccttatggttttacacgagtaatgtcaagctaccgttggccaagacagtttcaaaatggaaacgatgttaatgattgggttgggccaccaaataataatggagtaattaaagaagttactattaatccagacactacttgtggcaatgactgggtctgtgaacatcgatggcgccaaataaggaacatggttaatttccgcaatgtagtggatggccagccttttacaaactggtatgataatgggagcaaccaagtggcttttgggagaggaaacagaggattcattgttttcaacaatgatgactggacattttctttaactttgcaaactggtcttcctgctggcacatactgtgatgtcatttctggagataaaattaatggcaattgcacaggcattaaaatctacgtttctgacgatggcaaagctcatttttctattagtaactctgctgaggatccatttattgcaattcatgctgaatctaaattataaaatttaaaattaaatgcatatcctcaaaac

SEQ ID NO: 106944 - DNA, 7446 bp, Homo sapiens
  Payload ID: 1006
  Gene Symbol: AGL
  Gene Name: amylo-alpha-1, 6-glucosidase, 4-alpha -glucanotransferase
  Uniprot ID: P35573
  ENST ID: ENST00000294724
  CDS Start-End: 479-5077
ctgtctacggcagctattccagaggcaacaactgcttccctctgttctcatctccccattggtggctggcgacccgaatttgggaatggggagattgcccacctgttatctttgagcagactaatctcttgtaagcagaagtgccattcggagtctccagagccctgtggcttggggctgggaatgtccccctgacttcaggctttcctaagtgtattgcttttctctgagaatggtctaggtttttaattttttaattgtaagaatctgtaatacagcatttttatttcggtcttattcgttgtgctcaaaggcaggaaacaactattaatttgccttctcgaatcttaatagttataagattcattctctttcattgctctgctaggcataaaacacacttcgaacatgggtaactcattcgactgtggagttcttttaattcttatgaaagatttcaaatcctctagaagccaaaatgggacacagtaaacagattcgaattttacttctgaacgaaatggagaaactggaaaagaccctcttcagacttgaacaagggtatgagctacagttccgattaggcccaactttacagggaaaagcagttaccgtgtatacaaattacccatttcctggagaaacatttaatagagaaaaattccgttctctggattgggaaaatccaacagaaagagaagatgattctgataaatactgtaaacttaatctgcaacaatctggttcatttcagtattatttccttcaaggaaatgagaaaagtggtggaggttacatagttgtggaccccattttacgtgttggtgctgataatcatgtgctacccttggactgtgttactcttcagacatttttagctaagtgtttgggaccttttgatgaatgggaaagcagacttagggttgcaaaagaatcaggctacaacatgattcattttaccccattgcagactcttggactatctaggtcatgctactcccttgccaatcagttagaattaaatcctgacttttcaagacctaatagaaagtatacctggaatgatgttggacagctagtggaaaaattaaaaaaggaatggaatgttatttgtattactgatgttgtctacaatcatactgctgctaatagtaaatggatccaggaacatccagaatgtgcctataatcttgtgaattctccacacttaaaacctgcctgggtcttagacagagcactttggcgtttctcctgtgatgttgcagaagggaaatacaaagaaaagggaatacctgctttgattgaaaatgatcaccatatgaattccatccgaaaaataatttgggaggatatttttccaaagcttaaactctgggaatttttccaagtagatgtcaacaaagcggttgagcaatttagaagacttcttacacaagaaaataggcgagtaaccaagtctgatccaaaccaacaccttacgattattcaagatcctgaatacagacggtttggctgtactgtagatatgaacattgcactaacgactttcataccacatgacaaggggccagcagcaattgaagaatgctgtaattggtttcataaaagaatggaggaattaaattcagagaagcatcgactcattaactatcatcaggaacaggcagttaattgccttttgggaaatgtgttttatgaacgactggctggccatggtccaaaactaggacctgtcactagaaagcatcctttagttaccaggtattttactttcccatttgaagagatagacttctccatggaagaatctatgattcatctgccaaataaagcttgttttctgatggcacacaatggatgggtaatgggagatgatcctcttcgaaactttgctgaaccgggttcagaagtttacctaaggagagaacttatttgctggggagacagtgttaaattacgctatgggaataaaccagaggactgtccttatctctgggcacacatgaaaaaatacactgaaataactgcaacttatttccagggagtacgtcttgataactgccactcaacacctcttcacgtagctgagtacatgttggatgctgctaggaatttgcaacccaatttatatgtagtagctgaactgttcacaggaagtgaagatctggacaatgtctttgttactagactgggcattagttccttaataagagaggcaatgagtgcatataatagtcatgaagagggcagattagtttaccgatatggaggagaacctgttggatcctttgttcagccctgtttgaggcctttaatgccagctattgcacatgccctgtttatggatattacgcatgataatgagtgtcctattgtgcatagatcagcgtatgatgctcttccaagtactacaattgtttctatggcatgttgtgctagtggaagtacaagaggctatgatgaattagtgcctcatcagatttcagtggtttctgaagaacggttttacactaagtggaatcctgaagcattgccttcaaacacaggtgaagttaatttccaaagcggcattattgcagccaggtgtgctatcagtaaacttcatcaggagcttggagccaagggttttattcaggtgtatgtggatcaagttgatgaagacatagtggcagtaacaagacactcacctagcatccatcagtctgttgtggctgtatctagaactgctttcaggaatcccaagacttcattttacagcaaggaagtgcctcaaatgtgcatccctggcaaaattgaagaagtagttcttgaagctagaactattgagagaaacacgaaaccttataggaaggatgagaattcaatcaatggaacaccagatatcacagtagaaattagagaacatattcagcttaatgaaagtaaaattgttaaacaagctggagttgccacaaaagggcccaatgaatatattcaagaaatagaatttgaaaacttgtctccaggaagtgttattatattcagagttagtcttgatccacatgcacaagtcgctgttggaattcttcgaaatcatctgacacaattcagtcctcactttaaatctggcagcctagctgttgacaatgcagatcctatattaaaaattccttttgcttctcttgcctccagattaactttggctgagctaaatcagatcctttaccgatgtgaatcagaagaaaaggaagatggtggagggtgctatgacataccaaactggtcagcccttaaatatgcaggtcttcaaggtttaatgtctgtattggcagaaataagaccaaagaatgacttggggcatcctttttgtaataatttgagatctggagattggatgattgactatgtcagtaaccggcttatttcacgatcaggaactattgctgaagttggtaaatggttgcaggctatgttcttctacctgaagcagatcccacgttaccttatcccatgttactttgatgctatattaattggtgcatataccactcttctggatacagcatggaagcagatgtcaagctttgttcagaatggttcaacctttgtgaaacacctttcattgggttcagttcaactgtgtggagtaggaaaattcccttccctgccaattctttcacctgccctaatggatgtaccttataggttaaatgagatcacaaaagaaaaggagcaatgttgtgtttctctagctgcaggcttacctcatttttcttctggtattttccgctgctggggaagggatacttttattgcacttagaggtatactgctgattactggacgctatgtagaagccaggaatattattttagcatttgcgggtaccctgaggcatggtctcattcctaatctactgggtgaaggaatttatgccagatacaattgtcgggatgctgtgtggtggtggctgcagtgtatccaggattactgtaaaatggttccaaatggtctagacattctcaagtgcccagtttccagaatgtatcctacagatgattctgctcctttgcctgctggcacactggatcagccattgtttgaagtcatacaggaagcaatgcaaaaacacatgcagggcatacagttccgagaaaggaatgctggtccccagatagatcgaaacatgaaggacgaaggttttaatataactgcaggagttgatgaagaaacaggatttgtttatggaggaaatcgtttcaattgtggcacatggatggataaaatgggagaaagtgacagagctagaaacagaggaatcccagccacaccaagagatgggtctgctgtggaaattgtgggcctgagtaaatctgctgttcgctggttgctggaattatccaaaaaaaatattttcccttatcatgaagtcacagtaaaaagacatggaaaggctataaaggtctcatatgatgagtggaacagaaaaatacaagacaactttgaaaagctatttcatgtttccgaagacccttcagatttaaatgaaaagcatccaaatctggttcacaaacgtggcatatacaaagatagttatggagcttcaagtccttggtgtgactatcagctcaggcctaattttaccatagcaatggttgtggcccctgagctctttactacagaaaaagcatggaaagctttggagattgcagaaaaaaaattgcttggtccccttggcatgaaaactttagatccagatgatatggtttactgtggaatttatgacaatgcattagacaatgacaactacaatcttgctaaaggtttcaattatcaccaaggacctgagtggctgtggcctattgggtattttcttcgtgcaaaattatatttttccagattgatgggcccggagactactgcaaagactatagttttggttaaaaatgttctttcccgacattatgttcatcttgagagatccccttggaaaggacttccagaactgaccaatgagaatgcccagtactgtcctttcagctgtgaaacacaagcctggtcaattgctactattcttgagacactttatgatttatagtttattacagatattaagtatgcaattacttgtattataggatgcaaggtcatcatatgtaaatgccttatatgcacaggctcaagttgttttaaaaatctcatttattataatattgatgctcaattaggtaagattgtaaaagcattgattttttttaatgtacagaggtagatttcaatttgaatcagaaagaaatatcattaccaatgaaatgtgtttgagttcagtaagaattattcaaatgcctagaaatccatagtttggaaaagaaaaatcatgtcatcttctatttgtacagaaatgaaaataaaatatgaaaataatgaaagaaatgaaaagatagcttttaattgtggtatatataatcttcagtaacaatacatactgaatacgctgtggttcattaatattaacaccacgtactatagtattcttaatacagtgctcactgcatttaataaatatttaataaatgatgaatgatagaagtttccatctacaatatatgttcctaaatggagcacagatgttcaaactatgctttcattttttcactgatatattaatttttgtgtaatgaatgccaacagtatattttatatgatttacttatgtgaggaaacatgcaaagcattaggaaatttatttcctaaaaacagttttgtaaaattagtattgagttctattgagtattataagatagcttacattttcaaaatggaaattgtcggtcatatttctagaactttaaagaaaaaagaatgttatattagttttctaaaactcaactatctttagtcatgttcaaaaatctattgctagatcatagtagatactggttttctattaactcaaaacctacattgacaagtttaacattgagaagaatcttaacaaaaatatggatatgaattcagtagatatcttaaattcaataaaatcactggaagtttttcatgataacttattttaagatgccttaaaaatcttaaagtcacaaaaggaaaaaggtttttaacatttacatgagttaacattttttcatagaacttatttcctagatagaattttttactgttttttactgttttcttaagaaaacagttaaatcattatgcattcagttggaagaaagtagtggcaagaattctttcattgctatataatattcagtggctcatttatacctaataaaataatggtattttaaaataatgctactttcaaagtagcatttttttagttagtttacaggttacatacccaaaaccttaactatgactaagaaattaaagaagaaaaccagcaaactaaaacttctgggcagcaaaaatatataaatgcttcagatgtcaaatacccatgcttgaaagctcgtgtaatttactttaagattatctgcctgctcttcttcaaagctgaccttgctttagaaatagttttaactagcttagttttctggtttccaaaactaaaatagattaaatcctacaaatttaaggacagttgtgacagtaatctgaccactatctataaatacattggacattggtttccaaatctccctttcttcttcagttccttccttgttcaatatatacccttctctaaactgtgcgggtaaaaggaatgactgtccttgagagaaccattagtttatcaaaggtttatgtagttttgttgctgtaccctaactttgatattcagggaggtaggaaaggtaacagaaaaccagcatatttaatcaaagcaagaagtaatcgctgacagttaaatgtgaccaaaaaaattaaaagttcacaatttttttaatgtagccatttggggttatctctagtaaggcagatacccacgttggtaaatttttaggatattgtgttgcactagaaaactaagtggttcatatttctaatgaggaagattaatgaaagaacattgttatattctgcgtggtatattttaaagtttaagaaggcatgttaaacattatttcctctatggtagttaaaatacagaattagatttttaacaggtgtcatttgactaaacgtttcggtagaatgcttcatacttgagtgatgctggataaggtattgtatttcaacaatggactatgccttggtttttcactaatcaaaatcaaaattactctttaacatgataaatgaatttaccagtttagtatgctgtggtattttaataagttttcaaagataattgggaaaacatgagactggtcatattgatgaatattgtaacatgtgaattgtgatccatttctgatatgtcttgaactactgtgtctagtgggcaaatgtcattgttacctctgtgtgttaagaaaataaaaatattttctaaaggtc

SEQ ID NO: 106945 - DNA, 7179 bp, Homo sapiens
  Payload ID: 1006
  Gene Symbol: AGL
  Gene Name: amylo-alpha-1, 6-glucosidase, 4-alpha -glucanotransferase
  Uniprot ID: P35573
  ENST ID: ENST00000361522
  CDS Start-End: 263-4810
tgtataagaatttgcacatcccaagttgctatgtgaataggaatgcgtttccaggggaaggagaaagagacattacagagcagacagctctatgatgtttactatacttgctaaaatgtgaaattcagctaaattggaatacaaagtagtgccaaaacagcattaggtttgcggagttattttaaacataattgaaaaatcaaggttttttaatactttaaataaaacatctgtttttcaatgtggtaatttaagtcctacgatgagtttattaacatgtgctttttatttagggtatgagctacagttccgattaggcccaactttacagggaaaagcagttaccgtgtatacaaattacccatttcctggagaaacatttaatagagaaaaattccgttctctggattgggaaaatccaacagaaagagaagatgattctgataaatactgtaaacttaatctgcaacaatctggttcatttcagtattatttccttcaaggaaatgagaaaagtggtggaggttacatagttgtggaccccattttacgtgttggtgctgataatcatgtgctacccttggactgtgttactcttcagacatttttagctaagtgtttgggaccttttgatgaatgggaaagcagacttagggttgcaaaagaatcaggctacaacatgattcattttaccccattgcagactcttggactatctaggtcatgctactcccttgccaatcagttagaattaaatcctgacttttcaagacctaatagaaagtatacctggaatgatgttggacagctagtggaaaaattaaaaaaggaatggaatgttatttgtattactgatgttgtctacaatcatactgctgctaatagtaaatggatccaggaacatccagaatgtgcctataatcttgtgaattctccacacttaaaacctgcctgggtcttagacagagcactttggcgtttctcctgtgatgttgcagaagggaaatacaaagaaaagggaatacctgctttgattgaaaatgatcaccatatgaattccatccgaaaaataatttgggaggatatttttccaaagcttaaactctgggaatttttccaagtagatgtcaacaaagcggttgagcaatttagaagacttcttacacaagaaaataggcgagtaaccaagtctgatccaaaccaacaccttacgattattcaagatcctgaatacagacggtttggctgtactgtagatatgaacattgcactaacgactttcataccacatgacaaggggccagcagcaattgaagaatgctgtaattggtttcataaaagaatggaggaattaaattcagagaagcatcgactcattaactatcatcaggaacaggcagttaattgccttttgggaaatgtgttttatgaacgactggctggccatggtccaaaactaggacctgtcactagaaagcatcctttagttaccaggtattttactttcccatttgaagagatagacttctccatggaagaatctatgattcatctgccaaataaagcttgttttctgatggcacacaatggatgggtaatgggagatgatcctcttcgaaactttgctgaaccgggttcagaagtttacctaaggagagaacttatttgctggggagacagtgttaaattacgctatgggaataaaccagaggactgtccttatctctgggcacacatgaaaaaatacactgaaataactgcaacttatttccagggagtacgtcttgataactgccactcaacacctcttcacgtagctgagtacatgttggatgctgctaggaatttgcaacccaatttatatgtagtagctgaactgttcacaggaagtgaagatctggacaatgtctttgttactagactgggcattagttccttaataagagaggcaatgagtgcatataatagtcatgaagagggcagattagtttaccgatatggaggagaacctgttggatcctttgttcagccctgtttgaggcctttaatgccagctattgcacatgccctgtttatggatattacgcatgataatgagtgtcctattgtgcatagatcagcgtatgatgctcttccaagtactacaattgtttctatggcatgttgtgctagtggaagtacaagaggctatgatgaattagtgcctcatcagatttcagtggtttctgaagaacggttttacactaagtggaatcctgaagcattgccttcaaacacaggtgaagttaatttccaaagcggcattattgcagccaggtgtgctatcagtaaacttcatcaggagcttggagccaagggttttattcaggtgtatgtggatcaagttgatgaagacatagtggcagtaacaagacactcacctagcatccatcagtctgttgtggctgtatctagaactgctttcaggaatcccaagacttcattttacagcaaggaagtgcctcaaatgtgcatccctggcaaaattgaagaagtagttcttgaagctagaactattgagagaaacacgaaaccttataggaaggatgagaattcaatcaatggaacaccagatatcacagtagaaattagagaacatattcagcttaatgaaagtaaaattgttaaacaagctggagttgccacaaaagggcccaatgaatatattcaagaaatagaatttgaaaacttgtctccaggaagtgttattatattcagagttagtcttgatccacatgcacaagtcgctgttggaattcttcgaaatcatctgacacaattcagtcctcactttaaatctggcagcctagctgttgacaatgcagatcctatattaaaaattccttttgcttctcttgcctccagattaactttggctgagctaaatcagatcctttaccgatgtgaatcagaagaaaaggaagatggtggagggtgctatgacataccaaactggtcagcccttaaatatgcaggtcttcaaggtttaatgtctgtattggcagaaataagaccaaagaatgacttggggcatcctttttgtaataatttgagatctggagattggatgattgactatgtcagtaaccggcttatttcacgatcaggaactattgctgaagttggtaaatggttgcaggctatgttcttctacctgaagcagatcccacgttaccttatcccatgttactttgatgctatattaattggtgcatataccactcttctggatacagcatggaagcagatgtcaagctttgttcagaatggttcaacctttgtgaaacacctttcattgggttcagttcaactgtgtggagtaggaaaattcccttccctgccaattctttcacctgccctaatggatgtaccttataggttaaatgagatcacaaaagaaaaggagcaatgttgtgtttctctagctgcaggcttacctcatttttcttctggtattttccgctgctggggaagggatacttttattgcacttagaggtatactgctgattactggacgctatgtagaagccaggaatattattttagcatttgcgggtaccctgaggcatggtctcattcctaatctactgggtgaaggaatttatgccagatacaattgtcgggatgctgtgtggtggtggctgcagtgtatccaggattactgtaaaatggttccaaatggtctagacattctcaagtgcccagtttccagaatgtatcctacagatgattctgctcctttgcctgctggcacactggatcagccattgtttgaagtcatacaggaagcaatgcaaaaacacatgcagggcatacagttccgagaaaggaatgctggtccccagatagatcgaaacatgaaggacgaaggttttaatataactgcaggagttgatgaagaaacaggatttgtttatggaggaaatcgtttcaattgtggcacatggatggataaaatgggagaaagtgacagagctagaaacagaggaatcccagccacaccaagagatgggtctgctgtggaaattgtgggcctgagtaaatctgctgttcgctggttgctggaattatccaaaaaaaatattttcccttatcatgaagtcacagtaaaaagacatggaaaggctataaaggtctcatatgatgagtggaacagaaaaatacaagacaactttgaaaagctatttcatgtttccgaagacccttcagatttaaatgaaaagcatccaaatctggttcacaaacgtggcatatacaaagatagttatggagcttcaagtccttggtgtgactatcagctcaggcctaattttaccatagcaatggttgtggcccctgagctctttactacagaaaaagcatggaaagctttggagattgcagaaaaaaaattgcttggtccccttggcatgaaaactttagatccagatgatatggtttactgtggaatttatgacaatgcattagacaatgacaactacaatcttgctaaaggtttcaattatcaccaaggacctgagtggctgtggcctattgggtattttcttcgtgcaaaattatatttttccagattgatgggcccggagactactgcaaagactatagttttggttaaaaatgttctttcccgacattatgttcatcttgagagatccccttggaaaggacttccagaactgaccaatgagaatgcccagtactgtcctttcagctgtgaaacacaagcctggtcaattgctactattcttgagacactttatgatttatagtttattacagatattaagtatgcaattacttgtattataggatgcaaggtcatcatatgtaaatgccttatatgcacaggctcaagttgttttaaaaatctcatttattataatattgatgctcaattaggtaagattgtaaaagcattgattttttttaatgtacagaggtagatttcaatttgaatcagaaagaaatatcattaccaatgaaatgtgtttgagttcagtaagaattattcaaatgcctagaaatccatagtttggaaaagaaaaatcatgtcatcttctatttgtacagaaatgaaaataaaatatgaaaataatgaaagaaatgaaaagatagcttttaattgtggtatatataatcttcagtaacaatacatactgaatacgctgtggttcattaatattaacaccacgtactatagtattcttaatacagtgctcactgcatttaataaatatttaataaatgatgaatgatagaagtttccatctacaatatatgttcctaaatggagcacagatgttcaaactatgctttcattttttcactgatatattaatttttgtgtaatgaatgccaacagtatattttatatgatttacttatgtgaggaaacatgcaaagcattaggaaatttatttcctaaaaacagttttgtaaaattagtattgagttctattgagtattataagatagcttacattttcaaaatggaaattgtcggtcatatttctagaactttaaagaaaaaagaatgttatattagttttctaaaactcaactatctttagtcatgttcaaaaatctattgctagatcatagtagatactggttttctattaactcaaaacctacattgacaagtttaacattgagaagaatcttaacaaaaatatggatatgaattcagtagatatcttaaattcaataaaatcactggaagtttttcatgataacttattttaagatgccttaaaaatcttaaagtcacaaaaggaaaaaggtttttaacatttacatgagttaacattttttcatagaacttatttcctagatagaattttttactgttttttactgttttcttaagaaaacagttaaatcattatgcattcagttggaagaaagtagtggcaagaattctttcattgctatataatattcagtggctcatttatacctaataaaataatggtattttaaaataatgctactttcaaagtagcatttttttagttagtttacaggttacatacccaaaaccttaactatgactaagaaattaaagaagaaaaccagcaaactaaaacttctgggcagcaaaaatatataaatgcttcagatgtcaaatacccatgcttgaaagctcgtgtaatttactttaagattatctgcctgctcttcttcaaagctgaccttgctttagaaatagttttaactagcttagttttctggtttccaaaactaaaatagattaaatcctacaaatttaaggacagttgtgacagtaatctgaccactatctataaatacattggacattggtttccaaatctccctttcttcttcagttccttccttgttcaatatatacccttctctaaactgtgcgggtaaaaggaatgactgtccttgagagaaccattagtttatcaaaggtttatgtagttttgttgctgtaccctaactttgatattcagggaggtaggaaaggtaacagaaaaccagcatatttaatcaaagcaagaagtaatcgctgacagttaaatgtgaccaaaaaaattaaaagttcacaatttttttaatgtagccatttggggttatctctagtaaggcagatacccacgttggtaaatttttaggatattgtgttgcactagaaaactaagtggttcatatttctaatgaggaagattaatgaaagaacattgttatattctgcgtggtatattttaaagtttaagaaggcatgttaaacattatttcctctatggtagttaaaatacagaattagatttttaacaggtgtcatttgactaaacgtttcggtagaatgcttcatacttgagtgatgctggataaggtattgtatttcaacaatggactatgccttggtttttcactaatcaaaatcaaaattactctttaacatgataaatgaatttaccagtttagtatgctgtggtattttaataagttttcaaagataattgggaaaacatgagactggtcatattgatgaatattgtaacatgtgaattgtgatccatttctgatatgtcttgaactactgtgtctagtgggcaaatgtcattgttacctctgtgtgttaagaaaataaaaatattttctaaaggtc

SEQ ID NO: 106946 - DNA, 7179 bp, Homo sapiens
  Payload ID: 1006
  Gene Symbol: AGL
  Gene Name: amylo-alpha-1, 6-glucosidase, 4-alpha -glucanotransferase
  Uniprot ID: P35573
  ENST ID: ENST00000361302
  CDS Start-End: 260-4810
gggtaactcattcgactgtggagttcttttaattcttatgaaagatttcaaatcctctagaagccaaaatgggacacagtaaacagattcgaattttacttctgaacgaaatggagaaactggaaaagaccctcttcagacttgaacaagaaactgggtctcactatgttgcccaggttgatattgaactcctggactcaagcaaccctccctctttggcctctgaaagtactgggattacaagcataagccaccgggcatggccccaattctgagcattaatttatttattgggtatgagctacagttccgattaggcccaactttacagggaaaagcagttaccgtgtatacaaattacccatttcctggagaaacatttaatagagaaaaattccgttctctggattgggaaaatccaacagaaagagaagatgattctgataaatactgtaaacttaatctgcaacaatctggttcatttcagtattatttccttcaaggaaatgagaaaagtggtggaggttacatagttgtggaccccattttacgtgttggtgctgataatcatgtgctacccttggactgtgttactcttcagacatttttagctaagtgtttgggaccttttgatgaatgggaaagcagacttagggttgcaaaagaatcaggctacaacatgattcattttaccccattgcagactcttggactatctaggtcatgctactcccttgccaatcagttagaattaaatcctgacttttcaagacctaatagaaagtatacctggaatgatgttggacagctagtggaaaaattaaaaaaggaatggaatgttatttgtattactgatgttgtctacaatcatactgctgctaatagtaaatggatccaggaacatccagaatgtgcctataatcttgtgaattctccacacttaaaacctgcctgggtcttagacagagcactttggcgtttctcctgtgatgttgcagaagggaaatacaaagaaaagggaatacctgctttgattgaaaatgatcaccatatgaattccatccgaaaaataatttgggaggatatttttccaaagcttaaactctgggaatttttccaagtagatgtcaacaaagcggttgagcaatttagaagacttcttacacaagaaaataggcgagtaaccaagtctgatccaaaccaacaccttacgattattcaagatcctgaatacagacggtttggctgtactgtagatatgaacattgcactaacgactttcataccacatgacaaggggccagcagcaattgaagaatgctgtaattggtttcataaaagaatggaggaattaaattcagagaagcatcgactcattaactatcatcaggaacaggcagttaattgccttttgggaaatgtgttttatgaacgactggctggccatggtccaaaactaggacctgtcactagaaagcatcctttagttaccaggtattttactttcccatttgaagagatagacttctccatggaagaatctatgattcatctgccaaataaagcttgttttctgatggcacacaatggatgggtaatgggagatgatcctcttcgaaactttgctgaaccgggttcagaagtttacctaaggagagaacttatttgctggggagacagtgttaaattacgctatgggaataaaccagaggactgtccttatctctgggcacacatgaaaaaatacactgaaataactgcaacttatttccagggagtacgtcttgataactgccactcaacacctcttcacgtagctgagtacatgttggatgctgctaggaatttgcaacccaatttatatgtagtagctgaactgttcacaggaagtgaagatctggacaatgtctttgttactagactgggcattagttccttaataagagaggcaatgagtgcatataatagtcatgaagagggcagattagtttaccgatatggaggagaacctgttggatcctttgttcagccctgtttgaggcctttaatgccagctattgcacatgccctgtttatggatattacgcatgataatgagtgtcctattgtgcatagatcagcgtatgatgctcttccaagtactacaattgtttctatggcatgttgtgctagtggaagtacaagaggctatgatgaattagtgcctcatcagatttcagtggtttctgaagaacggttttacactaagtggaatcctgaagcattgccttcaaacacaggtgaagttaatttccaaagcggcattattgcagccaggtgtgctatcagtaaacttcatcaggagcttggagccaagggttttattcaggtgtatgtggatcaagttgatgaagacatagtggcagtaacaagacactcacctagcatccatcagtctgttgtggctgtatctagaactgctttcaggaatcccaagacttcattttacagcaaggaagtgcctcaaatgtgcatccctggcaaaattgaagaagtagttcttgaagctagaactattgagagaaacacgaaaccttataggaaggatgagaattcaatcaatggaacaccagatatcacagtagaaattagagaacatattcagcttaatgaaagtaaaattgttaaacaagctggagttgccacaaaagggcccaatgaatatattcaagaaatagaatttgaaaacttgtctccaggaagtgttattatattcagagttagtcttgatccacatgcacaagtcgctgttggaattcttcgaaatcatctgacacaattcagtcctcactttaaatctggcagcctagctgttgacaatgcagatcctatattaaaaattccttttgcttctcttgcctccagattaactttggctgagctaaatcagatcctttaccgatgtgaatcagaagaaaaggaagatggtggagggtgctatgacataccaaactggtcagcccttaaatatgcaggtcttcaaggtttaatgtctgtattggcagaaataagaccaaagaatgacttggggcatcctttttgtaataatttgagatctggagattggatgattgactatgtcagtaaccggcttatttcacgatcaggaactattgctgaagttggtaaatggttgcaggctatgttcttctacctgaagcagatcccacgttaccttatcccatgttactttgatgctatattaattggtgcatataccactcttctggatacagcatggaagcagatgtcaagctttgttcagaatggttcaacctttgtgaaacacctttcattgggttcagttcaactgtgtggagtaggaaaattcccttccctgccaattctttcacctgccctaatggatgtaccttataggttaaatgagatcacaaaagaaaaggagcaatgttgtgtttctctagctgcaggcttacctcatttttcttctggtattttccgctgctggggaagggatacttttattgcacttagaggtatactgctgattactggacgctatgtagaagccaggaatattattttagcatttgcgggtaccctgaggcatggtctcattcctaatctactgggtgaaggaatttatgccagatacaattgtcgggatgctgtgtggtggtggctgcagtgtatccaggattactgtaaaatggttccaaatggtctagacattctcaagtgcccagtttccagaatgtatcctacagatgattctgctcctttgcctgctggcacactggatcagccattgtttgaagtcatacaggaagcaatgcaaaaacacatgcagggcatacagttccgagaaaggaatgctggtccccagatagatcgaaacatgaaggacgaaggttttaatataactgcaggagttgatgaagaaacaggatttgtttatggaggaaatcgtttcaattgtggcacatggatggataaaatgggagaaagtgacagagctagaaacagaggaatcccagccacaccaagagatgggtctgctgtggaaattgtgggcctgagtaaatctgctgttcgctggttgctggaattatccaaaaaaaatattttcccttatcatgaagtcacagtaaaaagacatggaaaggctataaaggtctcatatgatgagtggaacagaaaaatacaagacaactttgaaaagctatttcatgtttccgaagacccttcagatttaaatgaaaagcatccaaatctggttcacaaacgtggcatatacaaagatagttatggagcttcaagtccttggtgtgactatcagctcaggcctaattttaccatagcaatggttgtggcccctgagctctttactacagaaaaagcatggaaagctttggagattgcagaaaaaaaattgcttggtccccttggcatgaaaactttagatccagatgatatggtttactgtggaatttatgacaatgcattagacaatgacaactacaatcttgctaaaggtttcaattatcaccaaggacctgagtggctgtggcctattgggtattttcttcgtgcaaaattatatttttccagattgatgggcccggagactactgcaaagactatagttttggttaaaaatgttctttcccgacattatgttcatcttgagagatccccttggaaaggacttccagaactgaccaatgagaatgcccagtactgtcctttcagctgtgaaacacaagcctggtcaattgctactattcttgagacactttatgatttatagtttattacagatattaagtatgcaattacttgtattataggatgcaaggtcatcatatgtaaatgccttatatgcacaggctcaagttgttttaaaaatctcatttattataatattgatgctcaattaggtaagattgtaaaagcattgattttttttaatgtacagaggtagatttcaatttgaatcagaaagaaatatcattaccaatgaaatgtgtttgagttcagtaagaattattcaaatgcctagaaatccatagtttggaaaagaaaaatcatgtcatcttctatttgtacagaaatgaaaataaaatatgaaaataatgaaagaaatgaaaagatagcttttaattgtggtatatataatcttcagtaacaatacatactgaatacgctgtggttcattaatattaacaccacgtactatagtattcttaatacagtgctcactgcatttaataaatatttaataaatgatgaatgatagaagtttccatctacaatatatgttcctaaatggagcacagatgttcaaactatgctttcattttttcactgatatattaatttttgtgtaatgaatgccaacagtatattttatatgatttacttatgtgaggaaacatgcaaagcattaggaaatttatttcctaaaaacagttttgtaaaattagtattgagttctattgagtattataagatagcttacattttcaaaatggaaattgtcggtcatatttctagaactttaaagaaaaaagaatgttatattagttttctaaaactcaactatctttagtcatgttcaaaaatctattgctagatcatagtagatactggttttctattaactcaaaacctacattgacaagtttaacattgagaagaatcttaacaaaaatatggatatgaattcagtagatatcttaaattcaataaaatcactggaagtttttcatgataacttattttaagatgccttaaaaatcttaaagtcacaaaaggaaaaaggtttttaacatttacatgagttaacattttttcatagaacttatttcctagatagaattttttactgttttttactgttttcttaagaaaacagttaaatcattatgcattcagttggaagaaagtagtggcaagaattctttcattgctatataatattcagtggctcatttatacctaataaaataatggtattttaaaataatgctactttcaaagtagcatttttttagttagtttacaggttacatacccaaaaccttaactatgactaagaaattaaagaagaaaaccagcaaactaaaacttctgggcagcaaaaatatataaatgcttcagatgtcaaatacccatgcttgaaagctcgtgtaatttactttaagattatctgcctgctcttcttcaaagctgaccttgctttagaaatagttttaactagcttagttttctggtttccaaaactaaaatagattaaatcctacaaatttaaggacagttgtgacagtaatctgaccactatctataaatacattggacattggtttccaaatctccctttcttcttcagttccttccttgttcaatatatacccttctctaaactgtgcgggtaaaaggaatgactgtccttgagagaaccattagtttatcaaaggtttatgtagttttgttgctgtaccctaactttgatattcagggaggtaggaaaggtaacagaaaaccagcatatttaatcaaagcaagaagtaatcgctgacagttaaatgtgaccaaaaaaattaaaagttcacaatttttttaatgtagccatttggggttatctctagtaaggcagatacccacgttggtaaatttttaggatattgtgttgcactagaaaactaagtggttcatatttctaatgaggaagattaatgaaagaacattgttatattctgcgtggtatattttaaagtttaagaaggcatgttaaacattatttcctctatggtagttaaaatacagaattagatttttaacaggtgtcatttgactaaacgtttcggtagaatgcttcatacttgagtgatgctggataaggtattgtatttcaacaatggactatgccttggtttttcactaatcaaaatcaaaattactctttaacatgataaatgaatttaccagtttagtatgctgtggtattttaataagttttcaaagataattgggaaaacatgagactggtcatattgatgaatattgtaacatgtgaattgtgatccatttctgatatgtcttgaactactgtgtctagtgggcaaatgtcattgttacctctgtgtgttaagaaaataaaaatattttctaaaggtc

SEQ ID NO: 106947 - DNA, 7368 bp, Homo sapiens
  Payload ID: 1006
  Gene Symbol: AGL
  Gene Name: amylo-alpha-1, 6-glucosidase, 4-alpha -glucanotransferase
  Uniprot ID: P35573
  ENST ID: ENST00000361915
  CDS Start-End: 401-4999
cccggaagtgggccagaggtacggtccgctcccacctggggcgagtgcgcgcacggccaggttgggtaccgggtgcgcccaggaacccgcgcgaggcgaagtcgctgagactctgcctgcttctcacccagctgcctcggcgctgccccggtcgctcgccgcccctccctttgcccttcacggcgcccggccctccttgggctgcggcttctgtgcgaggctgggcagccagcccttccccttctgtttctccccgtcccctccccccgaccgtagcaccagagtcgcgggtcctgcagtgccccagaagccgcacgtataactccctcggcgggtaactcattcgactgtggagttcttttaattcttatgaaagatttcaaatcctctagaagccaaaatgggacacagtaaacagattcgaattttacttctgaacgaaatggagaaactggaaaagaccctcttcagacttgaacaagggtatgagctacagttccgattaggcccaactttacagggaaaagcagttaccgtgtatacaaattacccatttcctggagaaacatttaatagagaaaaattccgttctctggattgggaaaatccaacagaaagagaagatgattctgataaatactgtaaacttaatctgcaacaatctggttcatttcagtattatttccttcaaggaaatgagaaaagtggtggaggttacatagttgtggaccccattttacgtgttggtgctgataatcatgtgctacccttggactgtgttactcttcagacatttttagctaagtgtttgggaccttttgatgaatgggaaagcagacttagggttgcaaaagaatcaggctacaacatgattcattttaccccattgcagactcttggactatctaggtcatgctactcccttgccaatcagttagaattaaatcctgacttttcaagacctaatagaaagtatacctggaatgatgttggacagctagtggaaaaattaaaaaaggaatggaatgttatttgtattactgatgttgtctacaatcatactgctgctaatagtaaatggatccaggaacatccagaatgtgcctataatcttgtgaattctccacacttaaaacctgcctgggtcttagacagagcactttggcgtttctcctgtgatgttgcagaagggaaatacaaagaaaagggaatacctgctttgattgaaaatgatcaccatatgaattccatccgaaaaataatttgggaggatatttttccaaagcttaaactctgggaatttttccaagtagatgtcaacaaagcggttgagcaatttagaagacttcttacacaagaaaataggcgagtaaccaagtctgatccaaaccaacaccttacgattattcaagatcctgaatacagacggtttggctgtactgtagatatgaacattgcactaacgactttcataccacatgacaaggggccagcagcaattgaagaatgctgtaattggtttcataaaagaatggaggaattaaattcagagaagcatcgactcattaactatcatcaggaacaggcagttaattgccttttgggaaatgtgttttatgaacgactggctggccatggtccaaaactaggacctgtcactagaaagcatcctttagttaccaggtattttactttcccatttgaagagatagacttctccatggaagaatctatgattcatctgccaaataaagcttgttttctgatggcacacaatggatgggtaatgggagatgatcctcttcgaaactttgctgaaccgggttcagaagtttacctaaggagagaacttatttgctggggagacagtgttaaattacgctatgggaataaaccagaggactgtccttatctctgggcacacatgaaaaaatacactgaaataactgcaacttatttccagggagtacgtcttgataactgccactcaacacctcttcacgtagctgagtacatgttggatgctgctaggaatttgcaacccaatttatatgtagtagctgaactgttcacaggaagtgaagatctggacaatgtctttgttactagactgggcattagttccttaataagagaggcaatgagtgcatataatagtcatgaagagggcagattagtttaccgatatggaggagaacctgttggatcctttgttcagccctgtttgaggcctttaatgccagctattgcacatgccctgtttatggatattacgcatgataatgagtgtcctattgtgcatagatcagcgtatgatgctcttccaagtactacaattgtttctatggcatgttgtgctagtggaagtacaagaggctatgatgaattagtgcctcatcagatttcagtggtttctgaagaacggttttacactaagtggaatcctgaagcattgccttcaaacacaggtgaagttaatttccaaagcggcattattgcagccaggtgtgctatcagtaaacttcatcaggagcttggagccaagggttttattcaggtgtatgtggatcaagttgatgaagacatagtggcagtaacaagacactcacctagcatccatcagtctgttgtggctgtatctagaactgctttcaggaatcccaagacttcattttacagcaaggaagtgcctcaaatgtgcatccctggcaaaattgaagaagtagttcttgaagctagaactattgagagaaacacgaaaccttataggaaggatgagaattcaatcaatggaacaccagatatcacagtagaaattagagaacatattcagcttaatgaaagtaaaattgttaaacaagctggagttgccacaaaagggcccaatgaatatattcaagaaatagaatttgaaaacttgtctccaggaagtgttattatattcagagttagtcttgatccacatgcacaagtcgctgttggaattcttcgaaatcatctgacacaattcagtcctcactttaaatctggcagcctagctgttgacaatgcagatcctatattaaaaattccttttgcttctcttgcctccagattaactttggctgagctaaatcagatcctttaccgatgtgaatcagaagaaaaggaagatggtggagggtgctatgacataccaaactggtcagcccttaaatatgcaggtcttcaaggtttaatgtctgtattggcagaaataagaccaaagaatgacttggggcatcctttttgtaataatttgagatctggagattggatgattgactatgtcagtaaccggcttatttcacgatcaggaactattgctgaagttggtaaatggttgcaggctatgttcttctacctgaagcagatcccacgttaccttatcccatgttactttgatgctatattaattggtgcatataccactcttctggatacagcatggaagcagatgtcaagctttgttcagaatggttcaacctttgtgaaacacctttcattgggttcagttcaactgtgtggagtaggaaaattcccttccctgccaattctttcacctgccctaatggatgtaccttataggttaaatgagatcacaaaagaaaaggagcaatgttgtgtttctctagctgcaggcttacctcatttttcttctggtattttccgctgctggggaagggatacttttattgcacttagaggtatactgctgattactggacgctatgtagaagccaggaatattattttagcatttgcgggtaccctgaggcatggtctcattcctaatctactgggtgaaggaatttatgccagatacaattgtcgggatgctgtgtggtggtggctgcagtgtatccaggattactgtaaaatggttccaaatggtctagacattctcaagtgcccagtttccagaatgtatcctacagatgattctgctcctttgcctgctggcacactggatcagccattgtttgaagtcatacaggaagcaatgcaaaaacacatgcagggcatacagttccgagaaaggaatgctggtccccagatagatcgaaacatgaaggacgaaggttttaatataactgcaggagttgatgaagaaacaggatttgtttatggaggaaatcgtttcaattgtggcacatggatggataaaatgggagaaagtgacagagctagaaacagaggaatcccagccacaccaagagatgggtctgctgtggaaattgtgggcctgagtaaatctgctgttcgctggttgctggaattatccaaaaaaaatattttcccttatcatgaagtcacagtaaaaagacatggaaaggctataaaggtctcatatgatgagtggaacagaaaaatacaagacaactttgaaaagctatttcatgtttccgaagacccttcagatttaaatgaaaagcatccaaatctggttcacaaacgtggcatatacaaagatagttatggagcttcaagtccttggtgtgactatcagctcaggcctaattttaccatagcaatggttgtggcccctgagctctttactacagaaaaagcatggaaagctttggagattgcagaaaaaaaattgcttggtccccttggcatgaaaactttagatccagatgatatggtttactgtggaatttatgacaatgcattagacaatgacaactacaatcttgctaaaggtttcaattatcaccaaggacctgagtggctgtggcctattgggtattttcttcgtgcaaaattatatttttccagattgatgggcccggagactactgcaaagactatagttttggttaaaaatgttctttcccgacattatgttcatcttgagagatccccttggaaaggacttccagaactgaccaatgagaatgcccagtactgtcctttcagctgtgaaacacaagcctggtcaattgctactattcttgagacactttatgatttatagtttattacagatattaagtatgcaattacttgtattataggatgcaaggtcatcatatgtaaatgccttatatgcacaggctcaagttgttttaaaaatctcatttattataatattgatgctcaattaggtaagattgtaaaagcattgattttttttaatgtacagaggtagatttcaatttgaatcagaaagaaatatcattaccaatgaaatgtgtttgagttcagtaagaattattcaaatgcctagaaatccatagtttggaaaagaaaaatcatgtcatcttctatttgtacagaaatgaaaataaaatatgaaaataatgaaagaaatgaaaagatagcttttaattgtggtatatataatcttcagtaacaatacatactgaatacgctgtggttcattaatattaacaccacgtactatagtattcttaatacagtgctcactgcatttaataaatatttaataaatgatgaatgatagaagtttccatctacaatatatgttcctaaatggagcacagatgttcaaactatgctttcattttttcactgatatattaatttttgtgtaatgaatgccaacagtatattttatatgatttacttatgtgaggaaacatgcaaagcattaggaaatttatttcctaaaaacagttttgtaaaattagtattgagttctattgagtattataagatagcttacattttcaaaatggaaattgtcggtcatatttctagaactttaaagaaaaaagaatgttatattagttttctaaaactcaactatctttagtcatgttcaaaaatctattgctagatcatagtagatactggttttctattaactcaaaacctacattgacaagtttaacattgagaagaatcttaacaaaaatatggatatgaattcagtagatatcttaaattcaataaaatcactggaagtttttcatgataacttattttaagatgccttaaaaatcttaaagtcacaaaaggaaaaaggtttttaacatttacatgagttaacattttttcatagaacttatttcctagatagaattttttactgttttttactgttttcttaagaaaacagttaaatcattatgcattcagttggaagaaagtagtggcaagaattctttcattgctatataatattcagtggctcatttatacctaataaaataatggtattttaaaataatgctactttcaaagtagcatttttttagttagtttacaggttacatacccaaaaccttaactatgactaagaaattaaagaagaaaaccagcaaactaaaacttctgggcagcaaaaatatataaatgcttcagatgtcaaatacccatgcttgaaagctcgtgtaatttactttaagattatctgcctgctcttcttcaaagctgaccttgctttagaaatagttttaactagcttagttttctggtttccaaaactaaaatagattaaatcctacaaatttaaggacagttgtgacagtaatctgaccactatctataaatacattggacattggtttccaaatctccctttcttcttcagttccttccttgttcaatatatacccttctctaaactgtgcgggtaaaaggaatgactgtccttgagagaaccattagtttatcaaaggtttatgtagttttgttgctgtaccctaactttgatattcagggaggtaggaaaggtaacagaaaaccagcatatttaatcaaagcaagaagtaatcgctgacagttaaatgtgaccaaaaaaattaaaagttcacaatttttttaatgtagccatttggggttatctctagtaaggcagatacccacgttggtaaatttttaggatattgtgttgcactagaaaactaagtggttcatatttctaatgaggaagattaatgaaagaacattgttatattctgcgtggtatattttaaagtttaagaaggcatgttaaacattatttcctctatggtagttaaaatacagaattagatttttaacaggtgtcatttgactaaacgtttcggtagaatgcttcatacttgagtgatgctggataaggtattgtatttcaacaatggactatgccttggtttttcactaatcaaaatcaaaattactctttaacatgataaatgaatttaccagtttagtatgctgtggtattttaataagttttcaaagataattgggaaaacatgagactggtcatattgatgaatattgtaacatgtgaattgtgatccatttctgatatgtcttgaactactgtgtctagtgggcaaatgtcattgttacctctgtgtgttaagaaaataaaaatattttctaaaggtc

SEQ ID NO: 106948 - DNA, 6923 bp, Homo sapiens
  Payload ID: 1006
  Gene Symbol: AGL
  Gene Name: amylo-alpha-1, 6-glucosidase, 4-alpha -glucanotransferase
  Uniprot ID: P35573
  ENST ID: ENST00000370161
  CDS Start-End: 1-4551
atggccccaattctgagcattaatttatttattgggtatgagctacagttccgattaggcccaactttacagggaaaagcagttaccgtgtatacaaattacccatttcctggagaaacatttaatagagaaaaattccgttctctggattgggaaaatccaacagaaagagaagatgattctgataaatactgtaaacttaatctgcaacaatctggttcatttcagtattatttccttcaaggaaatgagaaaagtggtggaggttacatagttgtggaccccattttacgtgttggtgctgataatcatgtgctacccttggactgtgttactcttcagacatttttagctaagtgtttgggaccttttgatgaatgggaaagcagacttagggttgcaaaagaatcaggctacaacatgattcattttaccccattgcagactcttggactatctaggtcatgctactcccttgccaatcagttagaattaaatcctgacttttcaagacctaatagaaagtatacctggaatgatgttggacagctagtggaaaaattaaaaaaggaatggaatgttatttgtattactgatgttgtctacaatcatactgctgctaatagtaaatggatccaggaacatccagaatgtgcctataatcttgtgaattctccacacttaaaacctgcctgggtcttagacagagcactttggcgtttctcctgtgatgttgcagaagggaaatacaaagaaaagggaatacctgctttgattgaaaatgatcaccatatgaattccatccgaaaaataatttgggaggatatttttccaaagcttaaactctgggaatttttccaagtagatgtcaacaaagcggttgagcaatttagaagacttcttacacaagaaaataggcgagtaaccaagtctgatccaaaccaacaccttacgattattcaagatcctgaatacagacggtttggctgtactgtagatatgaacattgcactaacgactttcataccacatgacaaggggccagcagcaattgaagaatgctgtaattggtttcataaaagaatggaggaattaaattcagagaagcatcgactcattaactatcatcaggaacaggcagttaattgccttttgggaaatgtgttttatgaacgactggctggccatggtccaaaactaggacctgtcactagaaagcatcctttagttaccaggtattttactttcccatttgaagagatagacttctccatggaagaatctatgattcatctgccaaataaagcttgttttctgatggcacacaatggatgggtaatgggagatgatcctcttcgaaactttgctgaaccgggttcagaagtttacctaaggagagaacttatttgctggggagacagtgttaaattacgctatgggaataaaccagaggactgtccttatctctgggcacacatgaaaaaatacactgaaataactgcaacttatttccagggagtacgtcttgataactgccactcaacacctcttcacgtagctgagtacatgttggatgctgctaggaatttgcaacccaatttatatgtagtagctgaactgttcacaggaagtgaagatctggacaatgtctttgttactagactgggcattagttccttaataagagaggcaatgagtgcatataatagtcatgaagagggcagattagtttaccgatatggaggagaacctgttggatcctttgttcagccctgtttgaggcctttaatgccagctattgcacatgccctgtttatggatattacgcatgataatgagtgtcctattgtgcatagatcagcgtatgatgctcttccaagtactacaattgtttctatggcatgttgtgctagtggaagtacaagaggctatgatgaattagtgcctcatcagatttcagtggtttctgaagaacggttttacactaagtggaatcctgaagcattgccttcaaacacaggtgaagttaatttccaaagcggcattattgcagccaggtgtgctatcagtaaacttcatcaggagcttggagccaagggttttattcaggtgtatgtggatcaagttgatgaagacatagtggcagtaacaagacactcacctagcatccatcagtctgttgtggctgtatctagaactgctttcaggaatcccaagacttcattttacagcaaggaagtgcctcaaatgtgcatccctggcaaaattgaagaagtagttcttgaagctagaactattgagagaaacacgaaaccttataggaaggatgagaattcaatcaatggaacaccagatatcacagtagaaattagagaacatattcagcttaatgaaagtaaaattgttaaacaagctggagttgccacaaaagggcccaatgaatatattcaagaaatagaatttgaaaacttgtctccaggaagtgttattatattcagagttagtcttgatccacatgcacaagtcgctgttggaattcttcgaaatcatctgacacaattcagtcctcactttaaatctggcagcctagctgttgacaatgcagatcctatattaaaaattccttttgcttctcttgcctccagattaactttggctgagctaaatcagatcctttaccgatgtgaatcagaagaaaaggaagatggtggagggtgctatgacataccaaactggtcagcccttaaatatgcaggtcttcaaggtttaatgtctgtattggcagaaataagaccaaagaatgacttggggcatcctttttgtaataatttgagatctggagattggatgattgactatgtcagtaaccggcttatttcacgatcaggaactattgctgaagttggtaaatggttgcaggctatgttcttctacctgaagcagatcccacgttaccttatcccatgttactttgatgctatattaattggtgcatataccactcttctggatacagcatggaagcagatgtcaagctttgttcagaatggttcaacctttgtgaaacacctttcattgggttcagttcaactgtgtggagtaggaaaattcccttccctgccaattctttcacctgccctaatggatgtaccttataggttaaatgagatcacaaaagaaaaggagcaatgttgtgtttctctagctgcaggcttacctcatttttcttctggtattttccgctgctggggaagggatacttttattgcacttagaggtatactgctgattactggacgctatgtagaagccaggaatattattttagcatttgcgggtaccctgaggcatggtctcattcctaatctactgggtgaaggaatttatgccagatacaattgtcgggatgctgtgtggtggtggctgcagtgtatccaggattactgtaaaatggttccaaatggtctagacattctcaagtgcccagtttccagaatgtatcctacagatgattctgctcctttgcctgctggcacactggatcagccattgtttgaagtcatacaggaagcaatgcaaaaacacatgcagggcatacagttccgagaaaggaatgctggtccccagatagatcgaaacatgaaggacgaaggttttaatataactgcaggagttgatgaagaaacaggatttgtttatggaggaaatcgtttcaattgtggcacatggatggataaaatgggagaaagtgacagagctagaaacagaggaatcccagccacaccaagagatgggtctgctgtggaaattgtgggcctgagtaaatctgctgttcgctggttgctggaattatccaaaaaaaatattttcccttatcatgaagtcacagtaaaaagacatggaaaggctataaaggtctcatatgatgagtggaacagaaaaatacaagacaactttgaaaagctatttcatgtttccgaagacccttcagatttaaatgaaaagcatccaaatctggttcacaaacgtggcatatacaaagatagttatggagcttcaagtccttggtgtgactatcagctcaggcctaattttaccatagcaatggttgtggcccctgagctctttactacagaaaaagcatggaaagctttggagattgcagaaaaaaaattgcttggtccccttggcatgaaaactttagatccagatgatatggtttactgtggaatttatgacaatgcattagacaatgacaactacaatcttgctaaaggtttcaattatcaccaaggacctgagtggctgtggcctattgggtattttcttcgtgcaaaattatatttttccagattgatgggcccggagactactgcaaagactatagttttggttaaaaatgttctttcccgacattatgttcatcttgagagatccccttggaaaggacttccagaactgaccaatgagaatgcccagtactgtcctttcagctgtgaaacacaagcctggtcaattgctactattcttgagacactttatgatttatagtttattacagatattaagtatgcaattacttgtattataggatgcaaggtcatcatatgtaaatgccttatatgcacaggctcaagttgttttaaaaatctcatttattataatattgatgctcaattaggtaagattgtaaaagcattgattttttttaatgtacagaggtagatttcaatttgaatcagaaagaaatatcattaccaatgaaatgtgtttgagttcagtaagaattattcaaatgcctagaaatccatagtttggaaaagaaaaatcatgtcatcttctatttgtacagaaatgaaaataaaatatgaaaataatgaaagaaatgaaaagatagcttttaattgtggtatatataatcttcagtaacaatacatactgaatacgctgtggttcattaatattaacaccacgtactatagtattcttaatacagtgctcactgcatttaataaatatttaataaatgatgaatgatagaagtttccatctacaatatatgttcctaaatggagcacagatgttcaaactatgctttcattttttcactgatatattaatttttgtgtaatgaatgccaacagtatattttatatgatttacttatgtgaggaaacatgcaaagcattaggaaatttatttcctaaaaacagttttgtaaaattagtattgagttctattgagtattataagatagcttacattttcaaaatggaaattgtcggtcatatttctagaactttaaagaaaaaagaatgttatattagttttctaaaactcaactatctttagtcatgttcaaaaatctattgctagatcatagtagatactggttttctattaactcaaaacctacattgacaagtttaacattgagaagaatcttaacaaaaatatggatatgaattcagtagatatcttaaattcaataaaatcactggaagtttttcatgataacttattttaagatgccttaaaaatcttaaagtcacaaaaggaaaaaggtttttaacatttacatgagttaacattttttcatagaacttatttcctagatagaattttttactgttttttactgttttcttaagaaaacagttaaatcattatgcattcagttggaagaaagtagtggcaagaattctttcattgctatataatattcagtggctcatttatacctaataaaataatggtattttaaaataatgctactttcaaagtagcatttttttagttagtttacaggttacatacccaaaaccttaactatgactaagaaattaaagaagaaaaccagcaaactaaaacttctgggcagcaaaaatatataaatgcttcagatgtcaaatacccatgcttgaaagctcgtgtaatttactttaagattatctgcctgctcttcttcaaagctgaccttgctttagaaatagttttaactagcttagttttctggtttccaaaactaaaatagattaaatcctacaaatttaaggacagttgtgacagtaatctgaccactatctataaatacattggacattggtttccaaatctccctttcttcttcagttccttccttgttcaatatatacccttctctaaactgtgcgggtaaaaggaatgactgtccttgagagaaccattagtttatcaaaggtttatgtagttttgttgctgtaccctaactttgatattcagggaggtaggaaaggtaacagaaaaccagcatatttaatcaaagcaagaagtaatcgctgacagttaaatgtgaccaaaaaaattaaaagttcacaatttttttaatgtagccatttggggttatctctagtaaggcagatacccacgttggtaaatttttaggatattgtgttgcactagaaaactaagtggttcatatttctaatgaggaagattaatgaaagaacattgttatattctgcgtggtatattttaaagtttaagaaggcatgttaaacattatttcctctatggtagttaaaatacagaattagatttttaacaggtgtcatttgactaaacgtttcggtagaatgcttcatacttgagtgatgctggataaggtattgtatttcaacaatggactatgccttggtttttcactaatcaaaatcaaaattactctttaacatgataaatgaatttaccagtttagtatgctgtggtattttaataagttttcaaagataattgggaaaacatgagactggtcatattgatgaatattgtaacatgtgaattgtgatccatttctgatatgtcttgaactactgtgtctagtgggcaaatgtcattgttacctctgtgtgttaagaaaataaaaatattttctaaaggtctgt

SEQ ID NO: 106949 - DNA, 7166 bp, Homo sapiens
  Payload ID: 1006
  Gene Symbol: AGL
  Gene Name: amylo-alpha-1, 6-glucosidase, 4-alpha -glucanotransferase
  Uniprot ID: P35573
  ENST ID: ENST00000370163
  CDS Start-End: 199-4797
ctgtctacggcagctattccagaggcaacaactgcttccctctgttctcatctccccattggtggctggcgacccgaatttgggaatggggagattgcccacctgttatctttgagcagactaatctcttgggtaactcattcgactgtggagttcttttaattcttatgaaagatttcaaatcctctagaagccaaaatgggacacagtaaacagattcgaattttacttctgaacgaaatggagaaactggaaaagaccctcttcagacttgaacaagggtatgagctacagttccgattaggcccaactttacagggaaaagcagttaccgtgtatacaaattacccatttcctggagaaacatttaatagagaaaaattccgttctctggattgggaaaatccaacagaaagagaagatgattctgataaatactgtaaacttaatctgcaacaatctggttcatttcagtattatttccttcaaggaaatgagaaaagtggtggaggttacatagttgtggaccccattttacgtgttggtgctgataatcatgtgctacccttggactgtgttactcttcagacatttttagctaagtgtttgggaccttttgatgaatgggaaagcagacttagggttgcaaaagaatcaggctacaacatgattcattttaccccattgcagactcttggactatctaggtcatgctactcccttgccaatcagttagaattaaatcctgacttttcaagacctaatagaaagtatacctggaatgatgttggacagctagtggaaaaattaaaaaaggaatggaatgttatttgtattactgatgttgtctacaatcatactgctgctaatagtaaatggatccaggaacatccagaatgtgcctataatcttgtgaattctccacacttaaaacctgcctgggtcttagacagagcactttggcgtttctcctgtgatgttgcagaagggaaatacaaagaaaagggaatacctgctttgattgaaaatgatcaccatatgaattccatccgaaaaataatttgggaggatatttttccaaagcttaaactctgggaatttttccaagtagatgtcaacaaagcggttgagcaatttagaagacttcttacacaagaaaataggcgagtaaccaagtctgatccaaaccaacaccttacgattattcaagatcctgaatacagacggtttggctgtactgtagatatgaacattgcactaacgactttcataccacatgacaaggggccagcagcaattgaagaatgctgtaattggtttcataaaagaatggaggaattaaattcagagaagcatcgactcattaactatcatcaggaacaggcagttaattgccttttgggaaatgtgttttatgaacgactggctggccatggtccaaaactaggacctgtcactagaaagcatcctttagttaccaggtattttactttcccatttgaagagatagacttctccatggaagaatctatgattcatctgccaaataaagcttgttttctgatggcacacaatggatgggtaatgggagatgatcctcttcgaaactttgctgaaccgggttcagaagtttacctaaggagagaacttatttgctggggagacagtgttaaattacgctatgggaataaaccagaggactgtccttatctctgggcacacatgaaaaaatacactgaaataactgcaacttatttccagggagtacgtcttgataactgccactcaacacctcttcacgtagctgagtacatgttggatgctgctaggaatttgcaacccaatttatatgtagtagctgaactgttcacaggaagtgaagatctggacaatgtctttgttactagactgggcattagttccttaataagagaggcaatgagtgcatataatagtcatgaagagggcagattagtttaccgatatggaggagaacctgttggatcctttgttcagccctgtttgaggcctttaatgccagctattgcacatgccctgtttatggatattacgcatgataatgagtgtcctattgtgcatagatcagcgtatgatgctcttccaagtactacaattgtttctatggcatgttgtgctagtggaagtacaagaggctatgatgaattagtgcctcatcagatttcagtggtttctgaagaacggttttacactaagtggaatcctgaagcattgccttcaaacacaggtgaagttaatttccaaagcggcattattgcagccaggtgtgctatcagtaaacttcatcaggagcttggagccaagggttttattcaggtgtatgtggatcaagttgatgaagacatagtggcagtaacaagacactcacctagcatccatcagtctgttgtggctgtatctagaactgctttcaggaatcccaagacttcattttacagcaaggaagtgcctcaaatgtgcatccctggcaaaattgaagaagtagttcttgaagctagaactattgagagaaacacgaaaccttataggaaggatgagaattcaatcaatggaacaccagatatcacagtagaaattagagaacatattcagcttaatgaaagtaaaattgttaaacaagctggagttgccacaaaagggcccaatgaatatattcaagaaatagaatttgaaaacttgtctccaggaagtgttattatattcagagttagtcttgatccacatgcacaagtcgctgttggaattcttcgaaatcatctgacacaattcagtcctcactttaaatctggcagcctagctgttgacaatgcagatcctatattaaaaattccttttgcttctcttgcctccagattaactttggctgagctaaatcagatcctttaccgatgtgaatcagaagaaaaggaagatggtggagggtgctatgacataccaaactggtcagcccttaaatatgcaggtcttcaaggtttaatgtctgtattggcagaaataagaccaaagaatgacttggggcatcctttttgtaataatttgagatctggagattggatgattgactatgtcagtaaccggcttatttcacgatcaggaactattgctgaagttggtaaatggttgcaggctatgttcttctacctgaagcagatcccacgttaccttatcccatgttactttgatgctatattaattggtgcatataccactcttctggatacagcatggaagcagatgtcaagctttgttcagaatggttcaacctttgtgaaacacctttcattgggttcagttcaactgtgtggagtaggaaaattcccttccctgccaattctttcacctgccctaatggatgtaccttataggttaaatgagatcacaaaagaaaaggagcaatgttgtgtttctctagctgcaggcttacctcatttttcttctggtattttccgctgctggggaagggatacttttattgcacttagaggtatactgctgattactggacgctatgtagaagccaggaatattattttagcatttgcgggtaccctgaggcatggtctcattcctaatctactgggtgaaggaatttatgccagatacaattgtcgggatgctgtgtggtggtggctgcagtgtatccaggattactgtaaaatggttccaaatggtctagacattctcaagtgcccagtttccagaatgtatcctacagatgattctgctcctttgcctgctggcacactggatcagccattgtttgaagtcatacaggaagcaatgcaaaaacacatgcagggcatacagttccgagaaaggaatgctggtccccagatagatcgaaacatgaaggacgaaggttttaatataactgcaggagttgatgaagaaacaggatttgtttatggaggaaatcgtttcaattgtggcacatggatggataaaatgggagaaagtgacagagctagaaacagaggaatcccagccacaccaagagatgggtctgctgtggaaattgtgggcctgagtaaatctgctgttcgctggttgctggaattatccaaaaaaaatattttcccttatcatgaagtcacagtaaaaagacatggaaaggctataaaggtctcatatgatgagtggaacagaaaaatacaagacaactttgaaaagctatttcatgtttccgaagacccttcagatttaaatgaaaagcatccaaatctggttcacaaacgtggcatatacaaagatagttatggagcttcaagtccttggtgtgactatcagctcaggcctaattttaccatagcaatggttgtggcccctgagctctttactacagaaaaagcatggaaagctttggagattgcagaaaaaaaattgcttggtccccttggcatgaaaactttagatccagatgatatggtttactgtggaatttatgacaatgcattagacaatgacaactacaatcttgctaaaggtttcaattatcaccaaggacctgagtggctgtggcctattgggtattttcttcgtgcaaaattatatttttccagattgatgggcccggagactactgcaaagactatagttttggttaaaaatgttctttcccgacattatgttcatcttgagagatccccttggaaaggacttccagaactgaccaatgagaatgcccagtactgtcctttcagctgtgaaacacaagcctggtcaattgctactattcttgagacactttatgatttatagtttattacagatattaagtatgcaattacttgtattataggatgcaaggtcatcatatgtaaatgccttatatgcacaggctcaagttgttttaaaaatctcatttattataatattgatgctcaattaggtaagattgtaaaagcattgattttttttaatgtacagaggtagatttcaatttgaatcagaaagaaatatcattaccaatgaaatgtgtttgagttcagtaagaattattcaaatgcctagaaatccatagtttggaaaagaaaaatcatgtcatcttctatttgtacagaaatgaaaataaaatatgaaaataatgaaagaaatgaaaagatagcttttaattgtggtatatataatcttcagtaacaatacatactgaatacgctgtggttcattaatattaacaccacgtactatagtattcttaatacagtgctcactgcatttaataaatatttaataaatgatgaatgatagaagtttccatctacaatatatgttcctaaatggagcacagatgttcaaactatgctttcattttttcactgatatattaatttttgtgtaatgaatgccaacagtatattttatatgatttacttatgtgaggaaacatgcaaagcattaggaaatttatttcctaaaaacagttttgtaaaattagtattgagttctattgagtattataagatagcttacattttcaaaatggaaattgtcggtcatatttctagaactttaaagaaaaaagaatgttatattagttttctaaaactcaactatctttagtcatgttcaaaaatctattgctagatcatagtagatactggttttctattaactcaaaacctacattgacaagtttaacattgagaagaatcttaacaaaaatatggatatgaattcagtagatatcttaaattcaataaaatcactggaagtttttcatgataacttattttaagatgccttaaaaatcttaaagtcacaaaaggaaaaaggtttttaacatttacatgagttaacattttttcatagaacttatttcctagatagaattttttactgttttttactgttttcttaagaaaacagttaaatcattatgcattcagttggaagaaagtagtggcaagaattctttcattgctatataatattcagtggctcatttatacctaataaaataatggtattttaaaataatgctactttcaaagtagcatttttttagttagtttacaggttacatacccaaaaccttaactatgactaagaaattaaagaagaaaaccagcaaactaaaacttctgggcagcaaaaatatataaatgcttcagatgtcaaatacccatgcttgaaagctcgtgtaatttactttaagattatctgcctgctcttcttcaaagctgaccttgctttagaaatagttttaactagcttagttttctggtttccaaaactaaaatagattaaatcctacaaatttaaggacagttgtgacagtaatctgaccactatctataaatacattggacattggtttccaaatctccctttcttcttcagttccttccttgttcaatatatacccttctctaaactgtgcgggtaaaaggaatgactgtccttgagagaaccattagtttatcaaaggtttatgtagttttgttgctgtaccctaactttgatattcagggaggtaggaaaggtaacagaaaaccagcatatttaatcaaagcaagaagtaatcgctgacagttaaatgtgaccaaaaaaattaaaagttcacaatttttttaatgtagccatttggggttatctctagtaaggcagatacccacgttggtaaatttttaggatattgtgttgcactagaaaactaagtggttcatatttctaatgaggaagattaatgaaagaacattgttatattctgcgtggtatattttaaagtttaagaaggcatgttaaacattatttcctctatggtagttaaaatacagaattagatttttaacaggtgtcatttgactaaacgtttcggtagaatgcttcatacttgagtgatgctggataaggtattgtatttcaacaatggactatgccttggtttttcactaatcaaaatcaaaattactctttaacatgataaatgaatttaccagtttagtatgctgtggtattttaataagttttcaaagataattgggaaaacatgagactggtcatattgatgaatattgtaacatgtgaattgtgatccatttctgatatgtcttgaactactgtgtctagtgggcaaatgtcattgttacctctgtgtgttaagaaaataaaaatattttctaaaggtc

SEQ ID NO: 106950 - DNA, 7106 bp, Homo sapiens
  Payload ID: 1006
  Gene Symbol: AGL
  Gene Name: amylo-alpha-1, 6-glucosidase, 4-alpha -glucanotransferase
  Uniprot ID: P35573
  ENST ID: ENST00000370165
  CDS Start-End: 139-4737
ctgtctacggcagctattccagaggcaacaactgcttccctctgttctcatctccccattggtggctggcgacccgaatttgggaatggggagattgcccacctgttatctttgagcagactaatctcttaagccaaaatgggacacagtaaacagattcgaattttacttctgaacgaaatggagaaactggaaaagaccctcttcagacttgaacaagggtatgagctacagttccgattaggcccaactttacagggaaaagcagttaccgtgtatacaaattacccatttcctggagaaacatttaatagagaaaaattccgttctctggattgggaaaatccaacagaaagagaagatgattctgataaatactgtaaacttaatctgcaacaatctggttcatttcagtattatttccttcaaggaaatgagaaaagtggtggaggttacatagttgtggaccccattttacgtgttggtgctgataatcatgtgctacccttggactgtgttactcttcagacatttttagctaagtgtttgggaccttttgatgaatgggaaagcagacttagggttgcaaaagaatcaggctacaacatgattcattttaccccattgcagactcttggactatctaggtcatgctactcccttgccaatcagttagaattaaatcctgacttttcaagacctaatagaaagtatacctggaatgatgttggacagctagtggaaaaattaaaaaaggaatggaatgttatttgtattactgatgttgtctacaatcatactgctgctaatagtaaatggatccaggaacatccagaatgtgcctataatcttgtgaattctccacacttaaaacctgcctgggtcttagacagagcactttggcgtttctcctgtgatgttgcagaagggaaatacaaagaaaagggaatacctgctttgattgaaaatgatcaccatatgaattccatccgaaaaataatttgggaggatatttttccaaagcttaaactctgggaatttttccaagtagatgtcaacaaagcggttgagcaatttagaagacttcttacacaagaaaataggcgagtaaccaagtctgatccaaaccaacaccttacgattattcaagatcctgaatacagacggtttggctgtactgtagatatgaacattgcactaacgactttcataccacatgacaaggggccagcagcaattgaagaatgctgtaattggtttcataaaagaatggaggaattaaattcagagaagcatcgactcattaactatcatcaggaacaggcagttaattgccttttgggaaatgtgttttatgaacgactggctggccatggtccaaaactaggacctgtcactagaaagcatcctttagttaccaggtattttactttcccatttgaagagatagacttctccatggaagaatctatgattcatctgccaaataaagcttgttttctgatggcacacaatggatgggtaatgggagatgatcctcttcgaaactttgctgaaccgggttcagaagtttacctaaggagagaacttatttgctggggagacagtgttaaattacgctatgggaataaaccagaggactgtccttatctctgggcacacatgaaaaaatacactgaaataactgcaacttatttccagggagtacgtcttgataactgccactcaacacctcttcacgtagctgagtacatgttggatgctgctaggaatttgcaacccaatttatatgtagtagctgaactgttcacaggaagtgaagatctggacaatgtctttgttactagactgggcattagttccttaataagagaggcaatgagtgcatataatagtcatgaagagggcagattagtttaccgatatggaggagaacctgttggatcctttgttcagccctgtttgaggcctttaatgccagctattgcacatgccctgtttatggatattacgcatgataatgagtgtcctattgtgcatagatcagcgtatgatgctcttccaagtactacaattgtttctatggcatgttgtgctagtggaagtacaagaggctatgatgaattagtgcctcatcagatttcagtggtttctgaagaacggttttacactaagtggaatcctgaagcattgccttcaaacacaggtgaagttaatttccaaagcggcattattgcagccaggtgtgctatcagtaaacttcatcaggagcttggagccaagggttttattcaggtgtatgtggatcaagttgatgaagacatagtggcagtaacaagacactcacctagcatccatcagtctgttgtggctgtatctagaactgctttcaggaatcccaagacttcattttacagcaaggaagtgcctcaaatgtgcatccctggcaaaattgaagaagtagttcttgaagctagaactattgagagaaacacgaaaccttataggaaggatgagaattcaatcaatggaacaccagatatcacagtagaaattagagaacatattcagcttaatgaaagtaaaattgttaaacaagctggagttgccacaaaagggcccaatgaatatattcaagaaatagaatttgaaaacttgtctccaggaagtgttattatattcagagttagtcttgatccacatgcacaagtcgctgttggaattcttcgaaatcatctgacacaattcagtcctcactttaaatctggcagcctagctgttgacaatgcagatcctatattaaaaattccttttgcttctcttgcctccagattaactttggctgagctaaatcagatcctttaccgatgtgaatcagaagaaaaggaagatggtggagggtgctatgacataccaaactggtcagcccttaaatatgcaggtcttcaaggtttaatgtctgtattggcagaaataagaccaaagaatgacttggggcatcctttttgtaataatttgagatctggagattggatgattgactatgtcagtaaccggcttatttcacgatcaggaactattgctgaagttggtaaatggttgcaggctatgttcttctacctgaagcagatcccacgttaccttatcccatgttactttgatgctatattaattggtgcatataccactcttctggatacagcatggaagcagatgtcaagctttgttcagaatggttcaacctttgtgaaacacctttcattgggttcagttcaactgtgtggagtaggaaaattcccttccctgccaattctttcacctgccctaatggatgtaccttataggttaaatgagatcacaaaagaaaaggagcaatgttgtgtttctctagctgcaggcttacctcatttttcttctggtattttccgctgctggggaagggatacttttattgcacttagaggtatactgctgattactggacgctatgtagaagccaggaatattattttagcatttgcgggtaccctgaggcatggtctcattcctaatctactgggtgaaggaatttatgccagatacaattgtcgggatgctgtgtggtggtggctgcagtgtatccaggattactgtaaaatggttccaaatggtctagacattctcaagtgcccagtttccagaatgtatcctacagatgattctgctcctttgcctgctggcacactggatcagccattgtttgaagtcatacaggaagcaatgcaaaaacacatgcagggcatacagttccgagaaaggaatgctggtccccagatagatcgaaacatgaaggacgaaggttttaatataactgcaggagttgatgaagaaacaggatttgtttatggaggaaatcgtttcaattgtggcacatggatggataaaatgggagaaagtgacagagctagaaacagaggaatcccagccacaccaagagatgggtctgctgtggaaattgtgggcctgagtaaatctgctgttcgctggttgctggaattatccaaaaaaaatattttcccttatcatgaagtcacagtaaaaagacatggaaaggctataaaggtctcatatgatgagtggaacagaaaaatacaagacaactttgaaaagctatttcatgtttccgaagacccttcagatttaaatgaaaagcatccaaatctggttcacaaacgtggcatatacaaagatagttatggagcttcaagtccttggtgtgactatcagctcaggcctaattttaccatagcaatggttgtggcccctgagctctttactacagaaaaagcatggaaagctttggagattgcagaaaaaaaattgcttggtccccttggcatgaaaactttagatccagatgatatggtttactgtggaatttatgacaatgcattagacaatgacaactacaatcttgctaaaggtttcaattatcaccaaggacctgagtggctgtggcctattgggtattttcttcgtgcaaaattatatttttccagattgatgggcccggagactactgcaaagactatagttttggttaaaaatgttctttcccgacattatgttcatcttgagagatccccttggaaaggacttccagaactgaccaatgagaatgcccagtactgtcctttcagctgtgaaacacaagcctggtcaattgctactattcttgagacactttatgatttatagtttattacagatattaagtatgcaattacttgtattataggatgcaaggtcatcatatgtaaatgccttatatgcacaggctcaagttgttttaaaaatctcatttattataatattgatgctcaattaggtaagattgtaaaagcattgattttttttaatgtacagaggtagatttcaatttgaatcagaaagaaatatcattaccaatgaaatgtgtttgagttcagtaagaattattcaaatgcctagaaatccatagtttggaaaagaaaaatcatgtcatcttctatttgtacagaaatgaaaataaaatatgaaaataatgaaagaaatgaaaagatagcttttaattgtggtatatataatcttcagtaacaatacatactgaatacgctgtggttcattaatattaacaccacgtactatagtattcttaatacagtgctcactgcatttaataaatatttaataaatgatgaatgatagaagtttccatctacaatatatgttcctaaatggagcacagatgttcaaactatgctttcattttttcactgatatattaatttttgtgtaatgaatgccaacagtatattttatatgatttacttatgtgaggaaacatgcaaagcattaggaaatttatttcctaaaaacagttttgtaaaattagtattgagttctattgagtattataagatagcttacattttcaaaatggaaattgtcggtcatatttctagaactttaaagaaaaaagaatgttatattagttttctaaaactcaactatctttagtcatgttcaaaaatctattgctagatcatagtagatactggttttctattaactcaaaacctacattgacaagtttaacattgagaagaatcttaacaaaaatatggatatgaattcagtagatatcttaaattcaataaaatcactggaagtttttcatgataacttattttaagatgccttaaaaatcttaaagtcacaaaaggaaaaaggtttttaacatttacatgagttaacattttttcatagaacttatttcctagatagaattttttactgttttttactgttttcttaagaaaacagttaaatcattatgcattcagttggaagaaagtagtggcaagaattctttcattgctatataatattcagtggctcatttatacctaataaaataatggtattttaaaataatgctactttcaaagtagcatttttttagttagtttacaggttacatacccaaaaccttaactatgactaagaaattaaagaagaaaaccagcaaactaaaacttctgggcagcaaaaatatataaatgcttcagatgtcaaatacccatgcttgaaagctcgtgtaatttactttaagattatctgcctgctcttcttcaaagctgaccttgctttagaaatagttttaactagcttagttttctggtttccaaaactaaaatagattaaatcctacaaatttaaggacagttgtgacagtaatctgaccactatctataaatacattggacattggtttccaaatctccctttcttcttcagttccttccttgttcaatatatacccttctctaaactgtgcgggtaaaaggaatgactgtccttgagagaaccattagtttatcaaaggtttatgtagttttgttgctgtaccctaactttgatattcagggaggtaggaaaggtaacagaaaaccagcatatttaatcaaagcaagaagtaatcgctgacagttaaatgtgaccaaaaaaattaaaagttcacaatttttttaatgtagccatttggggttatctctagtaaggcagatacccacgttggtaaatttttaggatattgtgttgcactagaaaactaagtggttcatatttctaatgaggaagattaatgaaagaacattgttatattctgcgtggtatattttaaagtttaagaaggcatgttaaacattatttcctctatggtagttaaaatacagaattagatttttaacaggtgtcatttgactaaacgtttcggtagaatgcttcatacttgagtgatgctggataaggtattgtatttcaacaatggactatgccttggtttttcactaatcaaaatcaaaattactctttaacatgataaatgaatttaccagtttagtatgctgtggtattttaataagttttcaaagataattgggaaaacatgagactggtcatattgatgaatattgtaacatgtgaattgtgatccatttctgatatgtcttgaactactgtgtctagtgggcaaatgtcattgttacctctgtgtgttaagaaaataaaaatattttctaaaggtc

SEQ ID NO: 106951 - DNA, 3467 bp, Homo sapiens
  Payload ID: 1007
  Gene Symbol: APP
  Gene Name: amyloid beta (A4) precursor protein
  Uniprot ID: P05067
  ENST ID: ENST00000346798
  CDS Start-End: 35-2347
cagcagcgcactcggtgccccgcgcagggtcgcgatgctgcccggtttggcactgctcctgctggccgcctggacggctcgggcgctggaggtacccactgatggtaatgctggcctgctggctgaaccccagattgccatgttctgtggcagactgaacatgcacatgaatgtccagaatgggaagtgggattcagatccatcagggaccaaaacctgcattgataccaaggaaggcatcctgcagtattgccaagaagtctaccctgaactgcagatcaccaatgtggtagaagccaaccaaccagtgaccatccagaactggtgcaagcggggccgcaagcagtgcaagacccatccccactttgtgattccctaccgctgcttagttggtgagtttgtaagtgatgcccttctcgttcctgacaagtgcaaattcttacaccaggagaggatggatgtttgcgaaactcatcttcactggcacaccgtcgccaaagagacatgcagtgagaagagtaccaacttgcatgactacggcatgttgctgccctgcggaattgacaagttccgaggggtagagtttgtgtgttgcccactggctgaagaaagtgacaatgtggattctgctgatgcggaggaggatgactcggatgtctggtggggcggagcagacacagactatgcagatgggagtgaagacaaagtagtagaagtagcagaggaggaagaagtggctgaggtggaagaagaagaagccgatgatgacgaggacgatgaggatggtgatgaggtagaggaagaggctgaggaaccctacgaagaagccacagagagaaccaccagcattgccaccaccaccaccaccaccacagagtctgtggaagaggtggttcgagaggtgtgctctgaacaagccgagacggggccgtgccgagcaatgatctcccgctggtactttgatgtgactgaagggaagtgtgccccattcttttacggcggatgtggcggcaaccggaacaactttgacacagaagagtactgcatggccgtgtgtggcagcgccatgtcccaaagtttactcaagactacccaggaacctcttgcccgagatcctgttaaacttcctacaacagcagccagtacccctgatgccgttgacaagtatctcgagacacctggggatgagaatgaacatgcccatttccagaaagccaaagagaggcttgaggccaagcaccgagagagaatgtcccaggtcatgagagaatgggaagaggcagaacgtcaagcaaagaacttgcctaaagctgataagaaggcagttatccagcatttccaggagaaagtggaatctttggaacaggaagcagccaacgagagacagcagctggtggagacacacatggccagagtggaagccatgctcaatgaccgccgccgcctggccctggagaactacatcaccgctctgcaggctgttcctcctcggcctcgtcacgtgttcaatatgctaaagaagtatgtccgcgcagaacagaaggacagacagcacaccctaaagcatttcgagcatgtgcgcatggtggatcccaagaaagccgctcagatccggtcccaggttatgacacacctccgtgtgatttatgagcgcatgaatcagtctctctccctgctctacaacgtgcctgcagtggccgaggagattcaggatgaagttgatgagctgcttcagaaagagcaaaactattcagatgacgtcttggccaacatgattagtgaaccaaggatcagttacggaaacgatgctctcatgccatctttgaccgaaacgaaaaccaccgtggagctccttcccgtgaatggagagttcagcctggacgatctccagccgtggcattcttttggggctgactctgtgccagccaacacagaaaacgaagttgagcctgttgatgcccgccctgctgccgaccgaggactgaccactcgaccaggttctgggttgacaaatatcaagacggaggagatctctgaagtgaagatggatgcagaattccgacatgactcaggatatgaagttcatcatcaaaaattggtgttctttgcagaagatgtgggttcaaacaaaggtgcaatcattggactcatggtgggcggtgttgtcatagcgacagtgatcgtcatcaccttggtgatgctgaagaagaaacagtacacatccattcatcatggtgtggtggaggttgacgccgctgtcaccccagaggagcgccacctgtccaagatgcagcagaacggctacgaaaatccaacctacaagttctttgagcagatgcagaactagacccccgccacagcagcctctgaagttggacagcaaaaccattgcttcactacccatcggtgtccatttatagaataatgtgggaagaaacaaacccgttttatgatttactcattatcgccttttgacagctgtgctgtaacacaagtagatgcctgaacttgaattaatccacacatcagtaatgtattctatctctctttacattttggtctctatactacattattaatgggttttgtgtactgtaaagaatttagctgtatcaaactagtgcatgaatagattctctcctgattatttatcacatagccccttagccagttgtatattattcttgtggtttgtgacccaattaagtcctactttacatatgctttaagaatcgatgggggatgcttcatgtgaacgtgggagttcagctgcttctcttgcctaagtattcctttcctgatcactatgcattttaaagttaaacatttttaagtatttcagatgctttagagagattttttttccatgactgcattttactgtacagattgctgcttctgctatatttgtgatataggaattaagaggatacacacgtttgtttcttcgtgcctgttttatgtgcacacattaggcattgagacttcaagcttttctttttttgtccacgtatctttgggtctttgataaagaaaagaatccctgttcattgtaagcacttttacggggcgggtggggaggggtgctctgctggtcttcaattaccaagaattctccaaaacaattttctgcaggatgattgtacagaatcattgcttatgacatgatcgctttctacactgtattacataaataaattaaataaaataaccccgggcaagacttttctttgaaggatgactacagacattaaataatcgaagtaattttgggtggggagaagaggcagattcaattttctttaaccagtctgaagtttcatttatgatacaaaagaagatgaaaatggaagtggcaatataaggggatgaggaaggcatgcctggacaaacccttcttttaagatgtgtcttcaatttgtataaaatggtgttttcatgtaaataaatacattcttggaggagca

SEQ ID NO: 106952 - DNA, 3355 bp, Homo sapiens
  Payload ID: 1007
  Gene Symbol: APP
  Gene Name: amyloid beta (A4) precursor protein
  Uniprot ID: P05067
  ENST ID: ENST00000348990
  CDS Start-End: 148-2235
agtttcctcggcagcggtaggcgagagcacgcggaggagcgtgcgcgggggccccgggagacggcggcggtggcggcgcgggcagagcaaggacgcggcggatcccactcgcacagcagcgcactcggtgccccgcgcagggtcgcgatgctgcccggtttggcactgctcctgctggccgcctggacggctcgggcgctggaggtacccactgatggtaatgctggcctgctggctgaaccccagattgccatgttctgtggcagactgaacatgcacatgaatgtccagaatgggaagtgggattcagatccatcagggaccaaaacctgcattgataccaaggaaggcatcctgcagtattgccaagaagtctaccctgaactgcagatcaccaatgtggtagaagccaaccaaccagtgaccatccagaactggtgcaagcggggccgcaagcagtgcaagacccatccccactttgtgattccctaccgctgcttagttggtgagtttgtaagtgatgcccttctcgttcctgacaagtgcaaattcttacaccaggagaggatggatgtttgcgaaactcatcttcactggcacaccgtcgccaaagagacatgcagtgagaagagtaccaacttgcatgactacggcatgttgctgccctgcggaattgacaagttccgaggggtagagtttgtgtgttgcccactggctgaagaaagtgacaatgtggattctgctgatgcggaggaggatgactcggatgtctggtggggcggagcagacacagactatgcagatgggagtgaagacaaagtagtagaagtagcagaggaggaagaagtggctgaggtggaagaagaagaagccgatgatgacgaggacgatgaggatggtgatgaggtagaggaagaggctgaggaaccctacgaagaagccacagagagaaccaccagcattgccaccaccaccaccaccaccacagagtctgtggaagaggtggttcgagttcctacaacagcagccagtacccctgatgccgttgacaagtatctcgagacacctggggatgagaatgaacatgcccatttccagaaagccaaagagaggcttgaggccaagcaccgagagagaatgtcccaggtcatgagagaatgggaagaggcagaacgtcaagcaaagaacttgcctaaagctgataagaaggcagttatccagcatttccaggagaaagtggaatctttggaacaggaagcagccaacgagagacagcagctggtggagacacacatggccagagtggaagccatgctcaatgaccgccgccgcctggccctggagaactacatcaccgctctgcaggctgttcctcctcggcctcgtcacgtgttcaatatgctaaagaagtatgtccgcgcagaacagaaggacagacagcacaccctaaagcatttcgagcatgtgcgcatggtggatcccaagaaagccgctcagatccggtcccaggttatgacacacctccgtgtgatttatgagcgcatgaatcagtctctctccctgctctacaacgtgcctgcagtggccgaggagattcaggatgaagttgatgagctgcttcagaaagagcaaaactattcagatgacgtcttggccaacatgattagtgaaccaaggatcagttacggaaacgatgctctcatgccatctttgaccgaaacgaaaaccaccgtggagctccttcccgtgaatggagagttcagcctggacgatctccagccgtggcattcttttggggctgactctgtgccagccaacacagaaaacgaagttgagcctgttgatgcccgccctgctgccgaccgaggactgaccactcgaccaggttctgggttgacaaatatcaagacggaggagatctctgaagtgaagatggatgcagaattccgacatgactcaggatatgaagttcatcatcaaaaattggtgttctttgcagaagatgtgggttcaaacaaaggtgcaatcattggactcatggtgggcggtgttgtcatagcgacagtgatcgtcatcaccttggtgatgctgaagaagaaacagtacacatccattcatcatggtgtggtggaggttgacgccgctgtcaccccagaggagcgccacctgtccaagatgcagcagaacggctacgaaaatccaacctacaagttctttgagcagatgcagaactagacccccgccacagcagcctctgaagttggacagcaaaaccattgcttcactacccatcggtgtccatttatagaataatgtgggaagaaacaaacccgttttatgatttactcattatcgccttttgacagctgtgctgtaacacaagtagatgcctgaacttgaattaatccacacatcagtaatgtattctatctctctttacattttggtctctatactacattattaatgggttttgtgtactgtaaagaatttagctgtatcaaactagtgcatgaatagattctctcctgattatttatcacatagccccttagccagttgtatattattcttgtggtttgtgacccaattaagtcctactttacatatgctttaagaatcgatgggggatgcttcatgtgaacgtgggagttcagctgcttctcttgcctaagtattcctttcctgatcactatgcattttaaagttaaacatttttaagtatttcagatgctttagagagattttttttccatgactgcattttactgtacagattgctgcttctgctatatttgtgatataggaattaagaggatacacacgtttgtttcttcgtgcctgttttatgtgcacacattaggcattgagacttcaagcttttctttttttgtccacgtatctttgggtctttgataaagaaaagaatccctgttcattgtaagcacttttacggggcgggtggggaggggtgctctgctggtcttcaattaccaagaattctccaaaacaattttctgcaggatgattgtacagaatcattgcttatgacatgatcgctttctacactgtattacataaataaattaaataaaataaccccgggcaagacttttctttgaaggatgactacagacattaaataatcgaagtaattttgggtggggagaagaggcagattcaattttctttaaccagtctgaagtttcatttatgatacaaaagaagatgaaaatggaagtggcaatataaggggatgaggaaggcatgcctggacaaacccttcttttaagatgtgtcttcaatttgtataaaatggtgttttcatgtaaataaatacattcttggaggagca

SEQ ID NO: 106953 - DNA, 3167 bp, Homo sapiens
  Payload ID: 1007
  Gene Symbol: APP
  Gene Name: amyloid beta (A4) precursor protein
  Uniprot ID: P05067
  ENST ID: ENST00000354192
  CDS Start-End: 128-2047
gcgagagcacgcggaggagcgtgcgcgggggccccgggagacggcggcggtggcggcgcgggcagagcaaggacgcggcggatcccactcgcacagcagcgcactcggtgccccgcgcagggtcgcgatgctgcccggtttggcactgctcctgctggccgcctggacggctcgggcgctggaggtctaccctgaactgcagatcaccaatgtggtagaagccaaccaaccagtgaccatccagaactggtgcaagcggggccgcaagcagtgcaagacccatccccactttgtgattccctaccgctgcttagttggtgagtttgtaagtgatgcccttctcgttcctgacaagtgcaaattcttacaccaggagaggatggatgtttgcgaaactcatcttcactggcacaccgtcgccaaagagacatgcagtgagaagagtaccaacttgcatgactacggcatgttgctgccctgcggaattgacaagttccgaggggtagagtttgtgtgttgcccactggctgaagaaagtgacaatgtggattctgctgatgcggaggaggatgactcggatgtctggtggggcggagcagacacagactatgcagatgggagtgaagacaaagtagtagaagtagcagaggaggaagaagtggctgaggtggaagaagaagaagccgatgatgacgaggacgatgaggatggtgatgaggtagaggaagaggctgaggaaccctacgaagaagccacagagagaaccaccagcattgccaccaccaccaccaccaccacagagtctgtggaagaggtggttcgagttcctacaacagcagccagtacccctgatgccgttgacaagtatctcgagacacctggggatgagaatgaacatgcccatttccagaaagccaaagagaggcttgaggccaagcaccgagagagaatgtcccaggtcatgagagaatgggaagaggcagaacgtcaagcaaagaacttgcctaaagctgataagaaggcagttatccagcatttccaggagaaagtggaatctttggaacaggaagcagccaacgagagacagcagctggtggagacacacatggccagagtggaagccatgctcaatgaccgccgccgcctggccctggagaactacatcaccgctctgcaggctgttcctcctcggcctcgtcacgtgttcaatatgctaaagaagtatgtccgcgcagaacagaaggacagacagcacaccctaaagcatttcgagcatgtgcgcatggtggatcccaagaaagccgctcagatccggtcccaggttatgacacacctccgtgtgatttatgagcgcatgaatcagtctctctccctgctctacaacgtgcctgcagtggccgaggagattcaggatgaagttgatgagctgcttcagaaagagcaaaactattcagatgacgtcttggccaacatgattagtgaaccaaggatcagttacggaaacgatgctctcatgccatctttgaccgaaacgaaaaccaccgtggagctccttcccgtgaatggagagttcagcctggacgatctccagccgtggcattcttttggggctgactctgtgccagccaacacagaaaacgaagttgagcctgttgatgcccgccctgctgccgaccgaggactgaccactcgaccaggttctgggttgacaaatatcaagacggaggagatctctgaagtgaagatggatgcagaattccgacatgactcaggatatgaagttcatcatcaaaaattggtgttctttgcagaagatgtgggttcaaacaaaggtgcaatcattggactcatggtgggcggtgttgtcatagcgacagtgatcgtcatcaccttggtgatgctgaagaagaaacagtacacatccattcatcatggtgtggtggaggttgacgccgctgtcaccccagaggagcgccacctgtccaagatgcagcagaacggctacgaaaatccaacctacaagttctttgagcagatgcagaactagacccccgccacagcagcctctgaagttggacagcaaaaccattgcttcactacccatcggtgtccatttatagaataatgtgggaagaaacaaacccgttttatgatttactcattatcgccttttgacagctgtgctgtaacacaagtagatgcctgaacttgaattaatccacacatcagtaatgtattctatctctctttacattttggtctctatactacattattaatgggttttgtgtactgtaaagaatttagctgtatcaaactagtgcatgaatagattctctcctgattatttatcacatagccccttagccagttgtatattattcttgtggtttgtgacccaattaagtcctactttacatatgctttaagaatcgatgggggatgcttcatgtgaacgtgggagttcagctgcttctcttgcctaagtattcctttcctgatcactatgcattttaaagttaaacatttttaagtatttcagatgctttagagagattttttttccatgactgcattttactgtacagattgctgcttctgctatatttgtgatataggaattaagaggatacacacgtttgtttcttcgtgcctgttttatgtgcacacattaggcattgagacttcaagcttttctttttttgtccacgtatctttgggtctttgataaagaaaagaatccctgttcattgtaagcacttttacggggcgggtggggaggggtgctctgctggtcttcaattaccaagaattctccaaaacaattttctgcaggatgattgtacagaatcattgcttatgacatgatcgctttctacactgtattacataaataaattaaataaaataaccccgggcaagacttttctttgaaggatgactacagacattaaataatcgaagtaattttgggtggggagaagaggcagattcaattttctttaaccagtctgaagtttcatttatgatacaaaagaagatgaaaatggaagtggcaatataaggggatgaggaaggcatgcctggacaaacccttcttttaagatgtgtcttcaatttgtataaaatggtgttttcatgtaaataaatacattcttggaggagca

SEQ ID NO: 106954 - DNA, 3543 bp, Homo sapiens
  Payload ID: 1007
  Gene Symbol: APP
  Gene Name: amyloid beta (A4) precursor protein
  Uniprot ID: P05067
  ENST ID: ENST00000357903
  CDS Start-End: 168-2423
cgccgcgctcgggctccgtcagtttcctcggcagcggtaggcgagagcacgcggaggagcgtgcgcgggggccccgggagacggcggcggtggcggcgcgggcagagcaaggacgcggcggatcccactcgcacagcagcgcactcggtgccccgcgcagggtcgcgatgctgcccggtttggcactgctcctgctggccgcctggacggctcgggcgctggaggtacccactgatggtaatgctggcctgctggctgaaccccagattgccatgttctgtggcagactgaacatgcacatgaatgtccagaatgggaagtgggattcagatccatcagggaccaaaacctgcattgataccaaggaaggcatcctgcagtattgccaagaagtctaccctgaactgcagatcaccaatgtggtagaagccaaccaaccagtgaccatccagaactggtgcaagcggggccgcaagcagtgcaagacccatccccactttgtgattccctaccgctgcttagttggtgagtttgtaagtgatgcccttctcgttcctgacaagtgcaaattcttacaccaggagaggatggatgtttgcgaaactcatcttcactggcacaccgtcgccaaagagacatgcagtgagaagagtaccaacttgcatgactacggcatgttgctgccctgcggaattgacaagttccgaggggtagagtttgtgtgttgcccactggctgaagaaagtgacaatgtggattctgctgatgcggaggaggatgactcggatgtctggtggggcggagcagacacagactatgcagatgggagtgaagacaaagtagtagaagtagcagaggaggaagaagtggctgaggtggaagaagaagaagccgatgatgacgaggacgatgaggatggtgatgaggtagaggaagaggctgaggaaccctacgaagaagccacagagagaaccaccagcattgccaccaccaccaccaccaccacagagtctgtggaagaggtggttcgagaggtgtgctctgaacaagccgagacggggccgtgccgagcaatgatctcccgctggtactttgatgtgactgaagggaagtgtgccccattcttttacggcggatgtggcggcaaccggaacaactttgacacagaagagtactgcatggccgtgtgtggcagcgccattcctacaacagcagccagtacccctgatgccgttgacaagtatctcgagacacctggggatgagaatgaacatgcccatttccagaaagccaaagagaggcttgaggccaagcaccgagagagaatgtcccaggtcatgagagaatgggaagaggcagaacgtcaagcaaagaacttgcctaaagctgataagaaggcagttatccagcatttccaggagaaagtggaatctttggaacaggaagcagccaacgagagacagcagctggtggagacacacatggccagagtggaagccatgctcaatgaccgccgccgcctggccctggagaactacatcaccgctctgcaggctgttcctcctcggcctcgtcacgtgttcaatatgctaaagaagtatgtccgcgcagaacagaaggacagacagcacaccctaaagcatttcgagcatgtgcgcatggtggatcccaagaaagccgctcagatccggtcccaggttatgacacacctccgtgtgatttatgagcgcatgaatcagtctctctccctgctctacaacgtgcctgcagtggccgaggagattcaggatgaagttgatgagctgcttcagaaagagcaaaactattcagatgacgtcttggccaacatgattagtgaaccaaggatcagttacggaaacgatgctctcatgccatctttgaccgaaacgaaaaccaccgtggagctccttcccgtgaatggagagttcagcctggacgatctccagccgtggcattcttttggggctgactctgtgccagccaacacagaaaacgaagttgagcctgttgatgcccgccctgctgccgaccgaggactgaccactcgaccaggttctgggttgacaaatatcaagacggaggagatctctgaagtgaagatggatgcagaattccgacatgactcaggatatgaagttcatcatcaaaaattggtgttctttgcagaagatgtgggttcaaacaaaggtgcaatcattggactcatggtgggcggtgttgtcatagcgacagtgatcgtcatcaccttggtgatgctgaagaagaaacagtacacatccattcatcatggtgtggtggaggttgacgccgctgtcaccccagaggagcgccacctgtccaagatgcagcagaacggctacgaaaatccaacctacaagttctttgagcagatgcagaactagacccccgccacagcagcctctgaagttggacagcaaaaccattgcttcactacccatcggtgtccatttatagaataatgtgggaagaaacaaacccgttttatgatttactcattatcgccttttgacagctgtgctgtaacacaagtagatgcctgaacttgaattaatccacacatcagtaatgtattctatctctctttacattttggtctctatactacattattaatgggttttgtgtactgtaaagaatttagctgtatcaaactagtgcatgaatagattctctcctgattatttatcacatagccccttagccagttgtatattattcttgtggtttgtgacccaattaagtcctactttacatatgctttaagaatcgatgggggatgcttcatgtgaacgtgggagttcagctgcttctcttgcctaagtattcctttcctgatcactatgcattttaaagttaaacatttttaagtatttcagatgctttagagagattttttttccatgactgcattttactgtacagattgctgcttctgctatatttgtgatataggaattaagaggatacacacgtttgtttcttcgtgcctgttttatgtgcacacattaggcattgagacttcaagcttttctttttttgtccacgtatctttgggtctttgataaagaaaagaatccctgttcattgtaagcacttttacggggcgggtggggaggggtgctctgctggtcttcaattaccaagaattctccaaaacaattttctgcaggatgattgtacagaatcattgcttatgacatgatcgctttctacactgtattacataaataaattaaataaaataaccccgggcaagacttttctttgaaggatgactacagacattaaataatcgaagtaattttgggtggggagaagaggcagattcaattttctttaaccagtctgaagtttcatttatgatacaaaagaagatgaaaatggaagtggcaatataaggggatgaggaaggcatgcctggacaaacccttcttttaagatgtgtcttcaatttgtataaaatggtgttttcatgtaaataaatacattcttggaggagca

SEQ ID NO: 106955 - DNA, 2366 bp, Homo sapiens
  Payload ID: 1007
  Gene Symbol: APP
  Gene Name: amyloid beta (A4) precursor protein
  Uniprot ID: P05067
  ENST ID: ENST00000358918
  CDS Start-End: 48-2306
gatcccactcgcacagcagcgcactcggtgccccgcgcagggtcgcgatgctgcccggtttggcactgctcctgctggccgcctggacggctcgggcgctggaggtacccactgatggtaatgctggcctgctggctgaaccccagattgccatgttctgtggcagactgaacatgcacatgaatgtccagaatgggaagtgggattcagatccatcagggaccaaaacctgcattgataccaaggaaggcatcctgcagtattgccaagaagtctaccctgaactgcagatcaccaatgtggtagaagccaaccaaccagtgaccatccagaactggtgcaagcggggccgcaagcagtgcaagacccatccccactttgtgattccctaccgctgcttagttggtgagtttgtaagtgatgcccttctcgttcctgacaagtgcaaattcttacaccaggagaggatggatgtttgcgaaactcatcttcactggcacaccgtcgccaaagagacatgcagtgagaagagtaccaacttgcatgactacggcatgttgctgccctgcggaattgacaagttccgaggggtagagtttgtgtgttgcccactggctgaagaaagtgacaatgtggattctgctgatgcggaggaggatgactcggatgtctggtggggcggagcagacacagactatgcagatgggagtgaagacaaagtagtagaagtagcagaggaggaagaagtggctgaggtggaagaagaagaagccgatgatgacgaggacgatgaggatggtgatgaggtagaggaagaggctgaggaaccctacgaagaagccacagagagaaccaccagcattgccaccaccaccaccaccaccacagagtctgtggaagaggtggttcgagaggtgtgctctgaacaagccgagacggggccgtgccgagcaatgatctcccgctggtactttgatgtgactgaagggaagtgtgccccattcttttacggcggatgtggcggcaaccggaacaactttgacacagaagagtactgcatggccgtgtgtggcagcgccatgtcccaaagtttactcaagactacccaggaacctcttgcccgagatcctgttaaacttcctacaacagcagccagtacccctgatgccgttgacaagtatctcgagacacctggggatgagaatgaacatgcccatttccagaaagccaaagagaggcttgaggccaagcaccgagagagaatgtcccaggtcatgagagaatgggaagaggcagaacgtcaagcaaagaacttgcctaaagctgataagaaggcagttatccagcatttccaggagaaagtggaatctttggaacaggaagcagccaacgagagacagcagctggtggagacacacatggccagagtggaagccatgctcaatgaccgccgccgcctggccctggagaactacatcaccgctctgcaggctgttcctcctcggcctcgtcacgtgttcaatatgctaaagaagtatgtccgcgcagaacagaaggacagacagcacaccctaaagcatttcgagcatgtgcgcatggtggatcccaagaaagccgctcagatccggtcccaggttatgacacacctccgtgtgatttatgagcgcatgaatcagtctctctccctgctctacaacgtgcctgcagtggccgaggagattcaggatgaagttgatgagctgcttcagaaagagcaaaactattcagatgacgtcttggccaacatgattagtgaaccaaggatcagttacggaaacgatgctctcatgccatctttgaccgaaacgaaaaccaccgtggagctccttcccgtgaatggagagttcagcctggacgatctccagccgtggcattcttttggggctgactctgtgccagccaacacagaaaacgaaggttctgggttgacaaatatcaagacggaggagatctctgaagtgaagatggatgcagaattccgacatgactcaggatatgaagttcatcatcaaaaattggtgttctttgcagaagatgtgggttcaaacaaaggtgcaatcattggactcatggtgggcggtgttgtcatagcgacagtgatcgtcatcaccttggtgatgctgaagaagaaacagtacacatccattcatcatggtgtggtggaggttgacgccgctgtcaccccagaggagcgccacctgtccaagatgcagcagaacggctacgaaaatccaacctacaagttctttgagcagatgcagaactagacccccgccacagcagcctctgaagttggacagcaaaaccattgcttcactacccatcgg

SEQ ID NO: 106956 - DNA, 3294 bp, Homo sapiens
  Payload ID: 1007
  Gene Symbol: APP
  Gene Name: amyloid beta (A4) precursor protein
  ENST ID: ENST00000359726
  CDS Start-End: 193-2175
gtcggatgattcaagctcacggggacgagcaggagcgctctcgacttttctagagcctcagcgtcctaggactcacctttccctgatcctgcaccgtccctctcctggccccagactctccctcccactgttcacgaagcccaggtacccactgatggtaatgctggcctgctggctgaaccccagattgccatgttctgtggcagactgaacatgcacatgaatgtccagaatgggaagtgggattcagatccatcagggaccaaaacctgcattgataccaaggaaggcatcctgcagtattgccaagaagtctaccctgaactgcagatcaccaatgtggtagaagccaaccaaccagtgaccatccagaactggtgcaagcggggccgcaagcagtgcaagacccatccccactttgtgattccctaccgctgcttagttggtgagtttgtaagtgatgcccttctcgttcctgacaagtgcaaattcttacaccaggagaggatggatgtttgcgaaactcatcttcactggcacaccgtcgccaaagagacatgcagtgagaagagtaccaacttgcatgactacggcatgttgctgccctgcggaattgacaagttccgaggggtagagtttgtgtgttgcccactggctgaagaaagtgacaatgtggattctgctgatgcggaggaggatgactcggatgtctggtggggcggagcagacacagactatgcagatgggagtgaagacaaagtagtagaagtagcagaggaggaagaagtggctgaggtggaagaagaagaagccgatgatgacgaggacgatgaggatggtgatgaggtagaggaagaggctgaggaaccctacgaagaagccacagagagaaccaccagcattgccaccaccaccaccaccaccacagagtctgtggaagaggtggttcgagttcctacaacagcagccagtacccctgatgccgttgacaagtatctcgagacacctggggatgagaatgaacatgcccatttccagaaagccaaagagaggcttgaggccaagcaccgagagagaatgtcccaggtcatgagagaatgggaagaggcagaacgtcaagcaaagaacttgcctaaagctgataagaaggcagttatccagcatttccaggagaaagtggaatctttggaacaggaagcagccaacgagagacagcagctggtggagacacacatggccagagtggaagccatgctcaatgaccgccgccgcctggccctggagaactacatcaccgctctgcaggctgttcctcctcggcctcgtcacgtgttcaatatgctaaagaagtatgtccgcgcagaacagaaggacagacagcacaccctaaagcatttcgagcatgtgcgcatggtggatcccaagaaagccgctcagatccggtcccaggttatgacacacctccgtgtgatttatgagcgcatgaatcagtctctctccctgctctacaacgtgcctgcagtggccgaggagattcaggatgaagttgatgagctgcttcagaaagagcaaaactattcagatgacgtcttggccaacatgattagtgaaccaaggatcagttacggaaacgatgctctcatgccatctttgaccgaaacgaaaaccaccgtggagctccttcccgtgaatggagagttcagcctggacgatctccagccgtggcattcttttggggctgactctgtgccagccaacacagaaaacgaagttgagcctgttgatgcccgccctgctgccgaccgaggactgaccactcgaccaggttctgggttgacaaatatcaagacggaggagatctctgaagtgaagatggatgcagaattccgacatgactcaggatatgaagttcatcatcaaaaattggtgttctttgcagaagatgtgggttcaaacaaaggtgcaatcattggactcatggtgggcggtgttgtcatagcgacagtgatcgtcatcaccttggtgatgctgaagaagaaacagtacacatccattcatcatggtgtggtggaggttgacgccgctgtcaccccagaggagcgccacctgtccaagatgcagcagaacggctacgaaaatccaacctacaagttctttgagcagatgcagaactagacccccgccacagcagcctctgaagttggacagcaaaaccattgcttcactacccatcggtgtccatttatagaataatgtgggaagaaacaaacccgttttatgatttactcattatcgccttttgacagctgtgctgtaacacaagtagatgcctgaacttgaattaatccacacatcagtaatgtattctatctctctttacattttggtctctatactacattattaatgggttttgtgtactgtaaagaatttagctgtatcaaactagtgcatgaatagattctctcctgattatttatcacatagccccttagccagttgtatattattcttgtggtttgtgacccaattaagtcctactttacatatgctttaagaatcgatgggggatgcttcatgtgaacgtgggagttcagctgcttctcttgcctaagtattcctttcctgatcactatgcattttaaagttaaacatttttaagtatttcagatgctttagagagattttttttccatgactgcattttactgtacagattgctgcttctgctatatttgtgatataggaattaagaggatacacacgtttgtttcttcgtgcctgttttatgtgcacacattaggcattgagacttcaagcttttctttttttgtccacgtatctttgggtctttgataaagaaaagaatccctgttcattgtaagcacttttacggggcgggtggggaggggtgctctgctggtcttcaattaccaagaattctccaaaacaattttctgcaggatgattgtacagaatcattgcttatgacatgatcgctttctacactgtattacataaataaattaaataaaataaccccgggcaagacttttctttgaaggatgactacagacattaaataatcgaagtaattttgggtggggagaagaggcagattcaattttctttaaccagtctgaagtttcatttatgatacaaaagaagatgaaaatggaagtggcaatataaggggatgaggaaggcatgcctggacaaacccttcttttaagatgtgtcttcaatttgtataaaatggtgttttcatgtaaataaatacattcttggaggagc

SEQ ID NO: 106957 - DNA, 2846 bp, Homo sapiens
  Payload ID: 1007
  Gene Symbol: APP
  Gene Name: amyloid beta (A4) precursor protein
  Uniprot ID: P05067
  ENST ID: ENST00000440126
  CDS Start-End: 267-2507
agagttccggaggctttggttgtccattgttagcttagaagttggcgcagtgtgcgtgtgatccacgcctaaatagcacagccttgctgtgcgtggtagaagttgggttagtgttgacatgctgttgactcaccctcccgaggatggaagctctggcctgggtcaagttgtggtcactgcagttaacagtttgttgatctcagggagtattccacagttgctgatgtaattgacaatgattggagccagctcttccccagattcaaatggaccaattagaggacttgttggttctgtttatcaactatgtacccactgatggtaatgctggcctgctggctgaaccccagattgccatgttctgtggcagactgaacatgcacatgaatgtccagaatgggaagtgggattcagatccatcagggaccaaaacctgcattgataccaaggaaggcatcctgcagtattgccaagaagtctaccctgaactgcagatcaccaatgtggtagaagccaaccaaccagtgaccatccagaactggtgcaagcggggccgcaagcagtgcaagacccatccccactttgtgattccctaccgctgcttagttggtgagtttgtaagtgatgcccttctcgttcctgacaagtgcaaattcttacaccaggagaggatggatgtttgcgaaactcatcttcactggcacaccgtcgccaaagagacatgcagtgagaagagtaccaacttgcatgactacggcatgttgctgccctgcggaattgacaagttccgaggggtagagtttgtgtgttgcccactggctgaagaaagtgacaatgtggattctgctgatgcggaggaggatgactcggatgtctggtggggcggagcagacacagactatgcagatgggagtgaagacaaagtagtagaagtagcagaggaggaagaagtggctgaggtggaagaagaagaagccgatgatgacgaggacgatgaggatggtgatgaggtagaggaagaggctgaggaaccctacgaagaagccacagagagaaccaccagcattgccaccaccaccaccaccaccacagagtctgtggaagaggtggttcgagaggtgtgctctgaacaagccgagacggggccgtgccgagcaatgatctcccgctggtactttgatgtgactgaagggaagtgtgccccattcttttacggcggatgtggcggcaaccggaacaactttgacacagaagagtactgcatggccgtgtgtggcagcgccattcctacaacagcagccagtacccctgatgccgttgacaagtatctcgagacacctggggatgagaatgaacatgcccatttccagaaagccaaagagaggcttgaggccaagcaccgagagagaatgtcccaggtcatgagagaatgggaagaggcagaacgtcaagcaaagaacttgcctaaagctgataagaaggcagttatccagcatttccaggagaaagtggaatctttggaacaggaagcagccaacgagagacagcagctggtggagacacacatggccagagtggaagccatgctcaatgaccgccgccgcctggccctggagaactacatcaccgctctgcaggctgttcctcctcggcctcgtcacgtgttcaatatgctaaagaagtatgtccgcgcagaacagaaggacagacagcacaccctaaagcatttcgagcatgtgcgcatggtggatcccaagaaagccgctcagatccggtcccaggttatgacacacctccgtgtgatttatgagcgcatgaatcagtctctctccctgctctacaacgtgcctgcagtggccgaggagattcaggatgaagttgatgagctgcttcagaaagagcaaaactattcagatgacgtcttggccaacatgattagtgaaccaaggatcagttacggaaacgatgctctcatgccatctttgaccgaaacgaaaaccaccgtggagctccttcccgtgaatggagagttcagcctggacgatctccagccgtggcattcttttggggctgactctgtgccagccaacacagaaaacgaagttgagcctgttgatgcccgccctgctgccgaccgaggactgaccactcgaccaggttctgggttgacaaatatcaagacggaggagatctctgaagtgaagatggatgcagaattccgacatgactcaggatatgaagttcatcatcaaaaattggtgttctttgcagaagatgtgggttcaaacaaaggtgcaatcattggactcatggtgggcggtgttgtcatagcgacagtgatcgtcatcaccttggtgatgctgaagaagaaacagtacacatccattcatcatggtgtggtggaggttgacgccgctgtcaccccagaggagcgccacctgtccaagatgcagcagaacggctacgaaaatccaacctacaagttctttgagcagatgcagaactagacccccgccacagcagcctctgaagttggacagcaaaaccattgcttcactacccatcggtgtccatttatagaataatgtgggaagaaacaaacccgttttatgatttactcattatcgccttttgacagctgtgctgtaacacaagtagatgcctgaacttgaattaatccacacatcagtaatgtattctatctctctttacattttggtctctatactacattattaatgggttttgtgtactgtaaagaatttagctgtatcaaactagtgcatgaatagattctctcctgattatttatcacatagccccttagccagttgtatattattctt

SEQ ID NO: 106958 - DNA, 1846 bp, Homo sapiens
  Payload ID: 1007
  Gene Symbol: APP
  Gene Name: amyloid beta (A4) precursor protein
  ENST ID: ENST00000448850
  CDS Start-End: 1-1456
actgcagatcaccaatgtggtagaagccaaccaaccagtgaccatccagaactggtgcaagcggggccgcaagcagtgcaagacccatccccactttgtgattccctaccgctgcttagttggtgagtttgtaagtgatgcccttctcgttcctgacaagtgcaaattcttacaccaggagaggatggatgtttgcgaaactcatcttcactggcacaccgtcgccaaagagacatgcagtgagaagagtaccaacttgcatgactacggcatgttgctgccctgcggaattgacaagttccgaggggtagagtttgtgtgttgcccactggctgaagaaagtgacaatgtggattctgctgatgcggaggaggatgactcggatgtctggtggggcggagcagacacagactatgcagatgggagtgaagacaaagtagtagaagtagcagaggaggaagaagtggctgaggtggaagaagaagaagccgatgatgacgaggacgatgaggatggtgatgaggtagaggaagaggctgaggaaccctacgaagaagccacagagagaaccaccagcattgccaccaccaccaccaccaccacagagtctgtggaagaggtggttcgagaggtgtgctctgaacaagccgagacggggccgtgccgagcaatgatctcccgctggtactttgatgtgactgaagggaagtgtgccccattcttttacggcggatgtggcggcaaccggaacaactttgacacagaagagtactgcatggccgtgtgtggcagcgccattcctacaacagcagccagtacccctgatgccgttgacaagtatctcgagacacctggggatgagaatgaacatgcccatttccagaaagccaaagagaggcttgaggccaagcaccgagagagaatgtcccaggtcatgagagaatgggaagaggcagaacgtcaagcaaagaacttgcctaaagctgataagaaggcagttatccagcatttccaggagaaagtggaatctttggaacaggaagcagccaacgagagacagcagctggtggagacacacatggccagagtggaagccatgctcaatgaccgccgccgcctggccctggagaactacatcaccgctctgcaggctgttcctcctcggcctcgtcacgtgttcaatatgctaaagaagtatgtccgcgcagaacagaaggacagacagcacaccctaaagcatttcgagcatgtgcgcatggtggatcccaagaaagccgctcagatccggtcccaggttatgacacacctccgtgtgatttatgagcgcatgaatcagtctctctccctgctctacaacgtgcctgcagtggccgaggagattcaggatgaagttggtgcagtggctcatgcctgtaattccagcattttgggaggccaaggtgggcagatgacttgagcccagaagttcaagaccagaatgggaaacatggcaagaccacatttctacaaaaaaattatccaggcatgataacatctatttgtagtcccagctactcaggaggctgtggtgggaggatctcctgagcctggggtggctgaggctgcagtgagccttgatcacgccacctgggcaatagagcaagaccctgtctcaaaaaaaggaagaaaaagactattatttcccccattgaatggtcttggcactattacacaaaatcaattgtccatagataatatgggtttatttcttaattcttagttcttttctttgatctgtgtgcctgtgcttactgtagtaccacactgttttgattattgtagctttgtagtaaattttgaaatcagc

SEQ ID NO: 106959 - DNA, 2517 bp, Homo sapiens
  Payload ID: 1007
  Gene Symbol: APP
  Gene Name: amyloid beta (A4) precursor protein
  ENST ID: ENST00000439274
  CDS Start-End: 35-2179
cagcagcgcactcggtgccccgcgcagggtcgcgatgctgcccggtttggcactgctcctgctggccgcctggacggctcgggcgctggaggtctaccctgaactgcagatcaccaatgtggtagaagccaaccaaccagtgaccatccagaactggtgcaagcggggccgcaagcagtgcaagacccatccccactttgtgattccctaccgctgcttagttggtgagtttgtaagtgatgcccttctcgttcctgacaagtgcaaattcttacaccaggagaggatggatgtttgcgaaactcatcttcactggcacaccgtcgccaaagagacatgcagtgagaagagtaccaacttgcatgactacggcatgttgctgccctgcggaattgacaagttccgaggggtagagtttgtgtgttgcccactggctgaagaaagtgacaatgtggattctgctgatgcggaggaggatgactcggatgtctggtggggcggagcagacacagactatgcagatgggagtgaagacaaagtagtagaagtagcagaggaggaagaagtggctgaggtggaagaagaagaagccgatgatgacgaggacgatgaggatggtgatgaggtagaggaagaggctgaggaaccctacgaagaagccacagagagaaccaccagcattgccaccaccaccaccaccaccacagagtctgtggaagaggtggttcgagaggtgtgctctgaacaagccgagacggggccgtgccgagcaatgatctcccgctggtactttgatgtgactgaagggaagtgtgccccattcttttacggcggatgtggcggcaaccggaacaactttgacacagaagagtactgcatggccgtgtgtggcagcgccatgtcccaaagtttactcaagactacccaggaacctcttgcccgagatcctgttaaacttcctacaacagcagccagtacccctgatgccgttgacaagtatctcgagacacctggggatgagaatgaacatgcccatttccagaaagccaaagagaggcttgaggccaagcaccgagagagaatgtcccaggtcatgagagaatgggaagaggcagaacgtcaagcaaagaacttgcctaaagctgataagaaggcagttatccagcatttccaggagaaagtggaatctttggaacaggaagcagccaacgagagacagcagctggtggagacacacatggccagagtggaagccatgctcaatgaccgccgccgcctggccctggagaactacatcaccgctctgcaggctgttcctcctcggcctcgtcacgtgttcaatatgctaaagaagtatgtccgcgcagaacagaaggacagacagcacaccctaaagcatttcgagcatgtgcgcatggtggatcccaagaaagccgctcagatccggtcccaggttatgacacacctccgtgtgatttatgagcgcatgaatcagtctctctccctgctctacaacgtgcctgcagtggccgaggagattcaggatgaagttgatgagctgcttcagaaagagcaaaactattcagatgacgtcttggccaacatgattagtgaaccaaggatcagttacggaaacgatgctctcatgccatctttgaccgaaacgaaaaccaccgtggagctccttcccgtgaatggagagttcagcctggacgatctccagccgtggcattcttttggggctgactctgtgccagccaacacagaaaacgaagttgagcctgttgatgcccgccctgctgccgaccgaggactgaccactcgaccaggttctgggttgacaaatatcaagacggaggagatctctgaagtgaagatggatgcagaattccgacatgactcaggatatgaagttcatcatcaaaaattggtgttctttgcagaagatgtgggttcaaacaaaggtgcaatcattggactcatggtgggcggtgttgtcatagcgacagtgatcgtcatcaccttggtgatgctgaagaagaaacagtacacatccattcatcatggtgtggtggaggttgacgccgctgtcaccccagaggagcgccacctgtccaagatgcagcagaacggctacgaaaatccaacctacaagttctttgagcagatgcagaactagacccccgccacagcagcctctgaagttggacagcaaaaccattgcttcactacccatcggtgtccatttatagaataatgtgggaagaaacaaacccgttttatgatttactcattatcgccttttgacagctgtgctgtaacacaagtagatgcctgaacttgaattaatccacacatcagtaatgtattctatctctctttacattttggtctctatactacattattaatgggttttgtgtactgtaaagaatttagctgtatcaaactagtgcatgaatagattctctcctgattatttatcacatagccccttagccagttgtatattattct

SEQ ID NO: 106960 - DNA, 541 bp, Homo sapiens
  Payload ID: 1007
  Gene Symbol: APP
  Gene Name: amyloid beta (A4) precursor protein
  ENST ID: ENST00000415997
  CDS Start-End: 1-541
gggcggagcagacacagactatgcagatgggagtgaagacaaagtagtagaagtagcagaggaggaagaagtggctgaggtggaagaagaagaagccgatgatgacgaggacgatgaggatggtgatgaggtagaggaagaggctgaggaaccctacgaagaagccacagagagaaccaccagcattgccaccaccaccaccaccaccacagagtctgtggaagaggtggttcgagtgtcccaaagtttactcaagactacccaggaacctcttgcccgagatcctgttaaacttcctacaacagcagccagtacccctgatgccgttgacaagtatctcgagacacctggggatgagaatgaacatgcccatttccagaaagccaaagagaggcttgaggccaagcaccgagagagaatgtcccaggtcatgagagaatgggaagaggcagaacgtcaagcaaagaacttgcctaaagctgataagaaggcagttatccagcatttccaggagaaagtggaatctttggaacaggaagca

SEQ ID NO: 106961 - DNA, 6534 bp, Homo sapiens
  Payload ID: 1008
  Gene Symbol: APBA1
  Gene Name: amyloid beta (A4) precursor protein-binding, family A, member 1
  Uniprot ID: Q02410
  ENST ID: ENST00000265381
  CDS Start-End: 224-2737
ggcggcggcggcggcggcggcagctgcggcgggagaagatggtggcgctggaggcagcagcggctggagcggagctttattcccaggcttggcaccagcgctgtcactagcgccgcctgctcccgcgggcccgcggacccagctgtcaggcaagcccagtggagcaaaatgagagcgcagtgagccgggcccagcttctctcctagccgttccgactcccaccatgaaccacttggaggggtctgcggaggtggaggtgaccgacgaggcggcaggtggggaggtgaacgagtcggtggaggccgacctggagcaccccgaggtggaagaggaacagcagcagccgccgcagcagcagcactatgtgggccgccaccagcgcgggcgagccctcgaggacctccgcgcccagctcggccaggaggaagaggagcgcggggaatgcctggcgcgctcagccagcacggagagcggcttccacaaccacacggacaccgccgagggcgacgtgatcgccgcggcccgcgacggctacgatgcggagcgcgcgcaggaccccgaggacgagagcgcctatgctgtgcagtaccggcccgaggccgaggagtacacggagcaggcagaggccgagcacgccgaggccacgcaccgccgcgcgctgcccaaccacctgcacttccactcgctggagcacgaggaagccatgaatgcggcctactcaggctacgtctacacgcaccggctcttccaccgcggtgaggacgagccctactccgagccctatgccgactacggcggcctccaggagcacgtgtacgaggagataggggacgcgcccgagctggacgcacgcgacggcctgcggctctacgagcaggagcgcgacgaggcggccgcgtaccgccaggaggccctgggcgcgcggctgcaccattacgacgagcgctccgacggcgagtccgacagccccgagaaggaggccgagttcgcgccctacccgcgcatggacagctacgagcaggaggaggacatcgaccagatagtggccgaggtgaagcagagcatgagctcgcagagcctcgacaaggcagccgaggacatgcctgaggccgagcaggacctggagcgtccccctaccccggccgggggtcgccccgacagccccgggctgcaggcgccggcggggcagcagcgggcggtgggccccgcgggcggcggcgaggcggggcagcggtacagcaaggagaagcgcgatgccatctcgctggccatcaaggacatcaaggaggccatcgaggaggtgaaaaccaggaccatccgttcgccttacacccccgacgagcccaaagagcccatctgggtcatgcgccaggacattagccccaccagggactgtgacgaccagaggccgatggacggagattctccgtctcctggcagctcctcccccttgggtgcagagtcatcaagcacatctcttcaccccagtgaccctgtggaagcgtccactaataaagagtcaagaaaaagcttggcttcattcccaacctacgttgaagttccgggaccctgcgaccccgaagacttgatcgatggaatcatttttgccgccaattaccttggctccactcagctgctctcagacaaaactccttccaaaaacgtgcgcatgatgcaggcccaggaagccgtaagcaggatcaagatggcccagaaattagccaaaagcaggaagaaggctcctgaaggcgaatctcagccaatgactgaagtggatctcttcatttctacccagagaatcaaagtgctgaacgccgacacacaggagacaatgatggaccaccctctgaggaccatttcctacattgcggacattgggaacatcgttgtgctgatggcccgccggcggatgcctcgctccaactcccaggagaacgtggaagcgtcccacccatcccaggatgggaaaaggcagtacaagatgatctgccacgtcttcgagtctgaggatgctcagctgattgcacagtccatcggacaggcatttagcgtggcataccaggaattcctcagggccaatgggattaaccccgaagatctcagccagaaggagtatagtgacctgctcaatacccaggacatgtacaacgatgacctgatccacttctccaagtcggaaaactgtaaagatgttttcatagagaagcagaaaggagaaatcctaggtgtggtgattgtggagtctggctggggatccatcctccccaccgtgatcattgccaacatgatgcatggtggccctgcggagaaatctgggaagctgaatatcggtgaccagatcatgtccattaatggcaccagcctggtgggcctgcctctgtccacctgccagagcattattaagggcttaaagaatcagtcccgagtcaagctgaatatcgtgagatgtcctccggtgaccaccgtgttaatcagaagaccagaccttcgctaccagctcggtttcagcgtccagaatggaattatctgcagcctcatgcgagggggaatagctgagagaggaggcgtccgtgtggggcaccggatcattgaaatcaatggacagagcgtcgtggccaccccccacgagaagatcgtccacattctctccaatgctgttggggagattcatatgaagacaatgccagccgcgatgtacaggctgctgacggcccaggagcagcctgtttacatctgaccgcggccacacgcggtggcatgcatggaggactctcctcttcgtggttgtgtttctcgtgctgcatccctgtgtccactgagactttcccctctcgcgcccagcatttggttttacacaggaagagaagaatccacaaggacctctttactctctccgatttgcttttttttttttttttttttcaataccagggaagtttcgtatgcactcccttgaggatggagagcagccagcacccacctggtactgacccaggaccatcctggagggctttctgggtgtgtccagggggtgggctgtcactgcttgagggagaatcctcccttcccaggaggtgcagacttcttaaaaggagctcgcggggcagcaaagcagctgattcagcagtgcctaaaacccagttgctgatccctgctctctgagtttatctgtgggaatgtggtagtacccagggccagcccacgtcattaaggttatgcactgcctgccatgtagttggggcaccatacattatttcttcccagaatctctgagccaaccttaaacctcttctattgctagttctaatttcaacgtatgtgtgttttctaatacgagccttctcaccccaggataaaaggggaaataactgccttgggcaaggacaccatagtgtcacagagagcttggcaattcatggggcatctgaagctttaccaggttgtcctcaagttatcaaccattagataaacacaggcaggtactgtctgcttctctctctctcacacacacacacacacacacagtcccatttgcatatcacccttccctgctcccaccaccagtgagacaagctgaagattaggcacacagatcccctggaaacccacctctctggaaggccccttccctggcaggtggccaggcaggcgggggctgctcagcctcatcctgagagacctgccctctctgcgctgaggcccagcccctccagcaccactttggcttaaagcatcctcctcctggactcccctccctgccgaacacacatcccaggagtctgggaaggagggactgttcccaagaaggcaagctgcaggtgcaattgcgtcttgttttctggcccaaggcaagaccaactttcttctctgctcagggccactaggcggatgtgatattggaaaggccagaatagtacataaaccacaaaattaaggagacaatagcaacctcaagttatgcctcagaatccccagatgtggtccataaacaccctcttgctgccttgtgggcctgagagcatttttggctggtgtggaattgttccgtgttttcatcaggtgcctcatatttatgcttccgtctcagttcagtgtagatgttttagtaatattataattctgagccagttttcacttggtccaaagagcattttgtgttcatgtgaggtgtgatttggctttgcttttgttttgtttcattcatgacctcagtagagacaggggaagagaaactattatattttgtaattaatatagtccctgttctctgcatccgagatatttatgttgtgtctatggaaataggaactcagtgagcaaatggtgggtagcatgtatttatagagagaatggagggattctaaggagggagcaaagtgactataacaagattagggacaagagacttcaaccagagagttctgtgatcaattccccgagatctctgcatcttctgagttttctgcttagaatcagggaagctcagtgcttgacaggaacgagcagtggcactctcagtttcactgtgttacaaaggagccctgaggaagggaggccgctggctgcccaggtgccctggggggaaagggacttctgctgctgcagagagtggcacccggtggggccaggggctctgggatggtccgtaaagctccccaggacttctttgaaggatgctttacagaatgtttctgggagaccagcctcaaggtcaacccatcacaaacgtgaggaccaggaaggaaccatggccagggttctccatttgctgtagagtatctggtgatacagtgagacactaaagagtcatcagccagttcatctttcctctgccaataagagtggatagaacaggaatgaagtgttactggtggtatttcaggcatcaggagccttggaaaatcatcgtaggggcccatgcctgtctgtccctaggcacctgggcagtgccacagaggcccgcccacgactggccaggggacagaactccagtagtgcatccctgtacaacctgcacataacggttatgtatgttcacctaaaggagagaatatactttctattcctattgcacaaaaaccttgtaaactttgagaggtgctgaaaaagccaattctgcaagctctcctagaggactgacattgtaacattagagtgagaagatttctctgccacattcttttgtgttaatccaggtgtgtcttcacacccagtgagtggaagttgctggagctcggtacaggtccacccagctgaagtgggttctttttcccactaccactggggcaagggagtgagcctaggtatggtcacctcagcagccacagtcttaaaagcaagtcgctagattttttgaaagtcccaagagaagtggtggtcttcccttctgtcatcccagtatatatagttatacatgtaaatatctaaataccccatgtaatgggaaggctatgtacagggcagccttcccaaacgctgtgagggcacagagctgctgtggctgctccaccagggtgtgctggtggctcagctttggggttggactcccacgttcacctccccctcctggtccaggcagaggcaccagaacccatcctgccttttctccagtgtgagcatttcagggagccaccatcagccttgggttcatgagaggaagaaacccccaaagaccaatgcctggagcccacttctccagcgacaccttccctcgccagagcaggctcctaggagtgcatggcaggggtgccgggtccctgtgcacgggtttgctttctgaacattgcccatcaacaccgccttcagggagtcccagagtaacctactacctcccccatcgctcctctgcccccctcaccctgtgggcaccaacacctcccgcacacagatgaaaaccatctacagagcccttcccgggtccctcgacccagtggtgtagccgttaccaatgtttacaaccaggggccgcccctccttagatgtgtttactcgcattcacaggccacctgttggtttgagtttcatgtgtctccttccctggcctaggttgacttgagcacacaactcgatctttcttcccctccatcaaggcagtgtgtgaggactgtgtgggaatgacatttcttgtacatacttagcacagcacctagagtatgaacttgtactattgttctgtaaagagggtgaaatagagcttattgtaaagtgtcgggagaagtatagtattgtatttgtaacaatatcgttctttgtatacacaaaactcaatgatctatatataaatataaataaatatataaataaaatatatctacacgtgagcctggaatgtggacaccgcacacccactgaatgtacttccttgacagtctggtcactggtccctccctccctccctcctccgtcccgtggccacagtcatccagtttggggttgtgatgtatttactgtgctatctatcttcctttatttaactgaacgctaatgtctgtataagagttgctgcaacaataaacaagaacttcacctcttggc

SEQ ID NO: 106962 - DNA, 5110 bp, Homo sapiens
  Payload ID: 1008
  Gene Symbol: APBA1
  Gene Name: amyloid beta (A4) precursor protein-binding, family A, member 1
  ENST ID: ENST00000617471
  CDS Start-End: 1-1314
tctccgtctcctggcagctcctcccccttgggtgcagagtcatcaagcacatctcttcaccccagtgaccctgtggaagcgtccactaataaagagtcaagaaaaagcttggcttcattcccaacctacgttgaagttccgggaccctgcgaccccgaagacttgatcgatggaatcatttttgccgccaattaccttggctccactcagctgctctcagacaaaactccttccaaaaacgtgcgcatgatgcaggcccaggaagccgtaagcaggatcaagatggcccagaaattagccaaaagcaggaagaaggctcctgaaggcgaatctcagccaatgactgaagtggatctcttcatttctacccagagaatcaaagtgctgaacgccgacacacaggagacaatgatggaccaccctctgaggaccatttcctacattgcggacattgggaacatcgttgtgctgatggcccgccggcggatgcctcgctccaactcccaggagaacgtggaagcgtcccacccatcccaggatgggaaaaggcagtacaagatgatctgccacgtcttcgagtctgaggatgctcagctgattgcacagtccatcggacaggcatttagcgtggcataccaggaattcctcagggccaatgggattaaccccgaagatctcagccagaaggagtatagtgacctgctcaatacccaggacatgtacaacgatgacctgatccacttctccaagtcggaaaactgtaaagatgttttcatagagaagcagaaaggagaaatcctaggtgtggtgattgtggagtctggctggggatccatcctccccaccgtgatcattgccaacatgatgcatggtggccctgcggagaaatctgggaagctgaatatcggtgaccagatcatgtccattaatggcaccagcctggtgggcctgcctctgtccacctgccagagcattattaagggcttaaagaatcagtcccgagtcaagctgaatatcgtgagatgtcctccggtgaccaccgtgttaatcagaagaccagaccttcgctaccagctcggtttcagcgtccagaatggaattatctgcagcctcatgcgagggggaatagctgagagaggaggcgtccgtgtggggcaccggatcattgaaatcaatggacagagcgtcgtggccaccccccacgagaagatcgtccacattctctccaatgctgttggggagattcatatgaagacaatgccagccgcgatgtacaggctgctgacggcccaggagcagcctgtttacatctgaccgcggccacacgcggtggcatgcatggaggactctcctcttcgtggttgtgtttctcgtgctgcatccctgtgtccactgagactttcccctctcgcgcccagcatttggttttacacaggaagagaagaatccacaaggacctctttactctctccgatttgcttttttttttttttttttttcaataccagggaagtttcgtatgcactcccttgaggatggagagcagccagcacccacctggtactgacccaggaccatcctggagggctttctgggtgtgtccagggggtgggctgtcactgcttgagggagaatcctcccttcccaggaggtgcagacttcttaaaaggagctcgcggggcagcaaagcagctgattcagcagtgcctaaaacccagttgctgatccctgctctctgagtttatctgtgggaatgtggtagtacccagggccagcccacgtcattaaggttatgcactgcctgccatgtagttggggcaccatacattatttcttcccagaatctctgagccaaccttaaacctcttctattgctagttctaatttcaacgtatgtgtgttttctaatacgagccttctcaccccaggataaaaggggaaataactgccttgggcaaggacaccatagtgtcacagagagcttggcaattcatggggcatctgaagctttaccaggttgtcctcaagttatcaaccattagataaacacaggcaggtactgtctgcttctctctctctcacacacacacacacacacacagtcccatttgcatatcacccttccctgctcccaccaccagtgagacaagctgaagattaggcacacagatcccctggaaacccacctctctggaaggccccttccctggcaggtggccaggcaggcgggggctgctcagcctcatcctgagagacctgccctctctgcgctgaggcccagcccctccagcaccactttggcttaaagcatcctcctcctggactcccctccctgccgaacacacatcccaggagtctgggaaggagggactgttcccaagaaggcaagctgcaggtgcaattgcgtcttgttttctggcccaaggcaagaccaactttcttctctgctcagggccactaggcggatgtgatattggaaaggccagaatagtacataaaccacaaaattaaggagacaatagcaacctcaagttatgcctcagaatccccagatgtggtccataaacaccctcttgctgccttgtgggcctgagagcatttttggctggtgtggaattgttccgtgttttcatcaggtgcctcatatttatgcttccgtctcagttcagtgtagatgttttagtaatattataattctgagccagtttttcacttggtccaaagagcattttgtgttcatgtgaggtgtgatttggctttgcttttgttttgtttcattcatgacctcagtagagacaggggaagagaaactattatattttgtaattaatatagtccctgttctctgcatccgagatatttatgttgtgtctatggaaataggaactcagtgagcaaatggtgggtagcatgtatttatagagagaatggagggattctaaggagggagcaaagtgactataacaagattagggacaagagacttcaaccagagagttctgtgatcaattccccgagatctctgcatcttctgagttttctgcttagaatcagggaagctcagtgcttgacaggaacgagcagtggcactctcagtttcactgtgttacaaaggagccctgaggaagggaggccgctggctgcccaggtgccctggggggaaagggacttctgctgctgcagagagtggcacccggtggggccaggggctctgggatggtccgtaaagctccccaggacttctttgaaggatgctttacagaatgtttctgggagaccagcctcaaggtcaacccatcacaaacgtgaggaccaggaaggaaccatggccagggttctccatttgctgtagagtatctggtgatacagtgagacactaaagagtcatcagccagttcatctttcctctgccaataagagtggatagaacaggaatgaagtgttactggtggtatttcaggcatcaggagccttggaaaatcatcgtaggggcccatgcctgtctgtccctaggcacctgggcagtgccacagaggcccgcccacgactggccaggggacagaactccagtagtgcatccctgtacaacctgcacataacggttatgtatgttcacctaaaggagagaatatactttctattcctattgcacaaaaaccttgtaaactttgagaggtgctgaaaaagccaattctgcaagctctcctagaggactgacattgtaacattagagtgagaagatttctctgccacattcttttgtgttaatccaggtgtgtcttcacacccagtgagtggaagttgctggagctcggtacaggtccacccagctgaagtgggttctttttcccactaccactggggcaagggagtgagcctaggtatggtcacctcagcagccacagtcttaaaagcaagtcgctagattttttgaaagtcccaagagaagtggtggtcttcccttctgtcatcccagtatatatagttatacatgtaaatatctaaataccccatgtaatgggaaggctatgtacagggcagccttcccaaacgctgtgagggcacagagctgctgtggctgctccaccagggtgtgctggtggctcagctttggggttggactcccacgttcacctccccctcctggtccaggcagaggcaccagaacccatcctgccttttctccagtgtgagcatttcagggagccaccatcagccttgggttcatgagaggaagaaacccccaaagaccaatgcctggagcccacttctccagcgacaccttccctcgccagagcaggctcctaggagtgcatggcaggggtgccgggtccctgtgcacgggtttgctttctgaacattgcccatcaacaccgccttcagggagtcccagagtaacctactacctcccccatcgctcctctgcccccctcaccctgtgggcaccaacacctcccgcacacagatgaaaaccatctacagagcccttcccgggtccctcgacccagtggtgtagccgttaccaatgtttacaaccaggggccgcccctccttagatgtgtttactcgcattcacaggccacctgttggtttgagtttcatgtgtctccttccctggcctaggttgacttgagcacacaactcgatctttcttcccctccatcaaggcagtgtgtgaggactgtgtgggaatgacatttcttgtacatacttagcacagcacctagagtatgaacttgtactattgttctgtaaagagggtgaaatagagcttattgtaaagtgtcgggagaagtatagtattgtatttgtaacaatatcgttctttgtatacacaaaactcaatgatctatatataaatataaataaatatataaataaaatatatctacacgtgagcctggaatgtggacaccgcacacccactgaatgtacttccttgacagtctggtcactggtccctccctccctccctcctccgtcccgtggccacagtcatccagtttggggttgtgatgtatttactgtgctatctatcttcctttatttaactgaacgctaatgtctgtataagagttgctgcaacaataaacaagaacttcacctcttg

SEQ ID NO: 106963 - DNA, 367 bp, Homo sapiens
  Payload ID: 1008
  Gene Symbol: APBA1
  Gene Name: amyloid beta (A4) precursor protein-binding, family A, member 1
  ENST ID: ENST00000470082
  CDS Start-End: 1-367
gaagacttgatcgatggaatcatttttgccgccaattaccttggctccactcagctgctctcagacaaaactccttccaaaaacgtgcgcatgatgcaggcccaggaagccgtaagcaggatcaaggctcctgaaggcgaatctcagccaatgactgaagtggatctcttcatttctacccagagaatcaaagtgctgaacgccgacacacaggagacaatgatggaccaccctctgaggaccatttcctacattgcggacattgggaacatcgttgtgctgatggcccgccggcggatgcctcgctccaactcccaggagaacgtggaagcgtcccacccatcccaggatgggaaaaggcagtaca

SEQ ID NO: 106964 - DNA, 367 bp, Homo sapiens; identical to SEQ ID NO: 106963
  Payload ID: 1008
  Gene Symbol: APBA1
  Gene Name: amyloid beta (A4) precursor protein-binding, family A, member 1
  ENST ID: ENST00000620509
  CDS Start-End: 1-367

SEQ ID NO: 106965 - DNA, 3599 bp, Homo sapiens
  Payload ID: 1009
  Gene Symbol: APBA2
  Gene Name: amyloid beta (A4) precursor protein-binding, family A, member 2
  Uniprot ID: Q99767
  ENST ID: ENST00000411764
  CDS Start-End: 208-2421
cagtctcctgaatatttacgcgttgctgaatctcctgtggacaaaccaccaataggccaggactgtcctgtggacagacggggtgagcctcttcttgtgtctggagattctgaaaagatttgatcaccaggagatttttcgggacattaccaaaccactcattttagtggctgcctccgggtgatgatggctgtgtgaacgactgccatggcccaccggaagcttgagagcgtggggagcggcatgttggaccatagggtgagaccaggtcctgtccctcacagccaggagcccgagagcgaggacatggagctgcccttggagggctatgtgcccgagggcctggagctggctgccctgcggccagagagccccgcgccagaggaacaggagtgccacaaccacagccccgatggggactccagctctgactacgtgaacaacacctctgaggaggaggactatgacgagggcctccctgaggaggaggagggcatcacctactacatccgctactgccctgaggacgacagctacctagagggcatggactgcaacggggaggagtacctggcccacagtgcacaccctgtggacactgatgagtgccaggaggcggtggaggagtggacggactcggcgggcccgcacccccacggccacgaggctgaaggcagccaggactacccagacggccaactgcccattccggaggatgagccctccgtccttgaggcccatgaccaggaagaagatggtcactactgtgccagcaaagagggctaccaggactactaccccgaggaggccaacgggaacaccggcgcctccccctaccgcctgaggcgtggggatggggacctggaggaccaggaggaggacattgaccagatcgtggcagagatcaagatgagtctgagcatgaccagcatcaccagcgccagtgaggccagccccgagcatgggcctgagccagggcctgaggactctgtagaggcctgcccacccatcaaggccagctgcagccccagcaggcacgaggcgaggcccaagtcgctgaacctccttcccgaggccaagcaccccggagacccccagagaggcttcaagcccaagaccaggaccccagaagagaggctgaagtggccccacgagcaggtttgcaatggtctggagcagccaaggaagcagcagcgctctgatctcaatggacctgttgacaataacaacattccagagacaaagaaggtggcatcatttccaagttttgtggctgttccagggccctgcgaaccagaagacctcatcgacgggatcatctttgctgccaattacctggggtccacccagctgctatcagaacggaacccttccaaaaacatcagaatgatgcaagcgcaggaggccgtcagccgggtcaagaattctgagggggatgcccagacgctgacggaagtggacctcttcatttccacccagaggatcaaggttttaaatgcagacacgcaggaaaccatgatggaccacgccttgcgtaccatctcctacatcgccgacattgggaacattgtagtgctgatggccagacgccgcatgccccggtcagcctctcaggactgcatcgagaccacgcccggggcccaggaaggcaagaagcagtataagatgatctgccatgtgttcgagtcggaggatgcccagctcatcgcccagtctatcggccaggccttcagcgtggcctaccaggagttcctgcgagccaatggcatcaaccccgaagacttgagccagaaggaatacagcgacatcatcaacacccaggagatgtacaacgacgacctcatccacttctcaaactcggagaactgcaaggagctgcagctggagaagcacaagggcgagatcctgggcgtggtggtggtggagtcgggctggggctccatcctgcccacggtgatcctggccaacatgatgaatggcggcccggctgcccgctcggggaagctgagcatcggggaccagatcatgtccatcaatggcaccagcctggtggggctgcccctcgccacctgccaaggcatcatcaagggcctgaagaaccagacacaggtgaagctcaacattgtcagctgtcccccggtcaccacggtccttatcaagcggccagacctcaagtaccagctgggcttcagcgtgcagaatggaattatctgcagcctcatgagagggggcattgctgagcgagggggcgtccgtgtgggccaccgcatcatcgagatcaacgggcagagcgtggtggccacagcccacgagaagatagtccaagctctgtccaactcggtcggagagatccacatgaagaccatgcccgccgccatgttcaggctcctcacgggtcaggagaccccgctgtacatctaggccaccccagcctggccacgcagccaggacaccgggcagggccgcccgggcccagaggagctgggagccgggccgcagacttgaccccgacgccacagcccagccacggacgctggctccccaaagggtgtgccctcaccacccacttgatttttttcattttgccaaaaaggggtatgtctttatcaaaggagagtcacagaacaaatgtttgtttgtaaagcgttccaagtattttgccacgttctggactgtcttctccctgcacaagccagggtgtgtctcggtagctgtgcgtggtgtggagtgtgtgtctttcctccctgaagctgtgcggagcgaactggcgcctccgagggacgcggctcccggggcagggcagccgtcacccctgcctcccgcccccttggctgggacgtctggggtcctgtggggcccccacaatggtcccaaacagctgcctctgccactgactgcagggacacgggcagcctggctcccaggacacgacttgtaatgaaagtttggggacatgtgattgattgattgattgtaaataaaggatgatggccacaacatgaaaactccatatttatttagatgctattattactgtttggacttttattttggcaggcttttttccagactctagggttttccaatgtgactaatgaccacacctgcctctcccgtcgtctcttctgggcaccctcccacccggctgcatacccgggcagggctcccacagagacaaggagggcacaggtgtctgccccctctttaaaatcgatctacacacatccacgcacatgcgaccccgaggaaacgaaacccactctagaaaacgcgaccttggccgcacctaaagcagccagccgtgagtgcagaccccttggccagcgtggcgcagtggccctgagcagtagtggcatgtgtgtagatcaagtcggatctagtccagctcggttcattagcgatccatgtaatctgacgtcatcttgtctcgaagtctctttttttggcccaggccttgaagaatacactgtgacttaagaagccttaccacgcagtaactaaagctttaggatgactgtattcgaggagtgccgtgtgttgcatgcagctacccgtaggaagacttcgcgcatatcactaataaacctgaagtcgtgatg

SEQ ID NO: 106966 - DNA, 594 bp, Homo sapiens
  Payload ID: 1009
  Gene Symbol: APBA2
  Gene Name: amyloid beta (A4) precursor protein-binding, family A, member 2
  ENST ID: ENST00000559709
  CDS Start-End: 582-594
agcagtcgcggtgtgcggctcggcgcgggctcacaaagagctcggcctcgcggactgagccggcggcagcggggcggggacggcggcgtacccgggcagcccagcgccctggccaggcgtgcctgtgcttaatcagcactgacgactggtgctgcttcagttgatttgatacacctagaggcagcctcatctccaacttgccttgacttcgtctggggagctgccgtgggggacccctggactggcagcattcccacccctcactttggcaaccctggtctaactccgcggagggagctgttcatcctctgggggctgctgggccagaaatatctcttacctgataatgtcaggcatcagaggttcctgtttcgtggtctcctgaatatttacgcgttgctgaatctcctgtggacaaaccaccaataggccaggactgtcctgtggacagacggggtgagcctcttcttgtgtctggagattctgaaaagatttgatcaccaggagatttttcgggacattaccaaaccactcattttagtggctgcctccgggtgatgatggctgtgtgaacgactgccatggcccaccgga

SEQ ID NO: 106967 - DNA, 3349 bp, Homo sapiens
  Payload ID: 1009
  Gene Symbol: APBA2
  Gene Name: amyloid beta (A4) precursor protein-binding, family A, member 2
  Uniprot ID: Q99767
  ENST ID: ENST00000558330
  CDS Start-End: 552-2765
gcccggcagccgcaggccggtgcgggatgcgccccgcagccgcgccgcgtgcgcccggcagaggcggccctgcgtgccgtacgctgcgtccggggcgcgcccgccgctattcgggaagctattcagcttcccgggctcattagcagtcgcggtgtgcggctcggcgcgggctcacaaagagctcggcctcgcggactgagccggcggcagcggggcggggacggcggcgtacccgggcagcccagcgccctggccaggcggagggagctgttcatcctctgggggctgctgggccagaaatatctcttacctgataatgtcaggcatcagaggttcctgtttcgtggtctcctgaatatttacgcgttgctgaatctcctgtggacaaaccaccaataggccaggactgtcctgtggacagacggggtgagcctcttcttgtgtctggagattctgaaaagatttgatcaccaggagatttttcgggacattaccaaaccactcattttagtggctgcctccgggtgatgatggctgtgtgaacgactgccatggcccaccggaagcttgagagcgtggggagcggcatgttggaccatagggtgagaccaggtcctgtccctcacagccaggagcccgagagcgaggacatggagctgcccttggagggctatgtgcccgagggcctggagctggctgccctgcggccagagagccccgcgccagaggaacaggagtgccacaaccacagccccgatggggactccagctctgactacgtgaacaacacctctgaggaggaggactatgacgagggcctccctgaggaggaggagggcatcacctactacatccgctactgccctgaggacgacagctacctagagggcatggactgcaacggggaggagtacctggcccacagtgcacaccctgtggacactgatgagtgccaggaggcggtggaggagtggacggactcggcgggcccgcacccccacggccacgaggctgaaggcagccaggactacccagacggccaactgcccattccggaggatgagccctccgtccttgaggcccatgaccaggaagaagatggtcactactgtgccagcaaagagggctaccaggactactaccccgaggaggccaacgggaacaccggcgcctccccctaccgcctgaggcgtggggatggggacctggaggaccaggaggaggacattgaccagatcgtggcagagatcaagatgagtctgagcatgaccagcatcaccagcgccagtgaggccagccccgagcatgggcctgagccagggcctgaggactctgtagaggcctgcccacccatcaaggccagctgcagccccagcaggcacgaggcgaggcccaagtcgctgaacctccttcccgaggccaagcaccccggagacccccagagaggcttcaagcccaagaccaggaccccagaagagaggctgaagtggccccacgagcaggtttgcaatggtctggagcagccaaggaagcagcagcgctctgatctcaatggacctgttgacaataacaacattccagagacaaagaaggtggcatcatttccaagttttgtggctgttccagggccctgcgaaccagaagacctcatcgacgggatcatctttgctgccaattacctggggtccacccagctgctatcagaacggaacccttccaaaaacatcagaatgatgcaagcgcaggaggccgtcagccgggtcaagaattctgagggggatgcccagacgctgacggaagtggacctcttcatttccacccagaggatcaaggttttaaatgcagacacgcaggaaaccatgatggaccacgccttgcgtaccatctcctacatcgccgacattgggaacattgtagtgctgatggccagacgccgcatgccccggtcagcctctcaggactgcatcgagaccacgcccggggcccaggaaggcaagaagcagtataagatgatctgccatgtgttcgagtcggaggatgcccagctcatcgcccagtctatcggccaggccttcagcgtggcctaccaggagttcctgcgagccaatggcatcaaccccgaagacttgagccagaaggaatacagcgacatcatcaacacccaggagatgtacaacgacgacctcatccacttctcaaactcggagaactgcaaggagctgcagctggagaagcacaagggcgagatcctgggcgtggtggtggtggagtcgggctggggctccatcctgcccacggtgatcctggccaacatgatgaatggcggcccggctgcccgctcggggaagctgagcatcggggaccagatcatgtccatcaatggcaccagcctggtggggctgcccctcgccacctgccaaggcatcatcaagggcctgaagaaccagacacaggtgaagctcaacattgtcagctgtcccccggtcaccacggtccttatcaagcggccagacctcaagtaccagctgggcttcagcgtgcagaatggaattatctgcagcctcatgagagggggcattgctgagcgagggggcgtccgtgtgggccaccgcatcatcgagatcaacgggcagagcgtggtggccacagcccacgagaagatagtccaagctctgtccaactcggtcggagagatccacatgaagaccatgcccgccgccatgttcaggctcctcacgggtcaggagaccccgctgtacatctaggccaccccagcctggccacgcagccaggacaccgggcagggccgcccgggcccagaggagctgggagccgggccgcagacttgaccccgacgccacagcccagccacggacgctggctccccaaagggtgtgccctcaccacccacttgatttttttcattttgccaaaaaggggtatgtctttatcaaaggagagtcacagaacaaatgtttgtttgtaaagcgttccaagtattttgccacgttctggactgtcttctccctgcacaagccagggtgtgtctcggtagctgtgcgtggtgtggagtgtgtgtctttcctccctgaagctgtgcggagcgaactggcgcctccgagggacgcggctcccggggcagggcagccgtcacccctgcctcccgcccccttggctgggacgtctggggtcctgtggggcccccacaatggtcccaaacagctgcctctgccactgactgcagggacacgggcagcctggctcccaggacacgacttgtaatgaaagtttggggacatgtgattgattgattgattgtaaataaaggatgatggccacaacatgaaaa

SEQ ID NO: 106968 - DNA, 711 bp, Homo sapiens
  Payload ID: 1009
  Gene Symbol: APBA2
  Gene Name: amyloid beta (A4) precursor protein-binding, family A, member 2
  ENST ID: ENST00000560283
  CDS Start-End: 376-711
gcagatgagggcctgcttgggtctggggcgtcagtggggattggctgcaggcagccatgaggagccttcagggtgatgagggttctaaaagtgcgtcgtgtgcctgagccactgcgacattcactagaagtcctccgtgctgacggagggtgaactgtgtggggcccaagttctatctcaggaaagccagggaagccactcagttcagctttgtgaaaatcaagggagtcttcttggaggaagtggactctgagctggatgtgaatgacggagtgtctttgaaagatttgatcaccaggagatttttcgggacattaccaaaccactcattttagtggctgcctccgggtgatgatggctgtgtgaacgactgccatggcccaccggaagcttgagagcgtggggagcggcatgttggaccatagggtgagaccaggtcctgtccctcacagccaggagcccgagagcgaggacatggagctgcccttggagggctatgtgcccgagggcctggagctggctgccctgcggccagagagccccgcgccagaggaacaggagtgccacaaccacagccccgatggggactccagctctgactacgtgaacaacacctctgaggaggaggactatgacgagggcctccctgaggaggaggagggcatcacctactacatccgctactgccctgaggacgacagctacctagag

SEQ ID NO: 106969 - DNA, 3138 bp, Homo sapiens
  Payload ID: 1009
  Gene Symbol: APBA2
  Gene Name: amyloid beta (A4) precursor protein-binding, family A, member 2
  Uniprot ID: Q99767
  ENST ID: ENST00000561069
  CDS Start-End: 305-2554
acataacagtaaggcaagaagatgactgcatttatcttctcagaatcacttcttcttaattgttgcttcccactattggcattggtgaaaggctgggccacaggaggctggatgaactttgtgttagccagtctcctgaatatttacgcgttgctgaatctcctgtggacaaaccaccaataggccaggactgtcctgtggacagacgggaaagatttgatcaccaggagatttttcgggacattaccaaaccactcattttagtggctgcctccgggtgatgatggctgtgtgaacgactgccatggcccaccggaagcttgagagcgtggggagcggcatgttggaccatagggtgagaccaggtcctgtccctcacagccaggagcccgagagcgaggacatggagctgcccttggagggctatgtgcccgagggcctggagctggctgccctgcggccagagagccccgcgccagaggaacaggagtgccacaaccacagccccgatggggactccagctctgactacgtgaacaacacctctgaggaggaggactatgacgagggcctccctgaggaggaggagggcatcacctactacatccgctactgccctgaggacgacagctacctagagggcatggactgcaacggggaggagtacctggcccacagtgcacaccctgtggacactgatgagtgccaggaggcggtggaggagtggacggactcggcgggcccgcacccccacggccacgaggctgaaggcagccaggactacccagacggccaactgcccattccggaggatgagccctccgtccttgaggcccatgaccaggaagaagatggtcactactgtgccagcaaagagggctaccaggactactaccccgaggaggccaacgggaacaccggcgcctccccctaccgcctgaggcgtggggatggggacctggaggaccaggaggaggacattgaccagatcgtggcagagatcaagatgagtctgagcatgaccagcatcaccagcgccagtgaggccagccccgagcatgggcctgagccagggcctgaggactctgtagaggcctgcccacccatcaaggccagctgcagccccagcaggcacgaggcgaggcccaagtcgctgaacctccttcccgaggccaagcaccccggagacccccagagaggcttcaagcccaagaccaggaccccagaagagaggctgaagtggccccacgagcaggtttgcaatggtctggagcagccaaggaagcagcagcgctctgatctcaatggacctgttgacaataacaacattccagagacaaagaaggtggcatcatttccaagttttgtggctgttccagggccctgcgaaccagaagacctcatcgacgggatcatctttgctgccaattacctggggtccacccagctgctatcagaacggaacccttccaaaaacatcagaatgatgcaagcgcaggaggccgtcagccgggtcaagaggatgcaaaaggctgctaagatcaagaaaaaagcgaattctgagggggatgcccagacgctgacggaagtggacctcttcatttccacccagaggatcaaggttttaaatgcagacacgcaggaaaccatgatggaccacgccttgcgtaccatctcctacatcgccgacattgggaacattgtagtgctgatggccagacgccgcatgccccggtcagcctctcaggactgcatcgagaccacgcccggggcccaggaaggcaagaagcagtataagatgatctgccatgtgttcgagtcggaggatgcccagctcatcgcccagtctatcggccaggccttcagcgtggcctaccaggagttcctgcgagccaatggcatcaaccccgaagacttgagccagaaggaatacagcgacatcatcaacacccaggagatgtacaacgacgacctcatccacttctcaaactcggagaactgcaaggagctgcagctggagaagcacaagggcgagatcctgggcgtggtggtggtggagtcgggctggggctccatcctgcccacggtgatcctggccaacatgatgaatggcggcccggctgcccgctcggggaagctgagcatcggggaccagatcatgtccatcaatggcaccagcctggtggggctgcccctcgccacctgccaaggcatcatcaagggcctgaagaaccagacacaggtgaagctcaacattgtcagctgtcccccggtcaccacggtccttatcaagcggccagacctcaagtaccagctgggcttcagcgtgcagaatggaattatctgcagcctcatgagagggggcattgctgagcgagggggcgtccgtgtgggccaccgcatcatcgagatcaacgggcagagcgtggtggccacagcccacgagaagatagtccaagctctgtccaactcggtcggagagatccacatgaagaccatgcccgccgccatgttcaggctcctcacgggtcaggagaccccgctgtacatctaggccaccccagcctggccacgcagccaggacaccgggcagggccgcccgggcccagaggagctgggagccgggccgcagacttgaccccgacgccacagcccagccacggacgctggctccccaaagggtgtgccctcaccacccacttgatttttttcattttgccaaaaaggggtatgtctttatcaaaggagagtcacagaacaaatgtttgtttgtaaagcgttccaagtattttgccacgttctggactgtcttctccctgcacaagccagggtgtgtctcggtagctgtgcgtggtgtggagtgtgtgtctttcctccctgaagctgtgcggagcgaactggcgcctccgagggacgcggctcccggggcagggcagccgtcacccctgcctcccgcccccttggctgggacgtctggggtcctgtggggcccccacaatggtcccaaacagctgcctctgccactgactgcagggacacgggcagcctggctcccaggacacgacttgtaatgaaagtttggggacatgtgattgattgattgattgtaaataaaggatgatggccacaacatgaaaa

SEQ ID NO: 106970 - DNA, 4031 bp, Homo sapiens
  Payload ID: 1009
  Gene Symbol: APBA2
  Gene Name: amyloid beta (A4) precursor protein-binding, family A, member 2
  Uniprot ID: Q99767
  ENST ID: ENST00000558402
  CDS Start-End: 600-2849
agtgtgcccggcgcgggtgaggcggaagcggccggggcgggggcgcaggcccggcagccgcaggccggtgcgggatgcgccccgcagccgcgccgcgtgcgcccggcagaggcggccctgcgtgccgtacgctgcgtccggggcgcgcccgccgctattcgggaagctattcagcttcccgggctcattagcagtcgcggtgtgcggctcggcgcgggctcacaaagagctcggcctcgcggactgagccggcggcagcggggcggggacggcggcgtacccgggcagcccagcgccctggccaggcggagggagctgttcatcctctgggggctgctgggccagaaatatctcttacctgataatgtcaggcatcagaggttcctgtttcgtggtctcctgaatatttacgcgttgctgaatctcctgtggacaaaccaccaataggccaggactgtcctgtggacagacggggtgagcctcttcttgtgtctggagattctgaaaagatttgatcaccaggagatttttcgggacattaccaaaccactcattttagtggctgcctccgggtgatgatggctgtgtgaacgactgccatggcccaccggaagcttgagagcgtggggagcggcatgttggaccatagggtgagaccaggtcctgtccctcacagccaggagcccgagagcgaggacatggagctgcccttggagggctatgtgcccgagggcctggagctggctgccctgcggccagagagccccgcgccagaggaacaggagtgccacaaccacagccccgatggggactccagctctgactacgtgaacaacacctctgaggaggaggactatgacgagggcctccctgaggaggaggagggcatcacctactacatccgctactgccctgaggacgacagctacctagagggcatggactgcaacggggaggagtacctggcccacagtgcacaccctgtggacactgatgagtgccaggaggcggtggaggagtggacggactcggcgggcccgcacccccacggccacgaggctgaaggcagccaggactacccagacggccaactgcccattccggaggatgagccctccgtccttgaggcccatgaccaggaagaagatggtcactactgtgccagcaaagagggctaccaggactactaccccgaggaggccaacgggaacaccggcgcctccccctaccgcctgaggcgtggggatggggacctggaggaccaggaggaggacattgaccagatcgtggcagagatcaagatgagtctgagcatgaccagcatcaccagcgccagtgaggccagccccgagcatgggcctgagccagggcctgaggactctgtagaggcctgcccacccatcaaggccagctgcagccccagcaggcacgaggcgaggcccaagtcgctgaacctccttcccgaggccaagcaccccggagacccccagagaggcttcaagcccaagaccaggaccccagaagagaggctgaagtggccccacgagcaggtttgcaatggtctggagcagccaaggaagcagcagcgctctgatctcaatggacctgttgacaataacaacattccagagacaaagaaggtggcatcatttccaagttttgtggctgttccagggccctgcgaaccagaagacctcatcgacgggatcatctttgctgccaattacctggggtccacccagctgctatcagaacggaacccttccaaaaacatcagaatgatgcaagcgcaggaggccgtcagccgggtcaagaggatgcaaaaggctgctaagatcaagaaaaaagcgaattctgagggggatgcccagacgctgacggaagtggacctcttcatttccacccagaggatcaaggttttaaatgcagacacgcaggaaaccatgatggaccacgccttgcgtaccatctcctacatcgccgacattgggaacattgtagtgctgatggccagacgccgcatgccccggtcagcctctcaggactgcatcgagaccacgcccggggcccaggaaggcaagaagcagtataagatgatctgccatgtgttcgagtcggaggatgcccagctcatcgcccagtctatcggccaggccttcagcgtggcctaccaggagttcctgcgagccaatggcatcaaccccgaagacttgagccagaaggaatacagcgacatcatcaacacccaggagatgtacaacgacgacctcatccacttctcaaactcggagaactgcaaggagctgcagctggagaagcacaagggcgagatcctgggcgtggtggtggtggagtcgggctggggctccatcctgcccacggtgatcctggccaacatgatgaatggcggcccggctgcccgctcggggaagctgagcatcggggaccagatcatgtccatcaatggcaccagcctggtggggctgcccctcgccacctgccaaggcatcatcaagggcctgaagaaccagacacaggtgaagctcaacattgtcagctgtcccccggtcaccacggtccttatcaagcggccagacctcaagtaccagctgggcttcagcgtgcagaatggaattatctgcagcctcatgagagggggcattgctgagcgagggggcgtccgtgtgggccaccgcatcatcgagatcaacgggcagagcgtggtggccacagcccacgagaagatagtccaagctctgtccaactcggtcggagagatccacatgaagaccatgcccgccgccatgttcaggctcctcacgggtcaggagaccccgctgtacatctaggccaccccagcctggccacgcagccaggacaccgggcagggccgcccgggcccagaggagctgggagccgggccgcagacttgaccccgacgccacagcccagccacggacgctggctccccaaagggtgtgccctcaccacccacttgatttttttcattttgccaaaaaggggtatgtctttatcaaaggagagtcacagaacaaatgtttgtttgtaaagcgttccaagtattttgccacgttctggactgtcttctccctgcacaagccagggtgtgtctcggtagctgtgcgtggtgtggagtgtgtgtctttcctccctgaagctgtgcggagcgaactggcgcctccgagggacgcggctcccggggcagggcagccgtcacccctgcctcccgcccccttggctgggacgtctggggtcctgtggggcccccacaatggtcccaaacagctgcctctgccactgactgcagggacacgggcagcctggctcccaggacacgacttgtaatgaaagtttggggacatgtgattgattgattgattgtaaataaaggatgatggccacaacatgaaaactccatatttatttagatgctattattactgtttggacttttattttggcaggcttttttccagactctagggttttccaatgtgactaatgaccacacctgcctctcccgtcgtctcttctgggcaccctcccacccggctgcatacccgggcagggctcccacagagacaaggagggcacaggtgtctgccccctctttaaaatcgatctacacacatccacgcacatgcgaccccgaggaaacgaaacccactctagaaaacgcgaccttggccgcacctaaagcagccagccgtgagtgcagaccccttggccagcgtggcgcagtggccctgagcagtagtggcatgtgtgtagatcaagtcggatctagtccagctcggttcattagcgatccatgtaatctgacgtcatcttgtctcgaagtctctttttttggcccaggccttgaagaatacactgtgacttaagaagccttaccacgcagtaactaaagctttaggatgactgtattcgaggagtgccgtgtgttgcatgcagctacccgtaggaagacttcgcgcatatcactaataaacctgaagtcgtgatgaaaa

SEQ ID NO: 106971 - DNA, 936 bp, Homo sapiens
  Payload ID: 1009
  Gene Symbol: APBA2
  Gene Name: amyloid beta (A4) precursor protein-binding, family A, member 2
  ENST ID: ENST00000558358
  CDS Start-End: 146-936
agtggtgagcacggtgtcgggggccgcattagctattgatttatgtgctgttatagaattaattgagtctggacatggagactcattttcttggacatgtagcagtggctgcctccgggtgatgatggctgtgtgaacgactgccatggcccaccggaagcttgagagcgtggggagcggcatgttggaccatagggtgagaccaggtcctgtccctcacagccaggagcccgagagcgaggacatggagctgcccttggagggctatgtgcccgagggcctggagctggctgccctgcggccagagagccccgcgccagaggaacaggagtgccacaaccacagccccgatggggactccagctctgactacgtgaacaacacctctgaggaggaggactatgacgagggcctccctgaggaggaggagggcatcacctactacatccgctactgccctgaggacgacagctacctagagggcatggactgcaacggggaggagtacctggcccacagtgcacaccctgtggacactgatgagtgccaggaggcggtggaggagtggacggactcggcgggcccgcacccccacggccacgaggctgaaggcagccaggactacccagacggccaactgcccattccggaggatgagccctccgtccttgaggcccatgaccaggaagaagatggtcactactgtgccagcaaagagggctaccaggactactaccccgaggaggccaacgggaacaccggcgcctccccctaccgcctgaggcgtggggatggggacctggaggaccaggaggaggacattgaccagatcgtggcagagatcaagatgagtctgagcatgaccagcatcaccagcgccagtgaggccagccccgagcatgggcctgagccagggcctgaggactctgtagaggc

SEQ ID NO: 106972 - DNA, 554 bp, Homo sapiens
  Payload ID: 1009
  Gene Symbol: APBA2
  Gene Name: amyloid beta (A4) precursor protein-binding, family A, member 2
  ENST ID: ENST00000558206
  CDS Start-End: 473-554
cagctcagccccactgcaaggagctcctgggtttatttaagtgagcctcagataactttacataaaagcaaatgtgtaaaaagcgataaagtcagatatattgaacatttgtcctgagggcaaatttctgagctctaaaagccagtttggttttagataacatctgtgagtctggaaacaggctgagatactctatatctgcactcccaactctgcctttggctttgtgagccctgtggtctccttgaaagaattggtccccagtgggtgaactaatcacccatgaagagtctcccaattcaaatctggaataaaaagtgaggacatgggggcagaatgttactcatcacatgtggcccgtcagtactagacttcaagaaagatttgatcaccaggagatttttcgggacattaccaaaccactcattttagtggctgcctccgggtgatgatggctgtgtgaacgactgccatggcccaccggaagcttgagagcgtggggagcggcatgttggaccatagggtgagaccaggtcctgtccctcacagccagg

SEQ ID NO: 106973 - DNA, 535 bp, Homo sapiens
  Payload ID: 1009
  Gene Symbol: APBA2
  Gene Name: amyloid beta (A4) precursor protein-binding, family A, member 2
  ENST ID: ENST00000558804
  CDS Start-End: 326-535
aacaaccgctgacttcctggttcctgggtgccgcatcactgcccctctgctccgggtcaaaccggctgtatgcttagcttcaggaacatgtggcaggtggcagcccccggccccgtggcagtctcctgaatatttacgcgttgctgaatctcctgtggacaaaccaccaataggccaggactgtcctgtggacagacggggtgagcctcttcttgtgtctggagattctgaaaagatttgatcaccaggagatttttcgggacattaccaaaccactcattttagtggctgcctccgggtgatgatggctgtgtgaacgactgccatggcccaccggaagcttgagagcgtggggagcggcatgttggaccatagggtgagaccaggtcctgtccctcacagccaggagcccgagagcgaggacatggagctgcccttggagggctatgtgcccgagggcctggagctggctgccctgcggccagagagccccgcgccagaggaacaggagtgccacaaccacagccccgatggg

SEQ ID NO: 106974 - DNA, 3635 bp, Homo sapiens
  Payload ID: 1009
  Gene Symbol: APBA2
  Gene Name: amyloid beta (A4) precursor protein-binding, family A, member 2
  Uniprot ID: Q99767
  ENST ID: ENST00000558259
  CDS Start-End: 208-2457
cagtctcctgaatatttacgcgttgctgaatctcctgtggacaaaccaccaataggccaggactgtcctgtggacagacggggtgagcctcttcttgtgtctggagattctgaaaagatttgatcaccaggagatttttcgggacattaccaaaccactcattttagtggctgcctccgggtgatgatggctgtgtgaacgactgccatggcccaccggaagcttgagagcgtggggagcggcatgttggaccatagggtgagaccaggtcctgtccctcacagccaggagcccgagagcgaggacatggagctgcccttggagggctatgtgcccgagggcctggagctggctgccctgcggccagagagccccgcgccagaggaacaggagtgccacaaccacagccccgatggggactccagctctgactacgtgaacaacacctctgaggaggaggactatgacgagggcctccctgaggaggaggagggcatcacctactacatccgctactgccctgaggacgacagctacctagagggcatggactgcaacggggaggagtacctggcccacagtgcacaccctgtggacactgatgagtgccaggaggcggtggaggagtggacggactcggcgggcccgcacccccacggccacgaggctgaaggcagccaggactacccagacggccaactgcccattccggaggatgagccctccgtccttgaggcccatgaccaggaagaagatggtcactactgtgccagcaaagagggctaccaggactactaccccgaggaggccaacgggaacaccggcgcctccccctaccgcctgaggcgtggggatggggacctggaggaccaggaggaggacattgaccagatcgtggcagagatcaagatgagtctgagcatgaccagcatcaccagcgccagtgaggccagccccgagcatgggcctgagccagggcctgaggactctgtagaggcctgcccacccatcaaggccagctgcagccccagcaggcacgaggcgaggcccaagtcgctgaacctccttcccgaggccaagcaccccggagacccccagagaggcttcaagcccaagaccaggaccccagaagagaggctgaagtggccccacgagcaggtttgcaatggtctggagcagccaaggaagcagcagcgctctgatctcaatggacctgttgacaataacaacattccagagacaaagaaggtggcatcatttccaagttttgtggctgttccagggccctgcgaaccagaagacctcatcgacgggatcatctttgctgccaattacctggggtccacccagctgctatcagaacggaacccttccaaaaacatcagaatgatgcaagcgcaggaggccgtcagccgggtcaagaggatgcaaaaggctgctaagatcaagaaaaaagcgaattctgagggggatgcccagacgctgacggaagtggacctcttcatttccacccagaggatcaaggttttaaatgcagacacgcaggaaaccatgatggaccacgccttgcgtaccatctcctacatcgccgacattgggaacattgtagtgctgatggccagacgccgcatgccccggtcagcctctcaggactgcatcgagaccacgcccggggcccaggaaggcaagaagcagtataagatgatctgccatgtgttcgagtcggaggatgcccagctcatcgcccagtctatcggccaggccttcagcgtggcctaccaggagttcctgcgagccaatggcatcaaccccgaagacttgagccagaaggaatacagcgacatcatcaacacccaggagatgtacaacgacgacctcatccacttctcaaactcggagaactgcaaggagctgcagctggagaagcacaagggcgagatcctgggcgtggtggtggtggagtcgggctggggctccatcctgcccacggtgatcctggccaacatgatgaatggcggcccggctgcccgctcggggaagctgagcatcggggaccagatcatgtccatcaatggcaccagcctggtggggctgcccctcgccacctgccaaggcatcatcaagggcctgaagaaccagacacaggtgaagctcaacattgtcagctgtcccccggtcaccacggtccttatcaagcggccagacctcaagtaccagctgggcttcagcgtgcagaatggaattatctgcagcctcatgagagggggcattgctgagcgagggggcgtccgtgtgggccaccgcatcatcgagatcaacgggcagagcgtggtggccacagcccacgagaagatagtccaagctctgtccaactcggtcggagagatccacatgaagaccatgcccgccgccatgttcaggctcctcacgggtcaggagaccccgctgtacatctaggccaccccagcctggccacgcagccaggacaccgggcagggccgcccgggcccagaggagctgggagccgggccgcagacttgaccccgacgccacagcccagccacggacgctggctccccaaagggtgtgccctcaccacccacttgatttttttcattttgccaaaaaggggtatgtctttatcaaaggagagtcacagaacaaatgtttgtttgtaaagcgttccaagtattttgccacgttctggactgtcttctccctgcacaagccagggtgtgtctcggtagctgtgcgtggtgtggagtgtgtgtctttcctccctgaagctgtgcggagcgaactggcgcctccgagggacgcggctcccggggcagggcagccgtcacccctgcctcccgcccccttggctgggacgtctggggtcctgtggggcccccacaatggtcccaaacagctgcctctgccactgactgcagggacacgggcagcctggctcccaggacacgacttgtaatgaaagtttggggacatgtgattgattgattgattgtaaataaaggatgatggccacaacatgaaaactccatatttatttagatgctattattactgtttggacttttattttggcaggcttttttccagactctagggttttccaatgtgactaatgaccacacctgcctctcccgtcgtctcttctgggcaccctcccacccggctgcatacccgggcagggctcccacagagacaaggagggcacaggtgtctgccccctctttaaaatcgatctacacacatccacgcacatgcgaccccgaggaaacgaaacccactctagaaaacgcgaccttggccgcacctaaagcagccagccgtgagtgcagaccccttggccagcgtggcgcagtggccctgagcagtagtggcatgtgtgtagatcaagtcggatctagtccagctcggttcattagcgatccatgtaatctgacgtcatcttgtctcgaagtctctttttttggcccaggccttgaagaatacactgtgacttaagaagccttaccacgcagtaactaaagctttaggatgactgtattcgaggagtgccgtgtgttgcatgcagctacccgtaggaagacttcgcgcatatcactaataaacctgaagtcgtgatg

SEQ ID NO: 106975 - DNA, 3640 bp, Homo sapiens
  Payload ID: 1009
  Gene Symbol: APBA2
  Gene Name: amyloid beta (A4) precursor protein-binding, family A, member 2
  Uniprot ID: Q99767
  ENST ID: ENST00000620457
  CDS Start-End: 205-2454
tctcctgaatatttacgcgttgctgaatctcctgtggacaaaccaccaataggccaggactgtcctgtggacagacggggtgagcctcttcttgtgtctggagattctgaaaagatttgatcaccaggagatttttcgggacattaccaaaccactcattttagtggctgcctccgggtgatgatggctgtgtgaacgactgccatggcccaccggaagcttgagagcgtggggagcggcatgttggaccatagggtgagaccaggtcctgtccctcacagccaggagcccgagagcgaggacatggagctgcccttggagggctatgtgcccgagggcctggagctggctgccctgcggccagagagccccgcgccagaggaacaggagtgccacaaccacagccccgatggggactccagctctgactacgtgaacaacacctctgaggaggaggactatgacgagggcctccctgaggaggaggagggcatcacctactacatccgctactgccctgaggacgacagctacctagagggcatggactgcaacggggaggagtacctggcccacagtgcacaccctgtggacactgatgagtgccaggaggcggtggaggagtggacggactcggcgggcccgcacccccacggccacgaggctgaaggcagccaggactacccagacggccaactgcccattccggaggatgagccctccgtccttgaggcccatgaccaggaagaagatggtcactactgtgccagcaaagagggctaccaggactactaccccgaggaggccaacgggaacaccggcgcctccccctaccgcctgaggcgtggggatggggacctggaggaccaggaggaggacattgaccagatcgtggcagagatcaagatgagtctgagcatgaccagcatcaccagcgccagtgaggccagccccgagcatgggcctgagccagggcctgaggactctgtagaggcctgcccacccatcaaggccagctgcagccccagcaggcacgaggcgaggcccaagtcgctgaacctccttcccgaggccaagcaccccggagacccccagagaggcttcaagcccaagaccaggaccccagaagagaggctgaagtggccccacgagcaggtttgcaatggtctggagcagccaaggaagcagcagcgctctgatctcaatggacctgttgacaataacaacattccagagacaaagaaggtggcatcatttccaagttttgtggctgttccagggccctgcgaaccagaagacctcatcgacgggatcatctttgctgccaattacctggggtccacccagctgctatcagaacggaacccttccaaaaacatcagaatgatgcaagcgcaggaggccgtcagccgggtcaagaggatgcaaaaggctgctaagatcaagaaaaaagcgaattctgagggggatgcccagacgctgacggaagtggacctcttcatttccacccagaggatcaaggttttaaatgcagacacgcaggaaaccatgatggaccacgccttgcgtaccatctcctacatcgccgacattgggaacattgtagtgctgatggccagacgccgcatgccccggtcagcctctcaggactgcatcgagaccacgcccggggcccaggaaggcaagaagcagtataagatgatctgccatgtgttcgagtcggaggatgcccagctcatcgcccagtctatcggccaggccttcagcgtggcctaccaggagttcctgcgagccaatggcatcaaccccgaagacttgagccagaaggaatacagcgacatcatcaacacccaggagatgtacaacgacgacctcatccacttctcaaactcggagaactgcaaggagctgcagctggagaagcacaagggcgagatcctgggcgtggtggtggtggagtcgggctggggctccatcctgcccacggtgatcctggccaacatgatgaatggcggcccggctgcccgctcggggaagctgagcatcggggaccagatcatgtccatcaatggcaccagcctggtggggctgcccctcgccacctgccaaggcatcatcaagggcctgaagaaccagacacaggtgaagctcaacattgtcagctgtcccccggtcaccacggtccttatcaagcggccagacctcaagtaccagctgggcttcagcgtgcagaatggaattatctgcagcctcatgagagggggcattgctgagcgagggggcgtccgtgtgggccaccgcatcatcgagatcaacgggcagagcgtggtggccacagcccacgagaagatagtccaagctctgtccaactcggtcggagagatccacatgaagaccatgcccgccgccatgttcaggctcctcacgggtcaggagaccccgctgtacatctaggccaccccagcctggccacgcagccaggacaccgggcagggccgcccgggcccagaggagctgggagccgggccgcagacttgaccccgacgccacagcccagccacggacgctggctccccaaagggtgtgccctcaccacccacttgatttttttcattttgccaaaaaggggtatgtctttatcaaaggagagtcacagaacaaatgtttgtttgtaaagcgttccaagtattttgccacgttctggactgtcttctccctgcacaagccagggtgtgtctcggtagctgtgcgtggtgtggagtgtgtgtctttcctccctgaagctgtgcggagcgaactggcgcctccgagggacgcggctcccggggcagggcagccgtcacccctgcctcccgcccccttggctgggacgtctggggtcctgtggggcccccacaatggtcccaaacagctgcctctgccactgactgcagggacacgggcagcctggctcccaggacacgacttgtaatgaaagtttggggacatgtgattgattgattgattgattgtaaataaaggatgatggccacaacatgaaaactccatatttatttagatgctattattactgtttggacttttattttggcaggcttttttccagactctagggttttccaatgtgactaatgaccacacctgcctctcccgtcgtctcttctgggcaccctcccacccggctgcatacccggccagggctcccacagagacaaggagggcacaggtgtctgccccctctttaaaatcgatctacacacatccacgcacatgcgaccccgaggaaacgaaacccactctagaaaacgcgaccttggccgcacctaaagcagccagccgtgagtgcagaccccttggccagcgtggcgcagtggccctgagcagtagtggcatgtgtgtagatcaagtcggatctagtccagctcggttcattagcgatccatgtaatctgacgtcatcttgtctcgaagtctctttttttggcccaggccttgaagaatacactgtgacttaagaagccttaccacgcagtaactaaagctttaggatgactgtattcgaggagtgccgtgtgttgcatgcagctacccgtaggaagacttcgcgcatatcactaataaacctgaagtcgtgatgaaaa

SEQ ID NO: 106976 - DNA, 3006 bp, Homo sapiens
  Payload ID: 1009
  Gene Symbol: APBA2
  Gene Name: amyloid beta (A4) precursor protein-binding, family A, member 2
  Uniprot ID: Q99767
  ENST ID: ENST00000612449
  CDS Start-End: 205-2418
tctcctgaatatttacgcgttgctgaatctcctgtggacaaaccaccaataggccaggactgtcctgtggacagacggggtgagcctcttcttgtgtctggagattctgaaaagatttgatcaccaggagatttttcgggacattaccaaaccactcattttagtggctgcctccgggtgatgatggctgtgtgaacgactgccatggcccaccggaagcttgagagcgtggggagcggcatgttggaccatagggtgagaccaggtcctgtccctcacagccaggagcccgagagcgaggacatggagctgcccttggagggctatgtgcccgagggcctggagctggctgccctgcggccagagagccccgcgccagaggaacaggagtgccacaaccacagccccgatggggactccagctctgactacgtgaacaacacctctgaggaggaggactatgacgagggcctccctgaggaggaggagggcatcacctactacatccgctactgccctgaggacgacagctacctagagggcatggactgcaacggggaggagtacctggcccacagtgcacaccctgtggacactgatgagtgccaggaggcggtggaggagtggacggactcggcgggcccgcacccccacggccacgaggctgaaggcagccaggactacccagacggccaactgcccattccggaggatgagccctccgtccttgaggcccatgaccaggaagaagatggtcactactgtgccagcaaagagggctaccaggactactaccccgaggaggccaacgggaacaccggcgcctccccctaccgcctgaggcgtggggatggggacctggaggaccaggaggaggacattgaccagatcgtggcagagatcaagatgagtctgagcatgaccagcatcaccagcgccagtgaggccagccccgagcatgggcctgagccagggcctgaggactctgtagaggcctgcccacccatcaaggccagctgcagccccagcaggcacgaggcgaggcccaagtcgctgaacctccttcccgaggccaagcaccccggagacccccagagaggcttcaagcccaagaccaggaccccagaagagaggctgaagtggccccacgagcaggtttgcaatggtctggagcagccaaggaagcagcagcgctctgatctcaatggacctgttgacaataacaacattccagagacaaagaaggtggcatcatttccaagttttgtggctgttccagggccctgcgaaccagaagacctcatcgacgggatcatctttgctgccaattacctggggtccacccagctgctatcagaacggaacccttccaaaaacatcagaatgatgcaagcgcaggaggccgtcagccgggtcaagaattctgagggggatgcccagacgctgacggaagtggacctcttcatttccacccagaggatcaaggttttaaatgcagacacgcaggaaaccatgatggaccacgccttgcgtaccatctcctacatcgccgacattgggaacattgtagtgctgatggccagacgccgcatgccccggtcagcctctcaggactgcatcgagaccacgcccggggcccaggaaggcaagaagcagtataagatgatctgccatgtgttcgagtcggaggatgcccagctcatcgcccagtctatcggccaggccttcagcgtggcctaccaggagttcctgcgagccaatggcatcaaccccgaagacttgagccagaaggaatacagcgacatcatcaacacccaggagatgtacaacgacgacctcatccacttctcaaactcggagaactgcaaggagctgcagctggagaagcacaagggcgagatcctgggcgtggtggtggtggagtcgggctggggctccatcctgcccacggtgatcctggccaacatgatgaatggcggcccggctgcccgctcggggaagctgagcatcggggaccagatcatgtccatcaatggcaccagcctggtggggctgcccctcgccacctgccaaggcatcatcaagggcctgaagaaccagacacaggtgaagctcaacattgtcagctgtcccccggtcaccacggtccttatcaagcggccagacctcaagtaccagctgggcttcagcgtgcagaatggaattatctgcagcctcatgagagggggcattgctgagcgagggggcgtccgtgtgggccaccgcatcatcgagatcaacgggcagagcgtggtggccacagcccacgagaagatagtccaagctctgtccaactcggtcggagagatccacatgaagaccatgcccgccgccatgttcaggctcctcacgggtcaggagaccccgctgtacatctaggccaccccagcctggccacgcagccaggacaccgggcagggccgcccgggcccagaggagctgggagccgggccgcagacttgaccccgacgccacagcccagccacggacgctggctccccaaagggtgtgccctcaccacccacttgatttttttcattttgccaaaaaggggtatgtctttatcaaaggagagtcacagaacaaatgtttgtttgtaaagcgttccaagtattttgccacgttctggactgtcttctccctgcacaagccagggtgtgtctcggtagctgtgcgtggtgtggagtgtgtgtctttcctccctgaagctgtgcggagcgaactggcgcctccgagggacgcggctcccggggcagggcagccgtcacccctgcctcccgcccccttggctgggacgtctggggtcctgtggggcccccacaatggtcccaaacagctgcctctgccactgactgcagggacacgggcagcctggctcccaggacacgacttgtaatgaaagtttggggacatgtgattgattgattgattgattgtaaataaaggatgatggccacaacatgaaaa

SEQ ID NO: 106977 - DNA, 936 bp, Homo sapiens; identical to SEQ ID NO: 106971
  Payload ID: 1009
  Gene Symbol: APBA2
  Gene Name: amyloid beta (A4) precursor protein-binding, family A, member 2
  ENST ID: ENST00000632681
  CDS Start-End: 146-936

SEQ ID NO: 106978 - DNA, 554 bp, Homo sapiens; identical to SEQ ID NO: 106972
  Payload ID: 1009
  Gene Symbol: APBA2
  Gene Name: amyloid beta (A4) precursor protein-binding, family A, member 2
  ENST ID: ENST00000631996
  CDS Start-End: 473-554

SEQ ID NO: 106979 - DNA, 3011 bp, Homo sapiens
  Payload ID: 1009
  Gene Symbol: APBA2
  Gene Name: amyloid beta (A4) precursor protein-binding, family A, member 2
  Uniprot ID: Q99767
  ENST ID: ENST00000631894
  CDS Start-End: 174-2423
tctcctgaatatttacgcgttgctgaatctcctgtggacaaaccaccaataggccaggactgtcctgtggacagacgggaaagatttgatcaccaggagatttttcgggacattaccaaaccactcattttagtggctgcctccgggtgatgatggctgtgtgaacgactgccatggcccaccggaagcttgagagcgtggggagcggcatgttggaccatagggtgagaccaggtcctgtccctcacagccaggagcccgagagcgaggacatggagctgcccttggagggctatgtgcccgagggcctggagctggctgccctgcggccagagagccccgcgccagaggaacaggagtgccacaaccacagccccgatggggactccagctctgactacgtgaacaacacctctgaggaggaggactatgacgagggcctccctgaggaggaggagggcatcacctactacatccgctactgccctgaggacgacagctacctagagggcatggactgcaacggggaggagtacctggcccacagtgcacaccctgtggacactgatgagtgccaggaggcggtggaggagtggacggactcggcgggcccgcacccccacggccacgaggctgaaggcagccaggactacccagacggccaactgcccattccggaggatgagccctccgtccttgaggcccatgaccaggaagaagatggtcactactgtgccagcaaagagggctaccaggactactaccccgaggaggccaacgggaacaccggcgcctccccctaccgcctgaggcgtggggatggggacctggaggaccaggaggaggacattgaccagatcgtggcagagatcaagatgagtctgagcatgaccagcatcaccagcgccagtgaggccagccccgagcatgggcctgagccagggcctgaggactctgtagaggcctgcccacccatcaaggccagctgcagccccagcaggcacgaggcgaggcccaagtcgctgaacctccttcccgaggccaagcaccccggagacccccagagaggcttcaagcccaagaccaggaccccagaagagaggctgaagtggccccacgagcaggtttgcaatggtctggagcagccaaggaagcagcagcgctctgatctcaatggacctgttgacaataacaacattccagagacaaagaaggtggcatcatttccaagttttgtggctgttccagggccctgcgaaccagaagacctcatcgacgggatcatctttgctgccaattacctggggtccacccagctgctatcagaacggaacccttccaaaaacatcagaatgatgcaagcgcaggaggccgtcagccgggtcaagaggatgcaaaaggctgctaagatcaagaaaaaagcgaattctgagggggatgcccagacgctgacggaagtggacctcttcatttccacccagaggatcaaggttttaaatgcagacacgcaggaaaccatgatggaccacgccttgcgtaccatctcctacatcgccgacattgggaacattgtagtgctgatggccagacgccgcatgccccggtcagcctctcaggactgcatcgagaccacgcccggggcccaggaaggcaagaagcagtataagatgatctgccatgtgttcgagtcggaggatgcccagctcatcgcccagtctatcggccaggccttcagcgtggcctaccaggagttcctgcgagccaatggcatcaaccccgaagacttgagccagaaggaatacagcgacatcatcaacacccaggagatgtacaacgacgacctcatccacttctcaaactcggagaactgcaaggagctgcagctggagaagcacaagggcgagatcctgggcgtggtggtggtggagtcgggctggggctccatcctgcccacggtgatcctggccaacatgatgaatggcggcccggctgcccgctcggggaagctgagcatcggggaccagatcatgtccatcaatggcaccagcctggtggggctgcccctcgccacctgccaaggcatcatcaagggcctgaagaaccagacacaggtgaagctcaacattgtcagctgtcccccggtcaccacggtccttatcaagcggccagacctcaagtaccagctgggcttcagcgtgcagaatggaattatctgcagcctcatgagagggggcattgctgagcgagggggcgtccgtgtgggccaccgcatcatcgagatcaacgggcagagcgtggtggccacagcccacgagaagatagtccaagctctgtccaactcggtcggagagatccacatgaagaccatgcccgccgccatgttcaggctcctcacgggtcaggagaccccgctgtacatctaggccaccccagcctggccacgcagccaggacaccgggcagggccgcccgggcccagaggagctgggagccgggccgcagacttgaccccgacgccacagcccagccacggacgctggctccccaaagggtgtgccctcaccacccacttgatttttttcattttgccaaaaaggggtatgtctttatcaaaggagagtcacagaacaaatgtttgtttgtaaagcgttccaagtattttgccacgttctggactgtcttctccctgcacaagccagggtgtgtctcggtagctgtgcgtggtgtggagtgtgtgtctttcctccctgaagctgtgcggagcgaactggcgcctccgagggacgcggctcccggggcagggcagccgtcacccctgcctcccgcccccttggctgggacgtctggggtcctgtggggcccccacaatggtcccaaacagctgcctctgccactgactgcagggacacgggcagcctggctcccaggacacgacttgtaatgaaagtttggggacatgtgattgattgattgattgattgtaaataaaggatgatggccacaacatgaaaa

SEQ ID NO: 106980 - DNA, 217 bp, Homo sapiens
  Payload ID: 1009
  Gene Symbol: APBA2
  Gene Name: amyloid beta (A4) precursor protein-binding, family A, member 2
  ENST ID: ENST00000631794
  CDS Start-End: 205-217
tctcctgaatatttacgcgttgctgaatctcctgtggacaaaccaccaataggccaggactgtcctgtggacagacggggtgagcctcttcttgtgtctggagattctgaaaagatttgatcaccaggagatttttcgggacattaccaaaccactcattttagtggctgcctccgggtgatgatggctgtgtgaacgactgccatggcccaccgga

SEQ ID NO: 106981 - DNA, 711 bp, Homo sapiens; identical to SEQ ID NO: 106968
  Payload ID: 1009
  Gene Symbol: APBA2
  Gene Name: amyloid beta (A4) precursor protein-binding, family A, member 2
  ENST ID: ENST00000632415
  CDS Start-End: 376-711

SEQ ID NO: 106982 - DNA, 535 bp, Homo sapiens; identical to SEQ ID NO: 106973
  Payload ID: 1009
  Gene Symbol: APBA2
  Gene Name: amyloid beta (A4) precursor protein-binding, family A, member 2
  ENST ID: ENST00000632247
  CDS Start-End: 326-535

SEQ ID NO: 106983 - DNA, 2075 bp, Homo sapiens
  Payload ID: 1010
  Gene Symbol: APBA3
  Gene Name: amyloid beta (A4) precursor protein-binding, family A, member 3
  Uniprot ID: O96018
  ENST ID: ENST00000316757
  CDS Start-End: 202-1929
catgctcaatgggccagggctctgcgcggatagaggagcgggcgccgggaccgggaatccccgagctgcgccttctggggacgcggcccgggctacgtcggggccgtccgtggggagcggggtcctggaggctgcgcggggctgaggcggcctcgatttgggaactgcctgaagatgccggcctaagcctggagtccaggcatggacttccccacaatttcccgatccccttcggggcctccagccatggacttggaggggcccagggacattcttgtgccttcggaggacctcacccctgacagccagtgggaccctatgccaggaggccccggcagcctcagtcggatggaacttgatgagtcaagccttcaggagctggtgcagcagtttgaagctctgccaggcgatctggtgggcccatccccaggtggagccccctgtcccctacacattgccacaggccatggcctggcctcccaggagattgctgatgcccacgggctcctgtctgccgaagctggccgggatgacctgctgggcctcttgcactgcgaggaatgcccgccttcccagactggtcctgaagagcctctagagcctgccccccgactgttgcagccccctgaggacccagatgaggattctgactccccagaatgggtggagggggcctctgctgagcaggagggcagcaggagctcaagcagttccccggaaccctggctggagacggtgcctctagtcacacctgaagagccacccgctggtgcccagagccccgagaccctggcttcctaccctgccccccaggaggtgcctggtccctgtgaccatgaagacctcctggacggtgtcatatttggggccaggtacctggggtccacccagctggtgtcggaacggaacccgcccaccagcacgcgcatggcccaggcccgggaggccatggaccgcgtcaaggcccccgatggggagacccagcccatgacggaggtggacctgttcgtctccaccaagaggatcaaggtcttgacagcggactcccaggaggccatgatggaccacgccctgcataccatctcctacacagccgacatcggctgcgtgctggtgctgatggcgcggcggcggctggcacggaggccggcaccccaggaccacggccgccgcctctacaagatgctctgccacgtattctacgcggaggacgcccagctcatcgcccaggccattggccaggccttcgccgccgcctacagccagttcctacgggaaagcggtattgaccccagccaggtgggcgtgcacccgagcccaggcgcctgccacctccataatggggacctggaccacttctccaacagtgacaactgccgggaggtgcacctcgagaagcggcgaggggagggcctgggcgtggccctggtggagtcgggctggggctccctgctgcccacagccgtcatcgccaacctgctgcacggggggcctgctgagcgctcgggggccctcagcatcggggaccgcctgaccgccatcaacgggaccagcctggtggggctgcccctggctgcgtgccaggccgctgtccgcgagacgaagtcgcagacgtcggtgacactcagcatcgtccactgccctcccgtcaccaccgccatcatccaccggccccacgcccgcgagcagctgggcttctgcgtggaggacggcatcatctgcagcctcctccgtggtggcatcgccgagcgtgggggcatccgcgtcggccaccgcatcattgagatcaatgggcagagtgtggtggccacgccacacgcccgcatcatcgagctgctcaccgaggcctatggcgaggtgcatatcaagacgatgccagctgccacatatcgcctccttacaggccaggagcagcccgtgtacctgtgaccacctcatcccttgcctgccactgtgccttcgcctccatggccccggagccccatcctgggcctgccctggctggccaggaccccagcggttcttggtcctgtatgatttcctaatataaaaacagtaaaagcttatgcatttgg

SEQ ID NO: 106984 - DNA, 2636 bp, Homo sapiens
  Payload ID: 1011
  Gene Symbol: APBB1
  Gene Name: amyloid beta (A4) precursor protein-binding, family B, member 1 (Fe65)
  Uniprot ID: O00213
  ENST ID: ENST00000299402
  CDS Start-End: 101-2227
atgttgtgatggagaagccgcggcggagcccgaaccccgcagcctgagccacctccgtcatctgggcccggggcctcaccgcgcaggagctgccaaggccatgtctgttccatcatcactgagccagtcggccattaatgccaacagccacggaggccccgcactgagcctacccctgcctctgcacgctgcccacaaccagctgctcaacgccaagctgcaggccacagctgtgggacccaaggacctgcgcagcgccatgggggagggtggtgggcctgagccaggccctgccaatgccaagtggctaaaagagggccagaaccagctccggcgggccgccacggcccaccgtgaccagaatcgcaatgtgaccttgaccttggcggaggaggccagccaggagcctgagatggcacccttgggccccaaaggcctgatacacctgtactctgagctggagctctcagctcacaacgcagccaaccgaggcctacgaggacctggcctgatcatcagcactcaagagcaggggccagatgagggagaggagaaggcggccggggaggccgaggaggaggaggaggatgatgatgatgaagaggaggaggaggacttatcttctcccccagggctgcctgagcccctggagagtgtggaggcccctcccaggccccaagcccttacagatggcccccgggaacacagcaagagtgccagcctcctgtttggcatgcggaacagtgcagccagtgatgaggactcaagctgggctaccttatcccagggcagcccctcctatggctccccagaggacacagattccttctggaaccccaacgccttcgagacggattccgacctgccggctggatggatgagggtccaggacacctcagggacctattactggcacatcccaacagggaccacccagtgggaaccccccggccgggcctccccctcacaggggagcagcccccaagaggagtcccagctcacctggacaggttttgctcatggagaaggctttgaggatggagaattttggaaggatgaacccagtgatgaggccccaatggagctgggactgaaggaacctgaggaggggacgttgaccttcccagctcagagcctcagcccagagccgttgccccaagaggaggagaagcttcccccacggaataccaacccagggatcaagtgtttcgccgtgcgctccctaggctgggtagagatgaccgaggaggagctggcccctggacgcagcagtgtggcagtcaacaattgcatccgtcagctctcttaccacaaaaacaacctgcatgaccccatgtctgggggctggggggaaggaaaggatctgctactgcagctggaggatgagacactaaagctagtggagccacagagccaggcactgctgcacgcccaacccatcatcagcatccgcgtgtggggcgtcgggcgggacagtggaagggactttgcctacgtagctcgtgataagctgacccagatgctcaagtgccacgtgtttcgctgtgaggcacctgccaagaacatcgccaccagcctgcatgagatctgctctaagatcatggccgaacggcgtaatgcccgctgcttggtaaatggactctccctggaccactctaaacttgtggatgtccctttccaagtggaattcccagcgcctaagaatgagttggtccagaagttccaagtctattacctggggaatgtacctgttgctaaacctgttggggtagatgtgattaatggggccctcgagtcagtcctgtcctccagcagccgtgaacaatggaccccaagtcatgtcagtgtggcccctgctaccctcaccatcttgcaccagcagacagaggcagtgctgggagagtgtcgggtgcgtttcctctccttcctggccgtgggcagagatgtccacacgtttgcattcatcatggctgccggcccagcctccttctgctgccacatgttctggtgcgagcccaatgctgccagcctctcagaggctgtgcaggctgcgtgcatgcttcgctaccagaagtgtctggatgcccgttcccaggcctccacctcctgcctcccagcaccccctgctgagtctgtggcacggcgtgtagggtggactgtccgcaggggtgttcagtcgctgtggggctccctgaagcccaaacggctgggggcccataccccatgaagaagcccccaccttccctccacctgcttgtgttgggccccagggaactaaagggtgtgggtcagggaggggtctagaggctattcctaggcctcaggcctcccaaatatgcccctccccagtagctacggttccctgcctaggagctggggagggagagatctaatcccttcaaggaagtgataacactggagtggtaacaagaggagcaggaagcaaggccagccctggttctccatccccatgtgtttcaggtggaacaggaggaactggtccaggccaggcctcatcctcctggacccagcaggggcagaaggaggaagggactggtccaggcatgggtcccttccccctgctccatgggcacctctgctgtattgatatcactaataaagtctgtctgcactgc

SEQ ID NO: 106985 - DNA, 2619 bp, Homo sapiens
  Payload ID: 1011
  Gene Symbol: APBB1
  Gene Name: amyloid beta (A4) precursor protein-binding, family B, member 1 (Fe65)
  Uniprot ID: O00213
  ENST ID: ENST00000311051
  CDS Start-End: 84-2210
tcgggctccagccccgtccgcgcgtctcccggcgtgggtgcgggaccagggcgctgcggggcgcgcagggagctgccaaggccatgtctgttccatcatcactgagccagtcggccattaatgccaacagccacggaggccccgcactgagcctacccctgcctctgcacgctgcccacaaccagctgctcaacgccaagctgcaggccacagctgtgggacccaaggacctgcgcagcgccatgggggagggtggtgggcctgagccaggccctgccaatgccaagtggctaaaagagggccagaaccagctccggcgggccgccacggcccaccgtgaccagaatcgcaatgtgaccttgaccttggcggaggaggccagccaggagcctgagatggcacccttgggccccaaaggcctgatacacctgtactctgagctggagctctcagctcacaacgcagccaaccgaggcctacgaggacctggcctgatcatcagcactcaagagcaggggccagatgagggagaggagaaggcggccggggaggccgaggaggaggaggaggatgatgatgatgaagaggaggaggaggacttatcttctcccccagggctgcctgagcccctggagagtgtggaggcccctcccaggccccaagcccttacagatggcccccgggaacacagcaagagtgccagcctcctgtttggcatgcggaacagtgcagccagtgatgaggactcaagctgggctaccttatcccagggcagcccctcctatggctccccagaggacacagattccttctggaaccccaacgccttcgagacggattccgacctgccggctggatggatgagggtccaggacacctcagggacctattactggcacatcccaacagggaccacccagtgggaaccccccggccgggcctccccctcacaggggagcagcccccaagaggagtcccagctcacctggacaggttttgctcatggagaaggctttgaggatggagaattttggaaggatgaacccagtgatgaggccccaatggagctgggactgaaggaacctgaggaggggacgttgaccttcccagctcagagcctcagcccagagccgttgccccaagaggaggagaagcttcccccacggaataccaacccagggatcaagtgtttcgccgtgcgctccctaggctgggtagagatgaccgaggaggagctggcccctggacgcagcagtgtggcagtcaacaattgcatccgtcagctctcttaccacaaaaacaacctgcatgaccccatgtctgggggctggggggaaggaaaggatctgctactgcagctggaggatgagacactaaagctagtggagccacagagccaggcactgctgcacgcccaacccatcatcagcatccgcgtgtggggcgtcgggcgggacagtggaagggactttgcctacgtagctcgtgataagctgacccagatgctcaagtgccacgtgtttcgctgtgaggcacctgccaagaacatcgccaccagcctgcatgagatctgctctaagatcatggccgaacggcgtaatgcccgctgcttggtaaatggactctccctggaccactctaaacttgtggatgtccctttccaagtggaattcccagcgcctaagaatgagttggtccagaagttccaagtctattacctggggaatgtacctgttgctaaacctgttggggtagatgtgattaatggggccctcgagtcagtcctgtcctccagcagccgtgaacaatggaccccaagtcatgtcagtgtggcccctgctaccctcaccatcttgcaccagcagacagaggcagtgctgggagagtgtcgggtgcgtttcctctccttcctggccgtgggcagagatgtccacacgtttgcattcatcatggctgccggcccagcctccttctgctgccacatgttctggtgcgagcccaatgctgccagcctctcagaggctgtgcaggctgcgtgcatgcttcgctaccagaagtgtctggatgcccgttcccaggcctccacctcctgcctcccagcaccccctgctgagtctgtggcacggcgtgtagggtggactgtccgcaggggtgttcagtcgctgtggggctccctgaagcccaaacggctgggggcccataccccatgaagaagcccccaccttccctccacctgcttgtgttgggccccagggaactaaagggtgtgggtcagggaggggtctagaggctattcctaggcctcaggcctcccaaatatgcccctccccagtagctacggttccctgcctaggagctggggagggagagatctaatcccttcaaggaagtgataacactggagtggtaacaagaggagcaggaagcaaggccagccctggttctccatccccatgtgtttcaggtggaacaggaggaactggtccaggccaggcctcatcctcctggacccagcaggggcagaaggaggaagggactggtccaggcatgggtcccttccccctgctccatgggcacctctgctgtattgatatcactaataaagtctgtctgcactgc

SEQ ID NO: 106986 - DNA, 2684 bp, Homo sapiens
  Payload ID: 1011
  Gene Symbol: APBB1
  Gene Name: amyloid beta (A4) precursor protein-binding, family B, member 1 (Fe65)
  ENST ID: ENST00000389906
  CDS Start-End: 142-2274
tcggggcgcggccccgcggcccgcgcgctcctgggcgggggatgttgtgatggagaagccgcggcggagcccgaaccccgcagcctgagccacctccgtcatctgggcccggggcctcaccgcgcaggagctgccaaggccatgtctgttccatcatcactgagccagtcggccattaatgccaacagccacggaggccccgcactgagcctacccctgcctctgcacgctgcccacaaccagctgctcaacgccaagctgcaggccacagctgtgggacccaaggacctgcgcagcgccatgggggagggtggtgggcctgagccaggccctgccaatgccaagtggctaaaagagggccagaaccagctccggcgggccgccacggcccaccgtgaccagaatcgcaatgtgaccttgaccttggcggaggaggccagccaggagcctgagatggcacccttgggccccaaaggcctgatacacctgtactctgagctggagctctcagctcacaacgcagccaaccgaggcctacgaggacctggcctgatcatcagcactcaagagcaggggccagatgagggagaggagaaggcggccggggaggccgaggaggaggaggaggatgatgatgatgaagaggaggaggaggacttatcttctcccccagggctgcctgagcccctggagagtgtggaggcccctcccaggccccaagcccttacagatggcccccgggaacacagcaagagtgccagcctcctgtttggcatgcggaacagtgcagccagtgatgaggactcaagctgggctaccttatcccagggcagcccctcctatggctccccagaggacacagattccttctggaaccccaacgccttcgagacggattccgacctgccggctggatggatgagggtccaggacacctcagggacctattactggcacatcccaacagggaccacccagtgggaaccccccggccgggcctccccctcacaggggagcagcccccaagaggagtcccagctcacctggacaggttttgctcatggagaaggctttgaggatggagaattttggaaggatgaacccagtgatgaggccccaatggagctgggactgaaggaacctgaggaggggacgttgaccttcccagctcagagcctcagcccagagccgttgccccaagaggaggagaagcttcccccacggaataccaacccagggatcaagtgtttcgccgtgcgctccctaggctgggtagagatgaccgaggaggagctggcccctggacgcagcagtgtggcagtcaacaattgcatccgtcagctctcttaccacaaaaacaacctgcatgaccccatgtctgggggctggggggaaggaaaggatctgctactgcagctggaggatgagacactaaagctagtggagccacagagccaggcactgctgcacgcccaacccatcatcagcatccgcgtgtggggcgtcgggcgggacagtggaagcaacagggactttgcctacgtagctcgtgataagctgacccagatgctcaagtgccacgtgtttcgctgtgaggcacctgccaagaacatcgccaccagcctgcatgagatctgctctaagatcatggccgaacggcgtaatgcccgctgcttggtaaatggactctccctggaccactctaaacttgtggatgtccctttccaagtggaattcccagcgcctaagaatgagttggtccagaagttccaagtctattacctggggaatgtacctgttgctaaacctgttggggtagatgtgattaatggggccctcgagtcagtcctgtcctccagcagccgtgaacaatggaccccaagtcatgtcagtgtggcccctgctaccctcaccatcttgcaccagcagacagaggcagtgctgggagagtgtcgggtgcgtttcctctccttcctggccgtgggcagagatgtccacacgtttgcattcatcatggctgccggcccagcctccttctgctgccacatgttctggtgcgagcccaatgctgccagcctctcagaggctgtgcaggctgcgtgcatgcttcgctaccagaagtgtctggatgcccgttcccaggcctccacctcctgcctcccagcaccccctgctgagtctgtggcacggcgtgtagggtggactgtccgcaggggtgttcagtcgctgtggggctccctgaagcccaaacggctgggggcccataccccatgaagaagcccccaccttccctccacctgcttgtgttgggccccagggaactaaagggtgtgggtcagggaggggtctagaggctattcctaggcctcaggcctcccaaatatgcccctccccagtagctacggttccctgcctaggagctggggagggagagatctaatcccttcaaggaagtgataacactggagtggtaacaagaggagcaggaagcaaggccagccctggttctccatccccatgtgtttcaggtggaacaggaggaactggtccaggccaggcctcatcctcctggacccagcaggggcagaaggaggaagggactggtccaggcatgggtcccttccccctgctccatgggcacctctgctgtattgatatcactaataaagtctgtctgcactgct

SEQ ID NO: 106987 - DNA, 1626 bp, Homo sapiens
  Payload ID: 1011
  Gene Symbol: APBB1
  Gene Name: amyloid beta (A4) precursor protein-binding, family B, member 1 (Fe65)
  Uniprot ID: O00213
  ENST ID: ENST00000530885
  CDS Start-End: 94-1560
gcttttctctgcagcccagcaccaggctgtgagcccagctggctgggctggaggggctgtgaggagggagggtggaggcaggaggggccgggaatgagcgccatgttctcccaggactttttcctggccattatcctgcaggacagcagcgcagattccttctggaaccccaacgccttcgagacggattccgacctgccggctggatggatgagggtccaggacacctcagggacctattactggcacatcccaacagggaccacccagtgggaaccccccggccgggcctccccctcacaggggagcagcccccaagaggagtcccagctcacctggacaggttttgctcatggagaaggctttgaggatggagaattttggaaggatgaacccagtgatgaggccccaatggagctgggactgaaggaacctgaggaggggacgttgaccttcccagctcagagcctcagcccagagccgttgccccaagaggaggagaagcttcccccacggaataccaacccagggatcaagtgtttcgccgtgcgctccctaggctgggtagagatgaccgaggaggagctggcccctggacgcagcagtgtggcagtcaacaattgcatccgtcagctctcttaccacaaaaacaacctgcatgaccccatgtctgggggctggggggaaggaaaggatctgctactgcagctggaggatgagacactaaagctagtggagccacagagccaggcactgctgcacgcccaacccatcatcagcatccgcgtgtggggcgtcgggcgggacagtggaagggactttgcctacgtagctcgtgataagctgacccagatgctcaagtgccacgtgtttcgctgtgaggcacctgccaagaacatcgccaccagcctgcatgagatctgctctaagatcatggccgaacggcgtaatgcccgctgcttggtaaatggactctccctggaccactctaaacttgtggatgtccctttccaagtggaattcccagcgcctaagaatgagttggtccagaagttccaagtctattacctggggaatgtacctgttgctaaacctgttggggtagatgtgattaatggggccctcgagtcagtcctgtcctccagcagccgtgaacaatggaccccaagtcatgtcagtgtggcccctgctaccctcaccatcttgcaccagcagacagaggcagtgctgggagagtgtcgggtgcgtttcctctccttcctggccgtgggcagagatgtccacacgtttgcattcatcatggctgccggcccagcctccttctgctgccacatgttctggtgcgagcccaatgctgccagcctctcagaggctgtgcaggctgcgtgcatgcttcgctaccagaagtgtctggatgcccgttcccaggcctccacctcctgcctcccagcaccccctgctgagtctgtggcacggcgtgtagggtggactgtccgcaggggtgttcagtcgctgtggggctccctgaagcccaaacggctgggggcccataccccatgaagaagcccccaccttccctccacctgcttgtgttgggccccagggaactaaagggtgtgggtcagg

SEQ ID NO: 106988 - DNA, 2128 bp, Homo sapiens
  Payload ID: 1011
  Gene Symbol: APBB1
  Gene Name: amyloid beta (A4) precursor protein-binding, family B, member 1 (Fe65)
  Uniprot ID: O00213
  ENST ID: ENST00000608394
  CDS Start-End: 382-1737
gagacgctgcagcctagctgggccctggcaggtgaggggtggggggtggtgctgggaagccccaagcccagcctcaagcttgctggggctcaggacctcaaagcccacccttgggttcaaactgctgtgcaggtcctggacaggggcgggatccctgaaggccttgaaaccacaccctatttatgctgacagctataggctctgcagggccccaggcagctggggtattccttaggggctgagtctcctggtatccctaagactgggcttggcttaggcactgaggactttttcctggccattatcctgcaggacagcagcgcagattccttctggaaccccaacgccttcgagacggattccgacctgccggctggatggatgagggtccaggacacctcagggacctattactggcacatcccaacagggaccacccagtgggaaccccccggccgggcctccccctcacaggggagcagcccccaagaggagtcccagctcacctggacaggttttgctcatggagaaggctttgaggatggagaattttggaaggatgaacccagtgatgaggccccaatggagctgggactgaaggaacctgaggaggggacgttgaccttcccagctcagagcctcagcccagagccgttgccccaagaggaggagaagcttcccccacggaataccaacccagggatcaagtgtttcgccgtgcgctccctaggctgggtagagatgaccgaggaggagctggcccctggacgcagcagtgtggcagtcaacaattgcatccgtcagctctcttaccacaaaaacaacctgcatgaccccatgtctgggggctggggggaaggaaaggatctgctactgcagctggaggatgagacactaaagctagtggagccacagagccaggcactgctgcacgcccaacccatcatcagcatccgcgtgtggggcgtcgggcgggacagtggaagagagagggactttgcctacgtagctcgtgataagctgacccagatgctcaagtgccacgtgtttcgctgtgaggcacctgccaagaacatcgccaccagcctgcatgagatctgctctaagatcatggccgaacggcgtaatgcccgctgcttggtaaatggactctccctggaccactctaaacttgtggatgtccctttccaagtggaattcccagcgcctaagaatgagttggtccagaagttccaagtctattacctggggaatgtacctgttgctaaacctgttggggtagatgtgattaatggggccctcgagtcagtcctgtcctccagcagccgtgaacaatggaccccaagtcatgtcagtgtggcccctgctaccctcaccatcttgcaccagcagacagaggcagtgctgggagagtgtcgggtgcgtttcctctccttcctggccgtgggcagagatgtccacacgtttgcattcatcatggctgccggcccagcctccttctgctgccacatgttctggtgcgagcccaatgctgccagcctctcagaggctgtgcaggctgcgtgcatgcttcgctaccagaagtgtctggatgcccgttcccaggcctccacctcctgcctcccagcaccccctgctgagtctgtggcacggcgtgtagggtggactgtccgcaggggtgttcagtcgctgtggggctccctgaagcccaaacggctgggggcccataccccatgaagaagcccccaccttccctccacctgcttgtgttgggccccagggaactaaagggtgtgggtcagggaggggtctagaggctattcctaggcctcaggcctcccaaatatgcccctccccagtagctacggttccctgcctaggagctggggagggagagatctaatcccttcaaggaagtgataacactggagtggtaacaagaggagcaggaagcaaggccagccctggttctccatccccatgtgtttcaggtggaacaggaggaactggtccaggccaggcctcatcctcctggacccagcaggggcagaaggaggaagggactggtccaggcatgggtcccttccccctgctccatgggcacctctgctgtattgatatcactaat

SEQ ID NO: 106989 - DNA, 1014 bp, Homo sapiens
  Payload ID: 1011
  Gene Symbol: APBB1
  Gene Name: amyloid beta (A4) precursor protein-binding, family B, member 1 (Fe65)
  ENST ID: ENST00000529890
  CDS Start-End: 230-1014
atgttctcccaggactttttcctggccattatcctgcaggacagcagcgcagtgtggccacattagccaccaacagggcccaggaggagacctgagccatgtcccctactggtggccccacatgtggtgactccagactataggctctaggcagaagcaggaactgtgttgtgattccttctggaaccccaacgccttcgagacggattccgacctgccggctggatggatgagggtccaggacacctcagggacctattactggcacatcccaacagggaccacccagtgggaaccccccggccgggcctccccctcacaggggagcagcccccaagaggagtcccagctcacctggacaggttttgctcatggagaaggctttgaggatggagaattttggaaggatgaacccagtgatgaggccccaatggagctgggactgaaggaacctgaggaggggacgttgaccttcccagctcagagcctcagcccagagccgttgccccaagaggaggagaagcttcccccacggaataccaacccagggatcaagtgtttcgccgtgcgctccctaggctgggtagagatgaccgaggaggagctggcccctggacgcagcagtgtggcagtcaacaattgcatccgtcagctctcttaccacaaaaacaacctgcatgaccccatgtctgggggctggggggaaggaaaggatctgctactgcagctggaggatgagacactaaagctagtggagccacagagccaggcactgctgcacgcccaacccatcatcagcatccgcgtgtggggcgtcgggcgggacagtggaagggactttgcctacgtagctcgtgataagctgacccagatgctcaagtgccacgtgtttcgctgtgaggcacctgccaagaacatcgccaccagcctgcatgagatctgctctaagatcatggccgaacggcgtaatgcccgctgcttggtaaatggactctccctggaccactctaaact

SEQ ID NO: 106990 - DNA, 1925 bp, Homo sapiens
  Payload ID: 1011
  Gene Symbol: APBB1
  Gene Name: amyloid beta (A4) precursor protein-binding, family B, member 1 (Fe65)
  Uniprot ID: O00213
  ENST ID: ENST00000608645
  CDS Start-End: 340-1695
gacgctgcagcctagctgggccctggcaggtgaggggtggggggtggtgctgggaagccccaagcccagcctcaagcttgctggggctcaggacctcaaagcccacccttgggttcaaactgctgtgcaggtcctggacaggggcgggatccctgaaggccttgaaaccacaccctatttatgctgacagctataggctctgcagggccccaggcagctggggtattccttaggggctgagtctcctggtatccctaagactgggcttggcttaggcactgagattccttctggaaccccaacgccttcgagacggattccgacctgccggctggatggatgagggtccaggacacctcagggacctattactggcacatcccaacagggaccacccagtgggaaccccccggccgggcctccccctcacaggggagcagcccccaagaggagtcccagctcacctggacaggttttgctcatggagaaggctttgaggatggagaattttggaaggatgaacccagtgatgaggccccaatggagctgggactgaaggaacctgaggaggggacgttgaccttcccagctcagagcctcagcccagagccgttgccccaagaggaggagaagcttcccccacggaataccaacccagggatcaagtgtttcgccgtgcgctccctaggctgggtagagatgaccgaggaggagctggcccctggacgcagcagtgtggcagtcaacaattgcatccgtcagctctcttaccacaaaaacaacctgcatgaccccatgtctgggggctggggggaaggaaaggatctgctactgcagctggaggatgagacactaaagctagtggagccacagagccaggcactgctgcacgcccaacccatcatcagcatccgcgtgtggggcgtcgggcgggacagtggaagagagagggactttgcctacgtagctcgtgataagctgacccagatgctcaagtgccacgtgtttcgctgtgaggcacctgccaagaacatcgccaccagcctgcatgagatctgctctaagatcatggccgaacggcgtaatgcccgctgcttggtaaatggactctccctggaccactctaaacttgtggatgtccctttccaagtggaattcccagcgcctaagaatgagttggtccagaagttccaagtctattacctggggaatgtacctgttgctaaacctgttggggtagatgtgattaatggggccctcgagtcagtcctgtcctccagcagccgtgaacaatggaccccaagtcatgtcagtgtggcccctgctaccctcaccatcttgcaccagcagacagaggcagtgctgggagagtgtcgggtgcgtttcctctccttcctggccgtgggcagagatgtccacacgtttgcattcatcatggctgccggcccagcctccttctgctgccacatgttctggtgcgagcccaatgctgccagcctctcagaggctgtgcaggctgcgtgcatgcttcgctaccagaagtgtctggatgcccgttcccaggcctccacctcctgcctcccagcaccccctgctgagtctgtggcacggcgtgtagggtggactgtccgcaggggtgttcagtcgctgtggggctccctgaagcccaaacggctgggggcccataccccatgaagaagcccccaccttccctccacctgcttgtgttgggccccagggaactaaagggtgtgggtcagggaggggtctagaggctattcctaggcctcaggcctcccaaatatgcccctccccagtagctacggttccctgcctaggagctggggagggagagatctaatcccttcaaggaagtgataacactggagtggtaacaagaggagcaggaagcaaggccagccctg

SEQ ID NO: 106991 - DNA, 424 bp, Homo sapiens
  Payload ID: 1011
  Gene Symbol: APBB1
  Gene Name: amyloid beta (A4) precursor protein-binding, family B, member 1 (Fe65)
  ENST ID: ENST00000532020
  CDS Start-End: 162-424
gcgcgctcctgggcgggggatgttgtgatggagaagccgcggcggagcccgaaccccgcagcctgagccacctccgtcatctgggcccggggcctcaccgcgcagattccttctggaaccccaacgccttcgagacggattccgacctgccggctggatggatgagggtccaggacacctcagggacctattactggcacatcccaacagggaccacccagtgggaaccccccggccgggcctccccctcacaggggagcagcccccaagaggagtcccagctcacctggacaggttttgctcatggagaaggctttgaggatggagaattttggaaggatgaacccagtgatgaggccccaatggagctgggactgaaggaacctgaggaggggacgttgaccttcccagctcagagcctcag

SEQ ID NO: 106992 - DNA, 2221 bp, Homo sapiens
  Payload ID: 1011
  Gene Symbol: APBB1
  Gene Name: amyloid beta (A4) precursor protein-binding, family B, member 1 (Fe65)
  ENST ID: ENST00000608435
  CDS Start-End: 102-2221
gatgttgtgatggagaagccgcggcggagcccgaaccccgcagcctgagccacctccgtcatctgggcccggggcctcaccgcgcaggagctgccaaggccatgtctgttccatcatcactgagccagtcggccattaatgccaacagccacggaggccccgcactgagcctacccctgcctctgcacgctgcccacaaccagctgctcaacgccaagctgcaggccacagctgtgggacccaaggacctgcgcagcgccatgggggagggtggtgggcctgagccaggccctgccaatgccaagtggctaaaagagggccagaaccagctccggcgggccgccacggcccaccgtgaccagaatcgcaatgtgaccttgaccttggcggaggaggccagccaggagcctgagatggcacccttgggccccaaaggcctgatacacctgtactctgagctggagctctcagctcacaacgcagccaaccgaggcctacgaggacctggcctgatcatcagcactcaagagcaggggccagatgagggagaggagaaggcggccggggaggccgaggaggaggaggaggatgatgatgatgaagaggaggaggaggacttatcttctcccccagggctgcctgagcccctggagagtgtggaggcccctcccaggccccaagcccttacagatggcccccgggaacacagcaagagtgccagcctcctgtttggcatgcggaacagtgcagccagtgatgaggactcaagctgggctaccttatcccagggcagcccctcctatggctccccagaggacacagattccttctggaaccccaacgccttcgagacggattccgacctgccggctggatggatgagggtccaggacacctcagggacctattactggcacatcccaacagggaccacccagtgggaaccccccggccgggcctccccctcacaggggagcagcccccaagaggagtcccagctcacctggacaggttttgctcatggagaaggctttgaggatggagaattttggaaggatgaacccagtgatgaggccccaatggagctgggactgaaggaacctgaggaggggacgttgaccttcccagctcagagcctcagcccagagccgttgccccaagaggaggagaagcttcccccacggaataccaacccagggatcaagtgtttcgccgtgcgctccctaggctgggtagagatgaccgaggaggagctggcccctggacgcagcagtgtggcagtcaacaattgcatccgtcagctctcttaccacaaaaacaacctgcatgaccccatgtctgggggctggggggaaggaaaggatctgctactgcagctggaggatgagacactaaagctagtggagccacagagccaggcactgctgcacgcccaacccatcatcagcatccgcgtgtggggcgtcgggcgggacagtggaagagagagggactttgcctacgtagctcgtgataagctgacccagatgctcaagtgccacgtgtttcgctgtgaggcacctgccaagaacatcgccaccagcctgcatgagatctgctctaagatcatggccgaacggcgtaatgcccgctgcttggtaaatggactctccctggaccactctaaacttgtggatgtccctttccaagtggaattcccagcgcctaagaatgagttggtccagaagttccaagtctattacctggggaatgtacctgttgctaaacctgttggggtagatgtgattaatggggccctcgagtcagtcctgtcctccagcagccgtgaacaatggaccccaagtcatgtcagtgtggcccctgctaccctcaccatcttgcaccagcagacagaggcagtgctgggagagtgtcgggtgcgtttcctctccttcctggccgtgggcagagatgtccacacgtttgcattcatcatggctgccggcccagcctccttctgctgccacatgttctggtgcgagcccaatgctgccagcctctcagaggctgtgcaggctgcgtgcatggtggaacaggaggaactggtccaggccaggcctcatcctcctggacccagcaggggcagaaggaggaagggactggtccaggcatgggtcccttccccctgctccatgggcacctctgctgtattgatatcactaataaagtctgtctgcactgc

SEQ ID NO: 106993 - DNA, 1920 bp, Homo sapiens
  Payload ID: 1011
  Gene Symbol: APBB1
  Gene Name: amyloid beta (A4) precursor protein-binding, family B, member 1 (Fe65)
  Uniprot ID: O00213
  ENST ID: ENST00000608655
  CDS Start-End: 39-1511
gctgtgaggagggagggtggaggcaggaggggccgggaatgagcgccatgttctcccaggactttttcctggccattatcctgcaggacagcagcgcagattccttctggaaccccaacgccttcgagacggattccgacctgccggctggatggatgagggtccaggacacctcagggacctattactggcacatcccaacagggaccacccagtgggaaccccccggccgggcctccccctcacaggggagcagcccccaagaggagtcccagctcacctggacaggttttgctcatggagaaggctttgaggatggagaattttggaaggatgaacccagtgatgaggccccaatggagctgggactgaaggaacctgaggaggggacgttgaccttcccagctcagagcctcagcccagagccgttgccccaagaggaggagaagcttcccccacggaataccaacccagggatcaagtgtttcgccgtgcgctccctaggctgggtagagatgaccgaggaggagctggcccctggacgcagcagtgtggcagtcaacaattgcatccgtcagctctcttaccacaaaaacaacctgcatgaccccatgtctgggggctggggggaaggaaaggatctgctactgcagctggaggatgagacactaaagctagtggagccacagagccaggcactgctgcacgcccaacccatcatcagcatccgcgtgtggggcgtcgggcgggacagtggaagagagagggactttgcctacgtagctcgtgataagctgacccagatgctcaagtgccacgtgtttcgctgtgaggcacctgccaagaacatcgccaccagcctgcatgagatctgctctaagatcatggccgaacggcgtaatgcccgctgcttggtaaatggactctccctggaccactctaaacttgtggatgtccctttccaagtggaattcccagcgcctaagaatgagttggtccagaagttccaagtctattacctggggaatgtacctgttgctaaacctgttggggtagatgtgattaatggggccctcgagtcagtcctgtcctccagcagccgtgaacaatggaccccaagtcatgtcagtgtggcccctgctaccctcaccatcttgcaccagcagacagaggcagtgctgggagagtgtcgggtgcgtttcctctccttcctggccgtgggcagagatgtccacacgtttgcattcatcatggctgccggcccagcctccttctgctgccacatgttctggtgcgagcccaatgctgccagcctctcagaggctgtgcaggctgcgtgcatgcttcgctaccagaagtgtctggatgcccgttcccaggcctccacctcctgcctcccagcaccccctgctgagtctgtggcacggcgtgtagggtggactgtccgcaggggtgttcagtcgctgtggggctccctgaagcccaaacggctgggggcccataccccatgaagaagcccccaccttccctccacctgcttgtgttgggccccagggaactaaagggtgtgggtcagggaggggtctagaggctattcctaggcctcaggcctcccaaatatgcccctccccagtagctacggttccctgcctaggagctggggagggagagatctaatcccttcaaggaagtgataacactggagtggtaacaagaggagcaggaagcaaggccagccctggttctccatccccatgtgtttcaggtggaacaggaggaactggtccaggccaggcctcatcctcctggacccagcaggggcagaaggaggaagggactggtccaggcatgggtcccttccccctgctccatgggcacctctgctgtattgatatcactaataaagtctgtctgcactgc

SEQ ID NO: 106994 - DNA, 2095 bp, Homo sapiens
  Payload ID: 1011
  Gene Symbol: APBB1
  Gene Name: amyloid beta (A4) precursor protein-binding, family B, member 1 (Fe65)
  Uniprot ID: O00213
  ENST ID: ENST00000608704
  CDS Start-End: 331-1686
tttggaagctgaggatggtgaagcaccctgcctgaataactctcgtcaggtgtgcagccaccttggcgtaaccacgcccactcccagccctgctgtgtctggttgcccagcagcagggtcttgggactgcctgtcccttagtactgcctcttggaccagtcaggattcctggtttccctggtaacgggaagcacgtcagcagtctgggcgctcccagccggtcctggtgctgcggttgccgaggagacgctgcagcctagctgggccctggcagattccttctggaaccccaacgccttcgagacggattccgacctgccggctggatggatgagggtccaggacacctcagggacctattactggcacatcccaacagggaccacccagtgggaaccccccggccgggcctccccctcacaggggagcagcccccaagaggagtcccagctcacctggacaggttttgctcatggagaaggctttgaggatggagaattttggaaggatgaacccagtgatgaggccccaatggagctgggactgaaggaacctgaggaggggacgttgaccttcccagctcagagcctcagcccagagccgttgccccaagaggaggagaagcttcccccacggaataccaacccagggatcaagtgtttcgccgtgcgctccctaggctgggtagagatgaccgaggaggagctggcccctggacgcagcagtgtggcagtcaacaattgcatccgtcagctctcttaccacaaaaacaacctgcatgaccccatgtctgggggctggggggaaggaaaggatctgctactgcagctggaggatgagacactaaagctagtggagccacagagccaggcactgctgcacgcccaacccatcatcagcatccgcgtgtggggcgtcgggcgggacagtggaagagagagggactttgcctacgtagctcgtgataagctgacccagatgctcaagtgccacgtgtttcgctgtgaggcacctgccaagaacatcgccaccagcctgcatgagatctgctctaagatcatggccgaacggcgtaatgcccgctgcttggtaaatggactctccctggaccactctaaacttgtggatgtccctttccaagtggaattcccagcgcctaagaatgagttggtccagaagttccaagtctattacctggggaatgtacctgttgctaaacctgttggggtagatgtgattaatggggccctcgagtcagtcctgtcctccagcagccgtgaacaatggaccccaagtcatgtcagtgtggcccctgctaccctcaccatcttgcaccagcagacagaggcagtgctgggagagtgtcgggtgcgtttcctctccttcctggccgtgggcagagatgtccacacgtttgcattcatcatggctgccggcccagcctccttctgctgccacatgttctggtgcgagcccaatgctgccagcctctcagaggctgtgcaggctgcgtgcatgcttcgctaccagaagtgtctggatgcccgttcccaggcctccacctcctgcctcccagcaccccctgctgagtctgtggcacggcgtgtagggtggactgtccgcaggggtgttcagtcgctgtggggctccctgaagcccaaacggctgggggcccataccccatgaagaagcccccaccttccctccacctgcttgtgttgggccccagggaactaaagggtgtgggtcagggaggggtctagaggctattcctaggcctcaggcctcccaaatatgcccctccccagtagctacggttccctgcctaggagctggggagggagagatctaatcccttcaaggaagtgataacactggagtggtaacaagaggagcaggaagcaaggccagccctggttctccatccccatgtgtttcaggtggaacaggaggaactggtccaggccaggcctcatcctcctggacccagcaggggcagaaggaggaagggactggtccaggcatgggtcccttccccctgctccatgggcacctctgctgtattgatatcactaataaagtctgtctgcactgc

SEQ ID NO: 106995 - DNA, 1442 bp, Homo sapiens
  Payload ID: 1011
  Gene Symbol: APBB1
  Gene Name: amyloid beta (A4) precursor protein-binding, family B, member 1 (Fe65)
  ENST ID: ENST00000529519
  CDS Start-End: 364-1071
ggtcctggtgctgcggttgccgaggagacgctgcagcctagctgggccctggcagctcacctggacaggttttgctcatggagaaggctttgaggatggagaattttggaaggatgaacccagtgatgaggccccaatggagctgggactgaaggaacctgaggaggggacgttgaccttcccagctcagagcctcagggaaaggatctgctactgcagctggaggatgagacactaaagctagtggagccacagagccaggcactgctgcacgcccaacccatcatcagcatccgcgtgtggggcgtcgggcgggacagtggaagggactttgcctacgtagctcgtgataagctgacccagatgctcaagtgccacgtgtttcgctgtgaggcacctgccaagaacatcgccaccagcctgcatgagatctgctctaagatcatggccgaacggcgtaatgcccgctgcttggtaaatggactctccctggaccactctaaacttgtggatgtccctttccaagtggaattcccagcgcctaagaatgagttggtccagaagttccaagtctattacctggggaatgtacctgttgctaaacctgttggggtagatgtgattaatggggccctcgagtcagtcctgtcctccagcagccgtgaacaatggaccccaagtcatgtcagtgtggcccctgctaccctcaccatcttgcaccagcagacagaggcagtgctgggagagtgtcgggtgcgtttcctctccttcctggccgtgggcagagatgtccacacgtttgcattcatcatggctgccggcccagcctccttctgctgccacatgttctggtgcgagcccaatgctgccagcctctcagaggctgtgcaggctgcgtgcatgcttcgctaccagaagtgtctggatgcccgttcccaggcctccacctcctgcctcccagcaccccctgctgagtctgtggcacggcgtgtagggtggactgtccgcaggggtgttcagtcgctgtggggctccctgaagcccaaacggctgggggcccataccccatgaagaagcccccaccttccctccacctgcttgtgttgggccccagggaactaaagggtgtgggtcagggaggggtctagaggctattcctaggcctcaggcctcccaaatatgcccctccccagtagctacggttccctgcctaggagctggggagggagagatctaatcccttcaaggaagtgataacactggagtggtaacaagaggagcaggaagcaaggccagccctggttctccatccccatgtgtttcaggtggaacaggaggaactggtccaggccaggcctcatcctcctggacccagcaggggcagaaggaggaagggactggtccaggcatgggtcccttccccctgctccatgggcacctct

SEQ ID NO: 106996 - DNA, 1574 bp, Homo sapiens
  Payload ID: 1011
  Gene Symbol: APBB1
  Gene Name: amyloid beta (A4) precursor protein-binding, family B, member 1 (Fe65)
  Uniprot ID: O00213
  ENST ID: ENST00000609331
  CDS Start-End: 43-1470
acagggttggagtggtgtggctctgccggcagacaagggtgtatgacacagatgcgagattccttctggaaccccaacgccttcgagacggattccgacctgccggctggatggatgagggtccaggacacctcagggacctattactggcacatcccaacagggaccacccagtgggaaccccccggccgggcctccccctcacaggggagcagcccccaagaggagtcccagctcacctggacaggttttgctcatggagaaggctttgaggatggagaattttggaaggatgaacccagtgatgaggccccaatggagctgggactgaaggaacctgaggaggggacgttgaccttcccagctcagagcctcagcccagagccgttgccccaagaggaggagaagcttcccccacggaataccaacccagggatcaagtgtttcgccgtgcgctccctaggctgggtagagatgaccgaggaggagctggcccctggacgcagcagtgtggcagtcaacaattgcatccgtcagctctcttaccacaaaaacaacctgcatgaccccatgtctgggggctggggggaaggaaaggatctgctactgcagctggaggatgagacactaaagctagtggagccacagagccaggcactgctgcacgcccaacccatcatcagcatccgcgtgtggggcgtcgggcgggacagtggaagagagagggactttgcctacgtagctcgtgataagctgacccagatgctcaagtgccacgtgtttcgctgtgaggcacctgccaagaacatcgccaccagcctgcatgagatctgctctaagatcatggccgaacggcgtaatgcccgctgcttggtaaatggactctccctggaccactctaaacttgtggatgtccctttccaagtggaattcccagcgcctaagaatgagttggtccagaagttccaagtctattacctggggaatgtacctgttgctaaacctgttggggtagatgtgattaatggggccctcgagtcagtcctgtcctccagcagccgtgaacaatggaccccaagtcatgtcagtgtggcccctgctaccctcaccatcttgcaccagcagacagaggcagtgctgggagagtgtcgggtgcgtttcctctccttcctggccgtgggcagagatgtccacacgtttgcattcatcatggctgccggcccagcctccttctgctgccacatgttctggtgcgagcccaatgctgccagcctctcagaggctgtgcaggctgcgtgcatgcttcgctaccagaagtgtctggatgcccgttcccaggcctccacctcctgcctcccagcaccccctgctgagtctgtggcacggcgtgtagggtggactgtccgcaggggtgttcagtcgctgtggggctccctgaagcccaaacggctgggggcccataccccatgaagaagcccccaccttccctccacctgcttgtgttgggccccagggaactaaagggtgtgggtcagggaggggtctagaggctattcctaggcctcaggcctccc

SEQ ID NO: 106997 - DNA, 2642 bp, Homo sapiens
  Payload ID: 1011
  Gene Symbol: APBB1
  Gene Name: amyloid beta (A4) precursor protein-binding, family B, member 1 (Fe65)
  Uniprot ID: O00213
  ENST ID: ENST00000609360
  CDS Start-End: 101-2233
atgttgtgatggagaagccgcggcggagcccgaaccccgcagcctgagccacctccgtcatctgggcccggggcctcaccgcgcaggagctgccaaggccatgtctgttccatcatcactgagccagtcggccattaatgccaacagccacggaggccccgcactgagcctacccctgcctctgcacgctgcccacaaccagctgctcaacgccaagctgcaggccacagctgtgggacccaaggacctgcgcagcgccatgggggagggtggtgggcctgagccaggccctgccaatgccaagtggctaaaagagggccagaaccagctccggcgggccgccacggcccaccgtgaccagaatcgcaatgtgaccttgaccttggcggaggaggccagccaggagcctgagatggcacccttgggccccaaaggcctgatacacctgtactctgagctggagctctcagctcacaacgcagccaaccgaggcctacgaggacctggcctgatcatcagcactcaagagcaggggccagatgagggagaggagaaggcggccggggaggccgaggaggaggaggaggatgatgatgatgaagaggaggaggaggacttatcttctcccccagggctgcctgagcccctggagagtgtggaggcccctcccaggccccaagcccttacagatggcccccgggaacacagcaagagtgccagcctcctgtttggcatgcggaacagtgcagccagtgatgaggactcaagctgggctaccttatcccagggcagcccctcctatggctccccagaggacacagattccttctggaaccccaacgccttcgagacggattccgacctgccggctggatggatgagggtccaggacacctcagggacctattactggcacatcccaacagggaccacccagtgggaaccccccggccgggcctccccctcacaggggagcagcccccaagaggagtcccagctcacctggacaggttttgctcatggagaaggctttgaggatggagaattttggaaggatgaacccagtgatgaggccccaatggagctgggactgaaggaacctgaggaggggacgttgaccttcccagctcagagcctcagcccagagccgttgccccaagaggaggagaagcttcccccacggaataccaacccagggatcaagtgtttcgccgtgcgctccctaggctgggtagagatgaccgaggaggagctggcccctggacgcagcagtgtggcagtcaacaattgcatccgtcagctctcttaccacaaaaacaacctgcatgaccccatgtctgggggctggggggaaggaaaggatctgctactgcagctggaggatgagacactaaagctagtggagccacagagccaggcactgctgcacgcccaacccatcatcagcatccgcgtgtggggcgtcgggcgggacagtggaagagagagggactttgcctacgtagctcgtgataagctgacccagatgctcaagtgccacgtgtttcgctgtgaggcacctgccaagaacatcgccaccagcctgcatgagatctgctctaagatcatggccgaacggcgtaatgcccgctgcttggtaaatggactctccctggaccactctaaacttgtggatgtccctttccaagtggaattcccagcgcctaagaatgagttggtccagaagttccaagtctattacctggggaatgtacctgttgctaaacctgttggggtagatgtgattaatggggccctcgagtcagtcctgtcctccagcagccgtgaacaatggaccccaagtcatgtcagtgtggcccctgctaccctcaccatcttgcaccagcagacagaggcagtgctgggagagtgtcgggtgcgtttcctctccttcctggccgtgggcagagatgtccacacgtttgcattcatcatggctgccggcccagcctccttctgctgccacatgttctggtgcgagcccaatgctgccagcctctcagaggctgtgcaggctgcgtgcatgcttcgctaccagaagtgtctggatgcccgttcccaggcctccacctcctgcctcccagcaccccctgctgagtctgtggcacggcgtgtagggtggactgtccgcaggggtgttcagtcgctgtggggctccctgaagcccaaacggctgggggcccataccccatgaagaagcccccaccttccctccacctgcttgtgttgggccccagggaactaaagggtgtgggtcagggaggggtctagaggctattcctaggcctcaggcctcccaaatatgcccctccccagtagctacggttccctgcctaggagctggggagggagagatctaatcccttcaaggaagtgataacactggagtggtaacaagaggagcaggaagcaaggccagccctggttctccatccccatgtgtttcaggtggaacaggaggaactggtccaggccaggcctcatcctcctggacccagcaggggcagaaggaggaagggactggtccaggcatgggtcccttccccctgctccatgggcacctctgctgtattgatatcactaataaagtctgtctgcactgc

SEQ ID NO: 106998 - DNA, 1907 bp, Homo sapiens
  Payload ID: 1011
  Gene Symbol: APBB1
  Gene Name: amyloid beta (A4) precursor protein-binding, family B, member 1 (Fe65)
  ENST ID: ENST00000621678
  CDS Start-End: 70-1497
aagagttagaggacgcatgagcgggttacagggttggagtggtgtggctctgccggcagacaagggtgtatgacacagatgcgagattccttctggaaccccaacgccttcgagacggattccgacctgccggctggatggatgagggtccaggacacctcagggacctattactggcacatcccaacagggaccacccagtgggaaccccccggccgggcctccccctcacaggggagcagcccccaagaggagtcccagctcacctggacaggttttgctcatggagaaggctttgaggatggagaattttggaaggatgaacccagtgatgaggccccaatggagctgggactgaaggaacctgaggaggggacgttgaccttcccagctcagagcctcagcccagagccgttgccccaagaggaggagaagcttcccccacggaataccaacccagggatcaagtgtttcgccgtgcgctccctaggctgggtagagatgaccgaggaggagctggcccctggacgcagcagtgtggcagtcaacaattgcatccgtcagctctcttaccacaaaaacaacctgcatgaccccatgtctgggggctggggggaaggaaaggatctgctactgcagctggaggatgagacactaaagctagtggagccacagagccaggcactgctgcacgcccaacccatcatcagcatccgcgtgtggggcgtcgggcgggacagtggaagcaacagggactttgcctacgtagctcgtgataagctgacccagatgctcaagtgccacgtgtttcgctgtgaggcacctgccaagaacatcgccaccagcctgcatgagatctgctctaagatcatggccgaacggcgtaatgcccgctgcttggtaaatggactctccctggaccactctaaacttgtggatgtccctttccaagtggaattcccagcgcctaagaatgagttggtccagaagttccaagtctattacctggggaatgtacctgttgctaaacctgttggggtagatgtgattaatggggccctcgagtcagtcctgtcctccagcagccgtgaacaatggaccccaagtcatgtcagtgtggcccctgctaccctcaccatcttgcaccagcagacagaggcagtgctgggagagtgtcgggtgcgtttcctctccttcctggccgtgggcagagatgtccacacgtttgcattcatcatggctgccggcccagcctccttctgctgccacatgttctggtgcgagcccaatgctgccagcctctcagaggctgtgcaggctgcgtgcatgcttcgctaccagaagtgtctggatgcccgttcccaggcctccacctcctgcctcccagcaccccctgctgagtctgtggcacggcgtgtagggtggactgtccgcaggggtgttcagtcgctgtggggctccctgaagcccaaacggctgggggcccataccccatgaagaagcccccaccttccctccacctgcttgtgttgggccccagggaactaaagggtgtgggtcagggaggggtctagaggctattcctaggcctcaggcctcccaaatatgcccctccccagtagctacggttccctgcctaggagctggggagggagagatctaatcccttcaaggaagtgataacactggagtggtaacaagaggagcaggaagcaaggccagccctggttctccatccccatgtgtttcaggtggaacaggaggaactggtccaggccaggcctcatcctcctggacccagcaggggcagaaggaggaagggactggtccaggcatgggtcccttccccctgctccatgggcacctctgctgtattgatatcactaataaagtctgtctgcactgct

SEQ ID NO: 106999 - DNA, 2147 bp, Homo sapiens
  Payload ID: 1011
  Gene Symbol: APBB1
  Gene Name: amyloid beta (A4) precursor protein-binding, family B, member 1 (Fe65)
  ENST ID: ENST00000610474
  CDS Start-End: 382-1737
gagacgctgcagcctagctgggccctggcaggtgaggggtggggggtggtgctgggaagccccaagcccagcctcaagcttgctggggctcaggacctcaaagcccacccttgggttcaaactgctgtgcaggtcctggacaggggcgggatccctgaaggccttgaaaccacaccctatttatgctgacagctataggctctgcagggccccaggcagctggggtattccttaggggctgagtctcctggtatccctaagactgggcttggcttaggcactgaggactttttcctggccattatcctgcaggacagcagcgcagattccttctggaaccccaacgccttcgagacggattccgacctgccggctggatggatgagggtccaggacacctcagggacctattactggcacatcccaacagggaccacccagtgggaaccccccggccgggcctccccctcacaggggagcagcccccaagaggagtcccagctcacctggacaggttttgctcatggagaaggctttgaggatggagaattttggaaggatgaacccagtgatgaggccccaatggagctgggactgaaggaacctgaggaggggacgttgaccttcccagctcagagcctcagcccagagccgttgccccaagaggaggagaagcttcccccacggaataccaacccagggatcaagtgtttcgccgtgcgctccctaggctgggtagagatgaccgaggaggagctggcccctggacgcagcagtgtggcagtcaacaattgcatccgtcagctctcttaccacaaaaacaacctgcatgaccccatgtctgggggctggggggaaggaaaggatctgctactgcagctggaggatgagacactaaagctagtggagccacagagccaggcactgctgcacgcccaacccatcatcagcatccgcgtgtggggcgtcgggcgggacagtggaagcaacagggactttgcctacgtagctcgtgataagctgacccagatgctcaagtgccacgtgtttcgctgtgaggcacctgccaagaacatcgccaccagcctgcatgagatctgctctaagatcatggccgaacggcgtaatgcccgctgcttggtaaatggactctccctggaccactctaaacttgtggatgtccctttccaagtggaattcccagcgcctaagaatgagttggtccagaagttccaagtctattacctggggaatgtacctgttgctaaacctgttggggtagatgtgattaatggggccctcgagtcagtcctgtcctccagcagccgtgaacaatggaccccaagtcatgtcagtgtggcccctgctaccctcaccatcttgcaccagcagacagaggcagtgctgggagagtgtcgggtgcgtttcctctccttcctggccgtgggcagagatgtccacacgtttgcattcatcatggctgccggcccagcctccttctgctgccacatgttctggtgcgagcccaatgctgccagcctctcagaggctgtgcaggctgcgtgcatgcttcgctaccagaagtgtctggatgcccgttcccaggcctccacctcctgcctcccagcaccccctgctgagtctgtggcacggcgtgtagggtggactgtccgcaggggtgttcagtcgctgtggggctccctgaagcccaaacggctgggggcccataccccatgaagaagcccccaccttccctccacctgcttgtgttgggccccagggaactaaagggtgtgggtcagggaggggtctagaggctattcctaggcctcaggcctcccaaatatgcccctccccagtagctacggttccctgcctaggagctggggagggagagatctaatcccttcaaggaagtgataacactggagtggtaacaagaggagcaggaagcaaggccagccctggttctccatccccatgtgtttcaggtggaacaggaggaactggtccaggccaggcctcatcctcctggacccagcaggggcagaaggaggaagggactggtccaggcatgggtcccttccccctgctccatgggcacctctgctgtattgatatcactaataaagtctgtctgcactgct

SEQ ID NO: 107000 - DNA, 2107 bp, Homo sapiens
  Payload ID: 1011
  Gene Symbol: APBB1
  Gene Name: amyloid beta (A4) precursor protein-binding, family B, member 1 (Fe65)
  ENST ID: ENST00000618005
  CDS Start-End: 342-1697
gagacgctgcagcctagctgggccctggcaggtgaggggtggggggtggtgctgggaagccccaagcccagcctcaagcttgctggggctcaggacctcaaagcccacccttgggttcaaactgctgtgcaggtcctggacaggggcgggatccctgaaggccttgaaaccacaccctatttatgctgacagctataggctctgcagggccccaggcagctggggtattccttaggggctgagtctcctggtatccctaagactgggcttggcttaggcactgagattccttctggaaccccaacgccttcgagacggattccgacctgccggctggatggatgagggtccaggacacctcagggacctattactggcacatcccaacagggaccacccagtgggaaccccccggccgggcctccccctcacaggggagcagcccccaagaggagtcccagctcacctggacaggttttgctcatggagaaggctttgaggatggagaattttggaaggatgaacccagtgatgaggccccaatggagctgggactgaaggaacctgaggaggggacgttgaccttcccagctcagagcctcagcccagagccgttgccccaagaggaggagaagcttcccccacggaataccaacccagggatcaagtgtttcgccgtgcgctccctaggctgggtagagatgaccgaggaggagctggcccctggacgcagcagtgtggcagtcaacaattgcatccgtcagctctcttaccacaaaaacaacctgcatgaccccatgtctgggggctggggggaaggaaaggatctgctactgcagctggaggatgagacactaaagctagtggagccacagagccaggcactgctgcacgcccaacccatcatcagcatccgcgtgtggggcgtcgggcgggacagtggaagcaacagggactttgcctacgtagctcgtgataagctgacccagatgctcaagtgccacgtgtttcgctgtgaggcacctgccaagaacatcgccaccagcctgcatgagatctgctctaagatcatggccgaacggcgtaatgcccgctgcttggtaaatggactctccctggaccactctaaacttgtggatgtccctttccaagtggaattcccagcgcctaagaatgagttggtccagaagttccaagtctattacctggggaatgtacctgttgctaaacctgttggggtagatgtgattaatggggccctcgagtcagtcctgtcctccagcagccgtgaacaatggaccccaagtcatgtcagtgtggcccctgctaccctcaccatcttgcaccagcagacagaggcagtgctgggagagtgtcgggtgcgtttcctctccttcctggccgtgggcagagatgtccacacgtttgcattcatcatggctgccggcccagcctccttctgctgccacatgttctggtgcgagcccaatgctgccagcctctcagaggctgtgcaggctgcgtgcatgcttcgctaccagaagtgtctggatgcccgttcccaggcctccacctcctgcctcccagcaccccctgctgagtctgtggcacggcgtgtagggtggactgtccgcaggggtgttcagtcgctgtggggctccctgaagcccaaacggctgggggcccataccccatgaagaagcccccaccttccctccacctgcttgtgttgggccccagggaactaaagggtgtgggtcagggaggggtctagaggctattcctaggcctcaggcctcccaaatatgcccctccccagtagctacggttccctgcctaggagctggggagggagagatctaatcccttcaaggaagtgataacactggagtggtaacaagaggagcaggaagcaaggccagccctggttctccatccccatgtgtttcaggtggaacaggaggaactggtccaggccaggcctcatcctcctggacccagcaggggcagaaggaggaagggactggtccaggcatgggtcccttccccctgctccatgggcacctctgctgtattgatatcactaataaagtctgtctgcactgct

SEQ ID NO: 107001 - DNA, 1513 bp, Homo sapiens
  Payload ID: 1012
  Gene Symbol: APBB1IP
  Gene Name: amyloid beta (A4) precursor protein-binding, family B, member 1 interacting protein
  Uniprot ID: Q7Z5R6
  ENST ID: ENST00000356785
  CDS Start-End: 234-752
cgctcctgagagaagggcgcgcgcggcacaggggccttccttgcacctcggagcaaagcagctcggatagcgccacacgtctgcgcgctgcgtgggaagggcagggctgacagcacttcctccccggggcagcgacctggagcccgggtgcggcagtctgcaccgcgcgtcgctttcccggccggagtctcgccgccttcccgcgccccgcagcgccccgcagagcagtcgagatgggtgagtcaagtgaagacatagaccaaatgttcagcactttgctgggagagatggatcttctgactcagagtttaggagttgacactctccctcctcctgaccctaatccacccagagctgaatttaactacagtgtggggtttaaagatttaaatgagtccttaaatgcactggaagaccaagatttagatgctctcatggcagatctggtagcagacataagtgaggctgagcagaggacaatccaggcacagaaagagtccttgcagaatcaacatcattcagcatctctacaagcatcaattttcagtggtgcagcctctcttggttatggaacaaatgttgctgccactggtatcagccaatatgaggatgacttaccacctccaccagccgatcctgtgttagaccttccactgccaccaccacctcctgaacctctctctcaggtaagtatgtgggaccagagatggcaggaccatcaacctctgctacctatcactgatgttccttgaagtgatcattacattcctaagttggtacatccaaagatctgagatactaaaaaacaaagatacagagcacgctcattgcaaagctagaaccctccgtaagcaagccacatgggtgtgtatcaagaatgtattagggccatattcaggatttactgtagtttgcttaaaaaatatttgtatgcaaaaactatttgataaaactcaatcttttgggggaaatgttttattaacatcatattgaaatgtggaactgattatatatttccatgtccctgttcttagctcagtacatagagaatagaaggcattcattatacattttctgagtagagtgaaattgaattttgttgaacttggcagccctgttcagtaggacaggtacatccaagtatcacttgtaatgtcatagttggggagggtgttacaaagcaggcagatgatgggtgcttgatattgataaatttctgaatattgaaaaacagacaactggaaagtttaaatgatcattatttgggatgttaactcatagtatgtctctcataaaagtaaaaagagcacttttaaggattttctttttagagtaagccaaatattttagaggagagtccagttcaatttcctgtggcttctacaatggtcacactgtgtcatgatgtttggtactcacaaataagaccctagggaccccgaaaggtcatacaatgccttttgaatgaacaaatattgaatataaatcaaatattaaattatactctatcaca

SEQ ID NO: 107002 - DNA, 2771 bp, Homo sapiens
  Payload ID: 1012
  Gene Symbol: APBB1IP
  Gene Name: amyloid beta (A4) precursor protein-binding, family B, member 1 interacting protein
  Uniprot ID: Q7Z5R6
  ENST ID: ENST00000376236
  CDS Start-End: 456-2456
agtccagccctgcaccgcgtcccctgagggcgggctgcaggcggccgggaagccttgcacaaccggcccaaaagaggaagcccagaaagtgctgaagtaaacactttgggagaccgttgcaacataaagcggcctctcagtctttggtggaaccatcactaggccccaatcccttagtccctcttgcgtcgaggctgcaaaatggttccattcgccaggagacgctcctgagagaagggcgcgcgcggcacaggggccttccttgcacctcggagcaaagcagctcggatagcgccacacgtctgcgcgctgcgtgggaagggcagggctgacagcacttcctccccggggcagcgacctggagcccgggtgcggcagtctgcaccgcgcgtcgctttcccggccggagtctcgccgccttcccgcgccccgcagcgccccgcagagcagtcgagatgggtgagtcaagtgaagacatagaccaaatgttcagcactttgctgggagagatggatcttctgactcagagtttaggagttgacactctccctcctcctgaccctaatccacccagagctgaatttaactacagtgtggggtttaaagatttaaatgagtccttaaatgcactggaagaccaagatttagatgctctcatggcagatctggtagcagacataagtgaggctgagcagaggacaatccaggcacagaaagagtccttgcagaatcaacatcattcagcatctctacaagcatcaattttcagtggtgcagcctctcttggttatggaacaaatgttgctgccactggtatcagccaatatgaggatgacttaccacctccaccagccgatcctgtgttagaccttccactgccaccaccacctcctgaacctctctctcaggaagaggaagaagcccaagccaaggctgataaaattaagctggcgctggaaaaactgaaggaggccaaggttaagaagctcgtcgtcaaggtgcacatgaatgataacagcacaaagtcactgatggtggatgagcggcagctggcccgagatgttctggacaaccttttcgagaaaactcattgtgactgcaatgtagactggtgtctttatgaaatctacccggaactacaaattgagaggttttttgaagaccatgaaaatgttgttgaagtcttatcagactggacaagagacacagaaaataaaatactatttttggagaaagaggagaaatatgctgtatttaaaaacccccagaatttctacttggataacagaggaaaaaaagaaagcaaggaaactaatgagaaaatgaatgctaagaacaaggaatccttacttgaggaaagtttctgtggaacatctatcattgtaccagaactggaaggagctctttatttgaaagaagatggaaagaaatcctggaaaaggcgctattttcttttacgggcttctggaatttattatgtacccaaaggaaagactaagacatctcgagatctggcgtgttttatacagtttgaaaatgtcaacatttactatgggactcagcataaaatgaaatataaagcgcccactgactattgctttgttttaaagcacccccaaattcagaaggagtcccagtatatcaagtatctctgctgtgatgacacaagaacccttaaccagtgggtcatgggaatacggatagccaagtatgggaagactctctatgataactaccagcgggctgtggcaaaggctggacttgcctctcggtggacaaacttggggacagtcaatgcagctgcaccagctcagccatctacaggacctaaaacaggcaccacccagcccaatggacagattccccaggctacacattctgtcagtgctgttctccaagaggcccagagacatgctgaaacatcgaaggataagaagccagccctcgggaaccaccacgacccggcagtgccccgggccccgcacgcccccaagtccagcctgcccccgccccctccggtgcggaggtcctccgacaccagcggcagtcccgccacgcccctcaaggccaagggcacaggcggcgggggcttgcccgccccacccgacgacttcctgccgccgccgccaccgccgccgcccctcgatgaccctgagctcccgccgccgcccccggacttcatggagccgcccccagacttcgtgcccccgcccccgccgtcgtacgcagggatcgcgggctcagagctgcccccgccgccgccgccgccgcccgcgcccgcgcccgcccccgtccccgactccgccaggccgccccccgcggtggccaagaggcctcctgtgccccccaagaggcaagagaacccagggcaccccggcggagcaggaggcggggagcaagatttcatgtcagacctcatgaaagctttgcaaaagaagagaggcaacgtgtcctagggacgggcatgatgagtgttccagagggagaagcatcgctgaccccgagcgcaggttttgctagcagattgccctgacatcttgttcatttcagataaaatgtgatgggaaacttctcactgatgtgctcaagtacaggcataaccattaacccagtagagttcagaatatctgcccaaatgtacatatcgttcccatgtattttaacctaaatggaatgtatcttcccttccaagctgcctaaagcgctgttttaggttcatttattttattatgttcagaagcatcaaataaaagttaaacgtttttccggaa

SEQ ID NO: 107003 - DNA, 8972 bp, Homo sapiens
  Payload ID: 1013
  Gene Symbol: APBB2
  Gene Name: amyloid beta (A4) precursor protein-binding, family B, member 2
  Uniprot ID: Q92870
  ENST ID: ENST00000295974
  CDS Start-End: 631-2907
gccaaagcctggagaagtggaatctcgtcagcgccgctccctgcgcgggactcgcggaacggcactgagcatgctcagttgccggagcccgttctggtctcaagtaggaagctagtgcgctgtaaccgcatctgatctgggcgctccgggaagggcgagactggagcagagccgctgggcgccggagccgaggcgagcgccgcgcgcaccactggttggagttgctgtgggtgagctgctgtggtctgtagccaagcatgctgtggtcggatctgcccagccgtggaacagaaacatttgctggatggaaaatccataaaagaaagctcctgtgaaaagctgaggctgacaataatttaagcaaaatcagatcgatctctttgggctgcctgacctccttgggtgcttgctattaattaacagactttgtggggaaaaaaaggagcttgccttctgagctttgtaccaaagacctgggaaaactaaccatctcagtctttcctgaggacttgggaactgccgaggcctctgccaatgtgttgactgtcgctatgggctcactgttgtccaggcagctcatatttcaaattataacctatttcctgcaccattgctgacgcctggtgatccatgtcagaagtacttccagctgactcaggtgttgacaccttggcagtgtttatggccagcagcggaactacagacgtcacaaatcggaacagcccagccacaccaccaaacacccttaacctccgatcctcccacaatgaactgttgaacgctgaaataaaacacacagaaaccaagaacagcacacctcccaaatgcaggaaaaaatatgcactaactaacatccaggcggccatgggcctctcggatccagctgcacagcccctgctgggaaatggctctgccaacatcaagctggtgaaaaatggggagaaccagctccgtaaggctgcagagcaagggcagcaggaccccaacaaaaacctgagccccactgcagtcatcaacataacttctgagaagttagagggtaaagagccccacccacaggattcctcgagctgtgagattttaccctcccagcccaggagaactaagagcttcctaaattactatgcagatctggaaacctcagccagagaactagagcagaaccgaggcaatcaccatgggactgcggaagagaaatcccagccagtccagggccaggcctccaccatcattgggaatggcgatttgctgctgcagaaaccaaacagaccccagtccagccctgaagacggccaagtagccacagtgtcatccagcccagaaaccaagaaggatcatccgaaaacaggggccaaaaccgactgtgcactgcaccggatccagaacctggcaccgagcgatgaggagtccagctggacaacgttgtcccaagacagtgcctcacccagctccccggatgaaacagatatatggagtgatcactcatttcagactgatccagatttgccgcctggctggaaaagagtcagtgacattgccgggacctattattggcacatcccaacaggaacgactcagtgggaacggcccgtctccatcccagcagatctccagggttctaggaaagggtcacttagttctgtaacgccatctcccaccccagagaacgagaaacagccatggagtgattttgctgttctgaatgggggaaagattaatagtgacatttggaaggatttgcatgcagccactgttaacccggaccccagtttaaaagagtttgaaggagcaaccctacgctatgcatctttgaaactcagaaatgccccacaccctgatgatgatgattcttgtagtatcaacagtgacccagaagccaagtgttttgctgtgcgttctctgggatgggtagagatggcagaagaggacctcgcccccggtaaaagtagtgttgcggtcaacaactgcatcaggcaactttcctactgcaaaaatgacatccgagacacagtcgggatttggggagaggggaaagacatgtacctgatcctggagaatgacatgctcagcctggtggaccccatggaccgcagcgtgctgcactcgcagcccatcgtcagcatccgcgtgtggggcgtgggccgcgacaatggccgggattttgcttatgtagcaagagataaagatacaagaattttgaaatgtcatgtatttcgatgtgacacaccagcaaaagccattgccacaagtctccacgagatctgctccaagattatggctgaacggaagaatgccaaagcgctggcctgcagctccttacaggaaagggccaatgtgaacctcgatgtccctttgcaagtagattttccaacaccaaagactgagctggtccagaagttccacgtgcagtacttgggcatgttacctgtagacaaaccagtcggaatggatattttgaacagtgccatagaaaatcttatgacctcatccaacaaggaggactggctgtcagtgaacatgaacgtggctgatgccactgtgactgtcatcagtgaaaagaatgaagaggaagtcttagtggaatgtcgtgtgcgattcctgtccttcatgggtgttgggaaggacgtccacacatttgccttcatcatggacacggggaaccagcgctttgagtgccacgttttctggtgcgagcctaatgctggtaacgtgtctgaggcggtgcaggccgcctgcatgttacgatatcagaagtgcttggtagccaggccgccttctcagaaagttcgaccacctccaccgccagcagattcagtaaccagaagagtcacaaccaatgtaaaacgaggggtcttatccctcattgacactttgaaacagaaacgccctgtcaccgaaatgccatagctgcacatgcaaaaggactcggctatttacctgaagattgactagctacactaaagaaaatgaactccgccatccgaccttccatccagttgctgatgctttgtcttcagagaatttacccttaaccaagcagtgttagacaagcatgttctctcgtcttgccaccatcatgtgatatgaaaagaagcatgaataattttttttgctgtaagttacatcatgcgcagtggaaggtctttttcttattgtaaatattgtgaacattacttaacttcacacacacacagagaagagtgtggccccacccctcctagtgaactaacgctgcgtccttggaatgaatgatgcgtgagttagtttcactgtcttcttggctggacctgtcacaagcaacctttaagtcctacagcactttgccctgttttcaacattggagtaggcactgcatagcagataccattgaattgctgtaaaaataggatggcgagtttgtgttttaatttttcataaaattgaacctgttggttgacaaaattggctgttggcatcagtatagaaaccaactggcagctttccctgacaagctctttgacacatggacaccatttcatgtctacagctgtttgtgggatgttggaaaaaaatgaaacttcaaaattgatgaaaaactaaattcgaggaattaaaatcgaacaaaacatagcctttcttttccgatggttttcaaactgattatttttaaaagagattaataaaatcataatgcattttgggtgggacatatttcaaacttctgccttatattgtacggtgcagctagagaattatagttcactatggccattctctacataaacattaagatgaaatactcctcatcagcctttcatccttagtttgagaattagctgatatgcaatttgaagttgaggaaatatcattgatatttctatcatgcacgattattttagatttctaccaccgtgtgatttttgctagtccatgtgctagaggtaaacgttctgctggaattctgcatccagctctatccccctctgatgctttttgcccagaaagctgtctgtccatcatgtattgtccatggcaacaaattacattaggttgaacctttccttgattttatgtatttaatattagaatttgttggactcaactagatatattttttaatttatattttttccattttactttgaagatttgaaatgttcatacctgagcaaagtctacacaggagtaatggactgtttaacaagtttcccaaaacagcattttcctgctccttcgtatgtaggtgagaaacttagctggaaagacatacaaatttagactctcgttgacattgtcgttttaaaaggaagttgctaaggcgatcaatctcaatattagtcttgtttacttcttcttaatgtcaaaattaacatttacaacatccaattataaaagtaatgctttatgtttatacactgctatgtacttgtcaaaatggtttccacattcttatcacatctgagccttaccaggtagagaaggtactaaatacactttagaagtaaaaatatgaagtaccgagaggctaaacccactggcctaagatctcaccaaagttcatgaaaaccaggactaggacccacggctcccaaagcccgttcttgctgtgttgtgctgcctccatatccgtcaggaagagcctttccagaatgattctgggcatatactaagaagagcaggtatggaaagatctattgtcagggaatcttagaattccctacacgagtgggagaaagatgtccaaattccttacgcagtggtattcatgatggtgccctatctaagtccaggactgttttcctacagcgtgcctcaaaagtgttgtagagggcaggattctacattcacagcctgttccatctacgagattttccagatgctacttgtggtagacattcctaactcatggtacttagccaccagagatcatgatggaatgagtgggtggcttttctacctgccattccctcagaattcatgaggggtgggggacagggggaccggaattgtcttagcaccccaatgttatgacaaaactatgctactttagaaacgcagtctgtttttcaccaattgacatactactgatctgaagtaaccagtgccatcataagaaattactgcattaagaaaatccttgctgtgccctttgaaaagctgttcagaaatcatttacagtgatctttcatctcggtcgctgtagtgaaacattttagtgtgataaatttcaaaattctaaacaaattacccacttttatattggaaatctctaccagaactccctcttcattttttaaggcatacatttgcttgttttcaagatcaagaattctgagctagctttaagtagcaaactgatttatatgtgcaattataggatgcattaagatgaatgatagcctttacatattgaaaactttgcagacgttttgttttgaaaatggcattgtatagtaaatgcaaattaattttgtaaaattatgttaaagagtatgttcagacactttctgccatggccaaaaagtatgtatgaaagtatgtgtgtatttgtttgtaaaaggatgccaatgttttacctgatatcttagtgacacttcagttatctatgcattctttagatctgtgattcggtaaacaggcagccatgttcacgatgccttctatgtcttaccatatttttaattaacctgttaaatacagcttaaaatatttttattttatttattctatttttactgaaatatactgcattattgtgttaatgtattatctttcctggatattatctcccagtgtatccagatctaagtaatctcagtgaactatacattgcctaaaaagtggttttgtaatgatttgtagtcacatttctattgggatatgtagaagaaaaggcaaaatgcttaaagttccttttattttttaaaagcagctagatagacacagacttgccacctcatacatctgctccttggcaacatcaaggggaacgactagccaacatgcctatggctaaaaactttcctttgcagactaaagcactgcttggtgcttcgtttttctacccttcacaacatgtgtgatttcatctaagagatatatacatgtacacatgccctttgtttccacctggatacaagatcactcatagctaattaggaccattgttttttgttcatctgtcttgttgcatgaagggacattagacccatttccattaaaataagttcttggtgataaactgtggcactgctacttctttttaaatccactttatgatttcaagatggacacttgtaagatgactcgacacaaggccattgcctggaagccccagagctttcctctgtttgtatggcccgttcatgtcccaggcattgcaacacaaactcctcaagatttcaccacaacatgacaagcattttcctaactgatattagcacaatttaactaataagccccttcgctctctagttggccaggcttaacctaatacacatctaacgtgtgtgccacacggccagtagaaagtttaacttcagcttcagggcaaagatacccactcacaccgtgtcaacgcaagcagtagttcctggcctccagagcagcttacttcccctgaaagaacgctttgttttcctttatgcccttttcctgttgaccacttttacacatttaaatgtaatttgttgtgagaataaatttagctgcataaaacgttcggctcatttatctgacatcttagtcacatatacaaggaatagaaatagaaactcggtgtctctagttatttttaaattattcttacctcagacttcttagaaatcactttagtaatggagcattttgctttgattagttactacatatttctgcctggtaagaactaggaagtaacttcaaattttgagtaatcaccctgtacttatttggtgatcaggaaggccagctggccttccggacatagaagcctatttagtcaccaactcgagtcttttgtaagcggtcttgctaggattgtgatattttagcacgaagaagtttatcacttcctttaagaacctgacatcaaagaataaagaatagaggtgtacacacactaaatccaaaatgaaaggtaactagagaaatcagttgaatctggtttagcttaactgttaggcgcaggaaggcagataaacagaatttaaagtatgtccccgctttttgttcatcttgcacttccacagtggtttctctctagtcagtaacaaaatttcattatggtttcaggcattatatggtggtaaataatttcagattaaaaatgtgtttgctattggagtatctgaatactagtaatttcattatttagaattttgcagcacttttatctcaagaagaagtccaagaatgtaaaatgccaaatgaaacatgtcagtggaatcaatattctccttcattagaattccctcatattgctttttttttttttcttcagacagaggagtcttactctggagtgcagtggtgtaatttcagctcaccacaacctccacctcccaagttcaagcaattctcgcctcagcctcctgagtagctgggattacaggcatgcaccgccacgcctggccaatttgtatatttttagtagagacagggtttcgccacgttggccaggctggtctcgaactcctgacctcaggtgatccgcccgccccaacctcccaaagtatgtgagccaccacgtccggcctcatattgcttttatccaaaattcttttcccttttcactctaccaaagtatttaaataatcctgtccttcatagaagattctcaaagaagaaaactgcagtgtaattaatgaatggtttaattcagaatcttcatatacttctaaagagaaaaataatttagtgccaaatgcatgttaggagataatcaatgtaagtggcaacaaattgtgacttcacatgctactgtagagatcagaaaattatcctaaactattccataacaatgagacaacatcacagaaaatacacttgaaaataaaaatctcaagaccagctacttctggacaatggaatacttttcagtctggtatggtggagggcccgaaaaggataagggattcttatgatacacaatgggattctttactgaacaatatgttaaattaagctgcaccgccttccttgaggcatggactaccctaaccaaccagatagaaatctgggtgggataagaggatgagccacacgctataattttagggcaaggagatagtgtttgattttcaaaatcagcaaaataagctgagcactttatatctttctgtacaagagtgataacatgaagaattcttcttcagggatttaaaatacaataagcctggttcaactataaaaagtcttgtttcctttcttcattgacacttttttttttttttttttttttttgaggcaaggtctcactctgcttcccaggctggagtgcagtggggcaatattggctcactgcaacctgcacctcctggactcaagagatcctcgtacctcagcctcctaagtagctgggactacaggcgtgtcccaccacacccagctaatttttgtattttttgtagagatggggttttggggtttcgccatgttgtccaggctcgtctggaactccggtgctcaagtggcgtgcccacctcagcctcccaaactgctgagattacagatgtgagccactgcacccagcccactgacacgttttactgataaatgtaaatctaagctaaaataaaaataatgtattaccgctataatacaattcaccattctcttttctcacttcaagtaagaaagtaaaaatagaatatcagagctgaagtagacctaagtattcatcttgaagaagataatattctaaaaatcatgccacctgaattgagcatttaggaatttatgtaacatttctatacaactgaattgcaaaaataaaactttaaattcaaacttta

SEQ ID NO: 107004 - DNA, 544 bp, Homo sapiens
  Payload ID: 1013
  Gene Symbol: APBB2
  Gene Name: amyloid beta (A4) precursor protein-binding, family B, member 2
  ENST ID: ENST00000503503
  CDS Start-End: 515-544
gatctgggcgctccgggaagggcgagactggagcagagccgctgggcgccggagccgaggcgagcgccgcgcgcaccactggttggagttgctgtgggtgagctgctgtggtctgtagccaagcatgctgtggtcggatctgcccagccgtggaacagaaacatttgctggatggaaaatccataaaagaaagctcctgtgaaaagctgaggctgacaataatttaagcaaaatcagtctcactctgtcaccaggctggagtgcagtgacgtgatctcggctcacagcaaccgctgtctgccaggttcaagtgattctcctgcctcagcctctcgagtaactggaactacagatcgatctctttgggctgcctgacctccttgggtgcttgctattaattaacagactttgtggggaaaaaaaggagcttgccttctgagctttgtaccaaagacctgggaaaaatttcaaattataacctatttcctgcaccattgctgacgcctggtgatccatgtcagaagtacttccagctgactcaggt

SEQ ID NO: 107005 - DNA, 537 bp, Homo sapiens
  Payload ID: 1013
  Gene Symbol: APBB2
  Gene Name: amyloid beta (A4) precursor protein-binding, family B, member 2
  ENST ID: ENST00000513516
  CDS Start-End: 277-537
aggcgcgggcgccgctctcttcaacttgagcccggggcagtgcgcgcggctgcttgagcgacggcaccgctggctggtgccggcaccctggggcttgtcgtagcacctggggcggcatccccgcccgacttcggaaggaccgggaggcaaagagagagggattttgcttatgtagcaagagataaagatacaagaattttgaaatgtcatgtatttcgatgtgacacaccagcaaaagccattgccacaagtctccacgagatctgctccaagattatggctgaacggaagaatgccaaagcgctggcctgcagctccttacaggaaagggccaatgtgaacctcgatgtccctttgcaagtagattttccaacaccaaagactgagctggtccagaagttccacgtgcagtacttgggcatgttacctgtagacaaaccagtcggaatggatattttgaacagtgccatagaaaatcttatgacctcatccaacaaggaggactggctgtcagtgaacatgaacgtggctgatgcc

SEQ ID NO: 107006 - DNA, 3316 bp, Homo sapiens
  Payload ID: 1013
  Gene Symbol: APBB2
  Gene Name: amyloid beta (A4) precursor protein-binding, family B, member 2
  ENST ID: ENST00000506352
  CDS Start-End: 628-2841
aaagcctggagaagtggaatctcgtcagcgccgctccctgcgcgggactcgcggaacggcactgagcatgctcagttgccggagcccgttctggtctcaagtaggaagctagtgcgctgtaaccgcatctgatctgggcgctccgggaagggcgagactggagcagagccgctgggcgccggagccgaggcgagcgccgcgcgcaccactggttggagttgctgtgggtgagctgctgtggtctgtagccaagcatgctgtggtcggatctgcccagccgtggaacagaaacatttgctggatggaaaatccataaaagaaagctcctgtgaaaagctgaggctgacaataatttaagcaaaatcagatcgatctctttgggctgcctgacctccttgggtgcttgctattaattaacagactttgtggggaaaaaaaggagcttgccttctgagctttgtaccaaagacctgggaaaactaaccatctcagtctttcctgaggacttgggaactgccgaggcctctgccaatgtgttgactgtcgctatgggctcactgttgtccaggcagctcatatttcaaattataacctatttcctgcaccattgctgacgcctggtgatccatgtcagaagtacttccagctgactcaggtgttgacaccttggcagtgtttatggccagcagcggaactacagacgtcacaaatcggaacagcccagccacaccaccaaacacccttaacctccgatcctcccacaatgaactgttgaacgctgaaataaaacacacagaaaccaagaacagcacacctcccaaatgcaggaaaaaatatgcactaactaacatccaggcggccatgggcctctcggatccagctgcacagcccctgctgggaaatggctctgccaacatcaagctggtgaaaaatggggagaaccagctccgtaaggctgcagagcaagggcagcaggaccccaacaaaaacctgagccccactgcagtcatcaacataacttctgagaagttagagggtaaagagccccacccacaggattcctcgagctgtgagattttaccctcccagcccaggagaactaagagcttcctaaattactatgcagatctggaaacctcagccagagaactagagcagaaccgaggcaatcaccatgggactgcggaagagaaatcccagccagtccagggccaggcctccaccatcattgggaatggcgatttgctgctgcagaaaccaaacagaccccagtccagccctgaagacggccaagtagccacagtgtcatccagcccagaaaccaagaaggatcatccgaaaacaggggccaaaaccgactgtgcactgcaccggatccagaacctggcaccgagcgatgaggagtccagctggacaacgttgtcccaagacagtgcctcacccagctccccggatgaaacagatatatggagtgatcactcatttcagactgatccagatttgccgcctggctggaaaagagtcagtgacattgccgggacctattattggcacatcccaacaggaacgactcagtgggaacggcccgtctccatcccagcagatctccagggttctaggaaagggtcacttagttctgtaacgccatctcccaccccagagaacgaggatttgcatgcagccactgttaacccggaccccagtttaaaagagtttgaaggagcaaccctacgctatgcatctttgaaactcagaaatgccccacaccctgatgatgatgattcttgtagtatcaacagtgacccagaagccaagtgttttgctgtgcgttctctgggatgggtagagatggcagaagaggacctcgcccccggtaaaagtagtgttgcggtcaacaactgcatcaggcaactttcctactgcaaaaatgacatccgagacacagtcgggatttggggagaggggaaagacatgtacctgatcctggagaatgacatgctcagcctggtggaccccatggaccgcagcgtgctgcactcgcagcccatcgtcagcatccgcgtgtggggcgtgggccgcgacaatggccgggattttgcttatgtagcaagagataaagatacaagaattttgaaatgtcatgtatttcgatgtgacacaccagcaaaagccattgccacaagtctccacgagatctgctccaagattatggctgaacggaagaatgccaaagcgctggcctgcagctccttacaggaaagggccaatgtgaacctcgatgtccctttgcaagtagattttccaacaccaaagactgagctggtccagaagttccacgtgcagtacttgggcatgttacctgtagacaaaccagtcggaatggatattttgaacagtgccatagaaaatcttatgacctcatccaacaaggaggactggctgtcagtgaacatgaacgtggctgatgccactgtgactgtcatcagtgaaaagaatgaagaggaagtcttagtggaatgtcgtgtgcgattcctgtccttcatgggtgttgggaaggacgtccacacatttgccttcatcatggacacggggaaccagcgctttgagtgccacgttttctggtgcgagcctaatgctggtaacgtgtctgaggcggtgcaggccgcctgcatgttacgatatcagaagtgcttggtagccaggccgccttctcagaaagttcgaccacctccaccgccagcagattcagtaaccagaagagtcacaaccaatgtaaaacgaggggtcttatccctcattgacactttgaaacagaaacgccctgtcaccgaaatgccatagctgcacatgcaaaaggactcggctatttacctgaagattgactagctacactaaagaaaatgaactccgccatccgaccttccatccagttgctgatgctttgtcttcagagaatttacccttaaccaagcagtgttagacaagcatgttctctcgtcttgccaccatcatgtgatatgaaaagaagcatgaataattttttttgctgtaagttacatcatgcgcagtggaaggtctttttcttattgtaaatattgtgaacattacttaacttcacacacacacagagaagagtgtggccccacccctcctagtgaactaacgctgcgtccttggaatgaatgatgcgtgagttagtttcactgtcttcttggctggacctgtcacaagcaacctttaagtcctacagcactttgccctgttttcaacattggagtaggcactgcatagcagataccattgaattgctgtaaaa

SEQ ID NO: 107007 - DNA, 550 bp, Homo sapiens
  Payload ID: 1013
  Gene Symbol: APBB2
  Gene Name: amyloid beta (A4) precursor protein-binding, family B, member 2
  ENST ID: ENST00000514920
  CDS Start-End: 266-550
attaattgctgcagagttgggaaattagatgagctgtcagtgctcagactcgctgttaacggggctgtgttattggcgggatgccgtgtgaatgctaacgtgttgtttctgctctgttccctcacgccttcccggattcagagagagggattttgcttatgtagcaagagataaagatacaagaattttgaaatgtcatgtatttcgatgtgacacaccagcaaaagccattgccacaagtctccacgagatctgctccaagattatggctgaacggaagaatgccaaagcgctggcctgcagctccttacaggaaagggccaatgtgaacctcgatgtccctttgcaagtagattttccaacaccaaagactgagctggtccagaagttccacgtgcagtacttgggcatgttacctgtagacaaaccagtcggaatggatattttgaacagtgccatagaaaatcttatgacctcatccaacaaggaggactggctgtcagtgaacatgaacgtggctgatgccactgtgactgtcatcagtgaaaag

SEQ ID NO: 107008 - DNA, 604 bp, Homo sapiens
  Payload ID: 1013
  Gene Symbol: APBB2
  Gene Name: amyloid beta (A4) precursor protein-binding, family B, member 2
  ENST ID: ENST00000508676
  CDS Start-End: 523-604
ggagaagtggaatctcgtcagcgccgctccctgcgcgggactcgcggaacggcactgagcatgctcagttgccggagcccgttctggtctcaagtaggaagctagtgcgctgtaaccgcatctgatctgggcgctccgggaagggcgagactggagcagagccgctgggcgccggagccgaggcgagcgccgcgcgcaccactggttggagttgctgtgggtgagctgctgtggtctgtagccaagcatgctgtggtcggatctgcccagccgtggaacagaaacatttgctggatggaaaatccataaaagaaagctcctgtgaaaagctgaggctgacaataatttaagcaaaatcagatcgatctctttgggctgcctgacctccttgggtgcttgctattaattaacagactttgtggggaaaaaaaggagcttgccttctgagctttgtaccaaagacctgggaaaaatttcaaattataacctatttcctgcaccattgctgacgcctggtgatccatgtcagaagtacttccagctgactcaggtgttgacaccttggcagtgtttatggccagcagcggaactacagacgtcacaa

SEQ ID NO: 107009 - DNA, 701 bp, Homo sapiens
  Payload ID: 1013
  Gene Symbol: APBB2
  Gene Name: amyloid beta (A4) precursor protein-binding, family B, member 2
  ENST ID: ENST00000510925
  CDS Start-End: 1-125
gtgacacaccagcaaaagccattgccacaagtctccacgagatctgctccaaggtaagattatggctgaacggaagaatgccaaagcgctggcctgcagctccttacaggaaagggccaatgtgaacctcgatgtccctttgcaagtagattttccaacaccaaagactgagctggtccagaagttccacgtgcagtacttgggcatgttacctgtagacaaaccagtcggaatggatattttgaacagtgccatagaaaatcttatgacctcatccaacaaggaggactggctgtcagtgaacatgaacgtggctgatgccactgtgactgtcatcagtgaaaagaatgaagaggaagtcttagtggaatgtcgtgtgcgattcctgtccttcatgggtgttgggaaggacgtccacacatttgccttcatcatggacacggggaaccagcgctttgagtgccacgttttctggtgcgagcctaatgctggtaacgtgtctgaggcggtgcaggccgcctgcatgttacgatatcagaagtgcttggtagccaggccgccttctcagaaagttcgaccacctccaccgccagcagattcagtaaccagaagagtcacaaccaatgtaaaacgaggggtcttatccctcattgacactttgaaacagaaacgccctgtcaccgaaatgccatagctgcaca

SEQ ID NO: 107010 - DNA, 1274 bp, Homo sapiens
  Payload ID: 1013
  Gene Symbol: APBB2
  Gene Name: amyloid beta (A4) precursor protein-binding, family B, member 2
  Uniprot ID: Q92870
  ENST ID: ENST00000504305
  CDS Start-End: 296-928
aacttgagcccggggcagtgcgcgcggctgcttgagcgacggcaccgctggctggtgccggcaccctggggcttgtcgtagcacctggggcggcatccccgcccgacttcggaaggaccgggaggcaaaggtgaggaagttggcgaaggaacggctctcctttgtttgcagagagagggattttgcttatgtagcaagagataaagatacaagaattttgaaatgtcatgtatttcgatgtgacacaccagcaaaagccattgccacaagtctccacgagatctgctccaagattatggctgaacggaagaatgccaaagcgctggcctgcagctccttacaggaaagggccaatgtgaacctcgatgtccctttgcaagtagattttccaacaccaaagactgagctggtccagaagttccacgtgcagtacttgggcatgttacctgtagacaaaccagtcggaatggatattttgaacagtgccatagaaaatcttatgacctcatccaacaaggaggactggctgtcagtgaacatgaacgtggctgatgccactgtgactgtcatcagtgaaaagaatgaagaggaagtcttagtggaatgtcgtgtgcgattcctgtccttcatgggtgttgggaaggacgtccacacatttgccttcatcatggacacggggaaccagcgctttgagtgccacgttttctggtgcgagcctaatgctggtaacgtgtctgaggcggtgcaggccgcctgcatgttacgatatcagaagtgcttggtagccaggccgccttctcagaaagttcgaccacctccaccgccagcagattcagtaaccagaagagtcacaaccaatgtaaaacgaggggtcttatccctcattgacactttgaaacagaaacgccctgtcaccgaaatgccatagctgcacatgcaaaaggactcggctatttacctgaagattgactagctacactaaagaaaatgaactccgccatccgaccttccatccagttgctgatgctttgtcttcagagaatttacccttaaccaagcagtgttagacaagcatgttctctcgtcttgccaccatcatgtgatatgaaaagaagcatgaataattttttttgctgtaagttacatcatgcgcagtggaaggtctttttcttattgtaaatattgtgaacattacttaacttcacacacacacagagaagagtgtggccccacccctcctagtgaactaacgctgcgtccttggaatgaatgat

SEQ ID NO: 107011 - DNA, 907 bp, Homo sapiens
  Payload ID: 1013
  Gene Symbol: APBB2
  Gene Name: amyloid beta (A4) precursor protein-binding, family B, member 2
  ENST ID: ENST00000509446
  CDS Start-End: 488-907
ccgcatctgatctgggcgctccgggaagggcgagactggagcagagccgctgggcgccggagccgaggcgagcgccgcgcgcaccactggttggagttgctgtgggtgagctgctgtggtctgtagccaagcatgctgtggtcggatctgcccagccgtggaacagaaacatttgctggatggaaaatccataaaagaaagctcctgtgaaaagctgaggctgacaataatttaagcaaaatcagatcgatctctttgggctgcctgacctccttgggtgcttgctattaattaacagactttgtggggaaaaaaaggagcttgccttctgagctttgtaccaaagacctgggaaaactaaccatctcagtctttcctgaggacttgggaactgccgaggcctctgccaatgtgttgactgtcgctatgggctcactgttgtccaggcagctcatctgactcaggtgttgacaccttggcagtgtttatggccagcagcggaactacagacgtcacaaatcggaacagcccagccacaccaccaaacacccttaacctccgatcctcccacaatgaactgttgaacgctgaaataaaacacacagaaaccaagaacagcacacctcccaaatgcaggaaaaaatatgcactaactaacatccaggcggccatgggcctctcggatccagctgcacagcccctgctgggaaatggctctgccaacatcaagctggtgaaaaatggggagaaccagctccgtaaggctgcagagcaagggcagcaggaccccaacaaaaacctgagccccactgcagtcatcaacataacttctgagaagttagagggtaaagagccccacccacaggattcctcgagctgtgagattttaccctcccagcccaggaga

SEQ ID NO: 107012 - DNA, 639 bp, Homo sapiens
  Payload ID: 1013
  Gene Symbol: APBB2
  Gene Name: amyloid beta (A4) precursor protein-binding, family B, member 2
  ENST ID: ENST00000508707
  CDS Start-End: 435-639
ctcaagtaggaagctagtgcgctgtaaccgcatctgatctgggcgctccgggaagggcgagactggagcagagccgctgggcgccggagccgaggcgagcgccgcgcgcaccactggttggagttgctgtgggtgagctgctgtggtctgtagccaagcatgctgtggtcggatctgcccagccgtggaacagaaacatttgctggatggaaaatccataaaagaaagctcctgtgaaaagctgaggctgacaataatttaagcaaaatcagatcgatctctttgggctgcctgacctccttgggtgcttgctattaattaacagactttgtggggaaaaaaaggagcttgccttctgagctttgtaccaaagacctgggaaaaatttcaaattataacctatttcctgcaccattgctgacgcctggtgatccatgtcagaagtacttccagctgactcaggtgttgacaccttggcagtgtttatggccagcagcggaactacagacgtcacaaatcggaacagcccagccacaccaccaaacacccttaacctccgatcctcccacaatgaactgttgaacgctgaaataaaacacacagaaaccaagaacagcacacctcccaaatgcaggaaaa

SEQ ID NO: 107013 - DNA, 426 bp, Homo sapiens
  Payload ID: 1013
  Gene Symbol: APBB2
  Gene Name: amyloid beta (A4) precursor protein-binding, family B, member 2
  ENST ID: ENST00000513493
  CDS Start-End: 1-426
ggggagaggggaaagacatgtacctgatcctggagaatgacatgctcagcctggtggaccccatggaccgcagcgtgctgcactcgcagcccatcgtcagcatccgcgtgtggggcgtgggccgcgacaatggccgagagagggattttgcttatgtagcaagagataaagatacaagaattttgaaatgtcatgtatttcgatgtgacacaccagcaaaagccattgccacaagtctccacgagatctgctccaagattatggctgaacggaagaatgccaaagcgctggcctgcagctccttacaggaaagggccaatgtgaacctcgatgtccctttgcaagattttccaacaccaaagactgagctggtccagaagttccacgtgcagtacttgggcatgttacctgtagacaaaccagtcg

SEQ ID NO: 107014 - DNA, 493 bp, Homo sapiens
  Payload ID: 1013
  Gene Symbol: APBB2
  Gene Name: amyloid beta (A4) precursor protein-binding, family B, member 2
  ENST ID: ENST00000503264
  CDS Start-End: 415-493
caagtaggaagctagtgcgctgtaaccgcatctgatctgggcgctccgggaagggcgagactggagcagagccgctgggcgccggagccgaggcgagcgccgcgcgcaccactggttggagttgctgtgggtgagctgctgtggtctgtagccaagcatgctgtggtcggatctgcccagccgtggaacagaaacatttgctggatggaaaatccataaaagaaagctcctgtgaaaagctgaggctgacaataatttaagcaaaatcagatcgatctctttgggctgcctgacctccttgggtgcttgctattaattaacagactttgtggggaaaaaaaggagcttgccttctgagctttgtaccaaagacctgggaaaactgactcaggtgttgacaccttggcagtgtttatggccagcagcggaactacagacgtcacaaatcggaacagcccagccacaccaccaaacacccttaacctccgatcct

SEQ ID NO: 107015 - DNA, 1681 bp, Homo sapiens
  Payload ID: 1013
  Gene Symbol: APBB2
  Gene Name: amyloid beta (A4) precursor protein-binding, family B, member 2
  Uniprot ID: Q92870
  ENST ID: ENST00000502841
  CDS Start-End: 290-922
aacttgagcccggggcagtgcgcgcggctgcttgagcgacggcaccgctggctggtgccggcaccctggggcttgtcgtagcacctggggcggcatccccgcccgacttcggaaggaccgggaggcaaaggtgaggaagttggcgaaggaacggctctcctttgtttgcagggattttgcttatgtagcaagagataaagatacaagaattttgaaatgtcatgtatttcgatgtgacacaccagcaaaagccattgccacaagtctccacgagatctgctccaagattatggctgaacggaagaatgccaaagcgctggcctgcagctccttacaggaaagggccaatgtgaacctcgatgtccctttgcaagtagattttccaacaccaaagactgagctggtccagaagttccacgtgcagtacttgggcatgttacctgtagacaaaccagtcggaatggatattttgaacagtgccatagaaaatcttatgacctcatccaacaaggaggactggctgtcagtgaacatgaacgtggctgatgccactgtgactgtcatcagtgaaaagaatgaagaggaagtcttagtggaatgtcgtgtgcgattcctgtccttcatgggtgttgggaaggacgtccacacatttgccttcatcatggacacggggaaccagcgctttgagtgccacgttttctggtgcgagcctaatgctggtaacgtgtctgaggcggtgcaggccgcctgcatgttacgatatcagaagtgcttggtagccaggccgccttctcagaaagttcgaccacctccaccgccagcagattcagtaaccagaagagtcacaaccaatgtaaaacgaggggtcttatccctcattgacactttgaaacagaaacgccctgtcaccgaaatgccatagctgcacatgcaaaaggactcggctatttacctgaagattgactagctacactaaagaaaatgaactccgccatccgaccttccatccagttgctgatgctttgtcttcagagaatttacccttaaccaagcagtgttagacaagcatgttctctcgtcttgccaccatcatgtgatatgaaaagaagcatgaataattttttttgctgtaagttacatcatgcgcagtggaaggtctttttcttattgtaaatattgtgaacattacttaacttcacacacacacagagaagagtgtggccccacccctcctagtgaactaacgctgcgtccttggaatgaatgatgcgtgagttagtttcactgtcttcttggctggacctgtcacaagcaacctttaagtcctacagcactttgccctgttttcaacattggagtaggcactgcatagcagataccattgaattgctgtaaaaataggatggcgagtttgtgttttaatttttcataaaattgaacctgttggttgacaaaattggctgttggcatcagtatagaaaccaactggcagctttccctgacaagctctttgacacatggacaccatttcatgtctacagctgtttgtgggatgttggaaaaaaatgaaacttcaaaattgatgaaaaactaaattcgaggaattaaaatcgaacaaaacatagcctttcttttccgatggttttcaaactgattatttttaaaagagattaataaaatc

SEQ ID NO: 107016 - DNA, 4166 bp, Homo sapiens
  Payload ID: 1013
  Gene Symbol: APBB2
  Gene Name: amyloid beta (A4) precursor protein-binding, family B, member 2
  Uniprot ID: Q92870
  ENST ID: ENST00000513140
  CDS Start-End: 471-2681
ctggagcagagccgctgggcgccggagccgaggcgagcgccgcgcgcaccactggttggagttgctgtgggtgagctgctgtggtctgtagccaagcatgctgtggtcggatctgcccagccgtggaacagaaacatttgctggatggaaaatccataaaagaaagctcctgtgaaaagctgaggctgacaataatttaagcaaaatcagatcgatctctttgggctgcctgacctccttgggtgcttgctattaattaacagactttgtggggaaaaaaaggagcttgccttctgagctttgtaccaaagacctgggaaaactaaccatctcagtctttcctgaggacttgggaactgccgaggcctctgccaatgtgttgactgtcgctatgggctcactgttgtccaggcagctcatatttcaaattataacctatttcctgcaccattgctgacgcctggtgatccatgtcagaagtacttccagctgactcaggtgttgacaccttggcagtgtttatggccagcagcggaactacagacgtcacaaatcggaacagcccagccacaccaccaaacacccttaacctccgatcctcccacaatgaactgttgaacgctgaaataaaacacacagaaaccaagaacagcacacctcccaaatgcaggaaaaaatatgcactaactaacatccaggcggccatgggcctctcggatccagctgcacagcccctgctgggaaatggctctgccaacatcaagctggtgaaaaatggggagaaccagctccgtaaggctgcagagcaagggcagcaggaccccaacaaaaacctgagccccactgcagtcatcaacataacttctgagaagttagagggtaaagagccccacccacaggattcctcgagctgtgagattttaccctcccagcccaggagaactaagagcttcctaaattactatgcagatctggaaacctcagccagagaactagagcagaaccgaggcaatcaccatgggactgcggaagagaaatcccagccagtccagggccaggcctccaccatcattgggaatggcgatttgctgctgcagaaaccaaacagaccccagtccagccctgaagacggccaagtagccacagtgtcatccagcccagaaaccaagaaggatcatccgaaaacaggggccaaaaccgactgtgcactgcaccggatccagaacctggcaccgagcgatgaggagtccagctggacaacgttgtcccaagacagtgcctcacccagctccccggatgaaacagatatatggagtgatcactcatttcagactgatccagatttgccgcctggctggaaaagagtcagtgacattgccgggacctattattggcacatcccaacaggaacgactcagtgggaacggcccgtctccatcccagcagatctccagggttctaggaaagggtcacttagttctgtaacgccatctcccaccccagagaacgaggatttgcatgcagccactgttaacccggaccccagtttaaaagagtttgaaggagcaaccctacgctatgcatctttgaaactcagaaatgccccacaccctgatgatgatgattcttgtagtatcaacagtgacccagaagccaagtgttttgctgtgcgttctctgggatgggtagagatggcagaagaggacctcgcccccggtaaaagtagtgttgcggtcaacaactgcatcaggcaactttcctactgcaaaaatgacatccgagacacagtcgggatttggggagaggggaaagacatgtacctgatcctggagaatgacatgctcagcctggtggaccccatggaccgcagcgtgctgcactcgcagcccatcgtcagcatccgcgtgtggggcgtgggccgcgacaatggccgggattttgcttatgtagcaagagataaagatacaagaattttgaaatgtcatgtatttcgatgtgacacaccagcaaaagccattgccacaagtctccacgagatctgctccaagattatggctgaacggaagaatgccaaagcgctggcctgcagctccttacaggaaagggccaatgtgaacctcgatgtccctttgcaagattttccaacaccaaagactgagctggtccagaagttccacgtgcagtacttgggcatgttacctgtagacaaaccagtcggaatggatattttgaacagtgccatagaaaatcttatgacctcatccaacaaggaggactggctgtcagtgaacatgaacgtggctgatgccactgtgactgtcatcagtgaaaagaatgaagaggaagtcttagtggaatgtcgtgtgcgattcctgtccttcatgggtgttgggaaggacgtccacacatttgccttcatcatggacacggggaaccagcgctttgagtgccacgttttctggtgcgagcctaatgctggtaacgtgtctgaggcggtgcaggccgcctgcatgttacgatatcagaagtgcttggtagccaggccgccttctcagaaagttcgaccacctccaccgccagcagattcagtaaccagaagagtcacaaccaatgtaaaacgaggggtcttatccctcattgacactttgaaacagaaacgccctgtcaccgaaatgccatagctgcacatgcaaaaggactcggctatttacctgaagattgactagctacactaaagaaaatgaactccgccatccgaccttccatccagttgctgatgctttgtcttcagagaatttacccttaaccaagcagtgttagacaagcatgttctctcgtcttgccaccatcatgtgatatgaaaagaagcatgaataattttttttgctgtaagttacatcatgcgcagtggaaggtctttttcttattgtaaatattgtgaacattacttaacttcacacacacacagagaagagtgtggccccacccctcctagtgaactaacgctgcgtccttggaatgaatgatgcgtgagttagtttcactgtcttcttggctggacctgtcacaagcaacctttaagtcctacagcactttgccctgttttcaacattggagtaggcactgcatagcagataccattgaattgctgtaaaaataggatggcgagtttgtgttttaatttttcataaaattgaacctgttggttgacaaaattggctgttggcatcagtatagaaaccaactggcagctttccctgacaagctctttgacacatggacaccatttcatgtctacagctgtttgtgggatgttggaaaaaaatgaaacttcaaaattgatgaaaaactaaattcgaggaattaaaatcgaacaaaacatagcctttcttttccgatggttttcaaactgattatttttaaaagagattaataaaatcataatgcattttgggtgggacatatttcaaacttctgccttatattgtacggtgcagctagagaattatagttcactatggccattctctacataaacattaagatgaaatactcctcatcagcctttcatccttagtttgagaattagctgatatgcaatttgaagttgaggaaatatcattgatatttctatcatgcacgattattttagatttctaccaccgtgtgatttttgctagtccatgtgctagaggtaaacgttctgctggaattctgcatccagctctatccccctctgatgctttttgcccagaaagctgtctgtccatcatgtattgtccatggcaacaaattacattaggttgaacctttccttgattttatgtatttaatattagaatttgttggactcaactagatatattttttaatttatattttttccattttactttgaagatttgaaatgttcatacctgagcaaagtctacacaggagtaatggactgtttaacaagtttcccaaaacagcattttcctgctccttcgtatgtaggtgagaaacttagctggaaagacatacaaatttagactctcgttgacattgtcgttttaaaaggaagttgctaaggcgatcaatctcaatattagtcttgtttacttcttcttaatgtcaaaattaacatttacaacatccaattataaaagtaatgctttatgtttata

SEQ ID NO: 107017 - DNA, 539 bp, Homo sapiens
  Payload ID: 1013
  Gene Symbol: APBB2
  Gene Name: amyloid beta (A4) precursor protein-binding, family B, member 2
  ENST ID: ENST00000512510
  CDS Start-End: 1-539
gtgctgcactcgcagcccatcgtcagcatccgcgtgtggggcgtgggccgcgacaatggccgagagagggattttgcttatgtagcaagagataaagatacaagaattttgaaatgtcatgtatttcgatgtgacacaccagcaaaagccattgccacaagtctccacgagatctgctccaagattatggctgaacggaagaatgccaaagcgctggcctgcagctccttacaggaaagggccaatgtgaacctcgatgtccctttgcaagtagattttccaacaccaaagactgagctggtccagaagttccacgtgcagtacttgggcatgttacctgtagacaaaccagtcggaatggatattttgaacagtgccatagaaaatcttatgacctcatccaacaaggaggactggctgtcagtgaacatgaacgtggctgatgccactgtgactgtcatcagtgaaaagaatgaagaggaagtcttagtggaatgtcgtgtgcgattcctgtccttcatgggtgttgggaaggacgt

SEQ ID NO: 107018 - DNA, 591 bp, Homo sapiens
  Payload ID: 1013
  Gene Symbol: APBB2
  Gene Name: amyloid beta (A4) precursor protein-binding, family B, member 2
  ENST ID: ENST00000510670
  CDS Start-End: 286-591
agggagggcgcagggaggcgcgggcgccgctctcttcaacttgagcccggggcagtgcgcgcggctgcttgagcgacggcaccgctggctggtgccggcaccctggggcttgtcgtagcacctggggcggcatccccgcccgacttcggaaggaccgggaggcaaagggattttgcttatgtagcaagagataaagatacaagaattttgaaatgtcatgtatttcgatgtgacacaccagcaaaagccattgccacaagtctccacgagatctgctccaagattatggctgaacggaagaatgccaaagcgctggcctgcagctccttacaggaaagggccaatgtgaacctcgatgtccctttgcaagtagattttccaacaccaaagactgagctggtccagaagttccacgtgcagtacttgggcatgttacctgtagacaaaccagtcggaatggatattttgaacagtgccatagaaaatcttatgacctcatccaacaaggaggactggctgtcagtgaacatgaacgtggctgatgccactgtgactgtcatcagtgaaaagaatgaagaggaagtcttagtg

SEQ ID NO: 107019 - DNA, 3592 bp, Homo sapiens
  Payload ID: 1013
  Gene Symbol: APBB2
  Gene Name: amyloid beta (A4) precursor protein-binding, family B, member 2
  Uniprot ID: Q92870
  ENST ID: ENST00000508593
  CDS Start-End: 545-2824
gcccgttctggtctcaagtaggaagctagtgcgctgtaaccgcatctgatctgggcgctccgggaagggcgagactggagcagagccgctgggcgccggagccgaggcgagcgccgcgcgcaccactggttggagttgctgtgggtgagctgctgtggtctgtagccaagcatgctgtggtcggatctgcccagccgtggaacagaaacatttgctggatggaaaatccataaaagaaagctcctgtgaaaagctgaggctgacaataatttaagcaaaatcagatcgatctctttgggctgcctgacctccttgggtgcttgctattaattaacagactttgtggggaaaaaaaggagcttgccttctgagctttgtaccaaagacctgggaaaactaaccatctcagtctttcctgaggacttgggaactgccgaggcctctgccaatgtgttgactgtcgctatgggctcactgttgtccaggcagctcatatttcaaattataacctatttcctgcaccattgctgacgcctggtgatccatgtcagaagtacttccagctgactcaggtgttgacaccttggcagtgtttatggccagcagcggaactacagacgtcacaaatcggaacagcccagccacaccaccaaacacccttaacctccgatcctcccacaatgaactgttgaacgctgaaataaaacacacagaaaccaagaacagcacacctcccaaatgcaggaaaaaatatgcactaactaacatccaggcggccatgggcctctcggatccagctgcacagcccctgctgggaaatggctctgccaacatcaagctggtgaaaaatggggagaaccagctccgtaaggctgcagagcaagggcagcaggaccccaacaaaaacctgagccccactgcagtcatcaacataacttctgagaagttagagggtaaagagccccacccacaggattcctcgagctgtgagattttaccctcccagcccaggagaactaagagcttcctaaattactatgcagatctggaaacctcagccagagaactagagcagaaccgaggcaatcaccatgggactgcggaagagaaatcccagccagtccagggccaggcctccaccatcattgggaatggcgatttgctgctgcagaaaccaaacagaccccagtccagccctgaagacggccaagtagccacagtgtcatccagcccagaaaccaagaaggatcatccgaaaacaggggccaaaaccgactgtgcactgcaccggatccagaacctggcaccgagcgatgaggagtccagctggacaacgttgtcccaagacagtgcctcacccagctccccggatgaaacagcagatatatggagtgatcactcatttcagactgatccagatttgccgcctggctggaaaagagtcagtgacattgccgggacctattattggcacatcccaacaggaacgactcagtgggaacggcccgtctccatcccagcagatctccagggttctaggaaagggtcacttagttctgtaacgccatctcccaccccagagaacgagaaacagccatggagtgattttgctgttctgaatgggggaaagattaatagtgacatttggaaggatttgcatgcagccactgttaacccggaccccagtttaaaagagtttgaaggagcaaccctacgctatgcatctttgaaactcagaaatgccccacaccctgatgatgatgattcttgtagtatcaacagtgacccagaagccaagtgttttgctgtgcgttctctgggatgggtagagatggcagaagaggacctcgcccccggtaaaagtagtgttgcggtcaacaactgcatcaggcaactttcctactgcaaaaatgacatccgagacacagtcgggatttggggagaggggaaagacatgtacctgatcctggagaatgacatgctcagcctggtggaccccatggaccgcagcgtgctgcactcgcagcccatcgtcagcatccgcgtgtggggcgtgggccgcgacaatggccgggattttgcttatgtagcaagagataaagatacaagaattttgaaatgtcatgtatttcgatgtgacacaccagcaaaagccattgccacaagtctccacgagatctgctccaagattatggctgaacggaagaatgccaaagcgctggcctgcagctccttacaggaaagggccaatgtgaacctcgatgtccctttgcaagtagattttccaacaccaaagactgagctggtccagaagttccacgtgcagtacttgggcatgttacctgtagacaaaccagtcggaatggatattttgaacagtgccatagaaaatcttatgacctcatccaacaaggaggactggctgtcagtgaacatgaacgtggctgatgccactgtgactgtcatcagtgaaaagaatgaagaggaagtcttagtggaatgtcgtgtgcgattcctgtccttcatgggtgttgggaaggacgtccacacatttgccttcatcatggacacggggaaccagcgctttgagtgccacgttttctggtgcgagcctaatgctggtaacgtgtctgaggcggtgcaggccgcctgcatgttacgatatcagaagtgcttggtagccaggccgccttctcagaaagttcgaccacctccaccgccagcagattcagtaaccagaagagtcacaaccaatgtaaaacgaggggtcttatccctcattgacactttgaaacagaaacgccctgtcaccgaaatgccatagctgcacatgcaaaaggactcggctatttacctgaagattgactagctacactaaagaaaatgaactccgccatccgaccttccatccagttgctgatgctttgtcttcagagaatttacccttaaccaagcagtgttagacaagcatgttctctcgtcttgccaccatcatgtgatatgaaaagaagcatgaataattttttttgctgtaagttacatcatgcgcagtggaaggtctttttcttattgtaaatattgtgaacattacttaacttcacacacacacagagaagagtgtggccccacccctcctagtgaactaacgctgcgtccttggaatgaatgatgcgtgagttagtttcactgtcttcttggctggacctgtcacaagcaacctttaagtcctacagcactttgccctgttttcaacattggagtaggcactgcatagcagataccattgaattgctgtaaaaataggatggcgagtttgtgttttaatttttcataaaattgaacctgttggttgacaaaattggctgttggcatcagtatagaaaccaactggcagctttccctgacaagctctttgacacatggacaccatttcatgtctacagctgtttgtgggatgttggaaaaaaatgaaacttcaaaattgatgaaaaactaaattcgaggaattaaaatcgaacaaaacatagcctttcttttccgatggttttcaaactgattatttttaaaagagattaataaaatcataatgcat

SEQ ID NO: 107020 - DNA, 2964 bp, Homo sapiens
  Payload ID: 1013
  Gene Symbol: APBB2
  Gene Name: amyloid beta (A4) precursor protein-binding, family B, member 2
  ENST ID: ENST00000513611
  CDS Start-End: 1-2185
tgacaccttggcagtgtttatggccagcagcggaactacagacgtcacaaatcggaacagcccagccacaccaccaaacacccttaacctccgatcctcccacaatgaactgttgaacgctgaaataaaacacacagaaaccaagaacagcacacctcccaaatgcaggaaaaaatatgcactaactaacatccaggcggccatgggcctctcggatccagctgcacagcccctgctgggaaatggctctgccaacatcaagctggtgaaaaatggggagaaccagctccgtaaggctgcagagcaagggcagcaggaccccaacaaaaacctgagccccactgcagtcatcaacataacttctgagaagttagagggtaaagagccccacccacaggattcctcgagctgtgagattttaccctcccagcccaggagaactaagagcttcctaaattactatgcagatctggaaacctcagccagagaactagagcagaaccgaggcaatcaccatgggactgcggaagagaaatcccagccagtccagggccaggcctccaccatcattgggaatggcgatttgctgctgcagaaaccaaacagaccccagtccagccctgaagacggccaagtagccacagtgtcatccagcccagaaaccaagaaggatcatccgaaaacaggggccaaaaccgactgtgcactgcaccggatccagaacctggcaccgagcgatgaggagtccagctggacaacgttgtcccaagacagtgcctcacccagctccccggatgaaacagcagatatatggagtgatcactcatttcagactgatccagatttgccgcctggctggaaaagagtcagtgacattgccgggacctattattggcacatcccaacaggaacgactcagtgggaacggcccgtctccatcccagcagatctccagggttctaggaaagggtcacttagttctgtaacgccatctcccaccccagagaacgaggatttgcatgcagccactgttaacccggaccccagtttaaaagagtttgaaggagcaaccctacgctatgcatctttgaaactcagaaatgccccacaccctgatgatgatgattcttgtagtatcaacagtgacccagaagccaagtgttttgctgtgcgttctctgggatgggtagagatggcagaagaggacctcgcccccggtaaaagtagtgttgcggtcaacaactgcatcaggcaactttcctactgcaaaaatgacatccgagacacagtcgggatttggggagaggggaaagacatgtacctgatcctggagaatgacatgctcagcctggtggaccccatggaccgcagcgtgctgcactcgcagcccatcgtcagcatccgcgtgtggggcgtgggccgcgacaatggccgggattttgcttatgtagcaagagataaagatacaagaattttgaaatgtcatgtatttcgatgtgacacaccagcaaaagccattgccacaagtctccacgagatctgctccaagattatggctgaacggaagaatgccaaagcgctggcctgcagctccttacaggaaagggccaatgtgaacctcgatgtccctttgcaagtagattttccaacaccaaagactgagctggtccagaagttccacgtgcagtacttgggcatgttacctgtagacaaaccagtcggaatggatattttgaacagtgccatagaaaatcttatgacctcatccaacaaggaggactggctgtcagtgaacatgaacgtggctgatgccactgtgactgtcatcagtgaaaagaatgaagaggaagtcttagtggaatgtcgtgtgcgattcctgtccttcatgggtgttgggaaggacgtccacacatttgccttcatcatggacacggggaaccagcgctttgagtgccacgttttctggtgcgagcctaatgctggtaacgtgtctgaggcggtgcaggccgcctgcatgttacgatatcagaagtgcttggtagccaggccgccttctcagaaagttcgaccacctccaccgccagcagattcagtaaccagaagagtcacaaccaatgtaaaacgaggggtcttatccctcattgacactttgaaacagaaacgccctgtcaccgaaatgccatagctgcacatgcaaaaggactcggctatttacctgaagattgactagctacactaaagaaaatgaactccgccatccgaccttccatccagttgctgatgctttgtcttcagagaatttacccttaaccaagcagtgttagacaagcatgttctctcgtcttgccaccatcatgtgatatgaaaagaagcatgaataattttttttgctgtaagttacatcatgcgcagtggaaggtctttttcttattgtaaatattgtgaacattacttaacttcacacacacacagagaagagtgtggccccacccctcctagtgaactaacgctgcgtccttggaatgaatgatgcgtgagttagtttcactgtcttcttggctggacctgtcacaagcaacctttaagtcctacagcactttgccctgttttcaacattggagtaggcactgcatagcagataccattgaattgctgtaaaaataggatggcgagtttgtgttttaatttttcataaaattgaacctgttggttgacaaaattggctgttggcatcagtatagaaaccaactggcagctttccctgacaagctctttgacacatggacaccatttcatgtctacagctgtttgtgggatgttggaaaaaaatgaaacttcaaaattgatgaaaaactaaattcgaggaattaaaatcgaacaaaacatagcctttcttttccgatggttttcaaactgattatttttaaaagagattaataaaatcataatgcattttgggtggga

SEQ ID NO: 107021 - DNA, 6992 bp, Homo sapiens
  Payload ID: 1013
  Gene Symbol: APBB2
  Gene Name: amyloid beta (A4) precursor protein-binding, family B, member 2
  Uniprot ID: Q92870
  ENST ID: ENST00000543538
  CDS Start-End: 296-928
aacttgagcccggggcagtgcgcgcggctgcttgagcgacggcaccgctggctggtgccggcaccctggggcttgtcgtagcacctggggcggcatccccgcccgacttcggaaggaccgggaggcaaaggtgaggaagttggcgaaggaacggctctcctttgtttgcaggcacagggattttgcttatgtagcaagagataaagatacaagaattttgaaatgtcatgtatttcgatgtgacacaccagcaaaagccattgccacaagtctccacgagatctgctccaagattatggctgaacggaagaatgccaaagcgctggcctgcagctccttacaggaaagggccaatgtgaacctcgatgtccctttgcaagtagattttccaacaccaaagactgagctggtccagaagttccacgtgcagtacttgggcatgttacctgtagacaaaccagtcggaatggatattttgaacagtgccatagaaaatcttatgacctcatccaacaaggaggactggctgtcagtgaacatgaacgtggctgatgccactgtgactgtcatcagtgaaaagaatgaagaggaagtcttagtggaatgtcgtgtgcgattcctgtccttcatgggtgttgggaaggacgtccacacatttgccttcatcatggacacggggaaccagcgctttgagtgccacgttttctggtgcgagcctaatgctggtaacgtgtctgaggcggtgcaggccgcctgcatgttacgatatcagaagtgcttggtagccaggccgccttctcagaaagttcgaccacctccaccgccagcagattcagtaaccagaagagtcacaaccaatgtaaaacgaggggtcttatccctcattgacactttgaaacagaaacgccctgtcaccgaaatgccatagctgcacatgcaaaaggactcggctatttacctgaagattgactagctacactaaagaaaatgaactccgccatccgaccttccatccagttgctgatgctttgtcttcagagaatttacccttaaccaagcagtgttagacaagcatgttctctcgtcttgccaccatcatgtgatatgaaaagaagcatgaataattttttttgctgtaagttacatcatgcgcagtggaaggtctttttcttattgtaaatattgtgaacattacttaacttcacacacacacagagaagagtgtggccccacccctcctagtgaactaacgctgcgtccttggaatgaatgatgcgtgagttagtttcactgtcttcttggctggacctgtcacaagcaacctttaagtcctacagcactttgccctgttttcaacattggagtaggcactgcatagcagataccattgaattgctgtaaaaataggatggcgagtttgtgttttaatttttcataaaattgaacctgttggttgacaaaattggctgttggcatcagtatagaaaccaactggcagctttccctgacaagctctttgacacatggacaccatttcatgtctacagctgtttgtgggatgttggaaaaaaatgaaacttcaaaattgatgaaaaactaaattcgaggaattaaaatcgaacaaaacatagcctttcttttccgatggttttcaaactgattatttttaaaagagattaataaaatcataatgcattttgggtgggacatatttcaaacttctgccttatattgtacggtgcagctagagaattatagttcactatggccattctctacataaacattaagatgaaatactcctcatcagcctttcatccttagtttgagaattagctgatatgcaatttgaagttgaggaaatatcattgatatttctatcatgcacgattattttagatttctaccaccgtgtgatttttgctagtccatgtgctagaggtaaacgttctgctggaattctgcatccagctctatccccctctgatgctttttgcccagaaagctgtctgtccatcatgtattgtccatggcaacaaattacattaggttgaacctttccttgattttatgtatttaatattagaatttgttggactcaactagatatattttttaatttatattttttccattttactttgaagatttgaaatgttcatacctgagcaaagtctacacaggagtaatggactgtttaacaagtttcccaaaacagcattttcctgctccttcgtatgtaggtgagaaacttagctggaaagacatacaaatttagactctcgttgacattgtcgttttaaaaggaagttgctaaggcgatcaatctcaatattagtcttgtttacttcttcttaatgtcaaaattaacatttacaacatccaattataaaagtaatgctttatgtttatacactgctatgtacttgtcaaaatggtttccacattcttatcacatctgagccttaccaggtagagaaggtactaaatacactttagaagtaaaaatatgaagtaccgagaggctaaacccactggcctaagatctcaccaaagttcatgaaaaccaggactaggacccacggctcccaaagcccgttcttgctgtgttgtgctgcctccatatccgtcaggaagagcctttccagaatgattctgggcatatactaagaagagcaggtatggaaagatctattgtcagggaatcttagaattccctacacgagtgggagaaagatgtccaaattccttacgcagtggtattcatgatggtgccctatctaagtccaggactgttttcctacagcgtgcctcaaaagtgttgtagagggcaggattctacattcacagcctgttccatctacgagattttccagatgctacttgtggtagacattcctaactcatggtacttagccaccagagatcatgatggaatgagtgggtggcttttctacctgccattccctcagaattcatgaggggtgggggacagggggaccggaattgtcttagcaccccaatgttatgacaaaactatgctactttagaaacgcagtctgtttttcaccaattgacatactactgatctgaagtaaccagtgccatcataagaaattactgcattaagaaaatccttgctgtgccctttgaaaagctgttcagaaatcatttacagtgatctttcatctcggtcgctgtagtgaaacattttagtgtgataaatttcaaaattctaaacaaattacccacttttatattggaaatctctaccagaactccctcttcattttttaaggcatacatttgcttgttttcaagatcaagaattctgagctagctttaagtagcaaactgatttatatgtgcaattataggatgcattaagatgaatgatagcctttacatattgaaaactttgcagacgttttgttttgaaaatggcattgtatagtaaatgcaaattaattttgtaaaattatgttaaagagtatgttcagacactttctgccatggccaaaaagtatgtatgaaagtatgtgtgtatttgtttgtaaaaggatgccaatgttttacctgatatcttagtgacacttcagttatctatgcattctttagatctgtgattcggtaaacaggcagccatgttcacgatgccttctatgtcttaccatatttttaattaacctgttaaatacagcttaaaatatttttattttatttattctatttttactgaaatatactgcattattgtgttaatgtattatctttcctggatattatctcccagtgtatccagatctaagtaatctcagtgaactatacattgcctaaaaagtggttttgtaatgatttgtagtcacatttctattgggatatgtagaagaaaaggcaaaatgcttaaagttccttttattttttaaaagcagctagatagacacagacttgccacctcatacatctgctccttggcaacatcaaggggaacgactagccaacatgcctatggctaaaaactttcctttgcagactaaagcactgcttggtgcttcgtttttctacccttcacaacatgtgtgatttcatctaagagatatatacatgtacacatgccctttgtttccacctggatacaagatcactcatagctaattaggaccattgttttttgttcatctgtcttgttgcatgaagggacattagacccatttccattaaaataagttcttggtgataaactgtggcactgctacttctttttaaatccactttatgatttcaagatggacacttgtaagatgactcgacacaaggccattgcctggaagccccagagctttcctctgtttgtatggcccgttcatgtcccaggcattgcaacacaaactcctcaagatttcaccacaacatgacaagcattttcctaactgatattagcacaatttaactaataagccccttcgctctctagttggccaggcttaacctaatacacatctaacgtgtgtgccacacggccagtagaaagtttaacttcagcttcagggcaaagatacccactcacaccgtgtcaacgcaagcagtagttcctggcctccagagcagcttacttcccctgaaagaacgctttgttttcctttatgcccttttcctgttgaccacttttacacatttaaatgtaatttgttgtgagaataaatttagctgcataaaacgttcggctcatttatctgacatcttagtcacatatacaaggaatagaaatagaaactcggtgtctctagttatttttaaattattcttacctcagacttcttagaaatcactttagtaatggagcattttgctttgattagttactacatatttctgcctggtaagaactaggaagtaacttcaaattttgagtaatcaccctgtacttatttggtgatcaggaaggccagctggccttccggacatagaagcctatttagtcaccaactcgagtcttttgtaagcggtcttgctaggattgtgatattttagcacgaagaagtttatcacttcctttaagaacctgacatcaaagaataaagaatagaggtgtacacacactaaatccaaaatgaaaggtaactagagaaatcagttgaatctggtttagcttaactgttaggcgcaggaaggcagataaacagaatttaaagtatgtccccgctttttgttcatcttgcacttccacagtggtttctctctagtcagtaacaaaatttcattatggtttcaggcattatatggtggtaaataatttcagattaaaaatgtgtttgctattggagtatctgaatactagtaatttcattatttagaattttgcagcacttttatctcaagaagaagtccaagaatgtaaaatgccaaatgaaacatgtcagtggaatcaatattctccttcattagaattccctcatattgctttttttttttttcttcagacagaggagtcttactctggagtgcagtggtgtaatttcagctcaccacaacctccacctcccaagttcaagcaattctcgcctcagcctcctgagtagctgggattacaggcatgcaccgccacgcctggccaatttgtatatttttagtagagacagggtttcgccacgttggccaggctggtctcgaactcctgacctcaggtgatccgcccgccccaacctcccaaagtatgtgagccaccacgtccggcctcatattgcttttatccaaaattcttttcccttttcactctaccaaagtatttaaataatcctgtccttcatagaagattctcaaagaagaaaactgcagtgtaattaatgaatggtttaattcagaatcttcatatacttctaaagagaaaaataatttagtgccaaatgcatgttaggagataatcaatgtaagtggcaacaaattgtgacttcacatgctactgtagagatcagaaaattatcctaaactattccataacaatgagacaacatcacagaaaatacacttgaaaataaaaatctcaagaccagctacttctggacaatggaatacttttcagtctggtatggtggagggcccgaaaaggataagggattcttatgatacacaatgggattctttactgaacaatatgttaaattaagctgcaccgccttccttgaggcatggactaccctaaccaaccagatagaaatctgggtgggataagaggatgagccacacgctataattttagggcaaggagatagtgtttgattttcaaaatcagcaaaataagctgagcactttatatctttctgtacaagagtgataacatgaagaattcttcttcagggatttaaaatacaataagcctggttcaactataaaaagtcttgtttcctttcttcattgacacttttttttttttttttttttttttgaggcaaggtctcactctgcttcccaggctggagtgcagtggggcaatattggctcactgcaacctgcacctcctggactcaagagatcctcgtacctcagcctcctaagtagctgggactacaggcgtgtcccaccacacccagctaatttttgtattttttgtagagatggggttttggggtttcgccatgttgtccaggctcgtctggaactccggtgctcaagtggcgtgcccacctcagcctcccaaactgctgagattacagatgtgagccactgcacccagcccactgacacgttttactgataaatgtaaatctaagctaaaataaaaataatgtattaccgctataatacaattcaccattctcttttctcacttcaagtaagaaagtaaaaatagaatatcagagctgaagtagacctaagtattcatcttgaagaagataatattctaaaaatcatgccacctgaattgagcatttaggaatttatgtaacatttctatacaactgaattgcaaaaataaaactttaaattcaaacttt

SEQ ID NO: 107022 - DNA, 1810 bp, Homo sapiens
  Payload ID: 1014
  Gene Symbol: APBB3
  Gene Name: amyloid beta (A4) precursor protein-binding, family B, member 3
  Uniprot ID: O95704
  ENST ID: ENST00000354402
  CDS Start-End: 16-1497
ggagcagccggggttatgctgggcaaggattacatgctggccatcattctggtcaactgcgatgatgacttgtggggggaccacagtctggaggtggaggctggcctgcctcctggctggaggaagatccacgatgctgcaggtacttactactggcatgtacccagcggtagcacccagtggcagcgcccaacctgggaactaggagatgcagaggacccaggcacgggaacggaggggatctggggactgcggccccccaaagggagatccttctccagcctggagagttcactggaccggagtaactctctgtcctggtatggtggggaatcctacatccagagcatggagccaggggctaagtgctttgcagtccgctctctgggctgggtagaggtacctgaagaggacctggcaccggggaagagcagtattgcagtcaataactgtatccagcagctggcccagacccgcagccggagccagcctccagatggtgcctggggtgagggccagaacatgctgatgatcctgaagaaggatgccatgagcctagtgaatcccctggaccacagtctgatccactgccagcctctggtgcacatccgtgtgtggggcgtggggagctccaagggccgtgacagccccatctctgcccctgctagggacttcgcttttgtggcaagtgacaaagatagctgtatgctcaagtgccatgtgttttgctgtgatgtccctgccaaggccattgccagtgccctacatgggctttgtgcccagatcttgtcagagcgagtagaggtcagtggtgatgcctcttgctgctccccagaccccatctctcctgaagacctgccacggcaagtggagctgctggatgcggtaagccaagctgctcagaagtacgaggcactgtatatggggacactgccagtcaccaaggccatgggcatggatgtgctgaacgaggccattggtaccctcaccgccaggggggaccggaatgcctgggtccccaccatgctcagtgtgtctgactctctcatgactgcacaccccattcaggcagaggccagtacagaggaggagccattgtggcagtgccctgtgcgccttgtgacatttattggtgttggccgcgacccacacacctttggcctcatcgctgacctgggccgtcagagcttccagtgcgcagccttctggtgccagccccatgcagggggactctctgaagctgtgcaggctgcctgtatggttcagtaccagaagtgtcttgtggcctctgcagctcgaggcaaggcctggggtgcccaggcccgtgcccgcctgcggctcaagcggaccagctccatggattccccaggaggtcccctgcccctccccctgctcaaaggaggggttggcggtgcaggggcaacccctcgaaagcggggtgtcttctcttttcttgatgccttccggctgaaaccctctctgctccatatgccctaaacttatctgggaaggctggggaagtaggctctgggtccatgcctaactctgtaccgttttattcctcaaggcctatagcctgtcactccttgaagccttctctgcctgtccctccgatccttgtccaccgtctatttattgcccaatttattgtttatacggatgactgggaggcactgcaccacaacgtaggaccctggctcccctttccttgggtccttgtgttccttgcccctgtccaaccctggacagttggctctacctcagtaacactttatagcaaaatcagtgcaaataaaaatccctcagtgac

SEQ ID NO: 107023 - DNA, 1804 bp, Homo sapiens
  Payload ID: 1014
  Gene Symbol: APBB3
  Gene Name: amyloid beta (A4) precursor protein-binding, family B, member 3
  Uniprot ID: O95704
  ENST ID: ENST00000356738
  CDS Start-End: 16-1491
ggagcagccggggttatgctgggcaaggattacatgctggccatcattctggtcaactgcgatgatgacttgtggggggaccacagtctggaggtggaggctggcctgcctcctggctggaggaagatccacgatgctgcaggtacttactactggcatgtacccagcggtagcacccagtggcagcgcccaacctgggaactaggagatgcagaggacccaggcacgggaacggaggggatctggggactgcggccccccaaagggagatccttctccagcctggagagttcactggaccggagtaactctctgtcctggtatggtggggaatcctacatccagagcatggagccaggggctaagtgctttgcagtccgctctctgggctgggtagaggtacctgaagaggacctggcaccggggaagagcagtattgcagtcaataactgtatccagcagctggcccagacccgcagccggagccagcctccagatggtgcctggggtgagggccagaacatgctgatgatcctgaagaaggatgccatgagcctagtgaatcccctggaccacagtctgatccactgccagcctctggtgcacatccgtgtgtggggcgtggggagctccaagggccgccccatctctgcccctgctagggacttcgcttttgtggcaagtgacaaagatagctgtatgctcaagtgccatgtgttttgctgtgatgtccctgccaaggccattgccagtgccctacatgggctttgtgcccagatcttgtcagagcgagtagaggtcagtggtgatgcctcttgctgctccccagaccccatctctcctgaagacctgccacggcaagtggagctgctggatgcggtaagccaagctgctcagaagtacgaggcactgtatatggggacactgccagtcaccaaggccatgggcatggatgtgctgaacgaggccattggtaccctcaccgccaggggggaccggaatgcctgggtccccaccatgctcagtgtgtctgactctctcatgactgcacaccccattcaggcagaggccagtacagaggaggagccattgtggcagtgccctgtgcgccttgtgacatttattggtgttggccgcgacccacacacctttggcctcatcgctgacctgggccgtcagagcttccagtgcgcagccttctggtgccagccccatgcagggggactctctgaagctgtgcaggctgcctgtatggttcagtaccagaagtgtcttgtggcctctgcagctcgaggcaaggcctggggtgcccaggcccgtgcccgcctgcggctcaagcggaccagctccatggattccccaggaggtcccctgcccctccccctgctcaaaggaggggttggcggtgcaggggcaacccctcgaaagcggggtgtcttctcttttcttgatgccttccggctgaaaccctctctgctccatatgccctaaacttatctgggaaggctggggaagtaggctctgggtccatgcctaactctgtaccgttttattcctcaaggcctatagcctgtcactccttgaagccttctctgcctgtccctccgatccttgtccaccgtctatttattgcccaatttattgtttatacggatgactgggaggcactgcaccacaacgtaggaccctggctcccctttccttgggtccttgtgttccttgcccctgtccaaccctggacagttggctctacctcagtaacactttatagcaaaatcagtgcaaataaaaatccctcagtgac

SEQ ID NO: 107024 - DNA, 2218 bp, Homo sapiens
  Payload ID: 1014
  Gene Symbol: APBB3
  Gene Name: amyloid beta (A4) precursor protein-binding, family B, member 3
  Uniprot ID: O95704
  ENST ID: ENST00000357560
  CDS Start-End: 445-1905
acgtgaccccctcccgtcgagtctcaggctgcgtgtgagcgcactcacgaccggggcgcgatgatctcactcgtgcgcgagtgcgcgcggcgcatgttcggcgtgtcggtcttcaggcgcctgatgagttcatagttgggcggtggtgtcagcggtttcgctggcgttcgtgggcctcccccggacccacacacggaaacacgcaaccattcggggatccagacgcccgtttacacgcaccacccctgggcgggctgtgcggctcaggccctcccccgggaccggcccgtgtcccgccccgtgtcccgccccgtatttgtgcggcgccagctggccccgcagcctgcggcgcagagaggctgggcttgcaggcgcagtagctccagaggtcgcgctgggctgagagtgcgggccggcagaggctggcggggagcagccggggttatgctgggcaaggattacatgctggccatcattctggtcaactgcgatgatgacttgtggggggaccacagtctggaggtggaggctggcctgcctcctggctggaggaagatccacgatgctgcaggtacttactactggcatgtacccagcggtagcacccagtggcagcgcccaacctgggaactaggagatgcagaggacccaggcacgggaacggaggggatctggggactgcggccccccaaagggagatccttctccagcctggagagttcactggaccggagtaactctctgtcctggtatggtggggaatcctacatccagagcatggagccaggggctaagtgctttgcagtccgctctctgggctgggtagaggtacctgaagaggacctggcaccggggaagagcagtattgcagtcaataactgtatccagcagctggcccagacccgcagccggagccagcctccagatggtgcctggggtgagggccagaacatgctgatgatcctgaagaaggatgccatgagcctagtgaatcccctggaccacagtctgatccactgccagcctctggtgcacatccgtgtgtggggcgtggggagctccaagggccgtgacagggacttcgcttttgtggcaagtgacaaagatagctgtatgctcaagtgccatgtgttttgctgtgatgtccctgccaaggccattgccagtgccctacatgggctttgtgcccagatcttgtcagagcgagtagaggtcagtggtgatgcctcttgctgctccccagaccccatctctcctgaagacctgccacggcaagtggagctgctggatgcggtaagccaagctgctcagaagtacgaggcactgtatatggggacactgccagtcaccaaggccatgggcatggatgtgctgaacgaggccattggtaccctcaccgccaggggggaccggaatgcctgggtccccaccatgctcagtgtgtctgactctctcatgactgcacaccccattcaggcagaggccagtacagaggaggagccattgtggcagtgccctgtgcgccttgtgacatttattggtgttggccgcgacccacacacctttggcctcatcgctgacctgggccgtcagagcttccagtgcgcagccttctggtgccagccccatgcagggggactctctgaagctgtgcaggctgcctgtatggttcagtaccagaagtgtcttgtggcctctgcagctcgaggcaaggcctggggtgcccaggcccgtgcccgcctgcggctcaagcggaccagctccatggattccccaggaggtcccctgcccctccccctgctcaaaggaggggttggcggtgcaggggcaacccctcgaaagcggggtgtcttctcttttcttgatgccttccggctgaaaccctctctgctccatatgccctaaacttatctgggaaggctggggaagtaggctctgggtccatgcctaactctgtaccgttttattcctcaaggcctatagcctgtcactccttgaagccttctctgcctgtccctccgatccttgtccaccgtctatttattgcccaatttattgtttatacggatgactgggaggcactgcaccacaacgtaggaccctggctcccctttccttgggtccttgtgttccttgcccctgtccaaccctggacagttggctctacctcagtaacactttatagcaaaatcagtgcaaataaaaatccctcagtgac

SEQ ID NO: 107025 - DNA, 2020 bp, Homo sapiens
  Payload ID: 1014
  Gene Symbol: APBB3
  Gene Name: amyloid beta (A4) precursor protein-binding, family B, member 3
  ENST ID: ENST00000358580
  CDS Start-End: 360-1379
cgcggcgcatgttcggcgtgtcggtcttcaggcgcctgatgagttcatagttgggcggtggtgtcagcggtttcgctggcgttcgtgggcctcccccggacccacacacggaaacacgcaaccattcggggatccagacgcccgtttacacgcaccacccctgggcgggctgtgcggctcaggccctcccccgggaccggcccgtgtcccgccccgtgtcccgccccgtatttgtgcggcgccagctggccccgcagcctgcggcgcagagaggctgggcttgcaggcgcagtagctccagaggtcgcgctgggctgagagtgcgggccggcagaggctggcggggagcagccggggttatgctgggcaaggattacatgctggccatcattctggtcaactgcgatgatgacttgtggggggaccacagtctggaggtggaggctggcctgcctcctggctggaggaagatccacgatgctgcaggtacttactactggcatgtacccagcggtagcacccagtggcagcgcccaacctgggaactaggagatgcagaggacccaggcacgggaacggaggggatctggggactgcggccccccaaagggagatccttctccagcctggagagttcactggaccggagtaactctctgtcctggtatggtggggaatcctacatccagagcatggagccaggggctaagtgctttgcagtccgctctctgggctgggtagaggtacctgaagaggacctggcaccggggaagagcagtattgcagtcaataactgtatccagcagctggcccagacccgcagccggagccagcctccagatggtgcctggggtgagggccagaacatgctgatgatcctgaagaaggatgccatgagcctagtgaatcccctggaccacagtctgatccactgccagcctctggtgcacatccgtgtgtggggcgtggggagctccaagggccgtgacagggacttcgcttttgtggcaagtgacaaagatagctgtatgctcaagtgccatgtgttttgctgtgatgtccctgccaaggccattgccagtgccctacatgggctttgtgcccagatcttgtcagagcgagtagaggtcagtggtgatgcctcttgctgctccccagaccccatctctcctgaagacctgccacggcaagtggagctgctggatgcggtaagccaagctgctcagaagtacgaggcactgtatatggggacactgccagtcaccaaggccatgggcagaggccagtacagaggaggagccattgtggcagtgccctgtgcgccttgtgacatttattggtgttggccgcgacccacacacctttggcctcatcgctgacctgggccgtcagagcttccagtgcgcagccttctggtgccagccccatgcagggggactctctgaagctgtgcaggctgcctgtatggttcagtaccagaagtgtcttgtggcctctgcagctcgaggcaaggcctggggtgcccaggcccgtgcccgcctgcggctcaagcggaccagctccatggattccccaggaggtcccctgcccctccccctgctcaaaggaggggttggcggtgcaggggcaacccctcgaaagcggggtgtcttctcttttcttgatgccttccggctgaaaccctctctgctccatatgccctaaacttatctgggaaggctggggaagtaggctctgggtccatgcctaactctgtaccgttttattcctcaaggcctatagcctgtcactccttgaagccttctctgcctgtccctccgatccttgtccaccgtctatttattgcccaatttattgtttatacggatgactgggaggcactgcaccacaacgtaggaccctggctcccctttccttgggtccttgtgttccttgcccctgtccaaccctggacagttggctctacctcagtaacactttatagcaaaatcagtgcaaataaaaatccctcagtgacctc

SEQ ID NO: 107026 - DNA, 1455 bp, Homo sapiens
  Payload ID: 1014
  Gene Symbol: APBB3
  Gene Name: amyloid beta (A4) precursor protein-binding, family B, member 3
  Uniprot ID: O95704
  ENST ID: ENST00000412920
  CDS Start-End: 1-1455
atgctgggcaaggattacatgctggccatcattctggtcaactgcgatgatgacttgtggggggaccacagtctggaggtggaggctggcctgcctcctggctggaggaagatccacgatgctgcaggtacttactactggcatgtacccagcggtagcacccagtggcagcgcccaacctgggaactaggagatgcagaggacccaggcacgggaacggaggggatctggggactgcggccccccaaagggagatccttctccagcctggagagttcactggaccggagtaactctctgtcctggtatggtggggaatcctacatccagagcatggagccaggggctaagtgctttgcagtccgctctctgggctgggtagaggtacctgaagaggacctggcaccggggaagagcagtattgcagtcaataactgtatccagcagctggcccagacccgcagccggagccagcctccagatggtgcctggggtgagggccagaacatgctgatgatcctgaagaaggatgccatgagcctagtgaatcccctggaccacagtctgatccactgccagcctctggtgcacatccgtgtgtggggcgtggggagctccaagggccgggacttcgcttttgtggcaagtgacaaagatagctgtatgctcaagtgccatgtgttttgctgtgatgtccctgccaaggccattgccagtgccctacatgggctttgtgcccagatcttgtcagagcgagtagaggtcagtggtgatgcctcttgctgctccccagaccccatctctcctgaagacctgccacggcaagtggagctgctggatgcggtaagccaagctgctcagaagtacgaggcactgtatatggggacactgccagtcaccaaggccatgggcatggatgtgctgaacgaggccattggtaccctcaccgccaggggggaccggaatgcctgggtccccaccatgctcagtgtgtctgactctctcatgactgcacaccccattcaggcagaggccagtacagaggaggagccattgtggcagtgccctgtgcgccttgtgacatttattggtgttggccgcgacccacacacctttggcctcatcgctgacctgggccgtcagagcttccagtgcgcagccttctggtgccagccccatgcagggggactctctgaagctgtgcaggctgcctgtatggttcagtaccagaagtgtcttgtggcctctgcagctcgaggcaaggcctggggtgcccaggcccgtgcccgcctgcggctcaagcggaccagctccatggattccccaggaggtcccctgcccctccccctgctcaaaggaggggttggcggtgcaggggcaacccctcgaaagcggggtgtcttctcttttcttgatgccttccggctgaaaccctctctgctccatatgccctaa

SEQ ID NO: 107027 - DNA, 1920 bp, Homo sapiens
  Payload ID: 1014
  Gene Symbol: APBB3
  Gene Name: amyloid beta (A4) precursor protein-binding, family B, member 3
  Uniprot ID: O95704
  ENST ID: ENST00000467078
  CDS Start-End: 1-738
atgctgggcaaggattacatgctggccatcattctggtcaactgcgatgatgacttgtggggggaccacagtctggaggtggaggctggcctgcctcctggctggaggaagatccacgatgctgcaggtacttactactggcatgtacccagcggtagcacccagtggcagcgcccaacctgggaactaggagatgcagaggacccaggcacgggaacggaggggatctggggactgcggccccccaaagggagatccttctccagcctggagagttcactggaccggagtaactctctgtcctggtatggtggggaatcctacatccagagcatggagccaggggctaagtgctttgcagtccgctctctgggctgggtagaggtacctgaagaggacctggcaccggggaagagcagtattgcagtcaataactgtatccagcagctggcccagacccgcagccggagccagcctccagatggtgcctggggtgagggccagaacatgctgatgatcctgaagaaggatgccatgagcctagtgaatcccctggaccacagtctgatccactgccagcctctggtgcacatccgtgtgtggggcgtggggagctccaagggccgatcctctgatgtggacccaggactgcttcccctgcctggtccagccctggttggggagggtgggcccagctcagcagggacagtttggggagagtccgagaggctgggctgattcccttctgtgctcccacatgcttccggaacagtgacagggacttcgcttttgtggcaagtgacaaagatagctgtatgctcaagtgccatgtgttttgctgtgatgtccctgccaaggccattgccagtgccctacatgggctttgtgcccagatcttgtcagagcgagtagaggtcagtggtgatgcctcttgctgctccccagaccccatctctcctgaagacctgccacggcaagtggagctgctggatgcggtaagccaagctgctcagaagtacgaggcactgtatatggggacactgccagtcaccaaggccatgggcatggatgtgctgaacgaggccattggtaccctcaccgccaggggggaccggaatgcctgggtccccaccatgctcagtgtgtctgactctctcatgactgcacaccccattcaggcagaggccagtacagaggaggagccattgtggcagtgccctgtgcgccttgtgacatttattggtgttggccgcgacccacacacctttggcctcatcgctgacctgggccgtcagagcttccagtgcgcagccttctggtgccagccccatgcagggggactctctgaagctgtgcaggctgcctgtatggttcagtaccagaagtgtcttgtggcctctgcagctcgaggcaaggcctggggtgcccaggcccgtgcccgcctgcggctcaagcggaccagctccatggattccccaggaggtcccctgcccctccccctgctcaaaggaggggttggcggtgcaggggcaacccctcgaaagcggggtgtcttctcttttcttgatgccttccggctgaaaccctctctgctccatatgccctaaacttatctgggaaggctggggaagtaggctctgggtccatgcctaactctgtaccgttttattcctcaaggcctatagcctgtcactccttgaagccttctctgcctgtccctccgatccttgtccaccgtctatttattgcccaatttattgtttatacggatgactgggaggcactgcaccacaacgtaggaccctggctcccctttccttgggtccttgtgttccttgcccctgtccaaccctggacagttggctctacctcagtaacactttatagcaaaatcagtgcaaataaaaatccctcagtgac

SEQ ID NO: 107028 - DNA, 1014 bp, Homo sapiens
  Payload ID: 1014
  Gene Symbol: APBB3
  Gene Name: amyloid beta (A4) precursor protein-binding, family B, member 3
  ENST ID: ENST00000511201
  CDS Start-End: 1-1014
atgctgggcaaggattacatgctggccatcattctggtcaactgcgatgatgacttgtggggggaccacagtctggaggtggaggctggcctgcctcctggctggaggaagatccacgatgctgcaggtacttactactggcatgtacccagcggtagcacccagtggcagcgcccaacctgggaactaggagatgcagaggacccaggcacgggaacggaggggatctggggactgcggccccccaaagggagatccttctccagcctggagagttcactggaccggagtaactctctgtcctggtatggtggggaatcctacatccagagcatggagccaggggctaagtgctttgcagtccgctctctgggctgggtagaggtacctgaagaggacctggcaccggggaagagcagtattgcagtcaataactgtatccagcagctggcccagacccgcagccggagccagcctccagatggtgcctggggtgagggccagaacatgctgatgatcctgaagaaggatgccatgagcctagtgaatcccctggaccacagtctgatccactgccagcctctggtgcacatccgtgtgtggggcgtggggagctccaagggccgggacttcgcttttgtggcaagtgacaaagatagctgtatgctcaagtgccatgtgttttgctgtgatgtccctgccaaggccattgccagtgccctacatgggctttgtgcccagatcttgtcagagcgagtagaggtcagtggtgatgcctcttgctgctccccagaccccatctctcctgaagacctgccacggcaagtggagctgctggatgcggtaagccaagctgctcagaagtacgaggcactgtatatggggacactgccagtcaccaaggccatgggcagaggccagtacagaggaggagccattgtggcagtgccctgtgcgccttgtgacatttattggtgttggccgcgacccacacacctttggcctcatcgctga

SEQ ID NO: 107029 - DNA, 2020 bp, Homo sapiens
  Payload ID: 1014
  Gene Symbol: APBB3
  Gene Name: amyloid beta (A4) precursor protein-binding, family B, member 3
  Uniprot ID: O95704
  ENST ID: ENST00000509914
  CDS Start-End: 88-732
ggctgggcttgcaggcgcagtagctccagaggtcgcgctgggctgagagtgcgggccggcagaggctggcggggagcagccggggttatgctgggcaaggattacatgctggccatcattctggtcaactgcgatgatgacttgtggggggaccacagtctggaggtggaggctggcctgcctcctggctggaggaagatccacgatgctgcaggtacttactactggcatgtacccagcggtagcacccagtggcagcgcccaacctgggaactaggagatgcagaggacccaggcacgggaacggaggggatctggggactgcggccccccaaagggagatccttctccagcctggagagttcactggaccggagtaactctctgtcctggtatggtggggaatcctacatccagagcatggagccaggggctaagtgctttgcagtccgctctctgggctgggtagaggtacctgaagaggacctggcaccggggaagagcagtattgcagtcaataactgtatccagcagctggcccagacccgcagccggagccagcctccagatggtgcctggggtgagggccagaacatgctgatgatcctgaagaaggatgccatgagcctagtgaatcccctggaccacagtctgatccactgccagcctctggctgtgatccccactgatgctgatccccagtacttgaacccctggacacagatcctctgatgtggacccaggactgcttcccctgcctggtccagccctggttggggagggtgggcccagctcagcagggacagtttggggagagtccgagaggctgggctgattcccttctgtgctcccacatgcttccggaacagtgacagggacttcgcttttgtggcaagtgacaaagatagctgtatgctcaagtgccatgtgttttgctgtgatgtccctgccaaggccattgccagtgccctacatgggctttgtgcccagatcttgtcagagcgagtagaggtcagtggtgatgcctcttgctgctccccagaccccatctctcctgaagacctgccacggcaagtggagctgctggatgcggtaagccaagctgctcagaagtacgaggcactgtatatggggacactgccagtcaccaaggccatgggcatggatgtgctgaacgaggccattggtaccctcaccgccaggggggaccggaatgcctgggtccccaccatgctcagtgtgtctgactctctcatgactgcacaccccattcaggcagaggccagtacagaggaggagccattgtggcagtgccctgtgcgccttgtgacatttattggtgttggccgcgacccacacacctttggcctcatcgctgacctgggccgtcagagcttccagtgcgcagccttctggtgccagccccatgcagggggactctctgaagctgtgcaggctgcctgtatggttcagtaccagaagtgtcttgtggcctctgcagctcgaggcaaggcctggggtgcccaggcccgtgcccgcctgcggctcaagcggaccagctccatggattccccaggaggtcccctgcccctccccctgctcaaaggaggggttggcggtgcaggggcaacccctcgaaagcggggtgtcttctcttttcttgatgccttccggctgaaaccctctctgctccatatgccctaaacttatctgggaaggctggggaagtaggctctgggtccatgcctaactctgtaccgttttattcctcaaggcctatagcctgtcactccttgaagccttctctgcctgtccctccgatccttgtccaccgtctatttattgcccaatttattgtttatacggatgactgggaggcactgcaccacaacgtaggaccctggctcccctttccttgggtccttgtgttccttgcccctgtccaaccctggacagttggctctacctcagtaacactttatagcaaaatcagtgcaaataaaaatccctcagtgacctc

SEQ ID NO: 107030 - DNA, 2032 bp, Homo sapiens
  Payload ID: 1014
  Gene Symbol: APBB3
  Gene Name: amyloid beta (A4) precursor protein-binding, family B, member 3
  ENST ID: ENST00000511896
  CDS Start-End: 127-618
gtgcggcgccagctggccccgcagcctgcggcgcagagaggctgggcttgcaggcgcagtagctccagaggtcgcgctgggctgagagtgcgggccggcagaggctggcggggagcagccggggttatgctgggcaaggattacatgctggccatcattctggtcaactgcgatgatgacttgtggggggaccacagtctggaggtggaggctggcctgcctcctggctggaggaagatccacgatgctgcaggtacttactactggcatgtacccagcggtagcacccagtggcagcgcccaacctgggaactaggagatgcagaggacccaggcacgtgctttgcagtccgctctctgggctgggtagaggtacctgaagaggacctggcaccggggaagagcagtattgcagtcaataactgtatccagcagctggcccagacccgcagccggagccagcctccagatggtgcctggggtgagggccagaacatgctgatgatcctgaagaaggatgccatgagcctagtgaatcccctggaccacagtctgatccactgccagcctctggtgcacatccgtgtgtggggcgtggggagctccaagggccggtgaggatgcctacatcccccaagcaagagctacttctccctcccggctgcaggctgtgatccccactgatgctgatccccagtacttgaacccctggacacagatcctctgatgtggacccaggactgcttcccctgcctggtccagccctggttggggagggtgggcccagctcagcagggacagtttggggagagtccgagaggctgggctgattcccttctgtgctcccacatgcttccggaacagtgacaggtgagtgaaaaccaggtatcctgagccccatccctgatgtccctactccatccctgctatatccctagcctgactttccagcctcctgcaggctcctgcctctaaccagcttctaccccagccccatctctgcccctgctagggacttcgcttttgtggcaagtgacaaagatagctgtatgctcaagtgccatgtgttttgctgtgatgtccctgccaaggccattgccagtgccctacatgggctttgtgcccagatcttgtcagagcgagtagaggtcagtggtgatgcctcttgctgctccccagaccccatctctcctgaagacctgccacggcaagtggagctgctggatgcggtaagccaagctgctcagaagtacgaggcactgtatatggggacactgccagtcaccaaggccatgggcatggatgtgctgaacgaggccattggtaccctcaccgccaggggggaccggaatgcctgggtccccaccatgctcagtgtgtctgactctctcatgactgcacaccccattcaggcagaggccagtacagaggaggagccattgtggcagtgccctgtgcgccttgtgacatttattggtgttggccgcgacccacacacctttggcctcatcgctgacctgggccgtcagagcttccagtgcgcagccttctggtgccagccccatgcagggggactctctgaagctgtgcaggctgcctgtatggttcagtaccagaagtgtcttgtggcctctgcagctcgaggcaaggcctggggtgcccaggcccgtgcccgcctgcggctcaagcggaccagctccatggattccccaggaggtcccctgcccctccccctgctcaaaggaggggttggcggtgcaggggcaacccctcgaaagcggggtgtcttctcttttcttgatgccttccggctgaaaccctctctgctccatatgccctaaacttatctgggaaggctggggaagtaggctctgggtccatgcctaactctgtaccgttttattcctcaaggcctatagcctgtcactccttgaagccttctctgcctgtccctccgatccttgtccaccgtctatttattgcccaatttattgtttatacggatgactgggaggcactgcaccacaacgta

SEQ ID NO: 107031 - DNA, 2495 bp, Homo sapiens
  Payload ID: 1015
  Gene Symbol: APLP1
  Gene Name: amyloid beta (A4) precursor-like protein 1
  Uniprot ID: P51693
  ENST ID: ENST00000221891
  CDS Start-End: 193-2148
actctgcgcgaagccgccacgctattgtcctgaccaggaaggcggggccggcgcggggcggggctggcggcgccggcgcagcccgggggcggcgggaggaggaggtggcggcggtggcgctgggagctcctgtcaccgctggggccgggccgggcgggagtgcaggggacgtgagggcgcaagggccgggacatggggcccgccagccccgctgctcgcggtctaagtcgccgcccgggccagccgccgctgccgctgctgctgccactattgctgctgcttctgcgcgcgcagcccgccatcgggagcctggccggtgggagccccggcgcggccgaggccccggggtcggcccaggtggctggactatgcgggcgcctaacccttcaccgggacctgcgcaccggccgctgggaaccagacccacagcgctctcgacgctgtctccgggacccgcagcgcgtgctggagtactgcagacagatgtacccggagctgcagattgcacgtgtggagcaggctacgcaggccatccccatggagcgctggtgcgggggttcccggagcggcagctgcgcccacccccaccaccaggttgtgcccttccgctgcctgcctggtgaatttgtgagtgaggccctgctggtgcctgaaggctgccggttcttgcaccaggagcgcatggaccaatgtgagagttcaacccggaggcatcaggaggcacaggaggcctgcagctcccagggcctcatcctgcacggctcgggcatgctcttaccctgtggctcggatcggttccgtggtgtggagtatgtgtgctgtccccctccagggacccccgacccatctgggacagcagttggtgacccctccacccggtcctggcccccggggagcagagtagagggggctgaggacgaggaagaggaggaatccttcccacagccagtagatgattacttcgtggagcctccgcaggctgaagaggaagaggaaacggtcccacccccaagctcccatacacttgcagtggtcggcaaagtcactcccaccccgaggcccacagacggtgtggatatttactttggcatgcctggggaaatcagtgagcacgaggggttcctgagggccaagatggacctggaggagcgtaggatgcgccagattaatgaggtgatgcgtgaatgggccatggcagacaaccagtccaagaacctgcctaaagccgacagacaggccctgaatgagcacttccagtccattctgcagactctggaggagcaggtgtctggtgagcgacagcgcctggtggaaacccacgccacccgcgtcatcgcccttatcaacgaccagcgccgggctgccttggagggcttcctggcagccctgcaggcagatccgcctcaggcggagcgtgtcctgttggccctgcggcgctacctgcgtgcggagcagaaggaacagaggcacacgctgcgccactaccagcatgtggccgccgtggatcccgagaaggcacagcagatgcgcttccaggtgcatacccaccttcaagtgattgaggagagggtgaatcagagcctgggcctgcttgaccagaacccccacctggctcaggagctgcggccccaaatccaggaactcctccactctgaacacctgggtcccagtgaattggaagcccctgcccctgggggcagcagcgaggacaagggtgggctgcagcctccagattccaaggatgcagacacccccatgacccttccaaaagggtccacagaacaagatgctgcatcccctgagaaagagaagatgaacccgctggaacagtatgagcgaaaggtgaatgcgtctgttccaaggggtttccctttccactcatcggagattcagagggatgagctggcaccagctgggacaggggtgtcccgtgaggctgtgtcgggtctgctgatcatgggagcgggcggaggctccctcatcgtcctctccatgctgctcctgcgcaggaagaagccctacggggctatcagccatggcgtggtggaggtggaccccatgctgaccctggaggagcagcagctccgcgaactgcagcggcacggctatgagaaccccacttaccgcttcctggaggaacgaccctgacccggcccccttcaccccttcagccgagcccagacctcccctcttcctggagccccagaaccccaactcccagcctagggcagcagggagtcttgaagtgatcatttcacacccttttgtgagacggctggaaattcttatttcccctttccaattccaaaattccatccctaagaattcccagatagtcccagcagcctccccacgtggcacctcctcaccttaatttattttttaagtttatttatggctctttaaggtgaccgccaccttggtcctagtgtctattccctggaattcaccctctcatgtttccctactaacatcccaataaagtcctcttccct

SEQ ID NO: 107032 - DNA, 2266 bp, Homo sapiens
  Payload ID: 1015
  Gene Symbol: APLP1
  Gene Name: amyloid beta (A4) precursor-like protein 1
  ENST ID: ENST00000537454
  CDS Start-End: 346-2181
aatcctgaggtgctgcatccacagtgggcatggtgctggtgcctgcttggatgatccttaaagaaaggtcctgggggctttggttcatggatccttgagctaggagttaaaggtccaggcccctgggacccttgggaagcagagcaagaagagtgaactcctgggtctgaaggagaatgggctgggggcttggtctctggtcctgagagagaaggtgcccagacttctggatctgaaagaggaagggactaggtctcaactgctgccttcttgactggggacattttggaggcctgtattcctgagccctcaacagaggaatgtactaggggatgggggtctctgatgcttgcatccttggaaaaggacaaaactgccccggggtcggcccaggtggctggactatgcgggcgcctaacccttcaccgggacctgcgcaccggccgctgggaaccagacccacagcgctctcgacgctgtctccgggacccgcagcgcgtgctggagtactgcagacagatgtacccggagctgcagattgcacgtgtggagcaggctacgcaggccatccccatggagcgctggtgcgggggttcccggagcggcagctgcgcccacccccaccaccaggttgtgcccttccgctgcctgcctggtgaatttgtgagtgaggccctgctggtgcctgaaggctgccggttcttgcaccaggagcgcatggaccaatgtgagagttcaacccggaggcatcaggaggcacaggaggcctgcagctcccagggcctcatcctgcacggctcgggcatgctcttaccctgtggctcggatcggttccgtggtgtggagtatgtgtgctgtccccctccagggacccccgacccatctgggacagcagttggtgacccctccacccggtcctggcccccggggagcagagtagagggggctgaggacgaggaagaggaggaatccttcccacagccagtagatgattacttcgtggagcctccgcaggctgaagaggaagaggaaacggtcccacccccaagctcccatacacttgcagtggtcggcaaagtcactcccaccccgaggcccacagacggtgtggatatttactttggcatgcctggggaaatcagtgagcacgaggggttcctgagggccaagatggacctggaggagcgtaggatgcgccagattaatgaggtgatgcgtgaatgggccatggcagacaaccagtccaagaacctgcctaaagccgacagacaggccctgaatgagcacttccagtccattctgcagactctggaggagcaggtgtctggtgagcgacagcgcctggtggaaacccacgccacccgcgtcatcgcccttatcaacgaccagcgccgggctgccttggagggcttcctggcagccctgcaggcagatccgcctcaggcggagcgtgtcctgttggccctgcggcgctacctgcgtgcggagcagaaggaacagaggcacacgctgcgccactaccagcatgtggccgccgtggatcccgagaaggcacagcagatgcgcttccaggtgcatacccaccttcaagtgattgaggagagggtgaatcagagcctgggcctgcttgaccagaacccccacctggctcaggagctgcggccccaaatccaggaactcctccactctgaacacctgggtcccagtgaattggaagcccctgcccctgggggcagcagcgaggacaagggtgggctgcagcctccagattccaaggatgacacccccatgacccttccaaaagggtccacagaacaagatgctgcatcccctgagaaagagaagatgaacccgctggaacagtatgagcgaaaggtgaatgcgtctgttccaaggggtttccctttccactcatcggagattcagagggatgagctggcaccagctgggacaggggtgtcccgtgaggctgtgtcgggtctgctgatcatgggagcgggcggaggctccctcatcgtcctctccatgctgctcctgcgcaggaagaagccctacggggctatcagccatggcgtggtggaggtggaccccatgctgaccctggaggagcagcagctccgcgaactgcagcggcacggctatgagaaccccacttaccgcttcctggaggaacgaccctgacccggcccccttcaccccttcagccgagcccagacctcccctcttcctggagccccagaaccccaactcccagcctagggcagca

SEQ ID NO: 107033 - DNA, 2052 bp, Homo sapiens
  Payload ID: 1015
  Gene Symbol: APLP1
  Gene Name: amyloid beta (A4) precursor-like protein 1
  ENST ID: ENST00000586861
  CDS Start-End: 66-2000
atagcaacgggagcgctggggcgcccccgccctacgggagctgtttcccagggaacggtgcctccatggaggcggtgtgcggtgcttgggggagggggctggtgctgggggtctcggtcctagggagcaaagaaccaggggaccctcatgccaacgccccccgagccctcactgtcctttccacttccatccaggccccggggtcggcccaggtggctggactatgcgggcgcctaacccttcaccgggacctgcgcaccggccgctgggaaccagacccacagcgctctcgacgctgtctccgggacccgcagcgcgtgctggagtactgcagacagatgtacccggagctgcagattgcacgtgtggagcaggctacgcaggccatccccatggagcgctggtgcgggggttcccggagcggcagctgcgcccacccccaccaccaggttgtgcccttccgctgcctgcctggtgaatttgtgagtgaggccctgctggtgcctgaaggctgccggttcttgcaccaggagcgcatggaccaatgtgagagttcaacccggaggcatcaggaggcacaggaggcctgcagctcccagggcctcatcctgcacggctcgggcatgctcttaccctgtggctcggatcggttccgtggtgtggagtatgtgtgctgtccccctccagggacccccgacccatctgggacagcagttggtgacccctccacccggtcctggcccccggggagcagagtagagggggctgaggacgaggaagaggaggaatccttcccacagccagtagatgattacttcgtggagcctccgcaggctgaagaggaagaggaaacggtcccacccccaagctcccatacacttgcagtggtcggcaaagtcactcccaccccgaggcccacagacggtgtggatatttactttggcatgcctggggaaatcagtgagcacgaggggttcctgagggccaagatggacctggaggagcgtaggatgcgccagattaatgaggtgatgcgtgaatgggccatggcagacaaccagtccaagaacctgcctaaagccgacagacaggccctgaatgagcacttccagtccattctgcagactctggaggagcaggtgtctggtgagcgacagcgcctggtggaaacccacgccacccgcgtcatcgcccttatcaacgaccagcgccgggctgccttggagggcttcctggcagccctgcaggcagatccgcctcaggcggagcgtgtcctgttggccctgcggcgctacctgcgtgcggagcagaaggaacagaggcacacgctgcgccactaccagcatgtggccgccgtggatcccgagaaggcacagcagatgcgcttccaggtgcatacccaccttcaagtgattgaggagagggtgaatcagagcctgggcctgcttgaccagaacccccacctggctcaggagctgcggccccaaatccaggaactcctccactctgaacacctgggtcccagtgaattggaagcccctgcccctgggggcagcagcgaggacaagggtgggctgcagcctccagattccaaggatgacacccccatgacccttccaaaagggtccacagaacaagatgctgcatcccctgagaaagagaagatgaacccgctggaacagtatgagcgaaaggtgaatgcgtctgttccaaggggtttccctttccactcatcggagattcagagggatgagctggcaccagctgggacaggggtgtcccgtgaggctgtgtcgggtctgctgatcatgggagcgggcggaggctccctcatcgtcctctccatgctgctcctgcgcaggaagaagccctacggggctatcagccatggcgtggtggaggtggaccccatgctgaccctggaggagcagcagctccgcgaactgcagcggcacggctatgagaaccccacttaccgcttcctggaggaacgaccctgacccggcccccttcaccccttcagccgagcccagacctcccctcttcctggag

SEQ ID NO: 107034 - DNA, 586 bp, Homo sapiens
  Payload ID: 1015
  Gene Symbol: APLP1
  Gene Name: amyloid beta (A4) precursor-like protein 1
  ENST ID: ENST00000589743
  CDS Start-End: 68-586
aaatttataacgggaagggagagttttggagaggcggaatagaggaaaaggcggggcctaaaggaggatgtacccggagctgcagattgcacgtgtggagcaggctacgcaggccatccccatggagcgctggtgcgggggttcccggagcggcagctgcgcccacccccaccaccaggttgtgcccttccgctgcctgcctggtgaatttgtgagtgaggccctgctggtgcctgaaggctgccggttcttgcaccaggagcgcatggaccaatgtgagagttcaacccggaggcatcaggaggcacaggaggcctgcagctcccagggcctcatcctgcacggctcgggcatgctcttaccctgtggctcggatcggttccgtggtgtggagtatgtgtgctgtccccctccagggacccccgacccatctgggacagcagttggtgacccctccacccggtcctggcccccggggagcagagtagagggggctgaggacgaggaagaggaggaatccttcccacagccagtagatgattacttcgtggagcctccgcaggctgaagaggaagaggaaacggtc

SEQ ID NO: 107035 - DNA, 664 bp, Homo sapiens
  Payload ID: 1015
  Gene Symbol: APLP1
  Gene Name: amyloid beta (A4) precursor-like protein 1
  ENST ID: ENST00000588808
  CDS Start-End: 1-664
gtgaatgggccatggcagacaaccagtccaagaacctgcctaaagccgacagacaggccctgaatgaggcggagcgtgtcctgttggccctgcggcgctacctgcgtgcggagcagaaggaacagaggcacacgctgcgccactaccagcatgtggccgccgtggatcccgagaaggcacagcagatgcgcttccaggtgcatacccaccttcaagtgattgaggagagggtgaatcagagcctgggcctgcttgaccagaacccccacctggctcaggagctgcggccccaaatccaggaactcctccactctgaacacctgggtcccagtgaattggaagcccctgcccctgggggcagcagcgaggacaagggtgggctgcagcctccagattccaaggatgacacccccatgacccttccaaaagggtccacagaacaagatgctgcatcccctgagaaagagaagatgaacccgctggaacagtatgagcgaaaggtgaatgcgtctgttccaaggggtttccctttccactcatcggagattcagagggatgagctggcaccagctgggacaggggtgtcccgtgaggctgtgtcgggtctgctgatcatgggagcgggcggaggctccctcatcgtcctctccatgctgctcctgcg

SEQ ID NO: 107036 - DNA, 2295 bp, Homo sapiens
  Payload ID: 1015
  Gene Symbol: APLP1
  Gene Name: amyloid beta (A4) precursor-like protein 1
  ENST ID: ENST00000590561
  CDS Start-End: 75-431
gctgggagctcctgtcaccgctggggccgggccgggcgggagtgcaggggacgtgagggcgcaagggccgggacatggggcccgccagccccgctgctcgcggtctaagtcgccgcccgggccagccgccgctgccgctgctgctgccactattgctgctgcttctgcgcgcgcagcccgccatcgggagcctggccggtgggagccccggcgcggccgagacccacagcgctctcgacgctgtctccgggacccgcagcgcgtgctggagtactgcagacagatgtacccggagctgcagattgcacgtgtggagcaggctacgcaggccatccccatggagcgctggtgcgggggttcccggagcggcagctgcgcccacccccaccaccaggttgtgcccttccgctgcctgcctggtgaatttgtgagtgaggccctgctggtgcctgaaggctgccggttcttgcaccaggagcgcatggaccaatgtgagagttcaacccggaggcatcaggaggcacaggaggcctgcagctcccagggcctcatcctgcacggctcgggcatgctcttaccctgtggctcggatcggttccgtggtgtggagtatgtgtgctgtccccctccagggacccccgacccatctgggacagcagttggtgacccctccacccggtcctggcccccggggagcagagtagagggggctgaggacgaggaagaggaggaatccttcccacagccagtagatgattacttcgtggagcctccgcaggctgaagaggaagaggaaacggtcccacccccaagctcccatacacttgcagtggtcggcaaagtcactcccaccccgaggcccacagacggtgtggatatttactttggcatgcctggggaaatcagtgagcacgaggggttcctgagggccaagatggacctggaggagcgtaggatgcgccagattaatgaggtgatgcgtgaatgggccatggcagacaaccagtccaagaacctgcctaaagccgacagacaggccctgaatgagcacttccagtccattctgcagactctggaggagcaggtgtctggtgagcgacagcgcctggtggaaacccacgccacccgcgtcatcgcccttatcaacgaccagcgccgggctgccttggagggcttcctggcagccctgcaggcagatccgcctcaggcggagcgtgtcctgttggccctgcggcgctacctgcgtgcggagcagaaggaacagaggcacacgctgcgccactaccagcatgtggccgccgtggatcccgagaaggcacagcagatgcgcttccaggtgcatacccaccttcaagtgattgaggagagggtgaatcagagcctgggcctgcttgaccagaacccccacctggctcaggagctgcggccccaaatccaggaactcctccactctgaacacctgggtcccagtgaattggaagcccctgcccctgggggcagcagcgaggacaagggtgggctgcagcctccagattccaaggatgcagacacccccatgacccttccaaaagggtccacagaacaagatgctgcatcccctgagaaagagaagatgaacccgctggaacagtatgagcgaaaggtgaatgcgtctgttccaaggggtttccctttccactcatcggagattcagagggatgagctggcaccagctgggacaggggtgtcccgtgaggctgtgtcgggtctgctgatcatgggagcgggcggaggctccctcatcgtcctctccatgctgctcctgcgcaggaagaagccctacggggctatcagccatggcgtggtggaggtggaccccatgctgaccctggaggagcagcagctccgcgaactgcagcggcacggctatgagaaccccacttaccgcttcctggaggaacgaccctgacccggcccccttcaccccttcagccgagcccagacctcccctcttcctggagccccagaaccccaactcccagcctagggcagcagggagtcttgaagtgatcatttcacacccttttgtgagacggctggaaattcttatttcccctttccaattccaaaattccatccctaagaattcccagatagtcccagcagcctccccacgtggcacctcctcaccttaatttattttttaagtttatttatggctctttaaggtgaccgccaccttggtcctagtgtctattccctggaattcaccctctcatgtttccctactaacatcccaataaagtcctcttccct

SEQ ID NO: 107037 - DNA, 1324 bp, Homo sapiens
  Payload ID: 1015
  Gene Symbol: APLP1
  Gene Name: amyloid beta (A4) precursor-like protein 1
  ENST ID: ENST00000592316
  CDS Start-End: 443-1324
ctagggaagcgatgtcctcatgaatactagagccttgaaaacggacctggccgggcgcggtggctcacgcctgtaatcgcagcacttggggaggccgaggcaggcggatcacctgaggtcagaagttcgagaccagcctggccaacacggcgaaactccgtctctactaaaaatacaaaaattagcctggcatggtggtgcgtgcctgtaatcccagctactcaggaggctgagacaggagaatcgcttgaacctgggaggaggaggttgcagtgagccgagattgtaccattccactccagcctgggcgacaagagcaaatctccgtctcaaagaaagaaagaaagagggagaaagaaagagaaaagggacctgactactggagaggggtggctggcaggggcggggcagtgggctgattgcccccatctgatccccccagatgtacccggagctgcagattgcacgtgtggagcaggctacgcaggccatccccatggagcgctggtgcgggggttcccggagcggcagctgcgcccacccccaccaccaggttgtgcccttccgctgcctgcctggtgaatttgtgagtgaggccctgctggtgcctgaaggctgccggttcttgcaccaggagcgcatggaccaatgtgagagttcaacccggaggcatcaggaggcacaggaggcctgcagctcccagggcctcatcctgcacggctcgggcatgctcttaccctgtggctcggatcggttccgtggtgtggagtatgtgtgctgtccccctccagggacccccgacccatctgggacagcagttggtgacccctccacccggtcctggcccccggggagcagagtagagggggctgaggacgaggaagaggaggaatccttcccacagccagtagatgattacttcgtggagcctccgcaggctgaagaggaagaggaaacggtcccacccccaagctcccatacacttgcagtggtcggcaaagtcactcccaccccgaggcccacagacggtgtggatatttactttggcatgcctggggaaatcagtgagcacgaggggttcctgagggccaagatggacctggaggagcgtaggatgcgccagattaatgaggtgatgcgtgaatgggccatggcagacaaccagtccaagaacctgcctaaagccgacagacaggccctgaatgagcacttccagtccattctgcagactctggaggagcaggtgtctggtgagcgacagcgcctggtggaaacccacgccacccgcgtcatcgcccttatcaacgaccagcgccgggctgcc

SEQ ID NO: 107038 - DNA, 1179 bp, Homo sapiens
  Payload ID: 1015
  Gene Symbol: APLP1
  Gene Name: amyloid beta (A4) precursor-like protein 1
  ENST ID: ENST00000587274
  CDS Start-End: 1-869
tccagtccattctgcagactctggaggagcaggtgtctggtgagcgacagcgcctggtggaaacccacgccacccgcgtcatcgcccttatcaacgaccagcgccgggctgccttggagggcttcctggcagccctgcaggcagatccgcctcaggcggagcgtgtcctgttggccctgcggcgctacctgcgtgcggagcagaaggaacagaggcacacgctgcgccactaccagcatgtggccgccgtggatcccgagaaggcacagcagatgcgcttccaggtgcatacccaccttcaagtgattgaggagagggtgaatcagagcctgggcctgcttgaccagaacccccacctggctcaggagctgcggccccaaatccaggaactcctccactctgaacacctgggtcccagtgaattggaagcccctgcccctgggggcagcagcgaggacaagggtgggctgcagcctccagattccaaggatgggtccacagaacaagatgctgcatcccctgagaaagagaagatgaacccgctggaacagtatgagcgaaaggtgaatgcgtctgttccaaggggtttccctttccactcatcggagattcagagggatgagctggcaccagctgggacaggggtgtcccgtgaggctgtgtcgggtctgctgatcatgggagcgggcggaggctccctcatcgtcctctccatgctgctcctgcgcaggaagaagccctacggggctatcagccatggcgtggtggaggtggaccccatgctgaccctggaggagcagcagctccgcgaactgcagcggcacggctatgagaaccccacttaccgcttcctggaggaacgaccctgacccggcccccttcaccccttcagccgagcccagacctcccctcttcctggagccccagaaccccaactcccagcctagggcagcagggagtcttgaagtgatcatttcacacccttttgtgagacggctggaaattcttatttcccctttccaattccaaaattccatccctaagaattcccagatagtcccagcagcctccccacgtggcacctcctcaccttaatttattttttaagtttatttatggctctttaaggtgaccgccaccttggtcctagtgtctattccctggaattcaccctctcat

SEQ ID NO: 107039 - DNA, 3727 bp, Homo sapiens
  Payload ID: 1016
  Gene Symbol: APLP2
  Gene Name: amyloid beta (A4) precursor-like protein 2
  Uniprot ID: Q06481
  ENST ID: ENST00000263574
  CDS Start-End: 73-2364
gtcgcggtgtgctaagcgaggagtccgagtgtgtgagcttgagagccgcgcgctagagcgacccggcgagggatggcggccaccgggaccgcggccgccgcagccacgggcaggctcctgcttctgctgctggtggggctcacggcgcctgccttggcgctggccggctacatcgaggctcttgcagccaatgccggaacaggatttgctgttgctgagcctcaaatcgcaatgttttgtgggaagttaaatatgcatgtgaacattcagactgggaaatgggaacctgatccaacaggcaccaagagctgctttgaaacaaaagaagaagttcttcagtactgtcaggagatgtatccagagctacagatcacaaatgtgatggaggcaaaccagcgggttagtattgacaactggtgccggagggacaaaaagcaatgcaagagtcgctttgttacacctttcaagtgtctcgtgggtgaatttgtaagtgatgtcctgctagttccagaaaagtgccagtttttccacaaagagcggatggaggtgtgtgagaatcaccagcactggcacacggtagtcaaagaggcatgtctgactcagggaatgaccttatatagctacggcatgctgctcccatgtggggtagaccagttccatggcactgaatatgtgtgctgccctcagacaaagattattggatctgtgtcaaaagaagaggaagaggaagatgaagaggaagaggaagaggaagatgaagaggaagactatgatgtttataaaagtgaatttcctactgaagcagatctggaagacttcacagaagcagctgtggatgaggatgatgaggatgaggaagaaggggaggaagtggtggaggaccgagattactactatgacaccttcaaaggagatgactacaatgaggagaatcctactgaacccggcagcgacggcaccatgtcagacaaggaaattactcatgatgtcaaagctgtctgctcccaggaggcgatgacggggccctgccgggccgtgatgcctcgttggtacttcgacctctccaagggaaagtgcgtgcgctttatatatggtggctgcggcggcaacaggaacaattttgagtctgaggattattgtatggctgtgtgtaaagcgatgattcctccaactcctctgccaaccaatgatgttgatgtgtatttcgagacctctgcagatgataatgagcatgctcgcttccagaaggctaaggagcagctggagattcggcaccgcaaccgaatggacagggtaaagaaggaatgggaagaggcagagcttcaagctaagaacctccccaaagcagagaggcagactctgattcagcacttccaagccatggttaaagctttagagaaggaagcagccagtgagaagcagcagctggtggagacccacctggcccgagtggaagctatgctgaatgaccgccgtcggatggctctggagaactacctggctgccttgcagtctgacccgccacggcctcatcgcattctccaggccttacggcgttatgtccgtgctgagaacaaagatcgcttacataccatccgtcattaccagcatgtgttggctgttgacccagaaaaggcggcccagatgaaatcccaggtgatgacacatctccacgtgattgaagaaaggaggaaccaaagcctctctctgctctacaaagtaccttatgtagcccaagaaattcaagaggaaattgatgagctccttcaggagcagcgtgcagatatggaccagttcactgcctcaatctcagagacccctgtggacgtccgggtgagctctgaggagagtgaggagatcccaccgttccaccccttccaccccttcccagccctacctgagaacgaagacactcagccggagttgtaccacccaatgaaaaaaggatctggagtgggagagcaggatgggggactgatcggtgccgaagagaaagtgattaacagtaagaataaagtggatgaaaacatggtcattgacgagactctggatgttaaggaaatgattttcaatgccgagagagttggaggcctcgaggaagagcgggaatccgtgggcccactgcgggaggacttcagtctgagtagcagtgctctcattggcctgctggtcatcgcagtggccattgccacggtcatcgtcatcagcctggtgatgctgaggaagaggcagtatggcaccatcagccacgggatcgtggaggttgatccaatgctcaccccagaagagcgtcacctgaacaagatgcagaaccatggctatgagaaccccacctacaaatacctggagcagatgcagatttaggtggcagggagcgcggcagccctggcggagggatgcaggtgggccggaagatcccacgattccgatcgactgccaagcagcagccgctgccaggggctgcgtctgacatcctgacctcctggactgtaggactatataaagtactactgtagaactgcaatttccattcttttaaatgggtgaaaaatggtaatataacaatatatgatatataaaccttaaatgaaaaaaatgatctattgcagatatttgatgtagttttcttttttaaattaatcagaaaccccacttccattgtattgtctgacacatgctctcaatatataataaatgggaaatgtcgattttcaataatagacttatatgcaggctgtcgttccggttatgttgtgtaagtcaactcttcagcctcattcactgtcctggcttttatttaaagaaaaaaaaggcagtattccctttttaaatgagctttcaggaagttgctgagaaatggggtggaatagggaactgtaatggccactgaagcacgtgagagaccctcgcaaaatgatgtgaaaggaccagtttcttgaagtccagtgtttccacggctggatacctgtgtgtctccataaaagtcctgtcaccaaggacgttaaaggcattttattccagcgtcttctagagagcttagtgtatacagatgagggtgtccgctgctgctttccttcggaatccagtgcttccacagagattagcctgtagcttatatttgacattcttcactgtctgttgtttacctaccgtagctttttaccgttcacttccccttccaactatgtccagatgtgcaggctcctcctctctggactttctccaaaggcactgaccctcggcctctactttgtcccctcacctccaccccctcctgtcaccggccttgtgacattcactcagagaagaccacaccaaggaggcggccgctggcccaggagagaacacggggaggtttgtttgtgtgaaaggaaagtagtccaggctgtccctgaaactgagtctgtggacactgtggaaagctttgaacaattgtgttttcgtcacaggagtctttgtaatgcttgtacagttgatgtcgatgctcactgcttctgctttttctttctttttattttaaatctgaaggttctggtaacctgtggtgtatttttattttcctgtgactgtttttgttttgtttttttcctttttcctcccctttgaccctattcatgtctctacccactatgcacagattaaacttcacctacaaactccttaatatgatctgtggagaatgtacacagtttaaacacatcaataaatactttaacttccaccgaga

SEQ ID NO: 107040 - DNA, 1862 bp, Homo sapiens
  Payload ID: 1016
  Gene Symbol: APLP2
  Gene Name: amyloid beta (A4) precursor-like protein 2
  Uniprot ID: Q06481
  ENST ID: ENST00000345598
  CDS Start-End: 63-1631
gctaagcgaggagtccgagtgtgtgagcttgagagccgcgcgctagagcgacccggcgagggatggcggccaccgggaccgcggccgccgcagccacgggcaggctcctgcttctgctgctggtggggctcacggcgcctgccttggcgctggccggctacatcgaggctcttgcagccaatgccggaacaggatttgctgttgctgagcctcaaatcgcaatgttttgtgggaagttaaatatgcatgtgaacattcagactgggaaatgggaacctgatccaacaggcaccaagagctgctttgaaacaaaagaagaagttcttcagtactgtcaggagatgtatccagagctacagatcacaaatgtgatggaggcaaaccagcgggttagtattgacaactggtgccggagggacaaaaagcaatgcaagagtcgctttgttacacctttcaagtgtctcgttcctccaactcctctgccaaccaatgatgttgatgtgtatttcgagacctctgcagatgataatgagcatgctcgcttccagaaggctaaggagcagctggagattcggcaccgcaaccgaatggacagggtaaagaaggaatgggaagaggcagagcttcaagctaagaacctccccaaagcagagaggcagactctgattcagcacttccaagccatggttaaagctttagagaaggaagcagccagtgagaagcagcagctggtggagacccacctggcccgagtggaagctatgctgaatgaccgccgtcggatggctctggagaactacctggctgccttgcagtctgacccgccacggcctcatcgcattctccaggccttacggcgttatgtccgtgctgagaacaaagatcgcttacataccatccgtcattaccagcatgtgttggctgttgacccagaaaaggcggcccagatgaaatcccaggtgatgacacatctccacgtgattgaagaaaggaggaaccaaagcctctctctgctctacaaagtaccttatgtagcccaagaaattcaagaggaaattgatgagctccttcaggagcagcgtgcagatatggaccagttcactgcctcaatctcagagacccctgtggacgtccgggtgagctctgaggagagtgaggagatcccaccgttccaccccttccaccccttcccagccctacctgagaacgaaggatctggagtgggagagcaggatgggggactgatcggtgccgaagagaaagtgattaacagtaagaataaagtggatgaaaacatggtcattgacgagactctggatgttaaggaaatgattttcaatgccgagagagttggaggcctcgaggaagagcgggaatccgtgggcccactgcgggaggacttcagtctgagtagcagtgctctcattggcctgctggtcatcgcagtggccattgccacggtcatcgtcatcagcctggtgatgctgaggaagaggcagtatggcaccatcagccacgggatcgtggaggttgatccaatgctcaccccagaagagcgtcacctgaacaagatgcagaaccatggctatgagaaccccacctacaaatacctggagcagatgcagatttaggtggcagggagcgcggcagccctggcggagggatgcaggtgggccggaagatcccacgattccgatcgactgccaagcagcagccgctgccaggggctgcgtctgacatcctgacctcctggactgtaggactatataaagtactactgtagaactgcaatttccattcttttaaatgggtgaaaaatggtaatataacaatatatgatatataaaccttaaatgaaaaaa

SEQ ID NO: 107041 - DNA, 3687 bp, Homo sapiens
  Payload ID: 1016
  Gene Symbol: APLP2
  Gene Name: amyloid beta (A4) precursor-like protein 2
  Uniprot ID: Q06481
  ENST ID: ENST00000278756
  CDS Start-End: 46-2331
tttgttgccaggtggacgcggccccggccttcgcgcgcggcagggatgctgcgagccccgggggagctcccgcgccaggccgcccgctgctccctctgccgcctggggccgggtcgcggacgcgcattttttaagtggcgctgtttgcctgcgtccgtagaccgaggaaacccgctctgggctcttgcagccaatgccggaacaggatttgctgttgctgagcctcaaatcgcaatgttttgtgggaagttaaatatgcatgtgaacattcagactgggaaatgggaacctgatccaacaggcaccaagagctgctttgaaacaaaagaagaagttcttcagtactgtcaggagatgtatccagagctacagatcacaaatgtgatggaggcaaaccagcgggttagtattgacaactggtgccggagggacaaaaagcaatgcaagagtcgctttgttacacctttcaagtgtctcgtgggtgaatttgtaagtgatgtcctgctagttccagaaaagtgccagtttttccacaaagagcggatggaggtgtgtgagaatcaccagcactggcacacggtagtcaaagaggcatgtctgactcagggaatgaccttatatagctacggcatgctgctcccatgtggggtagaccagttccatggcactgaatatgtgtgctgccctcagacaaagattattggatctgtgtcaaaagaagaggaagaggaagatgaagaggaagaggaagaggaagatgaagaggaagactatgatgtttataaaagtgaatttcctactgaagcagatctggaagacttcacagaagcagctgtggatgaggatgatgaggatgaggaagaaggggaggaagtggtggaggaccgagattactactatgacaccttcaaaggagatgactacaatgaggagaatcctactgaacccggcagcgacggcaccatgtcagacaaggaaattactcatgatgtcaaagctgtctgctcccaggaggcgatgacggggccctgccgggccgtgatgcctcgttggtacttcgacctctccaagggaaagtgcgtgcgctttatatatggtggctgcggcggcaacaggaacaattttgagtctgaggattattgtatggctgtgtgtaaagcgatgattcctccaactcctctgccaaccaatgatgttgatgtgtatttcgagacctctgcagatgataatgagcatgctcgcttccagaaggctaaggagcagctggagattcggcaccgcaaccgaatggacagggtaaagaaggaatgggaagaggcagagcttcaagctaagaacctccccaaagcagagaggcagactctgattcagcacttccaagccatggttaaagctttagagaaggaagcagccagtgagaagcagcagctggtggagacccacctggcccgagtggaagctatgctgaatgaccgccgtcggatggctctggagaactacctggctgccttgcagtctgacccgccacggcctcatcgcattctccaggccttacggcgttatgtccgtgctgagaacaaagatcgcttacataccatccgtcattaccagcatgtgttggctgttgacccagaaaaggcggcccagatgaaatcccaggtgatgacacatctccacgtgattgaagaaaggaggaaccaaagcctctctctgctctacaaagtaccttatgtagcccaagaaattcaagaggaaattgatgagctccttcaggagcagcgtgcagatatggaccagttcactgcctcaatctcagagacccctgtggacgtccgggtgagctctgaggagagtgaggagatcccaccgttccaccccttccaccccttcccagccctacctgagaacgaaggatctggagtgggagagcaggatgggggactgatcggtgccgaagagaaagtgattaacagtaagaataaagtggatgaaaacatggtcattgacgagactctggatgttaaggaaatgattttcaatgccgagagagttggaggcctcgaggaagagcgggaatccgtgggcccactgcgggaggacttcagtctgagtagcagtgctctcattggcctgctggtcatcgcagtggccattgccacggtcatcgtcatcagcctggtgatgctgaggaagaggcagtatggcaccatcagccacgggatcgtggaggttgatccaatgctcaccccagaagagcgtcacctgaacaagatgcagaaccatggctatgagaaccccacctacaaatacctggagcagatgcagatttaggtggcagggagcgcggcagccctggcggagggatgcaggtgggccggaagatcccacgattccgatcgactgccaagcagcagccgctgccaggggctgcgtctgacatcctgacctcctggactgtaggactatataaagtactactgtagaactgcaatttccattcttttaaatgggtgaaaaatggtaatataacaatatatgatatataaaccttaaatgaaaaaaatgatctattgcagatatttgatgtagttttcttttttaaattaatcagaaaccccacttccattgtattgtctgacacatgctctcaatatataataaatgggaaatgtcgattttcaataatagacttatatgcaggctgtcgttccggttatgttgtgtaagtcaactcttcagcctcattcactgtcctggcttttatttaaagaaaaaaaaggcagtattccctttttaaatgagctttcaggaagttgctgagaaatggggtggaatagggaactgtaatggccactgaagcacgtgagagaccctcgcaaaatgatgtgaaaggaccagtttcttgaagtccagtgtttccacggctggatacctgtgtgtctccataaaagtcctgtcaccaaggacgttaaaggcattttattccagcgtcttctagagagcttagtgtatacagatgagggtgtccgctgctgctttccttcggaatccagtgcttccacagagattagcctgtagcttatatttgacattcttcactgtctgttgtttacctaccgtagctttttaccgttcacttccccttccaactatgtccagatgtgcaggctcctcctctctggactttctccaaaggcactgaccctcggcctctactttgtcccctcacctccaccccctcctgtcaccggccttgtgacattcactcagagaagaccacaccaaggaggcggccgctggcccaggagagaacacggggaggtttgtttgtgtgaaaggaaagtagtccaggctgtccctgaaactgagtctgtggacactgtggaaagctttgaacaattgtgttttcgtcacaggagtctttgtaatgcttgtacagttgatgtcgatgctcactgcttctgctttttctttctttttattttaaatctgaaggttctggtaacctgtggtgtatttttattttcctgtgactgtttttgttttgtttttttcctttttcctcccctttgaccctattcatgtctctacccactatgcacagattaaacttcacctacaaactccttaatatgatctgtggagaatgtacacagtttaaacacatcaataaatactttaacttcc

SEQ ID NO: 107042 - DNA, 3270 bp, Homo sapiens
  Payload ID: 1016
  Gene Symbol: APLP2
  Gene Name: amyloid beta (A4) precursor-like protein 2
  Uniprot ID: Q06481
  ENST ID: ENST00000338167
  CDS Start-End: 58-2313
gcgaggagtccgagtgtgtgagcttgagagccgcgcgctagagcgacccggcgagggatggcggccaccgggaccgcggccgccgcagccacgggcaggctcctgcttctgctgctggtggggctcacggcgcctgccttggcgctggccggctacatcgaggctcttgcagccaatgccggaacaggatttgctgttgctgagcctcaaatcgcaatgttttgtgggaagttaaatatgcatgtgaacattcagactgggaaatgggaacctgatccaacaggcaccaagagctgctttgaaacaaaagaagaagttcttcagtactgtcaggagatgtatccagagctacagatcacaaatgtgatggaggcaaaccagcgggttagtattgacaactggtgccggagggacaaaaagcaatgcaagagtcgctttgttacacctttcaagtgtctcgtgggtgaatttgtaagtgatgtcctgctagttccagaaaagtgccagtttttccacaaagagcggatggaggtgtgtgagaatcaccagcactggcacacggtagtcaaagaggcatgtctgactcagggaatgaccttatatagctacggcatgctgctcccatgtggggtagaccagttccatggcactgaatatgtgtgctgccctcagacaaagattattggatctgtgtcaaaagaagaggaagaggaagatgaagaggaagaggaagaggaagatgaagaggaagactatgatgtttataaaagtgaatttcctactgaagcagatctggaagacttcacagaagcagctgtggatgaggatgatgaggatgaggaagaaggggaggaagtggtggaggaccgagattactactatgacaccttcaaaggagatgactacaatgaggagaatcctactgaacccggcagcgacggcaccatgtcagacaaggaaattactcatgatgtcaaagctgtctgctcccaggaggcgatgacggggccctgccgggccgtgatgcctcgttggtacttcgacctctccaagggaaagtgcgtgcgctttatatatggtggctgcggcggcaacaggaacaattttgagtctgaggattattgtatggctgtgtgtaaagcgatgattcctccaactcctctgccaaccaatgatgttgatgtgtatttcgagacctctgcagatgataatgagcatgctcgcttccagaaggctaaggagcagctggagattcggcaccgcaaccgaatggacagggtaaagaaggaatgggaagaggcagagcttcaagctaagaacctccccaaagcagagaggcagactctgattcagcacttccaagccatggttaaagctttagagaaggaagcagccagtgagaagcagcagctggtggagacccacctggcccgagtggaagctatgctgaatgaccgccgtcggatggctctggagaactacctggctgccttgcagtctgacccgccacggcctcatcgcattctccaggccttacggcgttatgtccgtgctgagaacaaagatcgcttacataccatccgtcattaccagcatgtgttggctgttgacccagaaaaggcggcccagatgaaatcccaggtgatgacacatctccacgtgattgaagaaaggaggaaccaaagcctctctctgctctacaaagtaccttatgtagcccaagaaattcaagaggaaattgatgagctccttcaggagcagcgtgcagatatggaccagttcactgcctcaatctcagagacccctgtggacgtccgggtgagctctgaggagagtgaggagatcccaccgttccaccccttccaccccttcccagccctacctgagaacgaaggatctggagtgggagagcaggatgggggactgatcggtgccgaagagaaagtgattaacagtaagaataaagtggatgaaaacatggtcattgacgagactctggatgttaaggaaatgattttcaatgccgagagagttggaggcctcgaggaagagcgggaatccgtgggcccactgcgggaggacttcagtctgagtagcagtgctctcattggcctgctggtcatcgcagtggccattgccacggtcatcgtcatcagcctggtgatgctgaggaagaggcagtatggcaccatcagccacgggatcgtggaggttgatccaatgctcaccccagaagagcgtcacctgaacaagatgcagaaccatggctatgagaaccccacctacaaatacctggagcagatgcagatttaggtggcagggagcgcggcagccctggcggagggatgcaggtgggccggaagatcccacgattccgatcgactgccaagcagcagccgctgccaggggctgcgtctgacatcctgacctcctggactgtaggactatataaagtactactgtagaactgcaatttccattcttttaaatgggtgaaaaatggtaatataacaatatatgatatataaaccttaaatgaaaaaaatgatctattgcagatatttgatgtagttttcttttttaaattaatcagaaaccccacttccattgtattgtctgacacatgctctcaatatataataaatgggaaatgtcgattttcaataatagacttatatgcaggctgtcgttccggttatgttgtgtaagtcaactcttcagcctcattcactgtcctggcttttatttaaagaaaaaaaaggcagtattccctttttaaatgagctttcaggaagttgctgagaaatggggtggaatagggaactgtaatggccactgaagcacgtgagagaccctcgcaaaatgatgtgaaaggaccagtttcttgaagtccagtgtttccacggctggatacctgtgtgtctccataaaagtcctgtcaccaaggacgttaaaggcattttattccagcgtcttctagagagcttagtgtatacagatgagggtgtccgctgctgctttccttcggaatccagtgcttccacagagattagcctgtagcttatatttgacattcttcactgtctgttgtttacctaccgtagctttttaccgttcacttccccttccaactatgtccagatgtgcaggctcctcctctctggactttctccaaaggcactgaccctcggcctctactttgtcccctcacctccaccccctcctgtcaccggccttgtgacattcactcagagaagaccacaccaagga

SEQ ID NO: 107043 - DNA, 542 bp, Homo sapiens
  Payload ID: 1016
  Gene Symbol: APLP2
  Gene Name: amyloid beta (A4) precursor-like protein 2
  ENST ID: ENST00000530132
  CDS Start-End: 85-192
agatgcttctgggtcgcggtgtgctaagcgaggagtccgagtgtgtgagcttgagagccgcgcgctagagcgacccggcgagggatggcggccaccgggaccgcggccgccgcagccacgggcaggctcctgcttctgctgctggtggggctcacggcgcctgccttggcgctggccggctacatcgagtagtacagtgagtagaagagtaatggttggccgaggccagtccctagtgtctccataccccctggaaataagtttcatggacttcctattttataatgggcaatcagaaaaaaaacacagggactgatgaagaacctgttcatttgagaatttcaggctcttgcagccaatgccggaacaggatttgctgttgctgagcctcaaatcgcaatgttttgtgggaagttaaatatgcatgtgaacattcagactgggaaatgggaacctgatccaacaggcaccaagagctgctttgaaacaaaagaagaagttcttcagtactgtcaggagatgtatccagagctacagatcac

SEQ ID NO: 107044 - DNA, 560 bp, Homo sapiens
  Payload ID: 1016
  Gene Symbol: APLP2
  Gene Name: amyloid beta (A4) precursor-like protein 2
  ENST ID: ENST00000533195
  CDS Start-End: 85-560
agatgcttctgggtcgcggtgtgctaagcgaggagtccgagtgtgtgagcttgagagccgcgcgctagagcgacccggcgagggatggcggccaccgggaccgcggccgccgcagccacgggcaggctcctgcttctgctgctggtggggctcacggcgcctgccttggcgctggccggctacatcgagtcttctcagatctgttgcagtccccggtctttcctgatcagcaccctcaaatgtctcattgtggatgagattaatgctcttgcagccaatgccggaacaggatttgctgttgctgagcctcaaatcgcaatgttttgtgggaagttaaatatgcatgtgaacattcagactgggaaatgggaacctgatccaacaggcaccaagagctgctttgaaacaaaagaagaagttcttcagtactgtcaggagatgtatccagagctacagatcacaaatgtgatggaggcaaaccagcgggttagtattgacaactggtgccggagggacaaaaagcaatgcaagagtcgctttgttacacctttcaagtgtct

SEQ ID NO: 107045 - DNA, 560 bp, Homo sapiens
  Payload ID: 1016
  Gene Symbol: APLP2
  Gene Name: amyloid beta (A4) precursor-like protein 2
  ENST ID: ENST00000533713
  CDS Start-End: 85-560
agatgcttctgggtcgcggtgtgctaagcgaggagtccgagtgtgtgagcttgagagccgcgcgctagagcgacccggcgagggatggcggccaccgggaccgcggccgccgcagccacgggcaggctcctgcttctgctgctggctcttgcagccaatgccggaacaggatttgctgttgctgagcctcaaatcgcaatgttttgtgggaagttaaatatgcatgtgaacattcagactgggaaatgggaacctgatccaacaggcaccaagagctgctttgaaacaaaagaagaagttcttcagtactgtcaggagatgtatccagagctacagatcacaaatgtgatggaggcaaaccagcgggttagtattgacaactggtgccggagggacaaaaagcaatgcaagagtcgctttgttacacctttcaagtgtctcgtgggtgaatttgtaagtgatgtcctgctagttccagaaaagtgccagtttttccacaaagagcggatggaggtgtgtgagaatcaccagcactggcacacggtagtcaaagaggtaag

SEQ ID NO: 107046 - DNA, 2041 bp, Homo sapiens
  Payload ID: 1016
  Gene Symbol: APLP2
  Gene Name: amyloid beta (A4) precursor-like protein 2
  ENST ID: ENST00000533616
  CDS Start-End: 142-261
aatatgaagtcagttccggttggtgtaaaacccccggggcggcggcgaactggctttagatgcttctgggtcgcggtgtgctaagcgaggagtccgagtgtgtgagcttgagagccgcgcgctagagcgacccggcgagggatggcggccaccgggaccgcggccgccgcagccacgggcaggctcctgcttctgctgctggtggggctcacggcgcctgccttggcgctggccggctacatcgagtgggtgaatttgtaagtgatgtcctgctagttccagaaaagtgccagtttttccacaaagagcggatggaggtgtgtgagaatcaccagcactggcacacggtagtcaaagaggcatgtctgactcagggaatgaccttatatagctacggcatgctgctcccatgtggggtagaccagttccatggcactgaatatgtgtgctgccctcagacaaagattattggatctgtgtcaaaagaagaggaagaggaagatgaagaggaagaggaagaggaagatgaagaggaagactatgatgtttataaaagtgaatttcctactgaagcagatctggaagacttcacagaagcagctgtggatgaggatgatgaggatgaggaagaaggggaggaagtggtggaggaccgagattactactatgacaccttcaaaggagatgactacaatgaggagaatcctactgaacccggcagcgacggcaccatgtcagacaaggaaattactcatgatgtcaaagttcctccaactcctctgccaaccaatgatgttgatgtgtatttcgagacctctgcagatgataatgagcatgctcgcttccagaaggctaaggagcagctggagattcggcaccgcaaccgaatggacagggtaaagaaggaatgggaagaggcagagcttcaagctaagaacctccccaaagcagagaggcagactctgattcagcacttccaagccatggttaaagctttagagaaggaagcagccagtgagaagcagcagctggtggagacccacctggcccgagtggaagctatgctgaatgaccgccgtcggatggctctggagaactacctggctgccttgcagtctgacccgccacggcctcatcgcattctccaggccttacggcgttatgtccgtgctgagaacaaagatcgcttacataccatccgtcattaccagcatgtgttggctgttgacccagaaaaggcggcccagatgaaatcccaggtgatgacacatctccacgtgattgaagaaaggaggaaccaaagcctctctctgctctacaaagtaccttatgtagcccaagaaattcaagaggaaattgatgagctccttcaggagcagcgtgcagatatggaccagttcactgcctcaatctcagagacccctgtggacgtccgggtgagctctgaggagagtgaggagatcccaccgttccaccccttccaccccttcccagccctacctgagaacgaagacactcagccggagttgtaccacccaatgaaaaaaggatctggagtgggagagcaggatgggggactgatcggtgccgaagagaaagtgattaacagtaagaataaagtggatgaaaacatggtcattgacgagactctggatgttaaggaaatgattttcaatgccgagagagttggaggcctcgaggaagagcgggaatccgtgggcccactgcgggaggacttcagtctgagtagcagtgctctcattggcctgctggtcatcgcagtggccattgccacggtcatcgtcatcagcctggtgatgctgaggaagaggcagtatggcaccatcagccacgggatcgtggaggttgatccaatgctcaccccagaagagcgtcacctgaacaagatgcagaaccatggctatgagaaccccacctacaaatacctggagcagatgcagatttaggtggcagggagcgcggcagccctggcggagggatgcaggtgggccggaagatcccacgattccgatcgactgcc

SEQ ID NO: 107047 - DNA, 556 bp, Homo sapiens
  Payload ID: 1016
  Gene Symbol: APLP2
  Gene Name: amyloid beta (A4) precursor-like protein 2
  ENST ID: ENST00000534582
  CDS Start-End: 85-435
agatgcttctgggtcgcggtgtgctaagcgaggagtccgagtgtgtgagcttgagagccgcgcgctagagcgacccggcgagggatggcggccaccgggaccgcggccgccgcagccacgggcaggctcctgcttctgctgctggtggggctcacggcgcctgccttggcgctggccggctacatcgaggctcttgcagccaatgccggaacaggatttgctgttgctgagcctcaaatcgcaatgttttgtgggaagttaaatatgcatgtgaacattcagactgggaaatgggaacctgatccaacaggcaccaagagctgctttgaaacaaaagaagaagttcttcagtactgtcaggagatgtatccagagctacagatcacaaatagcggatggaggtgtgtgagaatcaccagcactggcacacggtagtcaaagaggcatgtctgactcagggaatgaccttatatagctacggcatgctgctcccatgtggggtagaccagttccatggcactgaatatgtgtgctgccctcagacaaagattattgg

SEQ ID NO: 107048 - DNA, 2530 bp, Homo sapiens
  Payload ID: 1016
  Gene Symbol: APLP2
  Gene Name: amyloid beta (A4) precursor-like protein 2
  Uniprot ID: Q06481
  ENST ID: ENST00000528499
  CDS Start-End: 85-2172
agatgcttctgggtcgcggtgtgctaagcgaggagtccgagtgtgtgagcttgagagccgcgcgctagagcgacccggcgagggatggcggccaccgggaccgcggccgccgcagccacgggcaggctcctgcttctgctgctggtggggctcacggcgcctgccttggcgctggccggctacatcgaggctcttgcagccaatgccggaacaggatttgctgttgctgagcctcaaatcgcaatgttttgtgggaagttaaatatgcatgtgaacattcagactgggaaatgggaacctgatccaacaggcaccaagagctgctttgaaacaaaagaagaagttcttcagtactgtcaggagatgtatccagagctacagatcacaaatgtgatggaggcaaaccagcgggttagtattgacaactggtgccggagggacaaaaagcaatgcaagagtcgctttgttacacctttcaagtgtctcgtgggtgaatttgtaagtgatgtcctgctagttccagaaaagtgccagtttttccacaaagagcggatggaggtgtgtgagaatcaccagcactggcacacggtagtcaaagaggcatgtctgactcagggaatgaccttatatagctacggcatgctgctcccatgtggggtagaccagttccatggcactgaatatgtgtgctgccctcagacaaagattattggatctgtgtcaaaagaagaggaagaggaagatgaagaggaagaggaagaggaagatgaagaggaagactatgatgtttataaaagtgaatttcctactgaagcagatctggaagacttcacagaagcagctgtggatgaggatgatgaggatgaggaagaaggggaggaagtggtggaggaccgagattactactatgacaccttcaaaggagatgactacaatgaggagaatcctactgaacccggcagcgacggcaccatgtcagacaaggaaattactcatgatgtcaaagttcctccaactcctctgccaaccaatgatgttgatgtgtatttcgagacctctgcagatgataatgagcatgctcgcttccagaaggctaaggagcagctggagattcggcaccgcaaccgaatggacagggtaaagaaggaatgggaagaggcagagcttcaagctaagaacctccccaaagcagagaggcagactctgattcagcacttccaagccatggttaaagctttagagaaggaagcagccagtgagaagcagcagctggtggagacccacctggcccgagtggaagctatgctgaatgaccgccgtcggatggctctggagaactacctggctgccttgcagtctgacccgccacggcctcatcgcattctccaggccttacggcgttatgtccgtgctgagaacaaagatcgcttacataccatccgtcattaccagcatgtgttggctgttgacccagaaaaggcggcccagatgaaatcccaggtgatgacacatctccacgtgattgaagaaaggaggaaccaaagcctctctctgctctacaaagtaccttatgtagcccaagaaattcaagaggaaattgatgagctccttcaggagcagcgtgcagatatggaccagttcactgcctcaatctcagagacccctgtggacgtccgggtgagctctgaggagagtgaggagatcccaccgttccaccccttccaccccttcccagccctacctgagaacgaaggatctggagtgggagagcaggatgggggactgatcggtgccgaagagaaagtgattaacagtaagaataaagtggatgaaaacatggtcattgacgagactctggatgttaaggaaatgattttcaatgccgagagagttggaggcctcgaggaagagcgggaatccgtgggcccactgcgggaggacttcagtctgagtagcagtgctctcattggcctgctggtcatcgcagtggccattgccacggtcatcgtcatcagcctggtgatgctgaggaagaggcagtatggcaccatcagccacgggatcgtggaggttgatccaatgctcaccccagaagagcgtcacctgaacaagatgcagaaccatggctatgagaaccccacctacaaatacctggagcagatgcagatttaggtggcagggagcgcggcagccctggcggagggatgcaggtgggccggaagatcccacgattccgatcgactgccaagcagcagccgctgccaggggctgcgtctgacatcctgacctcctggactgtaggactatataaagtactactgtagaactgcaatttccattcttttaaatgggtgaaaaatggtaatataacaatatatgatatataaaccttaaatgaaaaaaatgatctattgcagatatttgatgtagttttcttttttaaattaatcagaaaccccacttccattgtattgtctgacacatgctctcaatatataataaatgggaaatgtcgattttcaataataga

SEQ ID NO: 107049 - DNA, 6478 bp, Homo sapiens
  Payload ID: 1017
  Gene Symbol: APPBP2
  Gene Name: amyloid beta precursor protein (cytoplasmic tail) binding protein 2
  Uniprot ID: Q92624
  ENST ID: ENST00000083182
  CDS Start-End: 289-2046
gagatcagcgctgggacggaacccgggttcctctcgaaccgggattgtgacgcttttggcctggctggccgctgttttctgtcccactttttactcgggcctgcgtccgctgccgccgtccctcagtttgcccccggaggaggcagggcggccgtgccttctgccgtgcgcccgcgtggctgccaccgcccctccgaatcctccggggccgcagaggggttcgctacggagggaggtgggggccttcgggaggaggaggcggaggaggcggaggaggagggaaggaagatggcggccgtggaactagagtggatcccagagactctctataacaccgccatctccgctgtcgtggacaactacatccgctcccgccgagacatccgctccttgcccgagaacatccagtttgatgtttactacaagctttaccaacagggacgcttatgtcaactgggcagtgaattttgtgaattggaagtttttgctaaagtactgagagctttggataaaagacatttgcttcatcattgttttcaggctttgatggatcatggtgttaaagttgcttcagtcttggcctactcattcagtaggcggtgctcttatatagcagaatcagatgctgcagtaaaggaaaaagccattcaggttggctttgttttaggtggctttctttcagatgcaggctggtacagtgatgctgagaaagtttttctgtcctgccttcagttgtgtactctacacgatgagatgcttcattggtttcgtgcagtagaatgttgtgtgaggttgcttcatgtgcgaaatggaaactgcaaatatcatttgggtgaagaaacatttaaattagctcagacatatatggataaactatcaaaacatggccagcaagcaaataaagctgcactctatggagaactgtgtgcactcctatttgcaaaaagtcactatgatgaggcatacaaatggtgcatcgaggcaatgaaagaaattacagcaggcttaccagtgaaagttgtggtggatgtcttaagacaagcttctaaggcttgtgtagtaaaacgtgaatttaagaaggcagaacagttaattaaacatgcagtgtatttggcacgggatcattttggatccaaacacccaaaatattctgatacactgctagattatgggttctacttactcaatgtagataatatctgtcagtctgttgcaatttatcaggcagcccttgacattagacagtcagtgtttggtggcaaaaatatccacgtagcaacagctcatgaagatttggcctactcttcttatgtccaccagtatagctctgggaaatttgacaatgcactatttcatgcagaaagagctattggtatcattacccacatcctacctgaagatcatcttcttttggcttcttcaaagagggtgaaagcacttattttagaggagattgcaattgattgtcataataaggaaactgaacagaggctgcttcaagaagctcatgatttgcacctgtcttcactccaactagctaaaaaagcttttggggaatttaatgtacagactgcaaaacactatggaaaccttggaagactttatcagtcaatgagaaaatttaaggaagctgaagaaatgcacatcaaagcaattcagattaaagaacaacttcttggtcaagaagattatgaagtagccctttcagtgggacatctggcttctttatataattatgacatgaatcagtatgaaaatgctgagaaactttatttgcgatctatagcaattgggaagaaactttttggtgagggctacagtggactagaatatgattatcgaggtctcattaaactttacaactccattggaaattacgagaaagtgtttgaatatcacaatgttctgtctaactggaaccggttgcgagatcggcaatattcagtgacagatgctcttgaagatgtcagcaccagcccccagtccactgaagaagtggtgcagtccttcctgatttctcagaatgtcgagggaccgagctgctgagggaggacctcagttaaccaattaccttttcccggattccagggaattcatactgtgaaatcaaaaccatgttgttttggggggctggaatttgcattgaaacactggtccagtccattgaagaccctattttgggtgatccctatcttgcagaatgtctgtaggaataagcatatattcagttatattcagcatgtaccgcatgtgtaagtagtctggcccacattttcaacctagtagaacaaacaacaggaaatcttttttttgttgtttttaaaaaattcattttgcagaaagcctgaaagaaaaaaaatacccctaaataaaactatttaagagtttaaaagagttgcattcttattatgtaaggatgattttaacaactttttaatatgtaattcttccatgtggaggtattcaatactgtagtgtaaagaaattttatgcggaaaatctttatatgcagtatagaaaagttaacacaagtactaataaaagagggacatcccgacttacgtttttctaccttgcccagataagtggatacaaccactctatattacaaggaaaggactgtcagattcatctgaactggaccagtgttgatctgtaatgtaatagaaaatctgatagaccagcacttctgacttttttttttttggtacaacaatgcaagatgctctgatagcatttgctaacaggaccaggaggatctaaaaaggaccagcctaatgtagaaggtggttacttggaccagaggctttagattattattttagatcctacatatacttttatcagtagaatgatttcatttagatgtataatgaaaaaggataatgcaaaaattatgtaatagataccaaattagggaagtttggcaatttcaatggcatatttttagtcaaggtacacagatggcagtgccataagcaagtctataaatatcggctgcagccatccccctcattttaaatgttgccctaataatcaatgcagttaacaagtatattggctgtgtgtcatgaaatagttcatgttcagatggaaatgttaggttactgtatggtttatggagattaatgaaaatgaatgcccaaaaataagtcttagaaaatcctccatttttatggtaaatagtaatacaactaggtcatttcatttgaaatctaggagtcaaatggaaagatcccctaataatacacctatttcactaacttgtctttctgtttattgggttttgatttgattttttgtaagccagtcaggttatttaatgatgaggtaataatcaaatttaagaatttgtgacatgtagcaattcaagaaacaaaaaggtattttgctgttacctcaattcttactgtagtagcccatctgatgcttctatagttaagaatctgggttccccccctattttcaggggttcatgacttggctgttaaagatgttgctcctagctaatgcttggagtagtctgtgggtgaatggatgtgtgttgaattttagttttcttttaacatgcatgttgggtgagaggggaaaaaaatctaagctgtctgccacattgagtacagaaaagttgtagatttcaaattttattaatattttaagcacttttttgaacttcccaaccttgtttgaagctgttatttgcagtcctattagttttgagccattgcatttaagttccctaggagggggttggttgggggatgtactgaaagagatgaagcaaacccacaccctaagatggtaactgtgtgatttagaaacctgagtttactcctcaaatcgaattattttctttttaaattttggaaagagtaaattgacgtacttgcagtttatgaagctgccccccacccctcagttaattgcagtctaatgtcaagaggcacttctttattaattaccaaatagtctttgtgaccaaggactaacatttttaagttactcagctctatcctcatgggcctatatatttaatacctccaaagatattttcaggataggctttgtatacttttattggttatttagaatccagtggtatgtttgtggtataggaatgtcatggtaaattgtttttcaataaatattttgaaacatgtttccatatgaagtttttttttcaatctgtattttttggttttgtgcacatacagcatttcctaggataaaaataaacaaatgacttacagcctcatcctccctaactccatttgaactcaacttagctcacactcagtgataaaacaacatggtatgtagaagcctaggatcacagggtgataatgtcaattggcagccagttgtgtttttttgaaacatcattattggcagtttctccttatcaccactgctttaatgtagtttttttgtaaatccatatactttaatgcatacactctagcttaagaaaacattgccattttggttagggatatgacttaatgtgctattatttctggttctaatgaagaataataccctatgactttaagtgtaagattcatcctttaagtagggatgtttaggataagttagatgtgtgccactatgatttattgggtttcttaaaaatcttgaagaaaataataaaatttatctcacaataagttaacttgcgcaaactttttacatatggtgaggtgcgtaaggaagccctggccaacttaaagatttttctggaggttcagcaaagttatgttaaattaggggcctttggtctcatccttctctgactcttctacccagtcttttcctaaagttcggtgctactccagttgggtgcatcagggagctccgtcagcactcgcatgtgtcgctcaggtggccactcatgcctgcattccatttaatagagtcaattggaatttttagagcataatctttatggatcctcaaagctgactttgccaaagggattgagacccttactaccatcaaatctctgtctctgcttggttaaaaattggctcactattgctttgtagtaacccctgcccaggtattttttcacttgtgaaaataatttgagaaagacctttgttcctagcctgttgggaaaagtttataattttatgaaaattaagtacagaggctgcgatcttagaaataatgaaggtgccatttggctgctccttaatagtgcagacagaaaactgcagtgaacacatgccaaaacatgattgaagcctttggctgaaactttatacatagaaataatgatttgctcataacaggtatcattaactgccactttttatgttttccctagaatttgtagccttgctgcttgcttttcttctgggtggcaaagttactactggaaaaacactataagtacaaagtttttggggttttatctttgctttagaagtggatgtgtacttcacctcttggctgtggaggaacttagttgccaggaaattttttttttttttttcagacggagtttcgctcttgttgcccaggctgggagggcaatggcaccgtcttggctcactgcaacctccgcctcccgggttccagcgattctcctgcctcagccttccgagtagctgggattacaggctcctgccaccacgcctggctaggaaattttttgttgttaatatgacatttggattaatctccagcttcaacagtacttcttttgtccataaatctcaggaatgttttaggcagaaaactggttttaccctgttgataatcagaaggagtgtgctttaggatttattgcataatactattctttaattgcaatcctaggtatctatagcatgagtggccttagtgagtttgttgaagtgcacatgtttttcaagagtaaaatttaagattaaaaatatatcctatatatagatatctagaaaacttggtttgtggtgcacagttaagtgttggatcactaaataaccattgcaggtaccgtttgtgtaacattactcatttctgtatattccttttatgggaagatattttgccatggtaactaaaacttttcagttctacttttatgatgtgaatgaatgctacgttttattaaatattaccaggtcagtactatttttatactttattaagcaacaggggattttagtttaataggctcaaaataaaaagttcttaatggaacagttaaaaacaaaacactaacaatctttacgtgaaaatccccactaatagtgccacaataatttctatagaaatatctaaggtcattaaatagatttttgaagacggttcttcattgtgtcaggatgacctttcatatcattctcaccaacttgtagtgcccaccgttatttgtaactattaaaccatactaagtatgtttgtaaccagcattgtgatatattctgtacttgtattgctaaaaatgaattattgacctaataaatatagtgttcctgcattcatagtg

SEQ ID NO: 107050 - DNA, 447 bp, Homo sapiens
  Payload ID: 1017
  Gene Symbol: APPBP2
  Gene Name: amyloid beta precursor protein (cytoplasmic tail) binding protein 2
  ENST ID: ENST00000585368
  CDS Start-End: 77-447
gggcctgcgtccgctgccgccgtccctcagtttgcccccggaggaggcggaggaggcggaggaggagggaaggaagatggcggccgtggaactagagtggatcccagagactctctataacaccgccatctccgctgtcgtggacaactacatccgctcccgccgagacatccgctccttgcccgagaacatccagtttgatgtttactacaagctttaccaacagggacgcttatgtcaactgggcagtgaattttgtgaattggaagtttttgctaaagtactgagagctttggataaaagacatttgcttcatcattgttttcaggctttgatggatcatggtgttaaagttgcttcagtcttggcctactcattcagtaggcggtgctcttatatagcagaatcagatgctgcagtaaaggaaaaagccattcaggttggctt

SEQ ID NO: 107051 - DNA, 525 bp, Homo sapiens
  Payload ID: 1017
  Gene Symbol: APPBP2
  Gene Name: amyloid beta precursor protein (cytoplasmic tail) binding protein 2
  ENST ID: ENST00000588668
  CDS Start-End: 8-295
aaggaagatggcggccgtggaactagagtggatcccagagactctctataacaccgccatctccgctgtcgtggacaactacatccgctcccgccgagacatccgctccttgcccgagaacatccagtttgatgtttactacaagctttaccaacagggacgcttatgtcaactgggcagtgaattttgtgaattggaagtttttgctaaagtactgagagctttggataaaaggttatctttcaccaagtccaaatcctttgacatttgcttcatcattgttttcaggctttgatggatcatggtgttaaagttgcttcagtcttggcctactcattcagtaggcggtgctcttatatagcagaatcagatgctgcagtaaaggaaaaagccattcaggttggctttgttttaggtggctttctttcagatgcaggctggtacagtgatgctgagaaagtttttctgtcctgccttcagttgtgtactctacacgatgagatgcttcattggtttcgtgcagta

SEQ ID NO: 107052 - DNA, 1705 bp, Homo sapiens
  Payload ID: 1017
  Gene Symbol: APPBP2
  Gene Name: amyloid beta precursor protein (cytoplasmic tail) binding protein 2
  ENST ID: ENST00000589341
  CDS Start-End: 202-387
tttttactcgggcctgcgtccgctgccgccgtccctcagtttgcccccggaggaggcagggcggccgtgccttctgccgtgcgcccgcgtggctgccaccgcccctccgaatcctccggggccgcagaggggttcgctacggagggaggtgggggccttcgggaggaggaggcggaggaggcggaggaggagggaaggaagatggcggccgtggaactagagtggatcccagagactctctataacaccgccatctccgctgtcgtggacaactacatccgctcccgccgagacatccgctccttgcccgagaacatccagtttgatgtttactacaagacatttgcttcatcattgttttcaggctttgatggatcatggtgttaaagttgcttcagtcttggcctactcattcagtaggcggtgctcttatatagcagaatcagatgctgcagtaaaggaaaaagccattcaggttggctttgttttaggtggctttctttcagatgcaggctggtacagtgatgctgagaaagtttttctgtcctgccttcagttgtgtactctacacgatgagatgcttcattggtttcgtgcagtagaatgttgtgtgaggttgcttcatgtgcgaaatggaaactgcaaatatcatttgggtgaagaaacatttaaattagctcagacatatatggataaactatcaaaacatggccagcaagcaaataaagctgcactctatggagaactgtgtgcactcctatttgcaaaaagtcactatgatgaggcatacaaatggtgcatcgaggcaatgaaagaaattacagcaggcttaccagtgaaagttgtggtggatgtcttaagacaagcttctaaggcttgtgtagtaaaacgtgaatttaagaaggcagaacagttaattaaacatgcagtgtatttggcacgggatcattttggatccaaacacccaaaatattctgatacactgctagattatgggttctacttactcaatgtagataatatctgtcagtctgttgcaatttatcaggcagcccttgacattagacagtcagtgtttggtggcaaaaatatccacgtagcaacagctcatgaagatttggcctactcttcttatgtccaccagtatagctctgggaaatttgacaatgcactatttcatgcagaaagagctattggtatcattacccacatcctacctgaagatcatcttcttttggcttcttcaaagagggtgaaagcacttattttagaggagattgcaattgattgtcataataaggaaactgaacagaggctgcttcaagaagctcatgatttgcacctgtcttcactccaactagctaaaaaagcttttggggaatttaatgtacagactgcaaaacactatggaaaccttggaagactttatcagtcaatgagaaaatttaaggaagctgaagaaatgcacatcaaagcaattcagattaaagaacaacttcttggtcaagaagattatgaagtagccctttcagtgggacatctggcttctttatataattatgacatgaatcagtatgaaaatgctgagaaactttatttgcgatctatagcaattgggaagaaactttttggtgagggctacagtggactagaatatgattatcgaggtctcattaaactttacaactccattggaaattacgag

SEQ ID NO: 107053 - DNA, 926 bp, Homo sapiens
  Payload ID: 1018
  Gene Symbol: APCS
  Gene Name: amyloid P component, serum
  Uniprot ID: P02743
  ENST ID: ENST00000255040
  CDS Start-End: 98-769
agggcatgaatatcagacgctagggggacagccactgtgttgtctgctaccctcatcctggtcactgcttctgctataacagccctaggccaggaatatgaacaagccgctgctttggatctctgtcctcaccagcctcctggaagcctttgctcacacagacctcagtgggaaggtgtttgtatttcctagagaatctgttactgatcatgtaaacttgatcacaccgctggagaagcctctacagaactttaccttgtgttttcgagcctatagtgatctctctcgtgcctacagcctcttctcctacaatacccaaggcagggataatgagctactagtttataaagaaagagttggagagtatagtctatacattggaagacacaaagttacatccaaagttatcgaaaagttcccggctccagtgcacatctgtgtgagctgggagtcctcatcaggtattgctgaattttggatcaatgggacacctttggtgaaaaagggtctgcgacagggttactttgtagaagctcagcccaagattgtcctggggcaggaacaggattcctatgggggcaagtttgataggagccagtcctttgtgggagagattggggatttgtacatgtgggactctgtgctgcccccagaaaatatcctgtctgcctatcagggtacccctctccctgccaatatcctggactggcaggctctgaactatgaaatcagaggatatgtcatcatcaaacccttggtgtgggtctgaggtcttgactcaacgagagcacttgaaaatgaaatgactgtctaagagatctggtcaaagcaactggatactagatcttacatctgcagctctttcttctttgaatttcctatctgtatgtctgcctaattaaaaaaatatatattgtattatgcta

SEQ ID NO: 107054 - DNA, 6644 bp, Homo sapiens
  Payload ID: 1019
  Gene Symbol: ALS2
  Gene Name: amyotrophic lateral sclerosis 2 (juvenile)
  Uniprot ID: Q96Q42
  ENST ID: ENST00000264276
  CDS Start-End: 374-5347
aagcgcatctcaggactgatagctccgccctaaactaagggagagactgtgctcccaagtacgtagcctgcagtgcctaacgcattctcagcaattttgacccccaacagacgccgtcgacagtctcccaagaacaattcccaggagctcggattccaagagccgcccgcgccctcgtttaccttcgctagtcgccctgcagccccgccctgtccggaggccccgccctccatgaatcagctgatcccgcggacccactgggttgccaagctcgcgccggatgcggagcgcggtgctgccggtggagcttcaggtcttgatagactttctgtaaagaaggaatgatttggtgatggagtgttcccactgaccgatggactcaaagaagagaagctcaacagaggcagaaggatccaaggaaagaggcctggtccatatctggcaggcaggatcctttcccataacaccagagagattgccaggctggggaggaaagactgttttgcaggcagccctcggagtgaaacatggagttcttctgactgaagatggtgaggtctacagctttgggactcttccctggagaagtggaccagtggagatttgtccaagtagccccattctagaaaatgccctggttgggcaatatgttattactgtggcaacaggaagcttccatagtggagcagtgacagacaatggtgtcgcgtacatgtggggagagaattctgctggccagtgtgcagtagccaaccagcagtatgtgccggaaccaaatcctgtcagcattgctgattctgaggccagccctttgttagcagtcaggattttacagttggcgtgtggcgaggagcacactctggcattgtcaataagcagagagatttgggcatggggtaccggttgtcagttgggtctcattaccactgccttcccagtgacaaagccgcaaaaggtagaacatcttgctgggcgagtggtgcttcaagttgcctgtggtgctttccacagcttagcccttgtacaatgcctcccttcccaggatctgaagccagtcccagaacgatgcaaccagtgcagccagctcttgattactatgactgacaaagaagaccatgtgattatatcagacagtcattgttgcccattaggtgtgacactgacagaatctcaggcagaaaaccatgccagcactgctctcagcccctccactgaaacccttgacaggcaggaagaagtatttgagaacactcttgtagcaaatgatcagtctgttgctactgaactgaatgcagtaagtgctcagatcacaagcagcgatgccatgtcctctcaacaaaatgtcatgggaacaactgaaatttcctctgccagaaacataccatcataccctgacacccaagcagtcaatgaatacctacggaaactgtcagatcattcagtaagagaggactcagagcatggtgaaaagccagtgccatctcagcctcttttagaagaagcaattcctaatctccacagcccgcctaccacaagcacctcagccctaaacagcctggtggtctcttgtgcatctgctgttggtgtgagagtggctgctacttatgaagctggtgccttgtcactgaagaaagttatgaacttttatagtacaaccccttgtgaaactggagctcaggcaggcagtagtgccattggccccgaaggtttgaaagatagcagggaagaacaggttaaacaggaatcaatgcaaggaaagaaaagttcaagtcttgtggatatcagagaagaagaaacagagggaggcagtcgaagactctccctccctggattgttgtcacaagtttcccccaggctcttaagaaaggctgcacgggtgaaaacgaggacagtggttctgacccccacatacagtggagaagcagatgcgctcctgccttctctgagaacagaagtgtggacctgggggaaagggaaggaagggcagctggggcacggcgatgttctgcctaggcttcaaccgttgtgtgtaaaatgtctggatggcaaagaagtaatccatctggaggcaggtggttaccattctcttgcacttactgcgaaatcccaggtttactcatggggtagcaatacctttggtcaacttgggcattccgattttccaacaacagttcctcgtcttgcaaagataagcagtgaaaatggagtctggagcatagctgcaggcagggattattccctgtttttagtggatacagaagacttccagcctgggttatattacagtggccgacaggaccctacagaaggtgacaaccttccagagaatcacagtggttctaagactccagtacttctctcctgtagtaagcttggatatataagcagagtgacagcaggaaaagatagctatttagccttggtggataaaaacattatggggtatattgccagtctccacgagttagctactacagaaagacgattctattcaaaactaagtgatatcaaatctcagattctcaggcctcttctcagtttagaaaatttgggcactacaactacagtccagctgttgcaggaggtggctagccgattcagcaagctgtgttacctcattggtcagcatggagcctcattgagcagcttccttcatggggtaaaggaagccaggagtttggtcatcctgaagcattcaagtctcttcttggatagttatacagagtattgcacatctattacaaatttcctggttatgggaggattccagcttcttgctaagcctgccattgatttcctaaataaaaaccaagagctgttgcaagatttgtcagaagtgaatgacgaaaacactcagttgatggaaatactgaatactttgtttttcttgccaatcagacgacttcataattacgcaaaagttttgctaaagcttgctacttgttttgaagtggcatctccagaatatcagaaactgcaggattccagttcttgttatgagtgtcttgctctccatctcggcaggaaaaggaaggaagcagaatacacactgggcttctggaagaccttccccggaaaaatgacggattccttgaggaagccagagcgtcgactgctgtgtgagagtagtaaccgagccctgtctctgcagcatgctgggaggttttccgtgaattggttcattctctttaatgatgccctggtccatgcccagttctccacgcaccatgttttccctctggccacgctgtgggcagagccactgtctgaagaagctggtggtgtgaatggcttaaagataactacacctgaggagcagttcactctcatttcatctacaccccaggaaaagacaaagtggctacgagctataagccaagccgtagatcaggctttgagagggatgtctgatctccccccttatggaagtggtagcagtgttcagagacaggaaccacccatttcacgcagtgccaaatatactttctacaaggatcctcgcctaaaggatgccacctatgatggacgctggctttcagggaagcctcatggcagaggggttttgaagtggcctgatggaaagatgtattctggcatgttcaggaatggcttggaagatgggtatggagaatacagaatcccaaacaaggcaatgaacaaagaagaccattatgtgggccattggaaagaaggaaaaatgtgcggtcaaggagtctacagctatgcttctggtgaagtatttgagggctgttttcaagataatatgcgtcatggtcatggtcttctacgaagtgggaaattgacgtcctcttctcctagtatgttcattggccagtgggtaatggataagaaagcaggatatggtgtctttgatgatatcactaggggggaaaagtatatgggaatgtggcaagatgatgtgtgtcaagggaatggtgtggtggttacccagtttggattatactacgagggcaactttcaccttaataaaatgatgggaaatggggttttgctttccgaagatgatactatctatgaaggagaattttcagatgactggactcttagtggaaagggaacactgactatgccaaatggagactacattgaaggttattttagtggagaatggggatctgggataaaaatcactggaacctacttcaaacctagtctatatgagagtgataaagacagacctaaagttttcaggaagctaggaaacctggcagtgccagctgatgagaagtggaaagcggtgtttgacgaatgttggcgccaactgggctgtgagggcccaggccaaggggaagtttggaaagcatgggacaatattgctgtggccttgaccaccagtcggcgccagcacagagacagtccagaaatactgagtcgttcacagactcagacactagagagtttggaattcattccacagcatgttggtgccttctctgtggagaaatatgatgacatcaggaaatatttaataaaggcctgtgacactcctctgcaccccctgggcaggcttgtggagacactggttgcagtgtatagaatgacatacgtgggcgtaggagccaaccgcaggttattgcaggaggctgtaaaggagattaagtcctatcttaagcgaattttccagctggtgaggttcttatttcctgagctgcctgaagaaggcagcacaattcctctctctgctcctctgccaaccgaaaggaagtctttttgcactgggaagtcagattcccgatctgaatcaccagagccaggttatgtagtaacgagttctggattattgcttcctgtgctgctacctcggctctacccaccgctgtttatgctttatgctttggataatgatcgcgaggaagacatttactgggaatgtgtccttcgactaaataagcagccagatattgctctcctgggctttcttggggtgcagaggaaattttggccagcaaccttgtcaatccttggagagagtaaaaaggttttgccaaccacgaaagatgcttgttttgcctcagcagtagaatgtctgcagcagatcagcacaacatttaccccatcagacaaacttaaggtcatccagcagacttttgaggagatctctcagagtgtcctggcgtcactccacgaagacttcttgtggtccatggatgacttgtttcctgttttcttatatgtggtgctacgggccaggattaggaatttaggctctgaggtacacctcattgaggatctaatggacccctatcttcagcatggggaacagggtataatgttcaccaccttgaaggcatgttactaccagattcagcgtgagaagcttaactaggctgcataacagcttgaaaactggattatctactacagagtgttataacaccatctggagtcttcctgtagtggcaaaaaagaacagtgttgaaattggaaaggactttgtgttatttaggttgttagaatgagccttaccaataataagagccctgagcccagaaaaaaggactgtatagtttaaagggaggattgaaagggaggtaaaaaatcagattagaccagttcttggcctatgataagttccaaaaataccatttatctactatttgaaaaaagaagaggatatcccttcctacagtaaagggtatgtcagctacatgaagttgtaagaaaagcttccagtagagcttcttatattaaagaagttgatggatatttttgaatttctggtttgcctgaatccacctgcagttaccccgatccgtttgcaagaaccagatcgtacttgaaactatagtggccacactctgccttcctgagtcccttccagtcatgtgtgcatcatgtctctttgccaagggaggggagaaaggaacttttaaactgcagttttaactttttctaagctgtttcttgatgggagaggttctgtgcaaaactaccacattctgtccccaaaatgtggaatgcatccaaataggagtcttctgcctcttaacttaaaagaacataggaattttgtttttggtttctttatcatgctacagagagtgaatacactggaattcagacaccgactctgagctgctaggaacctcatttgtccatgtgcaaacgctgtattccaaggcctgtgaatggcagcctgaggaagttttgcatgcaggctgtgttttcgagcaggactaacaactgggaaataagcaaaaaactgcatcgatccccagcctggtgttgttcttccctatacttcacactgaactcaggatgggaagaaaaaggaaacaagctttggctttttccatctcaaaagtattgtggcacctcaacatttcagtgttttgctttttaaaaaatgccctattgtaagttgttggtttatactgtataagtaacactagtagctgttttgaataacataggtgctcttcctcatctcatctcctacaccgtggtgagcatacagagtgtcctgatttgtgttaagtgactgagaagatgttaattacttttgaaaaaggatcatggtttttgctctactttataatcaagacaagtgtttattaaaatactgttttggaatgttggctgtaatgtaacagcaattttcataataaaaggcattcatcttt

SEQ ID NO: 107055 - DNA, 571 bp, Homo sapiens
  Payload ID: 1019
  Gene Symbol: ALS2
  Gene Name: amyotrophic lateral sclerosis 2 (juvenile)
  ENST ID: ENST00000409632
  CDS Start-End: 154-571
aagctcgcgccggatgcggagcgcggtgctgccggtggagcttcagcttatgtcttgatgtttgcctgcatgtagctgaactgattgatccaggtcttgatagactttctgtaaagaaggaatgatttggtgatggagtgttcccactgaccgatggactcaaagaagagaagctcaacagaggcagaaggatccaaggaaagaggcctggtccatatctggcaggcaggatcctttcccataacaccagagagattgccaggctggggaggaaagactgttttgcaggcagccctcggagtgaaacatggagttcttctgactgaagatggtgaggtctacagctttgggactcttccctggagaagtggaccagtggagatttgtccaagtagccccattctagaaaatgccctggttgggcaatatgttattactgtggcaacaggaagcttccatagtggagcagtgacagacaatggtgtcgcgtacatgtggggagagaattctgctggccagtgtgcagtagccaaccagcagtatgtgccggaaccaaatcctgtcagcattg

SEQ ID NO: 107056 - DNA, 559 bp, Homo sapiens
  Payload ID: 1019
  Gene Symbol: ALS2
  Gene Name: amyotrophic lateral sclerosis 2 (juvenile)
  ENST ID: ENST00000410052
  CDS Start-End: 241-559
agctgatcccgcggacccactgggttgccaagctcgcgccggatgcggagcgcggtgctgccggtggagcttcaggatggagaaggaactgactgctgtacccaagtgaagatctttactcagttacccttatatttggctatatggaataaaattgtgtgatatgtttattctgagcaggtcttgatagactttctgtaaagaaggaatgatttggtgatggagtgttcccactgaccgatggactcaaagaagagaagctcaacagaggcagaaggatccaaggaaagaggcctggtccatatctggcaggcaggatcctttcccataacaccagagagattgccaggctggggaggaaagactgttttgcaggcagccctcggagtgaaacatggagttcttctgactgaagatggtgaggtctacagctttgggactcttccctggagaagtggaccagtggagatttgtccaagtagccccattctagaaaatgccctggttgggcaatatgttattactgtggcaacaggaagcttccatagtggagcagtga

SEQ ID NO: 107057 - DNA, 3242 bp, Homo sapiens
  Payload ID: 1019
  Gene Symbol: ALS2
  Gene Name: amyotrophic lateral sclerosis 2 (juvenile)
  ENST ID: ENST00000439495
  CDS Start-End: 1-1756
tttagccttggtggataaaaacattatggggtatattgccagtctccacgagttagctactacagaaagacgattctattcaaaactaagtgatatcaaatctcagattctcaggcctcttctcagtttagaaaatttgggcactacaactacagtccagctgttgcaggaggtggctagccgattcagcaagctgtgttacctcattggtcagcatggagcctcattgagcagcttccttcatggggtaaaggaagccaggagtttggtcatcctgaagcattcaagtctcttcttggatagttatacagagtattgcacatctattacaaatttcctggttatgggaggattccagcttcttgctaagcctgccattgatttcctaaataaaaaccaagagctgttgcaagatttgtcagaagtgaatgacgaaaacactcagttgatggaaatactgaatactttgtttttcttgccaatcagacgacttcataattacgcaaaagttttgctaaagcttgctacttgttttgaagtggcatctccagaatatcagaaactgcaggattccagttcttgttatgagtgtcttgctctccatctcggcaggaaaaggaaggaagcagaatacacactgggcttctggaagaccttccccggaaaaatgacggattccttgaggaagccagagcgtcgactgctgtgtgagagtagtaaccgagccctgtctctgcagcatgctgggaggttttccgtgaattggttcattctctttaatgatgccctggtccatgcccagttctccacgcaccatgttttccctctggccacgctgtgggcagagccactgtctgaagaagctggtggtgtgaatggcttaaagataactacacctgaggagcagttcactctcatttcatctacaccccaggaaaagacaaagtggctacgagctataagccaagccgtagatcaggctttgagagggatgtctgatctccccccttatggaagtggtagcagtgttcagagacaggaaccacccatttcacgcagtgccaaatatactttctacaaggatcctcgcctaaaggatgccacctatgatggacgctggctttcagggaagcctcatggcagaggggttttgaagtggcctgatggaaagatgtattctggcatgttcaggaatggcttggaagatgggtatggagaatacagaatcccaaacaaggcaatgaacaaagaagaccattatgtgggccattggaaagaaggaaaaatgtgcggtcaaggagtctacagctatgcttctggtgaagtatttgagggctgttttcaagataatatgcgtcatggtcatggtcttctacgaagtgggaaattgacgtcctcttctcctagtatgttcattggccagtgggtaatggataagaaagcaggatatggtgtctttgatgatatcactaggggggaaaagtatatgggaatgtggcaagatgatgtgtgtcaagggaatggtgtggtggttacccagtttggattatactacgagggcaactttcaccttaataaaatgatgggaaatggggttttgctttccgaagatgatactatctatgaaggagaattttcagatgactggactcttagtggaaaggataattctggcctcatagaacaagttgggaagtgttccctcctcccctattttctgaaagtttgcgaagctttggtattatttcttctttgaatgtttgggagaattcaccaatgaagtcttctgggcctaagcattactttggaacactgactatgccaaatggagactacattgaaggttattttagtggagaatggggatctgggataaaaatcactggaacctacttcaaacctagtctatatgagagtgataaagacagacctaaagttttcaggaagctaggaaacctggcagtgccagctgatgagaagtggaaagcggtgtttgacgaatgttggcgccaactgggctgtgagggcccaggccaaggggaagtttggaaagcatgggacaatattgctgtggccttgaccaccagtcggcgccagcacagagacagtccagaaatactgagtcgttcacagactcagacactagagagtttggaattcattccacagcatgttggtgccttctctgtggagaaatatgatgacatcaggaaatatttaataaaggcctgtgacactcctctgcaccccctgggcaggcttgtggagacactggttgcagtgtatagaatgacatacgtgggcgtaggagccaaccgcaggttattgcaggaggctgtaaaggagattaagtcctatcttaagcgaattttccagctggtgaggttcttatttcctgagctgcctgaagaaggcagcacaattcctctctctgctcctctgccaaccgaaaggaagtctttttgcactgggaagtcagattcccgatctgaatcaccagagccaggttatgtagtaacgagttctggattattgcttcctgtgctgctacctcggctctacccaccgctgtttatgctttatgctttggataatgatcgcgaggaagacatttactgggaatgtgtccttcgactaaataagcagccagatattgctctcctgggctttcttggggtgcagaggaaattttggccagcaaccttgtcaatccttggagagagtaaaaaggttttgccaaccacgaaagatgcttgttttgcctcagcagtagaatgtctgcagcagatcagcacaacatttaccccatcagacaaacttaaggtcatccagcagacttttgaggagatctctcagagtgtcctggcgtcactccacgaagacttcttgtggtccatggatgacttgtttcctgttttcttatatgtggtgctacgggccaggattaggaatttaggctctgaggtacacctcattgaggatctaatggacccctatcttcagcatggggaacagggtataatgttcaccaccttgaaggcatgttactaccagattcagcgtgagaagcttaactaggctgcataacagcttgaaaactggattatctactacagagtgttataacaccatctggagtcttcctgtagtggcaaaaaagaacagtgttgaaattggaaaggactttgtgttatttaggttgttagaatgagccttaccaataataagagccctgagcccag

SEQ ID NO: 107058 - DNA, 2677 bp, Homo sapiens
  Payload ID: 1019
  Gene Symbol: ALS2
  Gene Name: amyotrophic lateral sclerosis 2 (juvenile)
  Uniprot ID: Q96Q42
  ENST ID: ENST00000467448
  CDS Start-End: 141-1331
gaatcagctgatcccgcggacccactgggttgccaagctcgcgccggatgcggagcgcggtgctgccggtggagcttcaggtcttgatagactttctgtaaagaaggaatgatttggtgatggagtgttcccactgaccgatggactcaaagaagagaagctcaacagaggcagaaggatccaaggaaagaggcctggtccatatctggcaggcaggatcctttcccataacaccagagagattgccaggctggggaggaaagactgttttgcaggcagccctcggagtgaaacatggagttcttctgactgaagatggtgaggtctacagctttgggactcttccctggagaagtggaccagtggagatttgtccaagtagccccattctagaaaatgccctggttgggcaatatgttattactgtggcaacaggaagcttccatagtggagcagtgacagacaatggtgtcgcgtacatgtggggagagaattctgctggccagtgtgcagtagccaaccagcagtatgtgccggaaccaaatcctgtcagcattgctgattctgaggccagccctttgttagcagtcaggattttacagttggcgtgtggcgaggagcacactctggcattgtcaataagcagagagatttgggcatggggtaccggttgtcagttgggtctcattaccactgccttcccagtgacaaagccgcaaaaggtagaacatcttgctgggcgagtggtgcttcaagttgcctgtggtgctttccacagcttagcccttgtacaatgcctcccttcccaggatctgaagccagtcccagaacgatgcaaccagtgcagccagctcttgattactatgactgacaaagaagaccatgtgattatatcagacagtcattgttgcccattaggtgtgacactgacagaatctcaggcagaaaaccatgccagcactgctctcagcccctccactgaaacccttgacaggcaggaagaagtatttgagaacactcttgtagcaaatgatcagtctgttgctactgaactgaatgcagtaagtgctcagatcacaagcagcgatgccatgtcctctcaacaaaatgtcatgggaacaactgaaatttcctctgccagaaacataccatcataccctgacacccaagcagtcaatgaatacctacggaaactgtcagatcattcagtaagagaggactcagagcatggtgaaaagccagtgccatctcaggtacctgctcaattttataaaataaaagtgtgtctagagttgaactgtatgggcttttctttagaaactttaaaatgagtaaggcttggtagcattttttattttttgagtttgattataattttgttttatcaggcaagcctagataaaggaaagaacctggattaattcaaaatcactctttatgtttgttctggccctttatgatattgaaaggtgtcatgttgggcttgttttataagtaggagcatttcatttttttttcttgctagtactttttttctatggctaaagtactgaattttggtgggccctgaatagtttaatataactagagattcacaaagattcttcttacttgtgtttgtaacactcttcagaattctgtagagaaaagtcttttccttctttaacagggaagattgttttgtggcagatccttcaattgtaggcagatttaaaacttacaggcaattacatgtttcagtttttttcaattatagctgtggtccttactgggcttaatttgaagaggtggctaatattttatctttttgtttgtttgtttttgagatggggtcttgctctgtcacccaggctggagtgcagtaatgcgattgtggctcactgcagcctcgatctcccaggttcaagcgatcctcccatttcagccttccaagtagctgggactatacacatgccaccacacctgctgattttatttttaagtagagtagagcctgttgcccaggctcatctcaaactcctgagctcaagcaatcctcccacctcagcctcccaaagtgttgagattacaggcatgagccatcatgcccagcctattttatatatcttattaaaactattttcattttgaagatttgtggtagaatgaacaaaagttgtttatcagtagcacatggtaaagtttgagttcccgcttaaactaaattgttttaaaaggattatttctgtgttttactcttagtgtggccttttgattttgctttaccaaaactgtaagaaaacaaaacaaaagatcatactcataaaagatctgtcctgcagtgtttctttttaggtttttgaaaccacatagcctcttgattctcaattcttattgtttactctgtcagaatgtgaacatgaaggtatttttagaaatagtctttatttcacaatctattcactgaaacttgtgggtatttgaatttttaaaaaaatcaaggataagctgtttggagaaaggtattataaagtctgaacaaagcaaaagtagtagtttaacaagaatgcatgtagaaaattcttagactgtacatgcttatcacattttacttactttgttaaacattggaagtttttgttacttatgctagtaacaatgtgtgtgtttctattgaattaaatttaatttatttaaa

SEQ ID NO: 107059 - DNA, 2104 bp, Homo sapiens
  Payload ID: 1020
  Gene Symbol: ALS2CR11
  Gene Name: amyotrophic lateral sclerosis 2 (juvenile) chromosome region, candidate 11
  Uniprot ID: Q53TS8
  ENST ID: ENST00000286195
  CDS Start-End: 46-1917
agcgggccgtcggttgggcgcagacaggccgcagaagatggagagatggagccaccccaagagacaaataggcctttcagcacacttgataaccgcagcgggcaggtccaagtcctgtccgccaccccgctattgcagaggaatccctacagcagcccggatatcatgcacattaaagggtcggaggcttcttcggtcccttacgccctgaaccagggcacgacggccctgcctaagaacaagaaccaggagggcaccgggcaccggctgctgaacatgctgagaaaaactcttaaagagtctgatagtgaagaactggaaataacacaggagacgccaaatttggtgccatttggggatgtggttggctgcctgggcattcatataaagaactgcagacattttatgcctaagatcagtttacaacattatgctaatttattcattcgcatctctataaacaaagctgtgaaatgtacaaaaatgtgtagcttgctatccaaaaacgatgagaagaacactgtaattaagttcgatgaagtgaagtatttttctgtacaggttcccagacgttatgatgataagcggaataatattttattggaactcatacaatatgacaatagagaaaaacgtgctttcttgttagggagtgttcagatacatctttatgaggtaattcagaaagggtgcttcattgaagaggtccaagtgttgcatggaaacatatttgtctgcaggctggaggtggaatttatgttctcctatggaaactttggttatggattttcacatcagttaaaacctcttcagaaaattactgagccatccatgtttatgaatcttgcaccacctccagaaagaacagatcccgtgacaaaagttattacaccacagacagtagaatatccagcattcttatccccagacctgaatgttactgttgggactccagctgtgcaatcctccaaccagccatctgtagtgcgacttgaaaaacttcagcaacaaccccgggaaaggctggaaaagatgaaaaaagaatatagaaatctgaatacatggatagataaagctaactatttagaaagcattctaatgccaaaattggaacataaggattctgaggaaactaatatagatgaggcatctgaaaacacgaaaagtaatcatcctgaagaggagcttgaaaatattgtaggagtagatatccctcttgtaaatgaggaagctgaaactactgcaaatgagttactggataatgattctgagaaaggcctgactataccaactttgaaccaatcggaccaagataattcaactgctgatgcttctaaaaatgatgaatcaacaccttcacccacagaagtgcactcattgtgcactatttctaaccaggaaacaataaaagcaggcagaataccacctttaggtgaacgtcaatcagaaagcatgccagacagaaaaatgaaaaatgtattttttccattagaagtaaaattaaaagataactatccaagcattttaaaagcagactcatctctatcagaggtggctttttcaccaaaagaatataattcaccatctttcagaccagaatatatagaattcaaaccaaaatttcaggattgttcagataaatttgaggatttacatgacatgacctcatttacacaccttaaaaaagtaaaatcaagatcaaggcttttaggaaaaagctcagatgatatccataaccatgccagacactctgcaagaccatatactgctccggaggttaacaagcaacgagaaagctacagtggaaagtttacaagtcgtcgaatggtttcatcaggcttagttcatataaatgataaaacatcagattatgaaatgcataaaatgcggccaaaaaaaattaaaagaggatattgaaaaatgttcgctcatttgtgatattataaaacatgtttaactcagaatgatatgtgaggccagcagtcagaatatcacttctccattaacaaaatggtttggagatctcttcttttgtgtgacagaagtcagcaaccaaatttcatcttgttagaaccattttgttttgattaaaatgaaaaacaaa

SEQ ID NO: 107060 - DNA, 2571 bp, Homo sapiens
  Payload ID: 1020
  Gene Symbol: ALS2CR11
  Gene Name: amyotrophic lateral sclerosis 2 (juvenile) chromosome region, candidate 11
  Uniprot ID: Q53TS8
  ENST ID: ENST00000450242
  CDS Start-End: 49-1701
agtagcgggccgtcggttgggcgcagacaggccgcagaagatggagagatggagccaccccaagagacaaataggcctttcagcacacttgataaccgcagcgggcaggtccaagtcctgtccgccaccccgctattgcagaggaatccctacagcagcccggatatcatgcacattaaagggtcggaggcttcttcggtcccttacgccctgaaccagggcacgacggccctgcctaagaacaagaaccaggagggcaccgggcaccggctgctgaacatgctgagaaaaactcttaaagagtctgatagtgaagaactggaaataacacaggagacgccaaatttggtgccatttggggatgtggttggctgcctgggcattcatataaagaactgcagacattttatgcctaagatcagtttacaacattatgctaatttattcattcgcatctctataaacaaagctgtgaaatgtacaaaaatgtgtagcttgctatccaaaaacgatgagaagaacactgtaattaagttcgatgaagtgaagtatttttctgtacaggttcccagacgttatgatgataagcggaataatattttattggaactcatacaatatgacaatagagaaaaacgtgctttcttgttagggagtgttcagatacatctttatgaggtaattcagaaagggtgcttcattgaagaggtccaagtgttgcatggaaacatatttgtctgcaggctggaggtggaatttatgttctcctatggaaactttggttatggattttcacatcagttaaaacctcttcagaaaattactgagccatccatgtttatgaatcttgcaccacctccagaaagaacagatcccgtgacaaaagttattacaccacagacagtagaatatccagcattcttatccccagacctgaatgttactgttgggactccagctgtgcaatcctccaaccagccatctgtagtgcgacttgaaaaacttcagcaacaaccccgggaaaggctggaaaagatgaaaaaagaatatagaaatctgaatacatggatagataaagctaactatttagaaagcattctaatgccaaaattggaacataaggattctgaggaaactaatatagatgaggcatctgaaaacacgaaaagtaatcatcctgaagaggagcttgaaaatattgtaggagtagatatccctcttgtaaatgaggaagctgaaactactgcaaatgagttactggataatgattctgagaaaggcctgactataccaactttgaaccaatcggaccaagataattcaactgctgatgcttctaaaaatgatgaatcaacaccttcacccacagaagtgcactcattgtgcactatttctaaccaggaaacaataaaagcaggcagaataccacctttaggtgaacgtcaatcagaaagcatgccagacagaaaaatgaaaaatgtattttttccattagaagtaaaattaaaagataactatccaagcattttaaaagcagactcatctctatcagaggtaaatttgaggagtatctgtataaatccaaagagcaggaacttagattcatctccaacagaaattagctggcaaaacaacaatctaaacttagctgaaagggagaacacaggcttagtttccaccagattaaaaattaaaaggtagctttcaaagccaagacccaaaagaaggccttgagctcaaggtgtctgcccttatattagaagtataagactagggagacaaaataatctattttaaaaaattaaatacaaataaatcgaaaatgcattcaaatgtctccaagtggaaatgtgtctaagtatattaaatattcctgctttacttatatcaatcaagaaatgaggataaaaaactttcaagaaaagcaaagtgatttgagatgccagtaatacaaattaatctcttgggttagtaattcagctgaaagtgtaacgacaataacaaaatgtaaattcaaaggaaatttaaaagcctgaggagttatttcagtggaaattcttaataaaactattatattataggaaataacatgttctccttattacaaataattttatagtttaaaatgagaataagagtgtgaatttaaaggtacaccaaataatagactttctcaaaatgacagccattctacttatatctttatatcttattggaataactattacaggtagttcatcaaatggtataaaaagatatataggtcagaagataaagaatttgagttctaagtgagattctgcttctaaatactagcttgggcatctaagtctctagacctatttttctcattatttgaatggtagatcagactaggtcatttctaaattctctcccaaatttcaaaagacataattttaactgggaattactctcagttacctatgtcaaataacattcttgttttttctgaatgtgaaagtaatgcacagtcacagaaaatttagaaaatggagagaaatgtaaaagaaaaaataaaagcagttataattctactgctagatttaacaa

SEQ ID NO: 107061 - DNA, 1639 bp, Homo sapiens
  Payload ID: 1020
  Gene Symbol: ALS2CR11
  Gene Name: amyotrophic lateral sclerosis 2 (juvenile) chromosome region, candidate 11
  Uniprot ID: Q53TS8
  ENST ID: ENST00000439802
  CDS Start-End: 25-1212
agacaggccgcagaagatggagagatggagccaccccaagagacaaataggcctttcagcacacttgataaccgcagcgggcaggtccaagtcctgtccgccaccccgctattgcagaggaatccctacagcagcccggatatcatgcacattaaagggtcggaggcttcttcggtcccttacgccctgaaccagggcacgacggccctgcctaagaacaagaaccaggagggcaccgggcaccggctgctgaacatgctgagaaaaactcttaaagagtctgatagtgaagaactggaaataacacaggagacgccaaatttggtgccatttggggatgtggttggctgcctgggcattcatataaagaactgcagacattttatgcctaagatcagtttacaacattatgctaatttattcattcgcatctctataaacaaagctgtgaaatgtacaaaaatgtgtagcttgctatccaaaaacgatgagaagaacactgtaattaagttcgatgaagtgaagtatttttctgtacaggttcccagacgttatgatgataagcggaataatattttattggaactcatacaatatgacaatagagaaaaacgtgctttcttgttagggagtgttcagatacatctttatgaggtaattcagaaagggtgcttcattgaagaggtccaagtgttgcatggaaacatatttgtctgcaggctggaggtggaatttatgttctcctatggaaactttggttatggattttcacatcagttaaaacctcttcagaaaattactgagccatccatgtttatgaatcttgcaccacctccagaaagaacagatcccgtgacaaaagttattacaccacagacagtagaatatccagcattcttatccccagacctgaatgttactgttgggactccagctgtgcaatcctccaaccagccatctgtagtgcgacttgaaaaacttcagcaacaaccccgggaaaggctggaaaagatgaaaaaagaatatagaaatctgaatacatggatagataaagctaactatttagaaagcattctaatgccaaaattggaacataaggattctgaggaaactaatatagatgaggcatctgaaaacacgaaaagtaatcatcctgaagaggagcttgaaaatattgtaggagtaggtggctttttcaccaaaagaatataattcaccatctttcagaccagaatatatagaattcaaaccaaaatttcaggattgttcagataaatttgaggatttacatgacatgacctcatttacacaccttaaaaaagtaaaatcaagatcaaggcttttaggaaaaagctcagatgatatccataaccatgccagacactctgcaagaccatatactgctccggaggttaacaagcaacgagaaagctacagtggaaagtttacaagtcgtcgaatggtttcatcaggcttagttcatataaatgataaaacatcagattatgaaatgcataaaatgcggccaaaaaaaattaaaagaggatattgaaaaatgttcgctcatttgtgatattataaaacatgtttaactcagaatgatatgtgaggccagcagtcagaatatcacttctccatt

SEQ ID NO: 107062 - DNA, 5512 bp, Homo sapiens
  Payload ID: 1020
  Gene Symbol: ALS2CR11
  Gene Name: amyotrophic lateral sclerosis 2 (juvenile) chromosome region, candidate 11
  Uniprot ID: Q53TS8
  ENST ID: ENST00000439140
  CDS Start-End: 46-5508
agcgggccgtcggttgggcgcagacaggccgcagaagatggagagatggagccaccccaagagacaaataggcctttcagcacacttgataaccgcagcgggcaggtccaagtcctgtccgccaccccgctattgcagaggaatccctacagcagcccggatatcatgcacattaaagggtcggaggcttcttcggtcccttacgccctgaaccagggcacgacggccctgcctaagaacaagaaccaggagggcaccgggcaccggctgctgaacatgctgagaaaaactcttaaagagtctgatagtgaagaactggaaataacacaggagacgccaaatttggtgccatttggggatgtggttggctgcctgggcattcatataaagaactgcagacattttatgcctaagatcagtttacaacattatgctaatttattcattcgcatctctataaacaaagctgtgaaatgtacaaaaatgtgtagcttgctatccaaaaacgatgagaagaacactgtaattaagttcgatgaagtgaagtatttttctgtacaggttcccagacgttatgatgataagcggaataatattttattggaactcatacaatatgacaatagagaaaaacgtgctttcttgttagggagtgttcagatacatctttatgaggtaattcagaaagggtgcttcattgaagaggtccaagtgttgcatggaaacatatttgtctgcaggctggaggtggaatttatgttctcctatggaaactttggttatggattttcacatcagttaaaacctcttcagaaaattactgagccatccatgtttatgaatcttgcaccacctccagaaagaacagatcccgtgacaaaagttattacaccacagacagtagaatatccagcattcttatccccagacctgaatgttactgttgggactccagctgtgcaatcctccaaccagccatctgtagtgcgacttgaaaaacttcagcaacaaccccgggaaaggctggaaaagatgaaaaaagaatatagaaatctgaatacatggatagataaagctaactatttagaaagcattctaatgccaaaattggaacataaggattctgaggaaactaatatagatgaggcatctgaaaacacgaaaagtaatcatcctgaagaggagcttgaaaatattgtaggagtagatatccctcttgtaaatgaggaagctgaaactactgcaaatgagttactggataatgattctgagaaaggcctgactataccaactttgaaccaatcggaccaagataattcaactgctgatgcttctaaaaatgatgaatcaacaccttcacccacagaagtgcactcattgtgcactatttctaaccaggaaacaataaaagcaggcagaataccacctttaggtgaacgtcaatcagaaagcatgccagacagaaaaatgaaaaatgtattttttccattagaagtaaaattaaaagataactatccaagcattttaaaagcagactcatctctatcagaggtggctttttcaccaaaagaatataattcaccatctttcagaccagaatatatagaattcaaaccaaaatttcagtttcagaaattcaacaagaacggttttgatccttttctaaggaatataaacaaaatgtcagtcagaaaaagaaaagatcaagatatatacaaatatagaaatatcttaggtgcagaggtcatagagcatgaagaccaggatcctccttatccagcacaatcaaaaactgcaggacctgctaatacaacctgggcccatgaccctaatatcttcacaacaaagatgttagaaactgagaataagttagcccctgatcctactatcaatacaataaagggtttagatacaaagaatagtttaaaagaaaatctaccaaatgtatctttaccaagcatcaaaggagaatcatcaagggctggaaatgtacaggcaaacacatgtcacctctcgaagtctttaaattttaccccccatatagaatatttaaaacaatcaatgatactcaagtcaattttaagtgaaaatctgcaagacctttcagacaaattattttctaaaccagaagttagtatgaacagtgaagcaagagagaaaagtagttctccacttctaagcattcatgataaatcatcaagtagtatggaagacaacgtattggaaaaaaaacaagatttaaacaactggctttcagaaaaagacattttaaattcaaagactactttaagtcaaataattaaaaatattcctgcagattcattttcagaaggtagtcaaataattgaaaatattcctgcagattcacttttagaaggtggtcaagtaattaaaaatattcctgaatattcactttcagaagggggtcagataattaaaaatattcctgcagattcatttttagaaagtggaccaggacaatctccagaggtagaagaacatgtctctaaaaaacacttcgaagctgatgagagagattttccaattaaaaaaaatagtagtaccaaaaagaaacatttaataagcgaagtacctaactccaaatcaggttcaagtggcactgtacatgactacattatgaggcaaatattcactgcaccaatattctcagaattggagatagaagtgaaagagccaagtgaaacaccaatgaacttggaaaatcaattacctacaccttggaagagaagtttgtcatcacatattctatttcatgaagaaaatgctgatgaaatagaattgccacagcccagatctgctacaagccagataatacaagcatttcctatagatacacttttagaatctgggataatcaaagtgatagaattagataaagaacaccataagagttctttgctgggtacggggatcacttctcctaaaggaaacctaaaggattcccaagagtattattcagaaatcagaagcgagacagaacctctttctgagcagagtatacccatcattcccaaagacactacttctgttagtagagctgaatttatacaggaagaccaaaatatgttcccacaagattcaagttattattcaatagcaaataaagaactgtatttgccaagaaatggtcagaggctttgtaaagacaaaaatgatctcagttctactttagaaagtttaactaactcattaatggataaacttagtgaatcagatgaaataatgttaaaatcctttttaaaaaacatcttcaatgtttttttcaaatataatcattctgaaagaagaggacaaccagaaaaagaattagaaagactaattcaaccttcttttacaagtgacacagaacaccttgaagaactccaagaggattttgataaagcagacaaattagacagaaaacctattttgagtccaaagttgcgtgtgtttctagaagaactctcagagtcagaagtaaaacatttaaaatctgaattaagtaaacaaatccagcattaccttgtagaaagactttcagaatcaggacatatcaccaaggaggacttaccaaaaatctatcaaaatctgtatctgatgaatgagaaagcagagcagaaagggccaaacagttttcaggggaaatattctgaaactgtgaaagaaatcatgtcttttgtcaacaatttcaatcatcatttcatagataaacatttggaaataaagctgagatcttttttaaaagagattctccaaaactatttcctaaaaaacatttcagaaagcagtttatttaatgagacagcatctgagactatatacccaaacatatcttctctaaggactaaaagtgtctcaatatcttttcatgaactagaacaagatatttcaaaggggagttttggtagaaggtttgaaataaacatgaaatatcctttaagtaaatctctacaaaactatctgatagctttatcagaaaatgaattattacatctaaaagctgatttaagcaaacacctccagagtctttttatagaaaaactttcaaaatcaggactaatgacaaaaaagcaattagaagggatcaaccagcatataaatttgcttaattctagttctataccattaaaatatataaaaacacatttaccttttagagatgactgtcactttgtggagaagcattcagaaaagcaaaataaatattcaagaattgttcaacaaaccactttacaaacggtttctgaggataaacttagagaagcagaattgattcgagagaaagaaaagaaatattttcccttacagaatttaaagggaaattcatctttaattaaggaacagaaaagttattacactaaggaagaagctaaaacaccaagtttaatcaaagtacaaccttcttccaatgaaaatatccaggcaagtccattaagtaagtcatcagaaatacttacagatatactgcttaagaaactaaggaaagaacatgtattcacgcagcttcctcaagcagaaaattctgttcataaaacagagattcaagacccatatagttggggtggtaaatcaaaaataactcaatcaaaagcttggtgtgaaaagacactgaaaatgaagtcccttgatagaaaggagcatgtaaacatctataaatggactgttcaggaaaaacctgaagcagtattaacatcgtatccaagaattcctaatgccagaatgccaagggaagatgagtacttaaacagaatcactttcccttcctggcaaagtagcactttaactcatttcaatacagagactggggaaaaatcaaaattagaagaccagtattgtcagacattgaaaggaaataataacaataataaaaagcatttagtaacatttgcacaatacaaaaaagaaatacaaactctttatataaaaccagatgaaatttgcagtgaaaaatgtgccaagttccctgaaatacagtcattccaatataaggttgtagaagatgagaaaaacttgaaaccacacctcttcccagaattatttaagatagaagatctaaaacccaaggtccgaaaagaaagagaccgtgtcgcccaaccaaaaaagtcatttaacaagatagtcaggatactaccaaccacactgcccaccacaagaattcacctaaagaagtctgttccaaggacactgcttcactggactgcaagaagaactatacatgattgttcagataaatttgaggatttacatgacatgacctcatttacacaccttaaaaaagtaaaatcaagatcaaggcttttaggaaaaagctcagatgatatccataaccatgccagacactctgcaagaccatatactgctccggaggttaacaagcaacgagaaagctacagtggaaagtttacaagtcgtcgaatggtttcatcaggcttagttcatataaatgataaaacatcagattatgaaatgcataaaatgcggccaaaaaaaattaaaagaggatattgaaaaa

SEQ ID NO: 107063 - DNA, 1769 bp, Homo sapiens
  Payload ID: 1021
  Gene Symbol: ALS2CR12
  Gene Name: amyotrophic lateral sclerosis 2 (juvenile) chromosome region, candidate 12
  Uniprot ID: Q96Q35
  ENST ID: ENST00000286190
  CDS Start-End: 48-1385
caagagcctcctgatctagcagccaagactccccctgacctttggccatgtaccccaaccctctcatctactgcacctgctgggacccctggaacttgggaccacggaagctaatcaagacccctcaactaccacgcaagaactccacagggagttccaagctaactcctcttgtaccagctccaaaaaatcacaattacctccaaccaacaaaacctgttgtttccccaaaaatgaaaatccattcagcaaggcaagaagagactaataaatcattttatgaagtgatcaacgtgtcacctggctatcaacttgttcggaatcgggaacagatttctgtcaccttaggggatgagatgtttgataggaaaaagcggtgggaatcggagatcccggacaaaggcagattttccaggaccaacatcatttctgacctagaagagcaaatctcagagctgacagcaataattgaacaaatgaacagagaccaccagtctgcccagaaattgctctccagtgaaatggatctccgctgtgctgagatgaaacagaactttgaaaacaagaacagggagctcaaagaggcccatgaagcagaactcagtgagttggagaacaactacaaagcagccttgaaggcagagaagttggctgcccaagagaagctagaggagatgggaaaagaatacaagtatttgaagaatatgtttcgtacgtatcaggacagtatttatgatgaaatggaagagaagtggtcaaaacagaaggcgaaatggaagaaggatgagaagttcgagcgagaaaatatcctgctacagcaaaaaaaaaagatgaccaaaaaattcgaaatggagtcaggagaagaagataagaaaataaatgaatcctgcagtgctgtctttgagaacttcattcaagagaaggaggagctcttgaaacaacatcaaagtgacaccttgcaattagaagagctgagaaaaaccaaagaggtgccctggagaagagaccaaataaatagacattggcatgatgtcctgcaacagcttcttcttatgcaggtcatgcaggaagaattgcatgcacaagcccttatcctagagtcactgaacacaaacctctactatacccagttggaactccagaaagagaaagctatagtgggaaatctggagaaaatgcttcaaaccaagtttgctgaaactgaagaaaagtataagcacaccatacagatcctgacggaagagaacattcatctgaagcaaaagataatttctaagaatgaagaaatttgtgaaggatgttctgggagattggcctctattactgtttctaaggatgattctgacactgtgcaagatggtagcaagaaaggacaagaatcataaacaaaaagttgctctgcattgttgaagatggttggcacaccatttctgtaggcccaggaaactcctgggagggttttcttgagaaaatgcatataatgagtttagttcttgggttgctctgactctctgaatgtctgaaaatgtttgaattcgcatctgaatttcacagcttatcacggactcttcactgaaaaatgatgctctccatactgggagctgagctttctctgagttttgtactatttttcttctaccttgacgtatttcgttagaaagaaactgatttgaaggccttcttcatattgaacttttactatatttgggaggtgtacctttgtcccctggggcatttaggtagcaaaaaaagatgatgtgttgatttta

SEQ ID NO: 107064 - DNA, 1943 bp, Homo sapiens
  Payload ID: 1021
  Gene Symbol: ALS2CR12
  Gene Name: amyotrophic lateral sclerosis 2 (juvenile) chromosome region, candidate 12
  Uniprot ID: Q96Q35
  ENST ID: ENST00000392257
  CDS Start-End: 445-1713
ctttggcctgccatctcccaagggcaaacctcacaactcaggcccaagtcacaggaatctgaatggtggggtgaccttctcctctagtttaatttcattgcaatactgagaaacttcaactgttttgtctttagaagggaaattcatgtttgtgccaggccagcctttgtaaaagcctttgattggattcactagaagtctgtcttcccgcagtacatatactgtgaattttctccttcggcatttcaaccacttggaatggccactaaagtggcttttgatctaaagtaaactctgattctgtgttgatggggaaccatttctctctaacatggtggtttctttaagatgtttgacttgggccacatgagaataacagatctttgggcagtccaagcaagagcctcctgatctagcagccaagactccccctgacctttggccatgtaccccaaccctctcatctactgcacctgctgggacccctggaacttgggaccacggaagctaatcaagacccctcaactaccacgcaagaactccacagggagttccaagctaactcctcttgtaccagctccaaaaaatcacaattacctccaaccaacaaaacctgttgtttccccaaaaatgaaaatccattcagcaaggcaagaagagactaataaatcattttatgaagtgatcaacgtgtcacctggctatcaacttgttcggaatcgggaacagatttctgtcaccttaggggatgagatgtttgataggaaaaagcggtgggaatcggagatcccggacaaaggcagattttccaggaccaacatcatttctgacctagaagagcaaatctcagagctgacagcaataattgaacaaatgaacagagaccaccagtctgcccagaaattgctctccagtgaaatggatctccgctgtgctgagatgaaacagaactttgaaaacaagaacagggagctcaaagaggcccatgaagcagaactcagtgagttggagaacaactacaaagcagccttgaaggcagagaagttggctgcccaagagaagctagaggagatgggaaaagaatacaagtatttgaagaatatgtttcgtacgtatcaggacagtatttatgatgaaatggaagagaagtggtcaaaacagaaggcgaaatggaagaaggatgagaagttcgagcgagaaaatatcctgctacagcaaaaaaaaaagatgaccaaaaaattcgaaatggagtcaggagaagaagataagaaaataaatgaatcctgcagtgctgtctttgagaacttcattcaagagaaggaggagctcttgaaacaacatcaaagtgacaccttgcaattagaagagctgagaaaaaccaaagaggtcatgcaggaagaattgcatgcacaagcccttatcctagagtcactgaacacaaacctctactatacccagttggaactccagaaagagaaagctatagtgggaaatctggagaaaatgcttcaaaccaagtttgctgaaactgaagaaaagtataagcacaccatacagatcctgacggaagagaacattcatctgaagcaaaagataatttctaagaatgaagaaatttgtgaaggatgttctgggagattggcctctattactgtttctaaggatgattctgacactgtgcaagatggtagcaagaaaggacaagaatcataaacaaaaagttgctctgcattgttgaagatggttggcacaccatttctgtaggcccaggaaactcctgggagggttttcttgagaaaatgcatataatgagtttagttcttgggttgctctgactctctgaatgtctgaaaatgtttgaattcgcatctgaatttcacagcttatcacggactcttcactgaaaaatgatgctctccatactgggagctgagctttctctg

SEQ ID NO: 107065 - DNA, 2013 bp, Homo sapiens
  Payload ID: 1021
  Gene Symbol: ALS2CR12
  Gene Name: amyotrophic lateral sclerosis 2 (juvenile) chromosome region, candidate 12
  Uniprot ID: Q96Q35
  ENST ID: ENST00000405148
  CDS Start-End: 445-1782
ctttggcctgccatctcccaagggcaaacctcacaactcaggcccaagtcacaggaatctgaatggtggggtgaccttctcctctagtttaatttcattgcaatactgagaaacttcaactgttttgtctttagaagggaaattcatgtttgtgccaggccagcctttgtaaaagcctttgattggattcactagaagtctgtcttcccgcagtacatatactgtgaattttctccttcggcatttcaaccacttggaatggccactaaagtggcttttgatctaaagtaaactctgattctgtgttgatggggaaccatttctctctaacatggtggtttctttaagatgtttgacttgggccacatgagaataacagatctttgggcagtccaagcaagagcctcctgatctagcagccaagactccccctgacctttggccatgtaccccaaccctctcatctactgcacctgctgggacccctggaacttgggaccacggaagctaatcaagacccctcaactaccacgcaagaactccacagggagttccaagctaactcctcttgtaccagctccaaaaaatcacaattacctccaaccaacaaaacctgttgtttccccaaaaatgaaaatccattcagcaaggcaagaagagactaataaatcattttatgaagtgatcaacgtgtcacctggctatcaacttgttcggaatcgggaacagatttctgtcaccttaggggatgagatgtttgataggaaaaagcggtgggaatcggagatcccggacaaaggcagattttccaggaccaacatcatttctgacctagaagagcaaatctcagagctgacagcaataattgaacaaatgaacagagaccaccagtctgcccagaaattgctctccagtgaaatggatctccgctgtgctgagatgaaacagaactttgaaaacaagaacagggagctcaaagaggcccatgaagcagaactcagtgagttggagaacaactacaaagcagccttgaaggcagagaagttggctgcccaagagaagctagaggagatgggaaaagaatacaagtatttgaagaatatgtttcgtacgtatcaggacagtatttatgatgaaatggaagagaagtggtcaaaacagaaggcgaaatggaagaaggatgagaagttcgagcgagaaaatatcctgctacagcaaaaaaaaaagatgaccaaaaaattcgaaatggagtcaggagaagaagataagaaaataaatgaatcctgcagtgctgtctttgagaacttcattcaagagaaggaggagctcttgaaacaacatcaaagtgacaccttgcaattagaagagctgagaaaaaccaaagaggtgccctggagaagagaccaaataaatagacattggcatgatgtcctgcaacagcttcttcttatgcaggtcatgcaggaagaattgcatgcacaagcccttatcctagagtcactgaacacaaacctctactatacccagttggaactccagaaagagaaagctatagtgggaaatctggagaaaatgcttcaaaccaagtttgctgaaactgaagaaaagtataagcacaccatacagatcctgacggaagagaacattcatctgaagcaaaagataatttctaagaatgaagaaatttgtgaaggatgttctgggagattggcctctattactgtttctaaggatgattctgacactgtgcaagatggtagcaagaaaggacaagaatcataaacaaaaagttgctctgcattgttgaagatggttggcacaccatttctgtaggcccaggaaactcctgggagggttttcttgagaaaatgcatataatgagtttagttcttgggttgctctgactctctgaatgtctgaaaatgtttgaattcgcatctgaatttcacagcttatcacggactcttcactgaaaaatgatgctctccatactgggagctgagctttctctga

SEQ ID NO: 107066 - DNA, 430 bp, Homo sapiens
  Payload ID: 1021
  Gene Symbol: ALS2CR12
  Gene Name: amyotrophic lateral sclerosis 2 (juvenile) chromosome region, candidate 12
  ENST ID: ENST00000425488
  CDS Start-End: 1-430
atgaaaatccattcagcaaggcaagaagagactaataaatcattttatgaagtgatcaacgtgtcacctggctatcaacttgttcggaatcgggaacagatttctgtcaccttaggggatgagatgtttgataggaaaaagcggtgggaatcggagatcccggacaaaggcagattttccagggagctcaaagaggcccatgaagcagaactcagtgagttggagaacaactacaaagcagccttgaaggcagagaagttggctgcccaagagaagctagaggagatgggaaaagaatacaagtatttgaagaatatgtttcgtacgtatcaggacagtatttatgatgaaatggaagagaagtggtcaaaacagaaggcgaaatggaagaaggatgagaagttcgagcgagaaaatatcctgctacagc

SEQ ID NO: 107067 - DNA, 782 bp, Homo sapiens
  Payload ID: 1021
  Gene Symbol: ALS2CR12
  Gene Name: amyotrophic lateral sclerosis 2 (juvenile) chromosome region, candidate 12
  ENST ID: ENST00000415745
  CDS Start-End: 1-374
acagtatttatgatgaaatggaagagaagtggtcaaaacagaaggcgaaatggaagaaggatgagaagttcgagcgagaaaatatcctgctacagcaaaaaaaaaagatgaccaaaaaattcgaaatggagtcaggagaagaagataagaaaataaatgaatcctgcagtgctgtctttgagaacttcattcaagagaaggaggagctcttgaaacaacatcaaagtgacaccttgcaattagaagagctgagaaaaaccaaagaggtcatgcaggaagaattgcatgcacaagcccttatcctagagtcactgaacacaaacctctactatacccagttggaactccagaaagaggcaaaagataatttctaagaatgaagaaatttgtgaaggatgttctgggagattggcctctattactgtttctaaggatgattctgacactgtgcaagatggtagcaagaaaggacaagaatcataaacaaaaagttgctctgcattgttgaagatggttggcacaccatttctgtaggcccaggaaactcctgggagggttttcttgagaaaatgcatataatgagtttagttcttgggttgctctgactctctgaatgtctgaaaatgtttgaattcgcatctgaatttcacagcttatcacggactcttcactgaaaaatgatgctctccatactgggagctgagctttctctgagttttgtactatttttcttctaccttgacgtatttcgttagaaagaaactgatttgaaggccttcttc

SEQ ID NO: 107068 - DNA, 458 bp, Homo sapiens
  Payload ID: 1021
  Gene Symbol: ALS2CR12
  Gene Name: amyotrophic lateral sclerosis 2 (juvenile) chromosome region, candidate 12
  ENST ID: ENST00000418364
  CDS Start-End: 312-458
ctcagtagcttcatctatagtatcagcataacaataattgagcagttttacctggctcacagcaaggactcggctatggcaaattttattttattttaattattttgttttatttttatttgtatcttattttattttttgagacgaagtctcactcttcacccaggctggagtgcagtggcacaatctcagctcactgcaacctctgcctcccaggttcaagcaatcctcccacctcagcctcctgagtagctgggactatagcaagagcctcctgatctagcagccaagactccccctgacctttggccatgtaccccaaccctctcatctactgcacctgctgggacccctggaacttgggaccacggaagctaatcaagacccctcaactaccacgcaagaactccacagggagttccaagctaactcctcttgtaccagctccaaaaaatcac

SEQ ID NO: 107069 - DNA, 1626 bp, Homo sapiens
  Payload ID: 1021
  Gene Symbol: ALS2CR12
  Gene Name: amyotrophic lateral sclerosis 2 (juvenile) chromosome region, candidate 12
  Uniprot ID: Q96Q35
  ENST ID: ENST00000439709
  CDS Start-End: 133-1401
atagcaacaaaataaacaaactttggcctgccatctcccaagggcaaacctcacaactcaggcccaagtcacaggaatctgaatgcaagagcctcctgatctagcagccaagactccccctgacctttggccatgtaccccaaccctctcatctactgcacctgctgggacccctggaacttgggaccacggaagctaatcaagacccctcaactaccacgcaagaactccacagggagttccaagctaactcctcttgtaccagctccaaaaaatcacaattacctccaaccaacaaaacctgttgtttccccaaaaatgaaaatccattcagcaaggcaagaagagactaataaatcattttatgaagtgatcaacgtgtcacctggctatcaacttgttcggaatcgggaacagatttctgtcaccttaggggatgagatgtttgataggaaaaagcggtgggaatcggagatcccggacaaaggcagattttccaggaccaacatcatttctgacctagaagagcaaatctcagagctgacagcaataattgaacaaatgaacagagaccaccagtctgcccagaaattgctctccagtgaaatggatctccgctgtgctgagatgaaacagaactttgaaaacaagaacagggagctcaaagaggcccatgaagcagaactcagtgagttggagaacaactacaaagcagccttgaaggcagagaagttggctgcccaagagaagctagaggagatgggaaaagaatacaagtatttgaagaatatgtttcgtacgtatcaggacagtatttatgatgaaatggaagagaagtggtcaaaacagaaggcgaaatggaagaaggatgagaagttcgagcgagaaaatatcctgctacagcaaaaaaaaaagatgaccaaaaaattcgaaatggagtcaggagaagaagataagaaaataaatgaatcctgcagtgctgtctttgagaacttcattcaagagaaggaggagctcttgaaacaacatcaaagtgacaccttgcaattagaagagctgagaaaaaccaaagaggtcatgcaggaagaattgcatgcacaagcccttatcctagagtcactgaacacaaacctctactatacccagttggaactccagaaagagaaagctatagtgggaaatctggagaaaatgcttcaaaccaagtttgctgaaactgaagaaaagtataagcacaccatacagatcctgacggaagagaacattcatctgaagcaaaagataatttctaagaatgaagaaatttgtgaaggatgttctgggagattggcctctattactgtttctaaggatgattctgacactgtgcaagatggtagcaagaaaggacaagaatcataaacaaaaagttgctctgcattgttgaagatggttggcacaccatttctgtaggcccaggaaactcctgggagggttttcttgagaaaatgcatataatgagtttagttcttgggttgctctgactctctgaatgtctgaaaatgtttgaattcgcatctgaatttcacagcttatcacggactcttcactgaaaaatgatgctctccatactgggagctgagcttt

SEQ ID NO: 107070 - DNA, 8262 bp, Homo sapiens
  Payload ID: 1022
  Gene Symbol: ANAPC1
  Gene Name: anaphase promoting complex subunit 1
  Uniprot ID: Q9H1A4
  ENST ID: ENST00000341068
  CDS Start-End: 774-6608
tcccaaagtgctgggattacaggcgcgagtggccgctggggttcttaacttgggtctttgaatcgccttaagaagtgtctctgaatctgggaattgcaagcaacgtttctgtgaggaccttcacacagttcatccactcttcgaagagtatggaccgaaaaaggcatagagcattcactgcacgtagagaaaatcagcaacccctgctccccaccctcagcctgaggtgcctacctccacgtggggtcaggaggcggaagcgaaaccagaagaaaaaaccctgagatctataaggcagttcaggtccctagtgacatgagctaaagagaacttggacgccaggactgtagcagacagagtccggcttcggggttcgcatcagtcgcacggaaggtggaaatagcccccaagttgtaacccgccgcggtcttccctcaacagcgcaggcgccaggactgctaggacgccgcgcacctcccgcgatgccccgccccggcgcgaggcaagacgggaaagtcaagatggacgcgtccatttgaacgtctcgcacgccttcctgccattagcactcgagcccgctgctgttgcccgttcttcctccagaataggggagggagagggaatgagaagctgctgcggcccaagagtcactgtgaaggaccccgccgctgccctcgggcctcctcggcccctgcgcctccggggagcagccggggctcgccgcgcctgacgcgtcccgagttatacagaaataatgttgatatttggaacccatgtcgaacttctatgaagaaaggacaacgatgattgcagcaagggatttgcaggaatttgttccttttggtcgagaccactgcaagcaccaccctaatgctttgaaccttcaacttcgccagctgcagccagcttctgaattatggtcttctgatggtgctgctggcttggtgggatcccttcaggaggttacaatccacgagaaacagaaggaaagctggcagttaaggaaaggagtaagtgaaattggagaagatgtggactatgatgaggaactctatgttgctggaaatatggtgatatggagcaaaggaagtaaaagccaggcattggcagtttataaagcatttacagttgacagtcctgttcagcaggcattgtggtgtgacttcattatatcacaggataagtctgaaaaggcctacagtagcaatgaagtagaaaaatgcatatgtatattgcaaagctcatgtattaacatgcatagcatagaaggaaaggattacatagcttcattaccatttcaggttgcaaatgtttggcccactaaatatggattgctgtttgaacgaagcgcttcttcacatgaagtacctccaggttcacccagagaacctttacctactatgttcagcatgctgcacccactagatgaaataactccacttgtttgtaaatctggaagtctttttggttcatcacgggtgcaatatgttgtagatcatgcaatgaaaattgttttcctcaatactgacccctctattgtaatgacttatgatgctgttcaaaatgtgcattctgtgtggactctccggagagtcaaatcagaggaagagaatgttgttttaaagttctctgaacaggggggaaccccacagaatgtggccactagcagctccctcacagcacatctcagaagcctctccaaaggagattcccctgtgacttcacctttccagaattactcctccattcacagccagagtcgctcaacctcatcacccagtctacattctcgctcaccttctatttccaacatggcagctctaagtcgtgctcattctcctgcgttaggagtgcactctttttcaggggtgcaaaggttcaacatttcaagccataatcagtctccaaagagacatagtatttctcattctccaaatagtaattctaatggctcctttcttgcaccagaaacggagccaattgttcctgaactgtgtattgaccatttgtggacagaaacgattactaatataagagagaaaaattcacaagcctcaaaagtgtttattacatctgacctatgtgggcaaaagttcctgtgctttttagtagagtcccagctccagttacgctgtgtaaagtttcaagagagtaatgataaaacccagctcatctttggttcagtgaccaacataccagcaaaggatgcagcaccagtggagaaaatagacaccatgctggtcttggaaggcagtggaaacctggtgctatacacaggagtggttcgggtgggaaaggtttttattcctggactgccagctccctctctgacgatgtccaacacaatgcctcggcccagtactccactagatggcgttagtactccaaagcctcttagtaaactccttggatcattggacgaggttgttctgttgtccccagttccagaactgagggattcttcaaaacttcatgattctctctataatgaggattgtactttccaacagcttggaacttacattcattctatcagagatcctgtccataacagagtcaccctggaactgagtaatggctccatggttaggatcactattcctgaaattgccacctctgagttagtacaaacgtgtttgcaagcaattaagtttatcctgccaaaagaaatagcagttcagatgcttgtcaagtggtacaatgtccacagtgctccaggaggacccagttatcactcagagtggaatttatttgtgacttgtctcatgaacatgatgggttataacacagaccgcttagcatggactagaaattttgactttgaaggatcactttctcctgtcattgcgcccaaaaaagcaaggccttccgagactggatctgatgatgactgggaatatttactaaattcagactaccaccagaatgttgagtctcatcttttgaacagatctttatgtctgagtccttcagaagcttcacagatgaaggatgaggatttttcacagaatctcagtctggattcttctacacttctctttactcacatacctgcaatttttttcgttcttcaccttgtgtatgaggagcttaagttgaatactctaatgggagaaggaatttgttcacttgttgaacttctcgttcagttggcaagggacttaaaattggggccttatgtagatcattactatagagactacccaacgcttgtcagaactactggacaagtgtgcacaattgatccaggtcaaacaggatttatgcatcatccatcattttttacgtctgagccaccaagtatttatcagtgggtgagttcttgtctgaagggtgaaggaatgccaccttatccttacctccctggaatctgtgaaagaagcagacttgtagtcttgagtattgcactgtacatacttggtgatgagagcttggtttctgatgaatcctcacagtatttaaccagaataactatagccccccagaagttgcaagtagaacaagaggaaaacaggtttagtttcaggcattctacatctgtttctagtctagctgaaagattggttgtctggatgactaatgtaggattcactttaagagatttggaaactcttccctttggaattgctcttcccatcagagatgcaatttatcactgtcgtgagcagcctgcctcagactggccagaagctgtctgtctcttgattggacgtcaggatctttccaagcaggcctgcgaaggaaacttacccaaagggaagtctgtgctctcatcagatgttccttcaggaacagaaactgaggaggaagatgacggcatgaatgacatgaatcacgaggtcatgtcattaatatggagtgaagatttaagggtgcaggatgtgcgaaggcttcttcagagtgcgcatcctgtccgtgtcaacgtagtgcagtacccagagctcagtgaccacgagttcatcgaggaaaaggaaaacagattgctccaattgtgtcagcgaactatggctcttcctgtaggacgaggaatgtttaccttgttttcgtaccatcctgttccaacagagccattgcctattcctaaattgaatctgactgggcgtgcccctcctcggaacacaacagtagaccttaatagtggaaacatcgatgtgcctcccaacatgacaagctgggccagctttcataatggtgtggctgctggcctgaagatagctcctgcctcccagatcgactcagcttggattgtttacaataagcccaagcatgctgagttggccaatgagtatgctggctttctcatggctctgggtttgaatgggcaccttaccaagctggcgactctcaatatccatgactacttgaccaagggccatgaaatgacaagcattggactgctacttggtgtttctgctgcaaaactaggcaccatggatatgtctattactcggcttcttagcattcacattcctgctctcttacccccaacgtccacagagctggatgttcctcacaatgtccaagtggctgcagtggttggcattggccttgtatatcaagggacagctcacagacatactgcagaagtcctgttggctgagataggacggcctcctggtcctgaaatggaatactgcactgacagagagtcatactccttagctgctggcttggccctgggcatggtctgcttggggcatggcagcaatttgataggtatgtctgatctcaatgtgcctgagcagctctatcagtacatggttggaggacataggcgctttcaaacaggaatgcatagggagaaacataaatcaccaagttatcaaatcaaagaaggagataccataaatgtggatgtgacttgtccaggtgctactctagctttggctatgatctacttaaaaaccaataacagatctattgcagattggctccgagcccctgacaccatgtatttgttggactttgtgaagccagaatttctcttgcttaggacacttgctcgatgcctgattttgtgggatgatattttaccaaattccaagtgggttgacagcaatgttcctcaaattataagagaaaatagtatctctctcagtgaaatcgaattgccgtgctcagaggatttgaatttggaaactttgtcccaagcacatgtctacataattgcaggagcctgcttgtctctgggttttcgatttgctggctcagaaaacttatcagcatttaactgtttgcataaatttgccaaagattttatgacttatttgtccgcacctaatgcttctgttacaggtcctcataacctagaaacttgtctgagcgtggtgctgctgtctctcgccatggtcatggctggctcaggaaacctaaaggttttgcagctttgtcgcttcttacacatgaaaacgggtggtgaaatgaactatggttttcacttagcccaccacatggcccttggacttctatttttgggaggaggaaggtactctttgagcacatcaaattcttccattgccgctcttctctgtgccctttatccgcacttcccagctcacagcactgacaaccggtatcatctccaggctctccggcacctctatgtgctggccgcggagcccaggcttctagtgcctgtggatgtggacacaaacacgccctgctatgccctcttagaagttacctacaagggcactcagtggtatgaacaaaccaaagaagaattgatggctcctacccttcttccagaactccatcttttaaagcagattaaagtaaaaggcccaagatactgggaactgctcatagatttaagcaaaggaacacaacacttgaagtccatcctttccaaggatggggttttatatgttaaactccgggcgggtcagctctcctacaaagaagatccaatgggatggcaaagtttgttggctcagactgttgctaacaggaactctgaagcccgggctttcaagccagaaacaatctcagcattcacttctgatccagcacttctgtcatttgctgaatatttctgcaagccaactgtgaacatgggtcagaaacaggaaattctggatctcttttcttcagtactctatgaatgtgttacccaggagaccccagagatgttgcctgcatacatcgcaatggatcaggctataagaagacttgggagaagagaaatgtctgagacttctgaactttggcagataaagttggtgttagagtttttcagctcccgaagccatcaggagcggctgcagaaccaccctaagcgggggctctttatgaactcggaattcctccctgttgtgaagtgcaccattgataataccctggaccagtggctacaagtcgggggtgatatgtgtgtgcacgcctacctcagcgggcagcccttggaggaatcacagctgagcatgctggcctgcttcctcgtctaccactctgtgccagctccacagcacctgccacctataggactagaagggagcacaagctttgctgaactgctcttcaaatttaagcagctaaaaatgccagtgcgagctttgctgagattggctcctttgcttcttggaaatccacagccaatggtgatgtgaccgtgtctggcggtgaacctaccctgaaacgtgacttctgcacaacaaacgtgaccaaacatcaaagctaaagcaatgtttataaagttttatggtataactagggggaaatgagctgcacaaacctcaatgtattttaaatctgttgctgtcatcattaacggtatatgacatataaaagcaagttaaaatttacttttgtaaataaagtttttggtttgtttccaaaactcttgatgattgctttagttttggacttagagaatagagcaggggttgctggagtgaatattgatttttaaagtctttgaactgtggtggtataggtgaagtgactatgcccaaaaatgccaagttttaaaagaagctatgtcataaagttttactttctgtggcaaaagagcgctttagcatttcctcagatgtcacagttgtcctgtctaaaataagtttgtacttctggtgacaatgccagacactcttatgatgtgatcaccttaaacaggagaaggagatttttgccctcagttgctcaacatgaagtactgtggactgaattgtgtcctcccagaattatatattgaggccctaatccctgtgtgactgtattaggcaatagggcatataggagattactaaggttaagtgaggtcatcataagggtggggccttaattcagtagaattggtggcctcctaagcagaggaagagagatttttctttctctctctgccatgtgaagacagtgaggagtcggccgtctgcaagccaagaagagcccttatcaggaacagacttggctagcaccttcatcgtggacctccagcctccagaattgcaagaaaatacatttccgtcgttgaaaccacccagtctgtggtattttgttatggcagcccaggcagactaatacgtgaagcctgctctaaatagataaaataagaaattactacagagggctctttagaaattgtatttaaaaacaagacaatccatatttacctaagatttacagaatgtatgtctataaaaggagggatttctggactagatgatgatgaaaaatgttcatataaaggcacctccagcttcgagttgccaacacaggaggaagaatgctccctgctgttcagatgctgatatgtgtcctgtgcttcctggatggccagtgggatcataagctggtagaagcaagaccttcatccactgacttcatatttcttccacatcctgaactgtggtgtttgactttaaaaataaattaaagcaaatagaaatgtttccattgagattttggcaaaaacccacatgacatttgcgtctgcagagtagacttggaaggcatgcacctggaggccaagtggtattctctggactctctgtccttgcatttgcgtggctgccccgaggactcgcttcttcctggatgtgaagcagaggcacgatggggctgactgagaggctgaaatgtgcttctcttcacagttacatagttttcttctaattaaaaataaattttaagtggtagattatgaaaattccatttgaatcaagattttaaaaattcaatatcaaaccagttgttactgtcttcactctccgttgtttacgattgtgtgcttttcctgaataaagaatgactggagagacatta

SEQ ID NO: 107071 - DNA, 5047 bp, Homo sapiens
  Payload ID: 1022
  Gene Symbol: ANAPC1
  Gene Name: anaphase promoting complex subunit 1
  ENST ID: ENST00000427997
  CDS Start-End: 1-4357
catctttggttcagtgaccaacataccagcaaaggatgcagcaccagtggagaaaatagacaccatgctggtcttggaaggcagtggaaacctggtgctatacacaggagtggttcgggtgggaaaggtttttattcctggactgccagctccctctctgacgatgtccaacacaatgcctcggcccagtactccactagatggcgttagtactccaaagcctcttagtaaactccttggatcattggacgaggttgttctgttgtccccagttccagaactgagggattcttcaaaacttcatgattctctctataatgaggattgtactttccaacagcttggaacttacattcattctatcagagatcctgtccataacagagtcaccctggaactgagtaatggctccatggttaggatcactattcctgaaattgccacctctgagttagtacaaacgtgtttgcaagcaattaagtttatcctgccaaaagaaatagcagttcagatgcttgtcaagtggtacaatgtccacagtgctccaggaggacccagttatcactcagagtggaatttatttgtgacttgtctcatgaacatgatgggttataacacagaccgcttagcatggactagaaattttgactttgaaggatcactttctcctgtcattgcgcccaaaaaagcaaggccttccgagactggatctgatgatgactgggaatatttactaaattcagactaccaccagaatgttgagtctcatcttttgaacagatctttatgtctgagtccttcagaagcttcacagatgaaggatgaggatttttcacagaatctcagtctggattcttctacacttctctttactcacatacctgcaatttttttcgttcttcaccttgtgtatgaggagcttaagttgaatactctaatgggagaaggaatttgttcacttgttgaacttctcgttcagttggcaagggacttaaaattggggccttatgtagatcattactatagagactacccaacgcttgtcagaactactggacaagtgtgcacaattgatccaggtcaaacaggatttatgcatcatccatcattttttacgtctgagccaccaagtatttatcagtgggtgagttcttgtctgaagggtgaaggaatgccaccttatccttacctccctggaatctgtgaaagaagcagacttgtagtcttgagtattgcactgtacatacttggtgatgagagcttggtttctgatgaatcctcacagtatttaaccagaataactatagccccccagaagttgcaagtagaacaagaggaaaacaggtttagtttcaggcattctacatctgtttctagtctagctgaaagattggttgtctggatgactaatgtaggattcactttaagagatttggaaactcttccctttggaattgctcttcccatcagagatgcaatttatcactgtcgtgagcagcctgcctcagactggccagaagctgtctgtctcttgattggacgtcaggatctttccaagcaggcctgcgaaggaaacttacccaaagggaagtctgtgctctcatcagatgttccttcaggaacagaaactgaggaggaagatgacggcatgaatgacatgaatcacgaggtcatgtcattaatatggagtgaagatttaagggtgcaggatgtgcgaaggcttcttcagagtgcgcatcctgtccgtgtcaacgtagtgcagtacccagagctcagtgaccacgagttcatcgaggaaaaggaaaacagattgctccaattgtgtcagcgaactatggctcttcctgtaggacgaggaatgtttaccttgttttcgtaccatcctgttccaacagagccattgcctattcctaaattgaatctgactgggcgtgcccctcctcggaacacaacagtagaccttaatagtggaaacatcgatgtgcctcccaacatgacaagctgggccagctttcataatggtgtggctgctggcctgaagatagctcctgcctcccagatcgactcagcttggattgtttacaataagcccaagcatgctgagttggccaatgagtatgctggctttctcatggctctgggtttgaatgggcaccttaccaagctggcgactctcaatatccatgactacttgaccaagggccatgaaatgacaagcattggactgctacttggtgtttctgctgcaaaactaggcaccatggatatgtctattactcggcttcttagcattcacattcctgctctcttacccccaacgtccacagagctggatgttcctcacaatgtccaagtggctgcagtggttggcattggccttgtatatcaagggacagctcacagacatactgcagaagtcctgttggctgagataggacggcctcctggtcctgaaatggaatactgcactgacagagagtcatactccttagctgctggcttggccctgggcatggtctgcttggggcatggcagcaatttgataggtatgtctgatctcaatgtgcctgagcagctctatcagtacatggttggaggacataggcgctttcaaacaggaatgcatagggagaaacataaatcaccaagttatcaaatcaaagaaggagataccataaatgtggatgtgacttgtccaggtgctactctagctttggctatgatctacttaaaaaccaataacagatctattgcagattggctccgagcccctgacaccatgtatttgttggactttgtgaagccagaatttctcttgcttaggacacttgctcgatgcctgattttgtgggatgatattttaccaaattccaagtgggttgacagcaatgttcctcaaattataagagaaaatagtatctctctcagtgaaatcgaattgccgtgctcagaggatttgaatttggaaactttgtcccaagcacatgtctacataattgcaggagcctgcttgtctctgggttttcgatttgctggctcagaaaacttatcagcatttaactgtttgcataaatttgccaaagattttatgacttatttgtccgcacctaatgcttctgttacaggtcctcataacctagaaacttgtctgagcgtggtgctgctgtctctcgccatggtcatggctggctcaggaaacctaaaggttttgcagctttgtcgcttcttacacatgaaaacgggtggtgaaatgaactatggttttcacttagcccaccacatggcccttggacttctatttttgggaggaggaaggtactctttgagcacatcaaattcttccattgccgctcttctctgtgccctttatccgcacttcccagctcacagcactgacaaccggtatcatctccaggctctccggcacctctatgtgctggccgcggagcccaggcttctagtgcctgtggatgtggacacaaacacgccctgctatgccctcttagaagttacctacaagggcactcagtggtatgaacaaaccaaagaagaattgatggctcctacccttcttccagaactccatcttttaaagcagattaaagtaaaaggcccaagatactgggaactgctcatagatttaagcaaaggaacacaacacttgaagtccatcctttccaaggatggggttttatatgttaaactccgggcgggtcagctctcctacaaagaagatccaatgggatggcaaagtttgttggctcagactgttgctaacaggaactctgaagcccgggctttcaagccagaaacaatctcagcattcacttctgatccagcacttctgtcatttgctgaatatttctgcaagccaactgtgaacatgggtcagaaacaggaaattctggatctcttttcttcagtactctatgaatgtgttacccaggagaccccagagatgttgcctgcatacatcgcaatggatcaggctataagaagacttgggagaagagaaatgtctgagacttctgaactttggcagataaagttggtgttagagtttttcagctcccgaagccatcaggagcggctgcagaaccaccctaagcgggggctctttatgaactcggaattcctccctgttgtgaagtgcaccattgataataccctggaccagtggctacaagtcgggggtgatatgtgtgtgcacgcctacctcagcgggcagcccttggaggaatcacagctgagcatgctggcctgcttcctcgtctaccactctgtgccagctccacagcacctgccacctataggactagaaggtcttctgaaggacctagcaggagactcaggttgaaaccctacagaacctcgccgtgtgccgcccagtcttccttgaataaggccattttctcaccctttgtctagtaactagctgactccacagctcatggtaaggggcatgtctcagctcagggggtctcctgacatcccagaggaagcaataaggtgggggtctttcatctctcagcctgatgatctgtgcacacccacttgatgggaggccagggtgcctgtgggcagatgggtcagagtgtgggccaggatttggagtagaagccagagcatgtgaaaatccaaaccaggaagacttcgttgcctcccgcatgtggggttgaaggcctctcttctgtggtctcccatcctcatgctgatcaaattgggggggaatgtctcactgtgtgaggatcaccccaattaagctgtgggggaggacacagaatctgatcccctctgtatccttagcgcatgctacctccagccaccaggggaaagaagcagaggtgaggtgggagaggtggccactctggacggtgtaactgggctggctgcctctcagcgcccacgagcaccccacagatatccacgctagtgtacaaaggttcccaagtggtggccttttcctgcttccaagggctgcccgggttcccccctctctgaaatagattggttgcttctcattacgtcacaagctgcagaaaaaaaa

SEQ ID NO: 107072 - DNA, 662 bp, Homo sapiens
  Payload ID: 1022
  Gene Symbol: ANAPC1
  Gene Name: anaphase promoting complex subunit 1
  ENST ID: ENST00000451367
  CDS Start-End: 54-503
ctgaccagaatgtgtttgaattcatacagaaataatgttgatatttggaacccatgtcgaacttctatgaagaaaggacaacgatgattgcagcaagggatttgcaggaatttgttccttttggtcgagaccactgcaagcaccaccctaatgctttgaaccttcaacttcgccagctgcagccagcttctgaattatggtcttctgatggtgctgctggcttggtgggatcccttcaggaggttacaatccacgagaaacagaaggaaagctggcagttaaggaaaggagtaagtgaaattggagaagatgtggactatgatgaggaactctatgttgctggaaatatggtgatatggagcaaaggaagtaaaagccaggcattggcagtttataaagcatttacagttgacagtcctgttcagcaggcattgtggtgtgacttcattatatcacaggataagtctgaaaaggcctacagttgcaaatgtttggcccactaaatatggattgctgtttgaacgaagcgcttcttcacatgaagtacctccaggttcacccagagaacctttacctactatgttcagcatgctgcacccactagatgaaataactccacttgtttgtaaatctggaagtaagtgtatttctatattctttta

SEQ ID NO: 107073 - DNA, 450 bp, Homo sapiens
  Payload ID: 1022
  Gene Symbol: ANAPC1
  Gene Name: anaphase promoting complex subunit 1
  ENST ID: ENST00000628342
  CDS Start-End: 1-450
atgtcgaacttctatgaagaaaggacaacgatgattgcagcaagggatttgcaggaatttgttccttttggtcgagaccactgcaagcaccaccctaatgctttgaaccttcaacttcgccagctgcagccagcttctgaattatggtcttctgatggtgctgctggcttggtgggatcccttcaggaggttacaatccacgagaaacagaaggaaagctggcagttaaggaaaggagtaagtgaaattggagaagatgtggactatgatgaggaactctatgttgctggaaatatggtgatatggagcaaaggaagtaaaagccaggcattggcagtttataaagcatttacagttgacagtcctgttcagcaggcattgtggtgtgacttcattatatcacaggataagtctgaaaaggcctacagttgcaaatgtttggcccactaa

SEQ ID NO: 107074 - DNA, 868 bp, Homo sapiens
  Payload ID: 1023
  Gene Symbol: ANAPC10
  Gene Name: anaphase promoting complex subunit 10
  Uniprot ID: Q9UM13
  ENST ID: ENST00000309439
  CDS Start-End: 96-653
attgagctgcgacccttgttcaacgccgttggcgaagccagctgctggaggtgccgagaatctgagtttcggcaagcagccagaatattttaaaaatgactacaccaaacaagacacctcctggtgctgaccccaagcagttggaaaggactggaacagtacgggaaattgggtcacaagctgtttggtcactctcatcttgcaaaccaggatttggagtggatcagttacgagatgacaatctagaaacttattggcaatcagatggttcccagcctcatttagtgaacatccaattcagaagaaaaacaacagtgaagacattatgtatttatgcagactacaaatctgatgaaagctatactccaagcaagatctcagtcagagtaggaaataattttcacaaccttcaagaaattcggcaacttgagttggtggaaccaagtggctggattcatgttcccttaactgacaatcataagaagccaactcgtacattcatgatacagattgctgttctagccaatcaccagaatggaagagacacccatatgagacaaattaaaatatacacaccagtagaagagagctccattggtaaatttcctagatgtacaactatagatttcatgatgtatcgttcaataaggtgactttaaaatgagacgaaaatcattaaacgtatctttgttttatcctgtatttaaataatatatcatgtacctttattgaacaaggcatccgttatatctaattttgtatatgtttaaaaatattttattgtaactttgacaaataaatttggggtcatattatctttattttctttaacatgtaataaagctcacatattttacattactaaaaa

SEQ ID NO: 107075 - DNA, 928 bp, Homo sapiens
  Payload ID: 1023
  Gene Symbol: ANAPC10
  Gene Name: anaphase promoting complex subunit 10
  Uniprot ID: Q9UM13
  ENST ID: ENST00000451299
  CDS Start-End: 156-713
gccgttggcgaagccagctgctggaggtgccgagaatctgagtttcggcaagcagccaggtctggaaactgtaacaggacattcagttagtaatgatggttgcaggttgaatagtctcgccctagatctcacctaacttgcagaatattttaaaaatgactacaccaaacaagacacctcctggtgctgaccccaagcagttggaaaggactggaacagtacgggaaattgggtcacaagctgtttggtcactctcatcttgcaaaccaggatttggagtggatcagttacgagatgacaatctagaaacttattggcaatcagatggttcccagcctcatttagtgaacatccaattcagaagaaaaacaacagtgaagacattatgtatttatgcagactacaaatctgatgaaagctatactccaagcaagatctcagtcagagtaggaaataattttcacaaccttcaagaaattcggcaacttgagttggtggaaccaagtggctggattcatgttcccttaactgacaatcataagaagccaactcgtacattcatgatacagattgctgttctagccaatcaccagaatggaagagacacccatatgagacaaattaaaatatacacaccagtagaagagagctccattggtaaatttcctagatgtacaactatagatttcatgatgtatcgttcaataaggtgactttaaaatgagacgaaaatcattaaacgtatctttgttttatcctgtatttaaataatatatcatgtacctttattgaacaaggcatccgttatatctaattttgtatatgtttaaaaatattttattgtaactttgacaaataaatttggggtcatattatctttattttctttaacatgtaataaagctcacatattttacattactaaaaa

SEQ ID NO: 107076 - DNA, 689 bp, Homo sapiens
  Payload ID: 1023
  Gene Symbol: ANAPC10
  Gene Name: anaphase promoting complex subunit 10
  ENST ID: ENST00000513054
  CDS Start-End: 215-689
gaagccagctgctggaggtgccgagaatctgagtttcggcaagcagccaggtctggaaactgtaacaggacattcagttagtaatgatggttgcaggttgaatagtctcgccctagatctcacctaacttgcagtaagtatcaagtgcttgtgtgccgattaaagaacaacttcggatacaatgggaggtgtcaaggaaacgaatattttaaaaatgactacaccaaacaagacacctcctggtgctgaccccaagcagttggaaaggactggaacagtacgggaaattgggtcacaagctgtttggtcactctcatcttgcaaaccaggatttggagtggatcagttacgagatgacaatctagaaacttattggcaatcagatggttcccagcctcatttagtgaacatccaattcagaagaaaaacaacagtgaagacattatgtatttatgcagactacaaatctgatgaaagctatactccaagcaagatctcagtcagagtaggaaataattttcacaaccttcaagaaattcggcaacttgagttggtggaaccaagtggctggattcatgttcccttaactgacaatcataagaagccaactcgtacattcatgatacagattgctgttctagccaatcaccagaatggaagagacacccatatgagacaaattaaaatat

SEQ ID NO: 107077 - DNA, 794 bp, Homo sapiens
  Payload ID: 1023
  Gene Symbol: ANAPC10
  Gene Name: anaphase promoting complex subunit 10
  ENST ID: ENST00000514390
  CDS Start-End: 319-794
acgcgctgctgctgtctccgccacctaaggcctaaccaaaggctctcggagaacgtccctacattctttccaacctggcagatggcagctaacggccaaacctctccgggctattcacgtacctggagaaaacgatccccttgcggaggggagcacagaggccaaatcagctcttgccttcacttttcagccacacagcgtgttctcacggccaccggccaaaatggcggtgcccagccgccgcacgcgcaagccataggacgtagtgcgcgcgcgcgacatagagcgtgaggcggaaccctggagaatattttaaaaatgactacaccaaacaagacacctcctggtgctgaccccaagcagttggaaaggactggaacagtacgggaaattgggtcacaagctgtttggtcactctcatcttgcaaaccaggatttggagtggatcagttacgagatgacaatctagaaacttattggcaatcagatggttcccagcctcatttagtgaacatccaattcagaagaaaaacaacagtgaagacattatgtatttatgcagactacaaatctgatgaaagctatactccaagcaagatctcagtcagagtaggaaataattttcacaaccttcaagaaattcggcaacttgagttggtggaaccaagtggctggattcatgttcccttaactgacaatcataagaagccaactcgtacattcatgatacagattgctgttctagccaatcaccagaatggaagagacacccatatgagacaaattaaaatata

SEQ ID NO: 107078 - DNA, 477 bp, Homo sapiens
  Payload ID: 1023
  Gene Symbol: ANAPC10
  Gene Name: anaphase promoting complex subunit 10
  ENST ID: ENST00000504721
  CDS Start-End: 151-477
tttttcacatatgaatagacttagtaaaattaacaaaagatgtgaaagatgaggtcaacctttttagaatgggccagttattcacttcaaaatcttgaagccattttcctgaccttatcttctatggtaagagcatataatattttaaaaatgactacaccaaacaagacacctcctggtgctgaccccaagcagttggaaaggactggaacagtacgggaaattgggtcacaagctgtttggtcactctcatcttgcaaaccaggatttggagtggatcagttacgagatgacaatctagaaacttattggcaatcagatggttcccagcctcatttagtgaacatccaattcagaagaaaaacaacagtgaagacattatgtatttatgcagactacaaatctgatgaaagctatactccaagcaagatctcagtcagagtaggaaataattttcacaaccttcaagaaattcgg

SEQ ID NO: 107079 - DNA, 1025 bp, Homo sapiens
  Payload ID: 1023
  Gene Symbol: ANAPC10
  Gene Name: anaphase promoting complex subunit 10
  Uniprot ID: Q9UM13
  ENST ID: ENST00000507656
  CDS Start-End: 95-652
cccttgttcaacgccgttggcgaagccagctgctggaggtgccgagaatctgagtttcggcaagcagccaggtctggaaactaatattttaaaaatgactacaccaaacaagacacctcctggtgctgaccccaagcagttggaaaggactggaacagtacgggaaattgggtcacaagctgtttggtcactctcatcttgcaaaccaggatttggagtggatcagttacgagatgacaatctagaaacttattggcaatcagatggttcccagcctcatttagtgaacatccaattcagaagaaaaacaacagtgaagacattatgtatttatgcagactacaaatctgatgaaagctatactccaagcaagatctcagtcagagtaggaaataattttcacaaccttcaagaaattcggcaacttgagttggtggaaccaagtggctggattcatgttcccttaactgacaatcataagaagccaactcgtacattcatgatacagattgctgttctagccaatcaccagaatggaagagacacccatatgagacaaattaaaatatacacaccagtagaagagagctccattggtaaatttcctagatgtacaactatagatttcatgatgtatcgttcaataaggtgactttaaaatgagacgaaaatcattaaacgtatctttgttttatcctgtatttaaataatatatcatgtacctttattgaacaaggcatccgttatatctaattttgtatatgtttaaaaatattttattgtaactttgacaaataaatttggggtcatattatctttattttctttaacatgtaataaagctcacatattttacattactaaaaatggatttgaagccaatcattttattttcccttgtatcaaaagaaaagagttccttgtatcaaaagaaaagagttgaactgaaaatttcagtatatacacaattataatagctaggtgattatttcattagtgttcatacattagagtaatggtttatt

SEQ ID NO: 107080 - DNA, 608 bp, Homo sapiens
  Payload ID: 1023
  Gene Symbol: ANAPC10
  Gene Name: anaphase promoting complex subunit 10
  ENST ID: ENST00000502847
  CDS Start-End: 403-608
gccaggtctggaaactgtgagtgtgtgggcttttctccgacgtcgagcgtggtcctagcgtaaacagatgcattcgcctctccggtttcaatctttttttacgtttgcgctttcctcaaggccggtgggtcaggagtggagccttagtcattctaacgctggaggtgtcagtaggaccaacagagtctggtgccgacacggcttactgttgcgcgctcttctaggcctcaacttcctctcaactgtgtggtaacaggacattcagttagtaatgatggttgcaggttgaatagtctcgccctagatctcacctaacttgcagtaagtatcaagtgcttgtgtgccgattaaagaacaacttcggatacaatgggaggtgtcaaggaaacgaatattttaaaaatgactacaccaaacaagacacctcctggtgctgaccccaagcagttggaaaggactggaacagtacgggaaattgggtcacaagctgtttggtcactctcatcttgcaaaccaggatttggagtggatcagttacgagatgacaatctagaaacttattggcaatcagatggttcccagcctcatttagtgaacatccaattcag

SEQ ID NO: 107081 - DNA, 505 bp, Homo sapiens
  Payload ID: 1023
  Gene Symbol: ANAPC10
  Gene Name: anaphase promoting complex subunit 10
  ENST ID: ENST00000512680
  CDS Start-End: 77-457
cattcagttagtaatgatggttgcaggttgaatagtctcgccctagatctcacctaacttgcagaatattttaaaaatgactacaccaaacaagacacctcctggtgctgaccccaagcagttggaaaggactggaacagtacgggaaattgggtcacaagctgtttggtcactctcatcttgcaaaccaggatttggagtggatcagttacgagatgacaatctagaaacttattggcaatcagatggttcccagcctcatttagtgaacatccaattcagaagaaaaacaacagtgaagacattatgtatttatgcagactacaaatctgatgaaagctatactccaagcaagatctcagtcagagtaggaaataattttcacaaccttcaagaaattcggcctcatgttttacatgtgaatgaagaatcaatgaatcttcaagtctcaggataaaggaatgagaatattgaagcagaaactgcaaataaaagacaatgcata

SEQ ID NO: 107082 - DNA, 1674 bp, Homo sapiens
  Payload ID: 1023
  Gene Symbol: ANAPC10
  Gene Name: anaphase promoting complex subunit 10
  Uniprot ID: Q9UM13
  ENST ID: ENST00000613466
  CDS Start-End: 319-876
acgcgctgctgctgtctccgccacctaaggcctaaccaaaggctctcggagaacgtccctacattctttccaacctggcagatggcagctaacggccaaacctctccgggctattcacgtacctggagaaaacgatccccttgcggaggggagcacagaggccaaatcagctcttgccttcacttttcagccacacagcgtgttctcacggccaccggccaaaatggcggtgcccagccgccgcacgcgcaagccataggacgtagtgcgcgcgcgcgacatagagcgtgaggcggaaccctggagaatattttaaaaatgactacaccaaacaagacacctcctggtgctgaccccaagcagttggaaaggactggaacagtacgggaaattgggtcacaagctgtttggtcactctcatcttgcaaaccaggatttggagtggatcagttacgagatgacaatctagaaacttattggcaatcagatggttcccagcctcatttagtgaacatccaattcagaagaaaaacaacagtgaagacattatgtatttatgcagactacaaatctgatgaaagctatactccaagcaagatctcagtcagagtaggaaataattttcacaaccttcaagaaattcggcaacttgagttggtggaaccaagtggctggattcatgttcccttaactgacaatcataagaagccaactcgtacattcatgatacagattgctgttctagccaatcaccagaatggaagagacacccatatgagacaaattaaaatatacacaccagtagaagagagctccattggtaaatttcctagatgtacaactatagatttcatgatgtatcgttcaataaggtgactttaaaatgagacgaaaatcattaaacgtatctttgttttatcctgtatttaaataatatatcatgtacctttattgaacaaggcatccgttatatctaattttgtatatgtttaaaaatattttattgtaactttgacaaataaatttggggtcatattatctttattttctttaacatgtaataaagctcacatattttacattactaaaaatggatttgaagccaatcattttattttcccttgtatcaaaagaaaagagttccttgtatcaaaagaaaagagttgaactgaaaatttcagtatatacacaattataatagctaggtgattatttcattagtgttcatacattagagtaatggtttattgcatatttgagaacaagactgtgttttatcaatatatatcatctttaataggtcaaaattactattttttctacccagaggaaggttattcttttaatactggatcttttaaaaaacagtgtcaaataagcttagtgttaggttgtctgatgagaaccaatctaatatggggagtataattaattgtctcatattcaccttcacggaatacttacagccctagggttgtctgtatcctaatgatattatgtaaagattgcctgtataatctagcagtacttatggaagagttctagcagtacttatggaagagttattttcaaatttgtgtctgacattgtagcattccctgggcagtcatatatcccataaaatcgtaaaagtatgtgaaattttttatatatattaaaagattttaaagaaat

SEQ ID NO: 107083 - DNA, 918 bp, Homo sapiens
  Payload ID: 1024
  Gene Symbol: ANAPC11
  Gene Name: anaphase promoting complex subunit 11
  Uniprot ID: Q9NYG5
  ENST ID: ENST00000344877
  CDS Start-End: 196-450
gcgtgcgcactggcgtgcgagactcggcgggcgctgttgagggagtcgggccgcgactgtggtcgtttttataccttcccgcgcggacgccggcgctgccaacggaagggcgggtagggcgagacggagtttcgtcatgttggccaggcccatttgagatctttgaagatatcctcaacgtgaggctctgctgccatgaaggtgaagattaagtgctggaacggcgtggccacttggctctgggtggccaacgatgagaactgtggcatctgcaggatggcatttaacggatgctgccctgactgcaaggtgcccggcgacgactgcccgctggtgtggggccagtgctcccactgcttccacatgcattgcatcctcaagtggctgcacgcacagcaggtgcagcagcactgccccatgtgccgccaggaatggaagttcaaggagtgaggcccgacctggctctcgctggaggggcatcctgagactccttcctcatgctggcgccgatggctgctggggacagcgcccctgagctgcaacaaggtggaaacaagggctggagctgcgtttgttttgccatcactatgttgacacttttatccaataagtgaaaactcattaaactactcaaatcttgctggaggcctctgggtgcctgtgttctcggcatatagatgtggtctcggtgtgttttgatatgaaaactctcatgaataaacatctccgtgaaacgccaaggccctcgtcaaaccctgagtcatgactgggaggagaaggagcaggatcagacggtagagcctggggcatgctcttcaggcatgctcttgcctgctggattgccggcggcggccctgggaccctccctcaggctggctctgagggaccctggctgtgcaaagctggcggccactgctt

SEQ ID NO: 107084 - DNA, 881 bp, Homo sapiens
  Payload ID: 1024
  Gene Symbol: ANAPC11
  Gene Name: anaphase promoting complex subunit 11
  Uniprot ID: Q9NYG5
  ENST ID: ENST00000357385
  CDS Start-End: 137-727
gagactcggcgggcgctgttgagggagtcgggccgcgactgtggtcgtttttataccttcccgcgcggacgccggcgctgccaacggaagggcgggtagggcggtgcgtgattaggttggcgaaggctctgctgccatgaaggtgaagattaagtgctggaacggcgtggccacttggctctgggtggccaacgatgagaactgtggcatctgcaggatggcatttaacggatgctgccctgactgtcctctccatggagaaagcatttctaggtgtttgggctggtgcccgcagcctgtgcctgtcctgggaggcagggcccatccacaggtgcccatcaacacagcttccccaacgcctgggcagcacaccggatccctgatgtctagggaagagtcttctaggtccccagaccccacccctcctgcccttgatcaagagaccagttcactactcagatgcacgtctccttggtgccttgaccattcatgtgacctttttggcatcacagatcaagtgtctgcagatgggcccagggcctgtaggcaaggtgcccggcgacgactgcccgctggtgtggggccagtgctcccactgcttccacatgcattgcatcctcaagtggctgcacgcacagcaggtgcagcagcactgccccatgtgccgccaggaatggaagttcaaggagtgaggcccgacctggctctcgctggaggggcatcctgagactccttcctcatgctggcgccgatggctgctggggacagcgcccctgagctgcaacaaggtggaaacaagggctggagctgcgtttgttttgccatcactatgttgacacttttatccaataagtgaaaactcattaaactactcaaatctt

SEQ ID NO: 107085 - DNA, 687 bp, Homo sapiens
  Payload ID: 1024
  Gene Symbol: ANAPC11
  Gene Name: anaphase promoting complex subunit 11
  Uniprot ID: Q9NYG5
  ENST ID: ENST00000392376
  CDS Start-End: 244-498
gcccgatcggccagggctgggggcgctgggggcgctacgggcgcggcgggtgcctgggagctgctgggagtccttgtttccgctcccgcccaggactgtgcgctcggctcgcggtggggtccggcgggcgcggcttcggcgggcggcagccgctgcagacgagctgcggagacggagtttcgtcatgttggccaggcccatttgagatctttgaagatatcctcaacgtgaggctctgctgccatgaaggtgaagattaagtgctggaacggcgtggccacttggctctgggtggccaacgatgagaactgtggcatctgcaggatggcatttaacggatgctgccctgactgcaaggtgcccggcgacgactgcccgctggtgtggggccagtgctcccactgcttccacatgcattgcatcctcaagtggctgcacgcacagcaggtgcagcagcactgccccatgtgccgccaggaatggaagttcaaggagtgaggcccgacctggctctcgctggaggggcatcctgagactccttcctcatgctggcgccgatggctgctggggacagcgcccctgagctgcaacaaggtggaaacaagggctggagctgcgtttgttttgccatcactatgttgacacttttatccaataagtgaaaactcattaaactactcaaatctt

SEQ ID NO: 107086 - DNA, 581 bp, Homo sapiens
  Payload ID: 1024
  Gene Symbol: ANAPC11
  Gene Name: anaphase promoting complex subunit 11
  Uniprot ID: Q9NYG5
  ENST ID: ENST00000571570
  CDS Start-End: 137-391
cgtgctgccacttgtcgggaagttgttttggctgaaaaaaaaaccgcaacaagagcagatctagacggagtttcgtcatgttggccaggcccatttgagatctttgaagatatcctcaacgtgaggctctgctgccatgaaggtgaagattaagtgctggaacggcgtggccacttggctctgggtggccaacgatgagaactgtggcatctgcaggatggcatttaacggatgctgccctgactgcaaggtgcccggcgacgactgcccgctggtgtggggccagtgctcccactgcttccacatgcattgcatcctcaagtggctgcacgcacagcaggtgcagcagcactgccccatgtgccgccaggaatggaagttcaaggagtgaggcccgacctggctctcgctggaggggcatcctgagactccttcctcatgctggcgccgatggctgctggggacagcgcccctgagctgcaacaaggtggaaacaagggctggagctgcgtttgttttgccatcactatgttgacacttttatccaataagtgaaaactcattaaactactcaaatcttg
